United States Patent Application Publication US 2005/0228172 A9 - sequence listing, part 98

SEQ ID NO: 449251 - DNA, 585 bp, Homo sapiens
catctcacaaactatgccagacacaccaggagctgggctctctaaggcttctgagaaaggagatttcatgacctgcttagtgacccagtgcagtcagttaacaggcttcagaaaacccctctttatggccagcacttacctgtatctttagtctttcattcagcgcataattattaagggctttccctctgtgagggactatattagttattggagacactttggaaacacagccactgctctcatggacctaatgggtcaaatggaggcagcaccacaaacaaatgtacagatacatcacggtaagtcttacaaaggaaaagagtcagtgctcttaaaatgctaggtatttgagagcagcctgtttcccatctatgccatggatctcttggtggcttttataagaacctctggtttcaggtctgacrtgtaaaggcttggaagtcattgctcccttcctcacaacagcaacaacaaaaagctaaacaaactgaaaatcaacaacctttacagagaattgaggtcacagcagaaaatgctgccctgaaaaatggagaaatggacagctatacacagagaaccaaa

SEQ ID NO: 449252 - DNA, 585 bp, Homo sapiens
catctcacaaactatgccagacacaccaggagctgggctctctaaggcttctgagaaaggagatttcatgacctgcttagtgacccagtgcagtcagttaacaggcttcagaaaacccctctttatggccagcacttacctgtatctttagtctttcattcagcgcataattattaagggctttccctctgtgagggactatattagttattggagacactttggaaacacagccactgctctcatggacctaatgggtcaaatggaggcagcaccacaaacaaatgtacagatacatcacggtaagtcttacaaaggaaaagagtcagtgctcttaaaatgctaggtatttgagagcagcctgtttcccatctatgccatggatctcttggtggcttttataagaacctctggtttcaggtctgacatgtaaaggcttggaagtcattgctcccttcctcacaacagyaacaacaaaaagctaaacaaactgaaaatcaacaacctttacagagaattgaggtcacagcagaaaatgctgccctgaaaaatggagaaatggacagctatacacagagaaccaaa

SEQ ID NO: 449253 - DNA, 580 bp, Homo sapiens
atagttcaaagaaagaccactccagcccttagactcaggctgggtcatataagcccccaattcaagagcatctttttatttattctgggctgatttgactaccaatataaacacacagatggtttcccaccttctacagtgcctggcctggagtagatagtgggtacaatttggcgaactacatggaaattcccaaaacccaaagaattatattcagagaaaaactttttttttaatcctttatgtctgatagataacaagcaatgatactacaaagagagttagctgagactaggctaatgcagtctgagctayctggataattcctgaaaatccatccacccacttttgcataaataccatgtccttaagggccacatcaactaactgccgtctcatcacaaagaatcacatttaattcattctaagagtagatgagaacatatgttatttttagaaatacatgttgatgcatgcatacagatgcaggttgatgcttaaaataacctcaaagatagggaattccctttatagctgtatatgtaaacttaggagggaaagatttggtcatgttaccccc

SEQ ID NO: 449254 - DNA, 580 bp, Homo sapiens
atagttcaaagaaagaccactccagcccttagactcaggctgggtcatataagcccccaattcaagagcatctttttatttattctgggctgatttgactaccaatataaacacacagatggtttcccaccttctacagtgcctggcctggagtagatagtgggtacaatttggcgaactacatggaaattcccaaaacccaaagaattatattcagagaaaaactttttttttaatcctttatgtctgatagataacaagcaatgatactacaaagagagttagctgagactaggctaatgcagtctgagctatctggataattcctgaaaatccatccacccacttttgyataaataccatgtccttaagggccacatcaactaactgccgtctcatcacaaagaatcacatttaattcattctaagagtagatgagaacatatgttatttttagaaatacatgttgatgcatgcatacagatgcaggttgatgcttaaaataacctcaaagatagggaattccctttatagctgtatatgtaaacttaggagggaaagatttggtcatgttaccccc

SEQ ID NO: 449255 - DNA, 560 bp, Homo sapiens
aattagacagctagctggcagcagctaactcatctaatagctggaaaagaaagatcagctttcactttcaattatgagatgctgagtagttggtagtttgaatagtatttattctcaaaagcccttttttttgtattatgttccttgtattatgttccatttatgttgtataataaatacccatctatccctagagataaaaacctgggagaaacacttctctggctatgtctccaggttcaattaaaatggaaggtgaaggcagtcacccagaagatttaaaggaaaacagtctcacttttgcctaaattaacaggcaaattcagcccaaagcttatactttgctttaactccagtacttaactattgttgagtagaattgatcatccaaggtaatacrtttggtagatgttaaaaggccactcttagaaattcaatgccaaatgatagtttttttttttacagagttaccatggagatagattctacacaaacgacaaaatatttaataaatggcaagaaaagaaattgcctatgtgcactttaaagaggtgacttct

SEQ ID NO: 449256 - DNA, 616 bp, Homo sapiens
ttctttctttgccttttgctgttctacatgcaagcgctttggaaaatgccaattttggatgtgatgcatctctgcaacctttgatcttccctaaaaagaatgacagatttctagtcttaaaatggtaaacacttctgaattgacaccctgtagcccacaatgagytcctatctcttgtcaaaacattacaccattttctggaacaccttgcttaaactgaatatccacttttgtccccttggtgagagtttctggaaactctgagtcaaaatggtaattctagaggcacttgcttttaggtgaactacagaacttcttgtaggaggacctttaggaatctgtttagtgagctcagggtaagcaatgttggctcagcctgccactgtcttttgggaggtggcaaagtcagtaaaatggtcagtcctatacacagcaaattggcttccacaaatgcatcttcagcagacacccaaatcacagacttgaagaaaggtgccctttctcttttgagaatttgtctcttgagacactcatagtctcagggtatttcctgttttctcaaagatgaagaactctgggagactgagagatgatatctgaactaggaattagggta

SEQ ID NO: 449257 - DNA, 616 bp, Homo sapiens
ttctttctttgccttttgctgttctacatgcaagcgctttggaaaatgccaattttggatgtgatgcatctctgcaacctttgatcttccctaaaaagaatgacagatttctagtcttaaaatggtaaacacttctgaattgacaccctgtagcccacaatgagctcctatctcttgtcaaaacattacaccattttctggaacaccttgcttaaactgaatatccacttttgtccccttggtgagagtttctggaaactctgagtcaaaatggtaattctagaggcacttgcttttaggtgaactacagaacttcttgtaggaggacctttaggaatctgtttagtgagctcagggtaagcaatgttggctcagcctgccactgtcttttgggaggtggcaaagtcagtaaaatggtcagtcctatacacagcaaattggcttccacaaatgcatcttcagcagacacccaaatcacagacytgaagaaaggtgccctttctcttttgagaatttgtctcttgagacactcatagtctcagggtatttcctgttttctcaaagatgaagaactctgggagactgagagatgatatctgaactaggaattagggta

SEQ ID NO: 449258 - DNA, 575 bp, Homo sapiens
gggagactgagagatgatatctgaactaggaattagggtatctgacctccagtattagctttgccactgacaagttatgaccttggattattcatgtaacttctctgaattttatttctttcaaccctaaaatgaaaatgttggactatatgtccctttaggtcacgcaaactctcagaatctcatgatcttaaattagtmtataattaccctttaggctcaaaggcaaagaccattaaatctgattgacttggtttaaaagataaaatcatggaagtgctagggtaatagttttctttctctgaattgtgctcttcagtcttggagcccaagagcccatctatgtattggaacctttatattccaatctctgtttagaaaggagagaaacaaaatattaacaacaaatactcccattagaaacaagaagaggacccaagatctctactgtgacctactgactgaggtcatagtctcttgttttgttactgagccggcccaggctgacaagacctgcattggataatgtcccagggtgacctatcatgaccatttgaaggttgtaaacctgatga

SEQ ID NO: 449259 - DNA, 585 bp, Homo sapiens
tctttcaaccctaaaatgaaaatgttggactatatgtccctttaggtcacgcaaactctcagaatctcatgatcttaaattagtctataattaccctttaggctcaaaggcaaagaccattaaatctgattgacttggtttaaaagataaaatcatggaagtgctagggtaatarttttctttctctgaattgtgctcttcagtcttggagcccaagagcccatctatgtattggaacctttatattccaatctctgtttagaaaggagagaaacaaaatattaacaacaaatactcccattagaaacaagaagaggacccaagatctctactgtgacctactgactgaggtcatagtctcttgttttgttactgagccggcccaggctgacaagacctgcattggataatgtcccagggtgacctatcatgaccatttgaaggttgtaaacctgatgagagtcgcaaatcctgatttacaaacatttttttcttctccttttgggtaggactcaagtgcatatactcaaatttcatctcaggaacacttcaggaaattccatatattctcacagtattgctaaa

SEQ ID NO: 449260 - DNA, 575 bp, Homo sapiens
gggagactgagagatgatatctgaactaggaattagggtatctgacctccagtattagctttgccactgacaagttatgaccttggattattcatgtaacttctctgaattttatttctttcaaccctaaaatgaaaatgttggactatatgtccctttaggtcacgcaaactctcagaatctcatgatcttaaattagtctataattaccctttaggctcaaaggcaaagaccattaaatctgattgacttggtttaaaagataaaatcatggaagtgctagggtaatagttttctttctctgaattgtgytcttcagtcttggagcccaagagcccatctatgtattggaacctttatattccaatctctgtttagaaaggagagaaacaaaatattaacaacaaatactcccattagaaacaagaagaggacccaagatctctactgtgacctactgactgaggtcatagtctcttgttttgttactgagccggcccaggctgacaagacctgcattggataatgtcccagggtgacctatcatgaccatttgaaggttgtaaacctgatga

SEQ ID NO: 449261 - DNA, 603 bp, Homo sapiens
tacaaaagaaaagtcaagaacccatctatttagagaatacaagaagaaaatgatattttcagaattaagaattcaggttttgctttcagactactgattcaaaactcctatactagctaaaatctattgttacagtagtgatgtgtcacttttccctctgtgctattttaaccacacaattgtttgggaaaagatgccaagtacatagacaaaattgtgaaygcttggtttttattcatttatggtattttggggggggggatcagatacttactatagacgtaggttgacatgtgatatgtagttatttattggaatttttctgaaaggtgaaaatgagcaaattttgccattgataaagttttgggacgagcaagaactaggctctaactggccctgtttatttgtgagcatatactaagtatttttggcttccttgggtagtataagttaaacctcatagccttgtttctccagagtttctcccttctgttagcattcagaaaataagagaactcccagattcccagtgggtgggcagcctcatcactagacccccaagctggttctatcttaacatgtttctaagatgaggagtttgcc

SEQ ID NO: 449262 - DNA, 603 bp, Homo sapiens
tacaaaagaaaagtcaagaacccatctatttagagaatacaagaagaaaatgatattttcagaattaagaattcaggttttgctttcagactactgattcaaaactcctatactagctaaaatctattgttacagtagtgatgtgtcacttttccctctgtgctattttaaccacacaattgtttgggaaaagatgccaagtacatagacaaaattgtgaacgcttggtttttattcatttatggtattttggggggggggatcagatacttactatagacgyaggttgacatgtgatatgtagttatttattggaatttttctgaaaggtgaaaatgagcaaattttgccattgataaagttttgggacgagcaagaactaggctctaactggccctgtttatttgtgagcatatactaagtatttttggcttccttgggtagtataagttaaacctcatagccttgtttctccagagtttctcccttctgttagcattcagaaaataagagaactcccagattcccagtgggtgggcagcctcatcactagacccccaagctggttctatcttaacatgtttctaagatgaggagtttgcc

SEQ ID NO: 449263 - DNA, 423 bp, Homo sapiens
agcctcccaaaatttgtcaaaattactatttaatctttcctgttagtttatggatccagtaggttctgcttcaggtaaggtatctctggtataattctctgtgttggcctgtctttccaaagtggtgatttaccctgtggtctcagttctctgatggctgtaagtaactttgttggtgttttttgttgtgttttgttttgtttttttgtaagaatagatgtgattacttccaagctctttagcagtcagtgctgagaytggaagttcctagtgttaatcatttaaattttctgttcagacttgttctttttctgatacatataaatgattctttctttgttgtattcttatgtagaactagggtttgagaacagtagaatcaggattatggctctttattttctgtgtatgagttgtttacat

SEQ ID NO: 449264 - DNA, 555 bp, Homo sapiens
  misc_feature (1)...(555): n = A,T,C or G
ttaatgttcatctcattgtggagcctgtggaccacttccagtgactctgcaagttaagactagatgtgagagtggctggtttgaagaaaagaacttttttcactttggggttggaaaggtggatctatgctctccatctttggtatgagagaaagtctgaaataatgaataaagctaattttcaataggattctttctggatgtatccatagcccaccatttctcatggtaactaaggaacaactttataatttcattgactttcaacaacaaatatttacttttcactcatgttgcatattaacagctgaggacacttacatgtgcattccaaatacactaagagctttgtcagaaatatgtattaaagwtgtcttctccagttgtataagttgcttttcaattgtttaatggtgttttctgttgagcataagtatttagtgcagcttatgcaaagaaaaaaaagttcttgatgttatactgtaactctattgggttttattctttatataaagctgttgaaaatcaccacagnagtgtcaaacaagcactgtg

SEQ ID NO: 449265 - DNA, 590 bp, Homo sapiens
gctgtacttctcctctgtagttccaattgtaatagtacttaattagcacaggattattggcatcagaacactgcagggattaagaggagtattcaataagagttattgracaaatatatacaaagatttttaatgatcagaaacatcaaaatagagtctccaagattcactgaaggctggaaaaggtttgcgtatttgcaaagcatccctgaacatcagagtggcttcttggcactgcaaatagcattgtgaatcccctctatccccaaagctttttgtgacctggacagatgctcatgtttctctgtgcactggtcttctcctctgcaaaatgaaacaagcactcagaatagtaagctatccctgaggttgctgagatgataaggtgaggaaggaccacgtgaatgctaagtagcactgtgatggctgggggctgagcccaaaggtcacagcactcttggaggggctacaggaaggaggtggtggcaggtaggattgtactacagcacacagttgctcactgcagttaattagcaatgtgagttaatgatgtggtaatatgctctaaggtaggttttacagctagcctc

SEQ ID NO: 449266 - DNA, 590 bp, Homo sapiens
gctgtacttctcctctgtagttccaattgtaatagtacttaattagcacaggattattggcatcagaacactgcagggattaagaggagtattcaataagagttattgaacaaatatatacaaagatttttaatgaycagaaacatcaaaatagagtctccaagattcactgaaggctggaaaaggtttgcgtatttgcaaagcatccctgaacatcagagtggcttcttggcactgcaaatagcattgtgaatcccctctatccccaaagctttttgtgacctggacagatgctcatgtttctctgtgcactggtcttctcctctgcaaaatgaaacaagcactcagaatagtaagctatccctgaggttgctgagatgataaggtgaggaaggaccacgtgaatgctaagtagcactgtgatggctgggggctgagcccaaaggtcacagcactcttggaggggctacaggaaggaggtggtggcaggtaggattgtactacagcacacagttgctcactgcagttaattagcaatgtgagttaatgatgtggtaatatgctctaaggtaggttttacagctagcctc

SEQ ID NO: 449267 - DNA, 561 bp, Homo sapiens
accatttttaaatacatttttgttgcttactatggtaccagacagtatcgtatacatagcagacaagtaatatatatttgctgaagagtgaatgaataaatcaagcatcttgtgtcatagtagtgaacttgagaaaacatttagttttgaaacaayaaaaactacagaaaagtaattggctataccaatgtagccatgacagaaaactggtaattttaataattttttgaaatatcttcaaaattattttaaagaacaaagtaaaattaaaaagtaaaacactccatgtcaagttgaagtgttcactttccttcacatccagtactatttcctcctatcctaagaagcaatgctagaaaatttatgaattgccttgcaaaccatttttgtttttatacacatgcatatgcatatgtatgcatatctagatataatgtgtttctgtaatttttatcaaatttataatactggtatcatactctagttgatctatatataattttgcaacttggatttttttcactcaacactgtgtgtgtgagttatccatgctatatacaa

SEQ ID NO: 449268 - DNA, 561 bp, Homo sapiens
accatttttaaatacatttttgttgcttactatggtaccagacagtatcgtatacatagcagacaagtaatatatatttgctgaagagtgaatgaataaatcaagcatcttgtgtcatagtagtgaacttgagaaaacatttagttttgaaacaataaaaactacagaaaagtaattggctataccaatgtagccatgacagaaaactggtaattttaataattttttgaaatatcttcaaaattattttaaagaacaawgtaaaattaaaaagtaaaacactccatgtcaagttgaagtgttcactttccttcacatccagtactatttcctcctatcctaagaagcaatgctagaaaatttatgaattgccttgcaaaccatttttgtttttatacacatgcatatgcatatgtatgcatatctagatataatgtgtttctgtaatttttatcaaatttataatactggtatcatactctagttgatctatatataattttgcaacttggatttttttcactcaacactgtgtgtgtgagttatccatgctatatacaa

SEQ ID NO: 449269 - DNA, 476 bp, Homo sapiens
gttgacagagttgatttcttctgagcctctcttcttggcttgtagatggctgtcctgtccctgtgtcttccagatagtattttccttcgtgttctaatcccttctttaaaagacaccagtcattttggattagggtccacccataggacctcwttttatcttaattacctatttaaagaccctgtcttcaaatacagtcacattctgagatacgaggtgttaggattttaacatataaatttgggagaggcacagttcagcccatagcaggtggttagggatggattcatgaaagagggcagcacttggactatggctccacgctgacccagatttggaacaatcagcccataactttaccctcaacaaagtggttgatttagaattggatacataaccagagtcaaggagacacaacaggttccccttgagtgaataggaagaacctcttcccttaaatgccttaatctagaagt

SEQ ID NO: 449270 - DNA, 570 bp, Homo sapiens
ttagttgtcaaatgtacaatttatttgaaacatttaatacaacaatgtggttgtaaggaaaaacactggaaagattttgaaatttattatgtgtcctgtctagctagacagckattatttgttttttagtatgctattttatgacttcataaagatagaagttcacatgtagaaaactcacagtaatgcaaataattactgtccatagaaatactaatagtgtctggtgaaatgcattgattatttccctgtagacattgactagttttaccagttttgcaaccatatgtgaatttacttcagcattttaaaaaatgtgactaaatgtgggataatttgaggtcatttttgaactggttgttcaatatcttactagtttcttcattaattaatgagataaagaaaactttaacatatgttcacttaaacctatatgggaatcattttaaaaaatttatcctttgatatggagattgtttaattaatcatgacacgttcatataacagaatggtacgtagccttacaagttgttacagaagaaaatttattgacatagaataaggcaggtt

SEQ ID NO: 449271 - DNA, 626 bp, Homo sapiens
tccagttagaggcctcttacatctgactgggtcagaagaaactggtagtaaatgataatattgcaggggttgtaaaatttggcttttgaaaattcacagggatttttgtgttctaccccttcatttcacttttcttgtgcacttaggtaggaaaaaaaaaatcattggctaagttaaccaagggaacctgagagcaaagccaatactttaggtaaaaatgggatcctgaattgctgaaaaactgagttccctttgacttatacattagacccagggaggagcaaagtcttacagaaatggcaaaatcttactaaagataacttacagtggaacgttctggataaacaacacattgaagtgtatttaaaaatgagggctccccaaaattaaatctgctaaccttttatcttagttactatcctgatccaaagaaatagacggcagcaccaattggctgactttggataagtaatgggggtacattttacctgagtaaaggataagtttgggttagaggccctcscctcagtaaagtccttcttggttaaaagggactaaagatgacaaggcccaaccgggggcaagtttgagccttgccagtctaatactgggtgctaagcagagtg

SEQ ID NO: 449272 - DNA, 563 bp, Homo sapiens
ggaaatgtggcagggctaatgcaaaattagcctgcaaatctttctggcttttattttcccaaagcctaaaacctgaagagtaatttgcagaagagataaaggaataaggattttccagtaaatgcagagttctggataaccaagggaaaaagcagcacttaactcctgccccacacaagaaagatattcctcctggactcagaagagctagggggaagaaatggggaaacacgggtctcagagcagtgaagatactggctctgcctcttgctaatgctatcactgatacatctaggcagagtggtctgttggcagctttaaaaaaagtatacctgtgcttcaagygtggcatcaggagctgccaagagctgctggacaagaaggagctatgcagccaagacagcaggtgcaatttggtggtgactaaatctcctgactaatcctgaccctgaccatagtcacagaatctctaccctatctctgatatggggaaagattttggaatcatggcccaagatcttttctaaagggaggggagagccctaaatgtgactgaggtgaag

SEQ ID NO: 449273 - DNA, 538 bp, Homo sapiens
gaccttaggcctaactaagccctattccaggatggtatctctaactaggttggagcttcttgaattacctagtttgagatcctaggtaacaagagcttactgggaagtacatgctttgggtcccaaggacttattatttaaagggtgtttcttgatggtcaccattgagtattgacttctactcttaatgttgtcatttcatgagttctatgcaatttttctgtaagaaacaatttctttttttttaatttaatttaattttattattattatactttaagttttagggtacatgtgcacaatgtgcaggttagttacatatgtatacatgtgccatgctggtgtgctgcacccattaactcgtcattatttctttctcttccacgcatgtcttagcaycaagaaaaatgtggttctgaaacttttattctgtgttgtcaataatggctcttaatcatccaggtggaactcacctctaaccttattttcagggagtgaaattttagcttaaactgtgaccatgaaatataaacatgcc

SEQ ID NO: 449274 - DNA, 616 bp, Homo sapiens
gcgtcctgaataaagtctgaagaactaactttcagttcgctaattctctctttagtagaatcacagctgttgttttatctctatattggtttctaatatcaattattacattttcatttctagaaattctatttgttgtttttttcagatctacctgatcaatttttgataatctctttctcccgtgtcatacaatgaaaactgtcttatatttctttaaacatatttactttaattctttatctagtaattccaacatctktaatctttgcaggtctgtttctgtagcttattgttacgctgcctctttctcatgtgatttgtttaaaatgttaaaaaattagtagctcatagtccttagaacttgacctgtgggaattctttgagatcctattttaaaatgcattcttccagaggatctgtaattgtttatgccaaacacctagggaaactaccaatctgagactacttaaaattaaattttagcttcagtggttttaaattcatacagataatatgctttctagccccaaatatgcatacatatgggctatggtcagaaattctcaaaggagaaatgtttttcctatttattttgctatcaacagaccaaaac

SEQ ID NO: 449275 - DNA, 573 bp, Homo sapiens
ggacttagaatctatagtagtaagttaaaaaaaaccaaaamcgatgtagaacaatggaactataacagaggaaaattctgtttaaattatgaatattgactgtttttttaaaacaaaactaagaattttctgtaatttgtaaccagtcagtggcagggtcaataacaagagtttagaggccaatacatagaagaggccggaccacactagaacagagatcagtccccgcccaaggttctggcatttcctcaaactcaagaggaaattcttaaattcaagccatgcttttcattctaagagtttttataatgaagcatacaactattccatgtagcaggaagggaactgcttaactgtagggtatgtgggagggattatctcctttactttcttggccattccagtaagttttgatttagaagaggaaatataagataaaatttgtctaagatagcaaaaggatagggaggcttgctcagaaaagatgaagtttggtcagttataacatacttgacagtatctaatttagagtttcacatttttaggaagtgtgaagagatcagagagtcagga

SEQ ID NO: 449276 - DNA, 648 bp, Homo sapiens
ggaatggggatatttagcttggaaagaaaagtgtgcgtggggtgtgcctctaaacatttcagtgactatctaataaaagaacagttcaatattccatggggtagagaactagatttaagattgtaagtatcacctaaaaggaaacatattttggctcattatcaggatgacatttaatggtcagagctccccaaaaatgagatacatttccctggaatccartgagctcaaaatacttaacattgaagaaatggagaccccacagttggagtaggtgactctaaggatctccaccaactttttttttccctctcgctaattggtctcactataaataagaaaagttatttttcacctttgactgtgtctgaaattagatgaccaaactatggataatggaatgactacggatactttctcaagtggaccagaagtgcctggtcaaactaagcctcctcttctgaccttcaggtatgactctcatcttctacctcaagaagcttctgggaatacatacagaaaaatgttaacttttaaaattgccagccatatttgctggaagtgttcccatgtatgcctgtgacagtggtagtgtttgtgaaggtgaggctgattaatgaaactaaggtggaaaacatctgagtaatg

SEQ ID NO: 449277 - DNA, 628 bp, Homo sapiens
atccagtgagctcaaaatacttaacattgaagaaatggagaccccacagttggagtaggtgactctaaggatctccaccaactttttttttccctctcgctaattggtctcactataaataagaaaagttatttttcacctttgactgtgtctgaaattagatgaccaaactatggataatggaatgactacggatactttctcaagtggaccagaagtgcctggtcaaactaagcctcctcttctgaccttcaggtatgactctcatcttctacctcaagaagcttctgggaatacatacagaaaaatgttaacttttaaaattgccagccatatttgctggaagtgttcccatgtatgcctgtgacagtggtagtgtttgtgaaggtgaggctgatyaatgaaactaaggtggaaaacatctgagtaatggcatgtggacttacataacatcagatagttttggtagcaggaaaacacataaaactttctgctttcttttataaatcaaataattatgttagtggcattttggtaaattggttagaaagtttcatttcaaaagttttgattacaaagtttctgatgatttttgttgactgataaaaataggatatcctgaatttgc

SEQ ID NO: 449278 - DNA, 563 bp, Homo sapiens
tctcaccacgacttttcacatcccagcctgagaaatgagatcaaggaaagtggagcttgtctaattgctaatttgccaatttgagtctgtaggaagtggaaaatygaggctttgactttactttaattttactttctatacttcgatatggactgaatttttaataagaccattaattattttttataataaaaacaaattgtaaaaattaaacatttaaaggttagcattgccagagacctgtgccagtacataacaaatgcgatgaagtacaggcagggtggaaagtggctgaaagcaatcttccgacttctatagctctggttccaatcttggctgtgcttcttactagatgtatgacttttaattgtcttcacttttaaagagtacttttatggtttacagacttatatgatgacagggttgttttttttttcttcagcacttcaaaaatgttttaaaaaatgacttcttgcctctattgtttctgaagagaagtatattttccctttgtgtaatgcatttttttccttgctgctttcaaggttttctttttctttttg

SEQ ID NO: 449279 - DNA, 563 bp, Homo sapiens
tctcaccacgacttttcacatcccagcctgagaaatgagatcaaggaaagtggagcttgtctaattgctaatttgccaatttgagtctgtaggaagtggaaaatcgaggctttgactttactttaattttactttctatacttygatatggactgaatttttaataagaccattaattattttttataataaaaacaaattgtaaaaattaaacatttaaaggttagcattgccagagacctgtgccagtacataacaaatgcgatgaagtacaggcagggtggaaagtggctgaaagcaatcttccgacttctatagctctggttccaatcttggctgtgcttcttactagatgtatgacttttaattgtcttcacttttaaagagtacttttatggtttacagacttatatgatgacagggttgttttttttttcttcagcacttcaaaaatgttttaaaaaatgacttcttgcctctattgtttctgaagagaagtatattttccctttgtgtaatgcatttttttccttgctgctttcaaggttttctttttctttttg

SEQ ID NO: 449280 - DNA, 587 bp, Homo sapiens
ttacctgtgatactttctgaaaacacattaggactagtggaaattgtgcatattgcaatgttgctatcagaggcaccattaatttactcctctagaatactatgatatggtaatcgaatactctgaaagatgtgaagaacatttgctgaatggagcatgctgcatactcagaaaatgagatgagctagttggttaaaaaattgatattttgctytctcttcctgcccctctgcagatgctaacagtcccagtgagttgttgtatatctttgttctctgtcagatactaggataaagcccatgaaccctgatatcttccaccgtgttttcacttggtcactttataacataagattatagtggttttctaatattttatgggacttgttagaaatttcaaaagagtttaaattcagtataccagcaagggctgaaagtatattcccaaatcaccaggaaaaggagtaaagccagtttgccattacatagaggggtcacttgggtctgaagtcagttgctgtagaccactgacctatatataactgctcgtaaaggaagacgagacagttaagagtcttggaagtgact

SEQ ID NO: 449281 - DNA, 480 bp, Homo sapiens
  misc_feature (1)...(480): n = A,T,C or G
agcagagaataatagggaagaagccatggtgaattctttttctggtctcttaaaaagcwatgttctttccccttcttgaccacaaagaatacttaatttaatttctgagcctttgaagaagaggaacctaaagatgatttgctcttgctccactggagcagggcctctcctggtgctctctttcttcctacacagcacaataacaggcttctagcaggaatatgagactcataatactggaccattggaaatgtgaggttctttggaaaaaaaaaaccctaacaaattaaatctactcactcatttctgataaatagcatggcttatcatctattgtataactctgacctctctagaaccccaagcaattccacctgtggcctggctcaagttctcctctgtcttaaatgttttccttgttcctactcatttaagcactaaccaaactccacagatcgcttcatatgnggactttagtgg

SEQ ID NO: 449282 - DNA, 480 bp, Homo sapiens
  misc_feature (1)...(480): n = A,T,C or G
agcagagaataatagggaagaagccatggtgaattctttttctggtctcttaaaaagctatgttctttccccttcttgaccacaaagaatacttaatttaatttctgagcctttgaagaagaggaacytaaagatgatttgctcttgctccactggagcagggcctctcctggtgctctctttcttcctacacagcacaataacaggcttctagcaggaatatgagactcataatactggaccattggaaatgtgaggttctttggaaaaaaaaaaccctaacaaattaaatctactcactcatttctgataaatagcatggcttatcatctattgtataactctgacctctctagaaccccaagcaattccacctgtggcctggctcaagttctcctctgtcttaaatgttttccttgttcctactcatttaagcactaaccaaactccacagatcgcttcatatgnggactttagtgg

SEQ ID NO: 449283 - DNA, 480 bp, Homo sapiens
  misc_feature (1)...(480): n = A,T,C or G
agcagagaataatagggaagaagccatggtgaattctttttctggtctcttaaaaagctatgttctttccccttcttgaccacaaagaatacttaatttaatttctgagcctttgaagaagaggaacctaaagatgatttgctcttgctccactggagcagggcctctcctggtgctctctttcttcctacacagcacaataacaggcttctagcaggaatatgagactcataatactggaccattggaaatgtgaggttmtttggaaaaaaaaaaccctaacaaattaaatctactcactcatttctgataaatagcatggcttatcatctattgtataactctgacctctctagaaccccaagcaattccacctgtggcctggctcaagttctcctctgtcttaaatgttttccttgttcctactcatttaagcactaaccaaactccacagatcgcttcatatgnggactttagtgg

SEQ ID NO: 449284 - DNA, 503 bp, Homo sapiens
tcttgggtgtttctcggagagggggatgtggcagggtcataggataatagtggagagaaggtcagcagataaacacgtgaacaaaggtctctgcatcatgaacaaggtaaagaattaagtgctgtgctttagatgtgcatacacataaacatctcaatgccttaaagagcagtattgctgcccgcatgtcccacctccacccctgaggcggttttcccctgtctcagtagatggaacatacaattgggttttacactgagacattccattgcccagggactggctggagacagatrccttcctcttgtctcaactgcaaagaggcgttccttcctcttttactaatcctccttagcacagggtgtcaggctgggggaccccggtcaggtctttcccttcccacgaggccatatttcagactatcacatggggagaaaccttggacaatacctgggtttcctaggcagaggtccctgtggccttccgcagtgtttgtgtccccg

SEQ ID NO: 449285 - DNA, 537 bp, Homo sapiens
gtccttccttctgagatcattttccttacacatgtgatctcaatctatatcattgctcatgataattgtgactcaaatccaactaattaatttgtttgtaaactctttctctagggaaaaatttaggatccactctttatctttcagaatttttatcacttattcttttgggcattggccaaggctaagcagcttagacacaactttctgagaagttttcttttattagcttttactttctttgctctctttattaagattttatttattgtggattggatttcatgaattgttgttttcctcattttatccttttttatttatttggtatatatcttaactttyctaagctgtcaatttttaaagtttaattttagaaatatctttaattttaagagcttctcatttcttgttttcttttttatattctttcttgtgttgtgaatgcaatatttaactcaattatggttattttaaagttctctttgtcaatatcttttctctaaggcagtgcttctcaaccttggggacactgac

SEQ ID NO: 449286 - DNA, 537 bp, Homo sapiens
gtccttccttctgagatcattttccttacacatgtgatctcaatctatatcattgctcatgataattgtgactcaaatccaactaattaatttgtttgtaaactctttctctagggaaaaatttaggatccactctttatctttcagaatttttatcacttattcttttgggcattggccaaggctaagcagcttagacacaactttctgagaagttttcttttattagcttttactttctttgctctctttattaagattttatttattgtggattggatttcatgaattgttgttttcctcattttatccttttttatttatttggtatatatcttaactttcctaagctgtcaatttttaaagtttaattttagaaatatctttaattttaagagcttctyatttcttgttttcttttttatattctttcttgtgttgtgaatgcaatatttaactcaattatggttattttaaagttctctttgtcaatatcttttctctaaggcagtgcttctcaaccttggggacactgac

SEQ ID NO: 449287 - DNA, 537 bp, Homo sapiens
gtccttccttctgagatcattttccttacacatgtgatctcaatctatatcattgctcatgataattgtgactcaaatccaactaattaatttgtttgtaaactctttctctagggaaaaatttaggatccactctttatctttcagaatttttatcacttattcttttgggcattggccaaggctaagcagcttagacacaactttctgagaagttttcttttattagcttttactttctttgctctctttattaagattttatttattgtggattggatttcatgaattgttgttttcctcattttatccttttttatttatttggtatatatcttaactttcctaagctgtcaatttttaaagtttaattttagaaatatctttaattttaagagcttctcatttctygttttcttttttatattctttcttgtgttgtgaatgcaatatttaactcaattatggttattttaaagttctctttgtcaatatcttttctctaaggcagtgcttctcaaccttggggacactgac

SEQ ID NO: 449288 - DNA, 511 bp, Homo sapiens
agtgagctgtgattacaccactatattctagcctgagagacatggcaacattgtgtctctttaaacagagagagacacctacacgcatatgtttatgcagaactattcacaatagcaaagtcaagaaatcaacctaaatatccatcagcagatgattggattaaagaaaatgtcacttatatacaccatggaatactacacagccataagaagaatgaaatcatgccttttgcagcaacatggatggagttagatgccattatcctaagtgaaataactcagaaacagaaattcaaatacttcatgttctcacttgtaagtggcaacctaacatagggtacacrtggacatacagagggaaataatagacaatagagactacaaaagcagggagtgtgggagggcagtgagagctgaaaaattactttggttacaatgttcactattcaggtaatgggtgcactaaaagcccagatttcaccactacacaatatatccttgcaacaaaacg

SEQ ID NO: 449289 - DNA, 510 bp, Homo sapiens
tactggttaaactaaaccaatggaaccaatagtcttygcaaaagagttgccccttcattaatattaaaaaaaaaaacctaatgattaaatattcataccataatgttaggctgctgaaataatgtgattcataatcttctatagccttatagaatcaaatagttcaatttataaaatgtcttcttgtattgaaataacagagattcattttttgtctccataaccagcataatgatcgtatcaagcctccttagtccaatgggccgaaagaatgataccgtcctgtgatttttgccctgctctcagaggatacttttggaaagaaaaaaatgatctctgcagtagcattcaagctgctcagctagagtcagaattacgtttaattttgtctccaagtgctgtcagtcatattgtaacagaggactggaaagattcaagctctatttccaacacaaaggcaatggagatcccttatttattttcataaattcctttaatccatacagcaca

SEQ ID NO: 449290 - DNA, 545 bp, Homo sapiens
ttaaataattgcctgcatgggtggcatcatgtatattataattatcataggatcctctgcatttctttttttaaaaaattacatttgtatttttcaaagaggatctaggtgaacttttgtgaatatattcacaggagaaattcctagaagctgatcttctccagtttaccataaaaaaagtactcatggaatctttacaatttttaatttacggtgcacttaataatgatattgctttatttataaagaagtttttgtttgcatttgttgaatcttttgaaatttatctattctatctaaactgaaatcgaattaatgggattaaattttaaaaaccctaccctcatcccagttgaatctatgttattctgttttgttgttatttctttttctttcccccttcccctcccgctccccctctccctcagcttctcattttcagtacctgggcaagagctttttgcaattcaattattaagctattaatagtgtaaagagtaataattcrtagcttattctctttccaaatgtccttcaattcttga

SEQ ID NO: 449291 - DNA, 570 bp, Homo sapiens
taatttttctttacaaaaaccatctgaggagcctcactatctacaaaatactgttcaaattctttagaatatcatgcaaatatctcaattacttgaatctaaattacctctcccttttcaacattttaacaaaatactttgcatttttatcacattatcacttgcatcaattatttctgaaattcatgagttaatcacaccagtcaactcactaccctgcaaatattccctaaactttacatcccctgtgcctcttttttatatgattctcttggacagcaatgccatcaaactcatttattatgaataaaataccagttataatttgtctttgattgacttcaattttggaaaagaaattatggattctagaactttttaaacaagagtttatattggcaatcctggggacttaygtttgtggcattgtccaataaaatttttgttttaataaaaatttgtatttaaaatatcagtaatgaaaagtgaacaaaataaaactacagagtttgatgaatttgggcttgtgactacatcatgaatacaggacctagataaagaaatgtaaca

SEQ ID NO: 449292 - DNA, 562 bp, Homo sapiens
agaaatgtaacattgtcagtaaccaaaatgccctgcccctcccaagactatatactcaaccaaagataaccaccagcttaacttccacaaccatatgtattaatacgtgtgatcttcttttactttagataatagaactattacaataacactcttttgtgactaccttggttsactcagcattttattttagaaactctctactgtggcatgtaattgtagcatgttaattgtctctgctgtatagtttattcattcattgaatggataaggtacagcataattacccattccgatgttgagaaatacttgtgtttttcacaatatttggctaatgtttatagttttgtaaatatcttataactgtatttggtgaacatagagatgcatttccatgtgttttctgctcatgattagaattactgggtcaaggaagtagtaacttagtgttaatagattctgtcaaacagtttgccaaaatgcctacaccaacttaatctctcacaaacagaatatgagaatttgaattgctccacatacctaccaatacttgacatttttg

SEQ ID NO: 449293 - DNA, 620 bp, Homo sapiens
tgcaatgtgaggaagattcatttggccattgttggctttgaaaatgtaagggggccacaagccaaggaaaacaggcagcaacataagctggaaaaggcaggaaatcaacttgtccctcagagccccagcaaagagcacaggctcgctgatgcctgcattttagcccagtgaaacccatttcagacttctgacctgaaaagtaagataattcatatgtgttgtttaaatccactagatttgtggtaatttgttagagsaacaataagaaactagctaatactatttttaaaataagatttatatgtgtctgaataataaggacaaatttttctcaaattttaattgattagaaacaaagttaaaattttccataaaatgacagtgtttactcttaaccttctataaaactttgcattttgagcaataaattaaataagatatagcattcttcaacttttcctttctatgaatttagtctcagatatttaaaactatactacaagattgattttttttacagaaaacatgtttggatgagttccatcaaatctcacttctaatctttttctccagcaaaaattttagtaattgacaatttaaaattattgaaaattatgaaa

SEQ ID NO: 449294 - DNA, 509 bp, Homo sapiens
tagtgtcaaagtgatgcaatgtgaggaagattcatttggccattgttggctttgaaaatgtaagggggccacaagccaaggaaaacaggcagcaacataagctggaaaaggcaggaaatcaacttgtccctcagagccccagcaaagagcacaggctcgctgatgcctgcattttagcccagtgaaacccatttcagacttctgacctgaaaagtaagataattcatatgtgttgtttaaatccactagatttgtggtaatttgttagaggaacaataagaaactagytaatactatttttaaaataagatttatatgtgtctgaataataaggacaaatttttctcaaattttaattgattagaaacaaagttaaaattttccataaaatgacagtgtttactcttaaccttctataaaactttgcattttgagcaataaattaaataagatatagcattcttcaacttttcctttctatgaatttagtctcagatatttaaaactat

SEQ ID NO: 449295 - DNA, 591 bp, Homo sapiens
attagttcttctttcagtgtttggtggaattcaccagtgaaggcatcaggtcccaggcttttacttgcttggagactcttcattatggcttgcatcttgttacttgttattggtctactcaagctttggatttctttatagttcaaccttggtaggttgtrtgtgtgtaggcatatatccatttcttctaagtttctcaatttattgacatacagtttctcagttttctctaatgatcctttaaattcctgctgtatcaacttaactccttttatatctctggttttatttatttgcatattctcttttttttctagtctggctaaaggtttgtaaattttgtaatcttatcaaaaaaacaactttttgcttcattagtcttttcatttttatatttttcagttcaattttatttatttatgctttaatcattatttttcttcttctaccagttttaggtggcttttcttccttttctagttttttaggatgcattattaggttatttatttgaagtttttcttcttttatgatgtaagcacttataactggaaacttttctcttagtgctgctttccctgtaacctatat

SEQ ID NO: 449296 - DNA, 604 bp, Homo sapiens
gcatattttattttaacatttctatattgttttatgcagtttgtttgtggttttgctttgaaacattttgtgttttccctttaacttctttctccatatttctatgatataaattataggtttttaaagttaaaattgatccattaattaaattaaaattctacttgtttaatctatttgcctcctttctcatagatttgaattaggtagtagcaatgagtattcacatgatttgaattaattaaatttaagactaaatgcagtgcccattgtcctgagttaacaacatttcttagtactgtgacctaagtaaattctgtatttgttgtttatgttttgttttataatgtatttatattaaaaaacctgtatttttggatgtatttttagaaaaacagatttacaggaaacaaaccaaacaaaaagacttgtggtacaagaaaattagaaaatacaktatatttaaaatggacgtgttagcttgtcccaggtaaactcagttcaaaatatgggataaaagagattttacttttaacttcgaacagctagagaatgatatgcaatatggaatatacgcagaactaatattgaaccaaatacctac

SEQ ID NO: 449297 - DNA, 620 bp, Homo sapiens
tctctagagttccaggcacattccttttagatcctactgtgaagcagcaatctctataaatttcataatactgttaggtaggacaaatccccaacagctataaaacctgtgtcttatcrataaatgcatgggatgaaacagaaggaaggcatcagtgcttctttacagccctgagaactggaaaatgtttgattcaacagggattttcctgaaatctttgcaaaccaatatgaacagctgtaacttccaggggaaaaggcaaaaggaaaaaatgatactagagttagaaaccctcggctgcatgcattattcgctttgttagcaaaacttcttttctgaacaaaactctattcatggaagaatctgctaagatttacaacaaaaatgagcattctaaaatagtccaggtttctcttacgtttattcctagataccttaaaaattttattatagtcaatattattgttacttattttcaggagatttttacatgcatcatattagttaaatgacaaaatacccctacgtacctctcttatctccagattcatgataatgcagctgaggaataaagacccaaggtcattggcccaaagttaacctattatcaagtgaggggg

SEQ ID NO: 449298 - DNA, 646 bp, Homo sapiens
ataactccaaaaatatgttattgatactgtgtttaatttttctaaatctacttcctcaagtgaaaagcaggattttggagtttttgaaaagactaaatgacatcatgttcctataataagctattaagtcaaattttaagtcaaattaataacagcatggaaatcatctctgtttctgttgggtatgcaccaaggagaccaagtatctagcactggtattttcatttttagtagatactgccaaacaattttttatarcactgtataatgtacatcccaatccacaatgtaagagtattcaagttgctctgcattatcacaaactattgatatattcagggatttttttttagggtttatagtagtatatctgggtggttttaatttacatttccctgatacataatgacattcagcatatttccttttgtttattgcccatttgaatatcttcattttttgacaggcccgtttgcccactttttacaaaactgggttttttgcctttttttctattatttgtaggaattctttatactctggatgaaagtctcttgtcagatatacagtattgttacagtctcaccaatacaccacaatgtagcagtctctcattgtgaggtatcactgggagttctttgtctca

SEQ ID NO: 449299 - DNA, 646 bp, Homo sapiens
ataactccaaaaatatgttattgatactgtgtttaatttttctaaatctacttcctcaagtgaaaagcaggattttggagtttttgaaaagactaaatgacatcatgttcctataataagctattaagtcaaattttaagtcaaattaataacagcatggaaatcatctctgtttctgttgggtatgcaccaaggagaccaagtatctagcactggtattttcatttttagtagatactgccaaacaattttttatagcactgtataatgtacatcccaatccacaatgtaagagtattcaagttgctctgcattatcacaaactattgatatattcagggatttttttttagggtttatagtagtatatctgggtggttttaatttacatttccctgatacataatgacattcagcatmtttccttttgtttattgcccatttgaatatcttcattttttgacaggcccgtttgcccactttttacaaaactgggttttttgcctttttttctattatttgtaggaattctttatactctggatgaaagtctcttgtcagatatacagtattgttacagtctcaccaatacaccacaatgtagcagtctctcattgtgaggtatcactgggagttctttgtctca

SEQ ID NO: 449300 - DNA, 574 bp, Homo sapiens
atcaaacaaaaatgaaaaactttcagaagttcagaaaattgtttaagatcataccttttgtaagtgaagattttggattagaatttagaagtcatgtttctaacttctcaatattgccccagttttgataatagaattttagatgcctgtttgaataaatttttgttggctttaaaatacaaacagaagaatgtgttttgtcactggaatyatagtttccaccaaaagcccaggaaaagtgtttggaataaaaacaaaatgagaaaagtatgatgttttaaaatttcacttctctagaatattttattcatgaaaactatgtttttgtgctccaagacaagccaaatgaatgcatttttaaatttagatttccttattcagcatacccctttgatatgcaataatttcctttataattcaatgaatgttaataattacatacataacaatctgaccagatgtttgcattagctgtaaggtaatagaaaataacaaaaatgtggtaataacgcacttatatgaaaataacttaaactatgctagttattttatgaatgaaaaagatttatttatg

SEQ ID NO: 449301 - DNA, 574 bp, Homo sapiens
atcaaacaaaaatgaaaaactttcagaagttcagaaaattgtttaagatcataccttttgtaagtgaagattttggattagaatttagaagtcatgtttctaacttctcaatattgccccagttttgataatagaattttagatgcctgtttgaataaatttttgttggctttaaaatacaaacagaagaatgtgttttgtcactggaattatagtttccaccaaaagcccaggaaaagtgtttggaataaaaacaaaatgagaaaagtatgatgttttaaaatttcacttctctagaatattttattcatgaaaactatgtttttgtgctccaagacaagccaaatgaatgcatttttaaatttagatttccttattcagcatacccctttgatatgcaataatttcctttataattcaatgaatgttaataattacatacataacaayctgaccagatgtttgcattagctgtaaggtaatagaaaataacaaaaatgtggtaataacgcacttatatgaaaataacttaaactatgctagttattttatgaatgaaaaagatttatttatg

SEQ ID NO: 449302 - DNA, 558 bp, Homo sapiens
tggctaaatcccaccaaaaccaaaatggcratgagaataacctctggccgtcctcactgctacactctcaccagtgccatgacactttacaaatgccatggcaatgtcaggaagttaccctatatgtctaaaatggggaggcatgaataatacaccccttgtttagcatatcatcaagaaataaccataaaaatgggcaaccagcagccctcggagctgctctatggagttgccattcctttattcctttactttatcaacttgctttcactttactctatggacttgctctgaatcctttcttgtgcgagatccaagaaccctctcctggggtctggatcaggactcctttcctgtaacactttgagaaaaatctaaagagctaaaacacttctatttctcatttttacaagtcaggtcagataaaccatagagaaggtttctttgaatattattaagacttcgctttggctcatttggaagactagagttttgaaacaaccttcacaaaaattgtatcaatgaaaaaattatgacactgaaagagatctgacctaa

SEQ ID NO: 449303 - DNA, 622 bp, Homo sapiens
attctatgattgtcttctgacctatcttccacttcacaaattttctcttcagttgggtctcaacaattgctaaagttattcattgagttcttaattttgactactatattttttaattctagaacttctttttgtttcttttatatagtttctagtttgctaagtccttaatcatttattttcttgaaaaaataacagcacatgttatatacttctgttcacctctatggatatatcttcactctctccactctgctgcctctccaggaacctgatctgcatggactgtatcaattaactttcttgtcctctggcttctagctgtgtttggctaaagtaaagtaccagtaggaccacagggaaggaggagagtgagattcggtactgatttacctgatctcttcctgtggggtcactgtgggctggccacattccctgaccatagactctctgtctctagattctgatagttcctccctccctgtaactcttcaagcctacaggtggtaaagcctcctcattgttcatagcccyagagtattggaccccatctctccccatcacaacccatacttttgaaaattattcctttattaaggaataatattatccctcatattat

SEQ ID NO: 449304 - DNA, 608 bp, Homo sapiens
acttaaatttcttaagggggagtggtctyctgctatgctgattgtgttgcctcatcaataaaaaagcttaactgcttatcctcaatatgtctctatttataaattatataaatgtcctattgtattaacatgtaatacccattatcaaatgtaaattttttcttaaaagataagtacaaaattctactattttcttcccatatcccatttgaattgctaaggtataaggtatagatatattgatgattactgatactactatcatatcatcatcatcatactgtattaatagtattatatcaatgtaatattaaacatcattatattactctccaagaactgtaccaataatttgcattccttttatcagagtatgaaaatttccatttctccacatccttaccaacacttgatgtaaatatgtacttttaacattttattttgaaaaatttcaaactagcagaaaagttgttagaataatacaatgacatcctgtataacctccacctagattcaccaattaataacagtttgctgcagttgcctttttttctctttgtctatctccctcttttctttcctcccttccctctgttgtagaaaaagct

SEQ ID NO: 449305 - DNA, 621 bp, Homo sapiens
aaaatggagaaaaagaattcgtttggctgagaaaaaaaaaaaaattttccagcaaaacaagatcgaagaaaaaaaaaacataaaggccttttaaatatacctataacttggayatccagttttaattaagctgagcatgctctaagaaaatccttttaactccattattatcctactttagcctcaccaagctgccaatatttccggctttcaaactttactaaacgtaacctcacaggtgaaaccagcaagtcttaattaaggttatgatttaactgcaagtgtatgaggtattttcaaagggggtaagcagttcttacaaaatttagaacatttaaaggttacctttaatgtaaatggcaatcagtaaatggcaaaagccacacagctatcaacctgaaagtactcattccctaagccaggactgaatcagctgccattgtaaagtgttacaggataaacaaaatattgccacgtggttacaggtcatgctcccaggcacatggaaaaagatggaggcctacagcaaagtttgctactgactatacagaaaatcatgcaaagcacaccagattggctacagcttaagaccaacctcacaaatccttttacctaattaaa

SEQ ID NO: 449306 - DNA, 478 bp, Homo sapiens
gagaggctacctctgaacacacatcctcactggagagtctgaaaatccagatcacaggagaagaatttaaccttacctagagctgaaacgaatttagaaagctgggagaaatataaaagtagaagcagcagcatgaagagccctgtaggcactcccaggccccaagaaagcccagggaacccatttctgacttttatctcacagaartccttgaggagggctgtcagtggagttggggaaggaccacagggagaaggaaacttccagctgctttgtaataatttcaaccaagcatgaattttccagggcagaatctgggggtgaatgggaagtgcaatcacagaagccatggtgaggaggggcaaaacctgaaaaccctgcttgctttcttgggcgcggggttgggggggtggggagggtggcggcgcttgtagcctggagcaagttcccagtcctgcttaccagctgcctggatata

SEQ ID NO: 449307 - DNA, 428 bp, Homo sapiens
tgttttgttgttggtttatttaacattcagaggtgtgtgtgttttatggcatgcaggggtggcaatgtctgccagtgatatcttgagattcagagataatattaaccaactgagaagaagggctgcagtttatacttgttgattctggtggaatcctgagacctgtccacctattgctaactaaaaagcatttygtaactcagtggcctaagacaaaaataatttactgttgctcatattcagtttgtcaactggggttcagcagatctggactgggctctgcttctcactacagctctacagatcagctggcagggtaagaggaggcaaggtctgctttaagctgccagtggtgggagcagatttgtatcacatgagtcttatcctccctaccctgggcatgtccttctcatggcaaatggtgaaag

SEQ ID NO: 449308 - DNA, 450 bp, Homo sapiens
gaaatcgggaggctccagggatttagcatggttygggccacagcacaaggtcccataggctctgaaagactaagctatagctccaatacaggcgttatctgactccaaagttcaggcctcttctacttgagatctgagtccctcacactggagcatggtcagttaaggctgcaaaagggagagagtaatggaggtcagcgttgaatagatacgaatataaactcttgggcactgttaacgccaaacagcctgacatcttacttcagatataactgtaacagtgtccaaaatccaatattagcatttaaaacttgtagcacacttattgtggagtcattgagtgatgcagaaagaaaaaaaaataaagccctgagaattcagctcatttacccaagtcactgacgcatttaaggaacagctcttataagtccatttaggtggtttagggct

SEQ ID NO: 449309 - DNA, 535 bp, Homo sapiens
atatgatggtaagtaacctatttattaccttaaatgtttccccacataaaggaaatggtagagagtaaggggaaaagagaaataagagatgtgataaaacctattccaccatctttatcttcatccacagcatgtcctagacattcagtgcctgggccagtctctatagtaaacttgggctgatctggaaacgtctccacttagctctgtaaggatggcacccttcagggtgcttcagaggaaacttactgaattcaacccaagtgtcctgaaagaaattgaagaagttactcaaagagctgaactttaaaacaaggagtagctgagggtgaggcatatcctatcttgastttctgagcactctggtaccatggaatgtctgtacactgaccttcgccaaagccaagaaagccctggtaggagtcacagcagccatgggtgagctgaaaggcttttcctgacttcctggggtctcaggaatagccagaggtgaaaagatttgccttttttactacataattgcacaaaccatggt

SEQ ID NO: 449310 - DNA, 534 bp, Homo sapiens
tatttcccctccagcacctcaatctacctcaactacgacgttagcttctaccatgacgaggacagtacctgccaccacaagagcccccgggaccaccgtccacagatccacctaccagaaccacagcacagagacaccaagcctgacagctgcagtcccaagctcagttagtgtccccagggctcccagcatcagcccgtctaccctaagccctgcaaccagcaaccactcccagcactgtaaggaaatgagttctgcattctttcatgacatgggagggctcctagggaagccaggaagggggtatgtgataagacagaacctaccagagctgaatactgcatatctttgaggaggttactgcatatctgagagggaggtagagtaccagcctgcgatttargactcataggtgcccctaccttacagagggtcttgtaggaagctgagaccctgtgagcctcagttgcttctcttacaaagtggaaataaccacccttccacaacctgcttcacaagattgccatgatagac

SEQ ID NO: 449311 - DNA, 578 bp, Homo sapiens
ggtaacagctctctcccaaaacaaacctccttcttgcctggggtctagactgcctttgtaagactaacgagttagccacaagattcgaaattatggtttaggagtcatgcwgctggaggctacaagattctgaccctccctaaactgctcctaagatcagtgcttgagatattttgcagaccctgggtcagctggcaccaccccgatggataagctggctcatctgaccttgtggctcccacacaggaactgactcagcgcaaacggacagcttcaatccctgtgattttcatctctgacccaaccaatcagcactgtcaactcactggtttccccctgtcccccaaactatccttaaaatgtctgatccccaaatgcttggggagactgatttgagtaataataaaacttcagtttcccacacagccagctctgcatgaattactctttctctattgcagtttccccatcttgataaataaagctctgtataagcagtgggcaaggtgaacccattggacggatacatcaccactagaggctcttttcttcctcttcctttggaaccagaccttcag

SEQ ID NO: 449312 - DNA, 468 bp, Homo sapiens
aggctggtctcaaactcctgggctcaagggatcctctcactccggtctcccaaagtgctgggattacaggtgtacaggtgtgagccaccatgccgagccctgtkgttgtttttctgaagaagttttcaggaggtttagtacgtatacgtttccttaaatggaggaaaggcaggtaggcagaggggcaagtaagatgcaagatgaatggttacattcttgtgagaccttggttagtattcagtaaatctagctatattttacataagagaaggtgaatgtttgaagagaaaaaggcagtaaaagaagaatcaattatgcagacctctcttggaaggtggaagaattagtctagtctttgtcctgcacctgggaagacaacattatctatgtggaatcaaacagactttagtttcaggagctagacttggattgtagacctaaagttataattggcatgtccttgtttag

SEQ ID NO: 449313 - DNA, 523 bp, Homo sapiens
ttataatggtaataatgttactgaaaaaaatgaaatcagcactctctcatttccatacaatccccaggaaagcatcacatcagwggggttagttgaaacatgttttgtgttttgcaaaccagtgagccttaattctttccccaaaaaaaaattagtgagccaggtggagatgtgatgtggcagggaaaccctaaccttcagcatccttacacttcaaatttgttagccacagaagttctttgtattttgttaatggatatgtggcatctcagattcaacaggtacttgagttccagtgatgatgaggcagctaacacagcgacctgtgtctttctttgcagttaaatgagccctcttgtttcatcagagcctgccaaaaagcctacccctcccttctcagatgccactgattcaaagtgcctttattccccctataatccaataggatctctcccttctgcacctccatcacgcatagcatttattgcatctgctttagatcctactcatgtctttgtgtcct

SEQ ID NO: 449314 - DNA, 494 bp, Homo sapiens
tagtttccttgggattaagcctgtaccatctatagtcgatttgacagcaaagaaaggggaaaaaaggaaaaactacatgcaattttcataacttattctgtaataaaattgaatttgaattgaattgtatggtaagctaaaaaaatagaatgaatgtaagtttgatttatttttaattaatttcagtgatggtaaaatgagccagatttccaactagagagttagaacaatacccagaacaacagaaaaagtagataagcaggagagtttatatcatgtagaatgtcagtatcacttccaccatttttcataagtcaatggtttgaagtgcttatacacagccctttggaaaagcatcatggaatgtaagatgtctctgtatcaggcctgatttttaggtcagcttgtacaaaataagaatagcacagatattttgaagcaacyagactttttgccttttcagtgtctgctgtctacaaaatattactattact

SEQ ID NO: 449315 - DNA, 483 bp, Homo sapiens
cagataagaacccaacctgactagcgtcttaattttgattttctgacagcccagtgaaatcaaccagggcttctgacatatagaactgtgagctaataagtgagtgttgttttaagctgctaaatttgtggtaatttatcacacagcaatacaaaactaatacacctccattcttccgagattgtcccttggcacttttttttttaaatagaaggtggttatcatatgaaattaatrgttgatttaagtagactctttaaagacagcttttctgtgtttacatctacaaacagtattcctctacgaaataatttatgacaaggctgaatagttttatgagcaataacatttatagtcatgttaaataaagatgcattaaaatataagaaccctgtagtgttctaaaatatattctaagtttcactcatgtagagcccatgttttatgtaggatattacaaaacttaagagaaatgttataata

SEQ ID NO: 449316 - DNA, 596 bp, Homo sapiens
gtttcccatcattaaaataaaatattaggaaatgaattgygtgtgtaacaaacatcatacagatacatacgcatgtgtgtgtttgtgtgtgtattactatttgtttgtacttaaacttgttgtgagtttacactcaaactactatttaggaatatgtctttcttctatatgttaaagcaaactaaatatggcctgagaaggactccgtaattctatatttgagtccttgtgaatgaactgcaacctaacttaataggcagacaagattgtaaacctaacttaggagtatgcatctgtaacaatagctgagtcttgggccaatgccggcaaccatacttcaaccactcattcactggtgagtgtcaaactgtattcaaataaggcaaaaactgagctgtaccctatccagctatttctgtaactcaattcctattctgtatgtcactttcctttttttgtctataaatttgttctgaccacaaggcacccctggagtctgtctgaatctgctgtgattctgggggctgctcaattcgcaaatcgttcattgctcaattaaactgctttaaatttaatttggctcaaattttactttc

SEQ ID NO: 449317 - DNA, 502 bp, Homo sapiens
ttaatctcttcaggattgggagggcctggaagaaaaagatctagctatgttaatattcttaacagatgcaaatttttccccacaaaggatggcttgcagggccatttcaaaatatggcaaagcaacatgttttggagtaaagcattttgattttcttctttgtcacatagtgttgtgccagagtcagattggaaagtaagtcacgatatatagggttaaatgaaatccatctgatgagaatttatgacaagtaggacatgactccctagatcccttagataggaatttgggcrtggttaaaaaaaaaaaatcaaagcttagccctcactaacatttcattctcttcttttggtaccagccataaactcttctcagtttgggtttcattatttcttttcctgcagctggcattcatggagaatagggaaggcttcataaagaaagcagcatggcatctggcctttgaaggatggacagaatttggtcacatggaaattggtgt

SEQ ID NO: 449318 - DNA, 567 bp, Homo sapiens
ctttgtcttggactctgctgatccttctctgtgccctaagcttgcctgccctggaataattgcttccttgtatttaggcttatgaaccatttgcagagaattctgtctctgtctgcagttgctcataattcacacttcatcagctttctgtatctacagctgctgctatttctaatggctattacacagatccaggcaaagctgagagttaaagtttgaaatttttctctatgtcacagtctgctatgctaggaagaatttcttcctatccacagcatgctcttgttctcagggcttggtctatcactctccctaccccatcccaccctgagctgcactgcaatggcataagagcgctttgccttcagcttcaggagaaatatgtaggcagtcacggtrgaatggaaaactgccagtcttcatagattttttttttttttaatagaaagactcccctacagggcatagtaacactagagcgttctcaaatataccacccatgcacacctcctgctcaacccctgacaaacaaacagaatcaattcaggatttgtggtttgttaattg

SEQ ID NO: 449319 - DNA, 483 bp, Homo sapiens
aaataaaagcttactttctaattctcttttttctccccaagacctgtctctctctgttgcccaggctggagtggagtgatgccatcacagctcgctgcagcctacatctcctagactcaagtgatcctcccacctcagcctccctagtagctgggactacatgcatgcaccatcatgcatgtagctaatctttttaaaagttttttgtagagatgaggtttctccatattgcctaggctggtcttaaactcctgggctcaagcaatctacttgccttggcctcccaaagtgctgggtttatagtagtgagccaycatgcctagcctattttttaactctcatttgatctaacagataaaagtttgtttgaaataataatagcagcaatgtatttaattaggtatgcttatgtatatactttatgtatatatatatgctcatgtataagtgaaatgaatggcagcaatgatacaaaggatggga

SEQ ID NO: 449320 - DNA, 607 bp, Homo sapiens
agatatcttttgtggggtgatttctaattatatttcatcagacatgtctggtgtttggtttatatgatatcaatattttggaatttgttgaggttctttttcttcatgctatgtgctcaaatttctcaaatgtttcatgtgtatttgaaaatatgtattctstgcttgttgagtttggtgagcaatgcattggtattgatattctcatcaatatttccgagtctccactccttgacacactagaagattttatttccctacccccttaaactcagccataaccaagttacttgcttgtgagaataaaatgtgagtggaagtgacatgtgttcctcttcatggtaacaaaatggctagtgcccaattctctgtgctgtcttccgctgtttctgtggtccctggggccccactttgagactgtagcatccaaagatggtggagggcaaggtgtggtgatcatgcctgtaatcctagcaatttgggaaaccaaagcaggaggatcacttgagcccaggagttcatgatagcagtgagctatgatcacaccactgccctccagcctgggacacaaagtgagacactatctcttaaaataacaacaacaaca

SEQ ID NO: 449321 - DNA, 482 bp, Homo sapiens
cctgtcccttcctgaattgcttgtttttcctgtaagagacacttcagcaattggcccttttcctggcagtagcattggcgccaatctccagtttttttgtgtgtgtttgtttgtttttgagatagggtcacactctgtcatccaagctgtagtgcagtggcgttaatatggctcactgcaacctcaacttcctaggctcaagcaatcttcctgcctcagcctcccargtagctggaaccacaggtgcgtaaccacacctggctaattttttaaaatttttgtagagataagagtcccatcatggtgcccaggctggtctcaaactcctgggctcaagcaatccttgcacctgggccttccaaagtactgggattacaggtgtgagccaccatacccagcctagtgtttttttgttttgctttgttttgttttaaggcacatccagaagtagcctcatttcacctcctgaaagataagaacac

SEQ ID NO: 449322 - DNA, 617 bp, Homo sapiens
ttaaaattcccgtcttaatccccagatgatgaccaaaagcagggattcctgtatggtgtttaccaacagttttctcataagactgtcactgctgtccatcctgtgaccacaggaatgttagtaaaatctaacatttggtactgctgcctgcaaatgtgcttttgctgcmctggggagcccagttgaacagctaaggaaggaagatggagcccctcagatgctccactttcctgatgaacatcctctttaagaatgcttacatatatcaattaaagatttcatattctttttttaagagccatattatctaatgagagtgtagcacatggttaacagtgcattgtatagccaggtggcatagggtcaaagcccagctctgcttgtcactcggtcttgccataaatcaggatcctcatctgtaagagaccttgagagtatcacctccatgcaatgattttgaggatgaaacatgcatggaaatccctatgtaaagacttagaattgctggcacgtgtatctcatcaaagtttcagaaaatcagaatagttgttactttataaatgtctgctatttctattcctacctagtggtggcattgggtgtgttgactacattca

SEQ ID NO: 449323 - DNA, 488 bp, Homo sapiens
acccaaaaatgactaaaagatttagttgcagagtatatgaccagtgtagtactaaagccagataaagaacatttaaaaattggatgcagaatagatgaagggaacaactcactaaattgccattttctggctcctttggaaaccatttctccctctagctatattctacccttccattcagtttaatgataattttatttttttctagcatgatctgggtttatgacaacttcaattttttcttagcagaagcagttattagatgtattgcttatgactaattctctcaagacttagactgtagaaacaatagcaacatttagttcctcatttcataaatcctaaatatgtaaatatcatctacyaaatttctatatattctataaatatattaaaggtgaatcaacaatatgaagcatgattttctttacatctcacagcattttgttcaaacagagttgacattcatgttacagcttgggataaca

SEQ ID NO: 449324 - DNA, 488 bp, Homo sapiens
acccaaaaatgactaaaagatttagttgcagagtatatgaccagtgtagtactaaagccagataaagaacatttaaaaattggatgcagaatagatgaagggaacaactcactaaattgccattttctggctcctttggaaaccatttctccctctagctatattctacccttccattcagtttaatgataattttatttttttctagcatgatctgggtttatgacaacttcaattttttcttagcagaagcagttattagatgtattgcttatgactaattctctcaagacttagactgtagaaacaatagcaacatttagttcctcatttcataaatcctaaatatgtaaatatcatctactaaatttctatatattctataaatatattaaaggtgaatcaayaatatgaagcatgattttctttacatctcacagcattttgttcaaacagagttgacattcatgttacagcttgggataaca

SEQ ID NO: 449325 - DNA, 582 bp, Homo sapiens
ttgtacgaaagaattgggaaaatctgactgacccagcttcagtgaggttctcatccttaggtatcaatcactcttggaggttgggaaaagggtagaggattgactagcctagcctatgtgacatgrccattctgtgtccatgaggatggtatctgtaacatgaagaatgcaggaagtactgctagacaccaagaaagatggctaccacagcatgtaaccaaaactccttatttatagatgggatgttagcattctgagacaataagtaattttaaaacttcagagttctaatgagaatttacatttgtgtctctttaactgcagcatgcatggtctgtccactgtgccatcctgctattttaattttatggatatttatatgatgaatcctggcagttggtattgaatatcaggacagagaattcatactggttctcaaaatataagtgtttggcaatctcacttctcttcataattggcaacattttacctagtgctactaagaatttcctgaagctccatcaaagcaacactgaattgatagattttcctaaatacgttagattttattaattcagcaaa

SEQ ID NO: 449326 - DNA, 630 bp, Homo sapiens
acattacactctgtttccaagcaaaaataattgggatgtaaccgtataaagagggttaacattaaaaacgttaaagaaaagaaaagagcatagaatttgtggctgcattattctacagtttaccacgctgtrgaataactgggaggcacgaagtagtattagtgactaaccttacagagttgtaaacattttgcacaaattacaccttttaaagcctgcatgatataagtagcttccactcattttcctacagatgtttaaagcaacggatgaaagtcaagctgctagtgtcacagctaggattgaagcttctagtgtttggatgtataactgccgcaccatggattttgtgagacatatagagaagtatcatccacatttttactactcagccattttttcatatttatgtttagtgtccatttttctcctcaaaaatatagaaaactttctattaagaatacttgtaaaaaacaaaaaagaatacttaacgatgaatccttcgtttagagctagtgtattcactcattgggtagagcccacaggaagttgggaaaattaaacagataagcgtagagggcagtcttgaccatggggcagaagttatggagaacaaatttggtgtctctt

SEQ ID NO: 449327 - DNA, 630 bp, Homo sapiens
acattacactctgtttccaagcaaaaataattgggatgtaaccgtataaagagggttaacattaaaaacgttaaagaaaagaaaagagcatagaatttgtggctgcattattctacagtttaccacgctgtggaataactgggaggcacgaagtagtattagtgactaaccttacagagttgtaaacattttgcacaaattacaccttttaaagcctgyatgatataagtagcttccactcattttcctacagatgtttaaagcaacggatgaaagtcaagctgctagtgtcacagctaggattgaagcttctagtgtttggatgtataactgccgcaccatggattttgtgagacatatagagaagtatcatccacatttttactactcagccattttttcatatttatgtttagtgtccatttttctcctcaaaaatatagaaaactttctattaagaatacttgtaaaaaacaaaaaagaatacttaacgatgaatccttcgtttagagctagtgtattcactcattgggtagagcccacaggaagttgggaaaattaaacagataagcgtagagggcagtcttgaccatggggcagaagttatggagaacaaatttggtgtctctt

SEQ ID NO: 449328 - DNA, 603 bp, Homo sapiens
gtttactctcttgacaagcactgaggctgaaataacatagatggatgagactctgctcttgccctagagaactcataatctatcagaagatattgactgcagagcttgaatgaatgaactgtagcctgattgtgtgacctgagtctgtgggagcacaaagaaagaagcaatgttgtctatctgaggctttagaataattcacaaggaaagctatttgttacctgagcccataactaatttgctaactaagatctccccaggacattctagtgaaagatagcatgagtcaaggamggcaggtagacaagttcagtgacttttcagaattataaaccagccttaataaccattaaatattaatttaggaaacaacatcatattatcaaaaatgtggaaatgtctaagatatagtgagagttgctatgggaatgacacccttaaaatttggattgcaggtgaagctatttctctatttcagcctttttataaaatgatgtaagagttacaattttcaatatacaactcaaagaaataattacctcttctgcaaattagtaagtacatgtaattttgcattttaaaaatctccttaaaagcaactac

SEQ ID NO: 449329 - DNA, 505 bp, Homo sapiens
catctggtttgctctcacacctggagatgtcactcaaagaggctggagaacagcaaagatgagtgtctgctccttcctctgggatctctgacctcaaggggcaacaacctgatgccagtaggattgctcctgtatagggttcctgacaactcctgttggagggcctcacccagctgggtggtgtggggaacaggacccgtttagtgaagcactttgagtgtcccttggtgaagagggtgtgcttcgctgaaggtaaaacccactggtctgggcagcctggattcctcagaactaccaggaggaaaggctaagtctgctggtccrtagagactgtggccacccgtcccccaaggggctcaggcccaggtagatcagagttctgtccctgagcacctggctggagttgctggagttcctccagggcagccttgcccagtgaggagtgatgggtcagggtcaggcctgaagagacgctctggctgcagtcttccccagctggtgtgtt

SEQ ID NO: 449330 - DNA, 629 bp, Homo sapiens
ggtgtgaggtggtttaaggaaaaccaacaagcaatggtgagtaaccacagcaggaaagtcactatcacctttgaccaaaagaggttaagggatgggagggttcaatggaacccagaaaaatttgaaactgtagggtaagagagggcacctgatgtgacatcaagattctccttttgtgcagaaaggtagtccttgccaaccccgtaggaagaaatataattatccagactgaattattctccactctcttcctgctgatgccttccttcatatgaacccaagagaggagactggttgatagtgttcataaaatgcaaggtagagagcacaagrttggatctacaggaagcaaaatgagagtactcagcatacatatttagtaagcacctgcatgacttatttaaattttattacaactcttcatcatttattgaaaatttgaacctcagctttccaagaccacatagatagtgactagtagaactaagattaagatttatatttgtctcatcctaatacctatgctgcttttactatgctatactccacacgtgtattcatgtgccttacatagtcccaaatacttcctttgcaaataagtacgaatttattctcagacctcacccata

SEQ ID NO: 449331 - DNA, 607 bp, Homo sapiens
atacttttcctactcatacatataattacctttgttggaagagacattagagccaccacccatagttacccctcaagaaaggaggttcaaattatgcatacttagttgttccaagtctagtttagtgtagcagataagaatttcacaccataaactaaaatgtgaaaataatatgactttgtagtttagtttatgttttaaagctctaataggataatagattttattctgttgaggttcccaattttcaaagagtcatgtctaattttcagagttgttatatagtgccaagtcattgttggaggcagggaacgcttgaatcatctgttcactcaggcactggccaatgccataattatccagttgtgttctattaagtcaacaataccaattgtctttcaaagttttccctggtcttctctgcatggcttcacaggaattggaacagtctccagtcrttctgtgcaatgctctaggactaccaaatgatttatttgggtgtttgagatataaaagctagtacgtgttgtttttattttttggttttcaacctattgcatacttctcgagaattctgaaactttttctttctttctttttaatgtgt

SEQ ID NO: 449332 - DNA, 350 bp, Homo sapiens
tttttattttttggttttcaacctattgcatacttctcgagaattctgaaactttttctttctttctttttaatgtgtgaaagaagaagacagaaaatacctggtaaataagaggaaaaataagttaatatttacaatattgcccttacacaggagttaatggacaatagcccccacccccattcctcgaccctccccttatctgtctaacgggctgagggtttgaagttccacaccgcaaaaatrgtaatatgtggaaaagtggcctttatgagaaagctcctctgtattcactgggatataaccatggcactgtgctcatgcttttctccatggttacgcaaagcctc

SEQ ID NO: 449333 - DNA, 603 bp, Homo sapiens
ttcaaatagaaaatgtgttccctttaaataaaaaatgaaagaaaaaaatggaattcagcctccaatggaaggcttctttttatgaggaaaatatattgattttatcatggatttatgaacaagttaagttrtaattaggtatttgctgggcaactttcatagggtgattttgcaggcatggggatcacagagactataaccttcctgtcagtatctagacctgcatttaacacctgtttctgaattggaaactaactaaaccctgatgtacttcaatatgtagctgaaattttattttcatctatagtcattaattcaatactagcatcagattttcacatttgattttcatcttacttgaattgtattcactggtacactagaataatcctcagcaacttgtcctttatcaagtgattttacagcttgcttacttagtcaaaacctatccataatgctactctctcctcatggcaaccacattcacataggtcagtccacaaagttaaatgactcatgtagcttttataatattatggtacacacatctctgcttagtatacatttcgtttttaagccattgtcctatagttcccagaaagg

SEQ ID NO: 449334 - DNA, 597 bp, Homo sapiens
tgataaagtaactgggtaaaatgttaatggaagaatacaaatggtgcatgtaaggatattcaccttaaaatctttgttttgccatttctatgaaatttttcataataaaatgttgaatagatggcttagggaagtttatctgctagcaagtgcaggcagtggcagtgaagtggtggcagacaggactgtagtattggcaacatcatgtagtgtgtagacccttgcattgtaagccaaatattgtaactttttgttccagtttgacccttgggtgagtcatctcagttccctgtgtctcactttctacatgcacttttaagaatagagactcaataaatatttgttgagttaatgtttgatatattgatatataaattgaaggaaacagataaaataatttctcaggtcccttctatgttttctatgactcattttcattragtatgtatcagataacacatctctatcattacttaaaatattttagcaatttatattatgactaattatataaattctaacaataacataattttaatggatgaactaaaatttgtatttacaaacgaatggtaactcaaagaagtagatcccttg

SEQ ID NO: 449335 - DNA, 351 bp, Homo sapiens
agttgatacctttagagtttgttacacaatgtagatggatattcctgctcagttctttctttagcatgtgaacgtgtgatgtctattttgtcactgaccattgcttgtagcatatatttttttctgaatacaaattcccataagtaggagtaatgctgggggtaaataaattataaagaatttatatttttccaaaattgaattcaaaaatgaaaaggaaattaaaggggctaatttagtaggatattgtaacagagcccattcctgacttgtaaaaacgctcrtatgtttactcataactgacttttatggttataataggccttttatttttgttctctgaataaatcc

SEQ ID NO: 449336 - DNA, 583 bp, Homo sapiens
cagggaattatattctgaaagtagtcagtatcagcctcttaccccagagagaactcctttgaaaagtattacaagctgcctaagcactaaaggttctcttatatctgtgtgtgggatatgccattcatttacttgaatgtattactctttgttatgaacacacctctcattgtgtttttaggacccttggacttatttagcatttatatagcacttccattttaacaaagatatgccacagtaatttatagtagttattcctcacagcaccctggaaaaatagaaggccatctctgtacttatttcatagatgaagaacaaactaaagcagggcttggaaatatggcaaaattgtatggatatatttaaaattaagggatgtaacttcaaggttattgtttcatcaggtaagtcaataaaaatatttgaaatataaatgaaggatttaaatgtagtctttctttcaattcacttaagatttccgtatgtttgctgctttctaatataataaacatgcatgtgggtaaaatgatttattagaaagctcacaaaatcctcaawacatgaacattcataaattcaa

SEQ ID NO: 449337 - DNA, 536 bp, Homo sapiens
gaaatgactccagtctacagctcccagcatgagcgactcagaagacggatgatttctgcatttccaactgaggtaccaggttcatctcactggggcttgttggatagtgggtgcaccctgcgtagcatgagcygaagcaggatgcggcattgcctcagaggggaagtgcaaggggtcggggaattccctttcctagccaagggaagccatgacagatggtacctggaaaatactgcgcttttccaacggtcttagcaaatggcacaccaggagattatatctcgtgcctggctcagaggatcccatgcccacggagcctcactcactgctagcacagcagtctgatattgaactgcaaggcagcagcaaggctgggggaggggcatccaccattgctgaggcttgagcaggtaaacaaagcagccaggaagctcgaactgggtggaggccaccacagcccaaggaggcctgcttgcctctgcagactccacctctgggggcagggcatagctgaacaaaaggcagcagaaacttct

SEQ ID NO: 449338 - DNA, 544 bp, Homo sapiens
tttttgaatttttttaaacaattgtgttaaaaaactaagaaaaaaggacagacattagcctaggactacagggtcaggatcattaatatcactgccttcaaccttcacatcttgtatcactggaaggtcttcaggggcaataacatgcatggagatgtcatctcctatgataacagtgctatcttctggatatctgttgaggaacctgcctgaggctgttttacagttaaatttatatatatatacgtatatatatatcatatacacacacaaattatatatatataaagttaactatatatatatatacttatatatatgtagaagcagtacactctaaaataataacattaagtatagtatagtaaatatataaaccagtaacacagttattatcattttcaagtattatatactrtatataagttgtatatgttatacttttatatgactggtatcacagtaggtttgtttacaccagcattaccacaaacacgtgagtaatatgttgcactgacacattataatgggtatgacatcacta

SEQ ID NO: 449339 - DNA, 518 bp, Homo sapiens
acctgtattgtgtgccgacttccagtctcatcctgtgacttagaatgccctaactgtctgggaatgcagcmcagtaagtcttagcctcatttaactcagctcctattcaagatagagttgccctggttcacatgcatgcctctgacagtttctgctcagaaatctgctgttgctctgataggttttcttttataggctacctgatgcttttgcctcacagctcttaagagtctttccttcatctttgctttggataacctcttgactgtgtgtctaagtgatgagtttcccaggtgttctttgagcttgtatttggatgtctagatctctagcaaggtcagacaagttttccttgattattccctcaaataatgtttccaaacttttagatttcttttttttgtcttgggaacaccaattattcttagatttgcatgcttaacatagttccaaacttcttggatgcttggctcatttttaaaaattcttttttctttgtctttgatggattgggttaa

SEQ ID NO: 449340 - DNA, 558 bp, Homo sapiens
ttttgtttgcctcttcttttttcttcttcattgggtttttattctttatgaagaatcactrgaactgggagtttctggtctccattgagccatctttcctccatcaagttgtcagatgtaggctctctgaacttacagcaaattcttgagtaaagagaaaatcaccaaggtccttaaggttgcttagtccctaaaagtaatctgttctgttacaccatctgctgtgccttggaaaggaaaatcctttggtctttaacattaaattcttacaaacaccaagtgttatccctttattgccaagagtttggagatgtgaagtaaaaagaaagaaaaaatgttctttaactttctttcctgttttagccaactggctctcaagaaaggacagggggttgggaatcatcaagtaatactatagcaaaaacatatacactaaagtttatagaagctttaaaatttatagaagctttgaaatttccagcattaatgctcagattccatttgtgtattcaatcacttattgaagccttttatgcctgcagtacaaaagtttaaaaa

SEQ ID NO: 449341 - DNA, 558 bp, Homo sapiens
ttttgtttgcctcttcttttttcttcttcattgggtttttattctttatgaagaatcactggaactgggagtttctggtctccattgagccatctttcctccatcaagttgtcagatgtaggctctctgaacttacagcaaattcttgagtaaagagaaaatcaccaaggtccttaaggttgcttagtccctaaaagtaatctgttctgttacaccatctgctgtgccttggaaaggaaaatcctttggtctttaacattaaattcttacaaacaccaagtgttatccctttattgccaagagtttggagatgtgaagtaaaaagaaagaaaaaatgttcttyaactttctttcctgttttagccaactggctctcaagaaaggacagggggttgggaatcatcaagtaatactatagcaaaaacatatacactaaagtttatagaagctttaaaatttatagaagctttgaaatttccagcattaatgctcagattccatttgtgtattcaatcacttattgaagccttttatgcctgcagtacaaaagtttaaaaa

SEQ ID NO: 449342 - DNA, 558 bp, Homo sapiens
ttttgtttgcctcttcttttttcttcttcattgggtttttattctttatgaagaatcactggaactgggagtttctggtctccattgagccatctttcctccatcaagttgtcagatgtaggctctctgaacttacagcaaattcttgagtaaagagaaaatcaccaaggtccttaaggttgcttagtccctaaaagtaatctgttctgttacaccatctgctgtgccttggaaaggaaaatcctttggtctttaacattaaattcttacaaacaccaagtgttatccctttattgccaagagtttggagatgtgaagtaaaaagaaagaaaaaatgttctttaactttctttcctgttttagccaactggctctcaagaaaggacagggggttgggaatcatcaagtaatactayagcaaaaacatatacactaaagtttatagaagctttaaaatttatagaagctttgaaatttccagcattaatgctcagattccatttgtgtattcaatcacttattgaagccttttatgcctgcagtacaaaagtttaaaaa

SEQ ID NO: 449343 - DNA, 573 bp, Homo sapiens
cttgcacgaattgacctctttgagacacagttcccttatctgaaaaataagagcaaaaatatatttcagttttaatgtgtgggatactgtatattcctagcatggtgcctaacatatagtaaggccactttggtatatgtgtagcacatgtgtgtgttgtatgtagcacatagcatatatacccttaccttgatcttgtaaacgacaaacaatattcatccacaaccactgctacttttctggagaacagtaatttgatctttctctcagaagttggcttgcaatggcagctccagaatttctgccttggagctaagagaagacaatcttggtrgaaggggaggagcttgagaaaacgcttcttagagctgcatatgcataacaagcacactggttttctaaaattctacctgtatatggggggttgtttgggaagactgatagagttctctcagttgccctttggtgcctatattgtctcccctgtctctcttaaatggaactgaaatgtcgaacagaaaatttttgccttatttttttctctttgcagttttctttaagtagaccatcagt

SEQ ID NO: 449344 - DNA, 637 bp, Homo sapiens
aaataaaataaaataaaataaatttaaaaaaataaaaatttctggtcattttagaagatctcattacataaaaatcacaatgtcatgcgtgttattatttgatcctgttgatgacatgaggcatgtagaaaagtttttgttcttaattagttccagtttatagggtggggagttggtggggggaaggaggcctagaggagtaaaatgacatactcaaggtcacacagcttttaagcagaaaaaccaastttcaagtctgagacctctcttctcaaagtctgttacatttcctcaaagcttccctggagtgagatgaatggggaatgagacgtaagcagcctttggagccaaagcagtggctttttccatggtatatctacttgttatgcccatacgatccatttctctaactgctgggagccaagatctgaaaaatctgttacaaagaaggatgatgaagccctttgtgataatgacacgagttccttccttgccctttgccaagcactgtgaaggaatggcttttccctagagtggggcatctctacagagtcactttagtttcagggatttctatcccacagttgtcaattttatagaagccaggacaagacatttttaacattgtgactcttaa

SEQ ID NO: 449345 - DNA, 481 bp, Homo sapiens
cagttaatttagtggatccccatgctctcaaaggatctggttacctgctgactgcttgtctggctcaaagagtgtcaattttgggatataattttatgggatctgatgaactgagaaatgtcaytgaagacataaagttaagtcctttagaagctataagcacgggctgggaggactcagttcattgccacattagagtataatggttgccctccctgtctttagaatcaaacatcttgggttctaatgcaatatctgcccttgttaactaagagccctcaggcaagttaattaacctctcagagctttttttttataccctgacaggatttgtgtctttgggttgtttagggattaaatgagattaaaatatacatgcaatctgaataagcattacctacggattgtaatcaaatcagaactttgtttttgtttcctactagccctttaacatttattcagtgagagaagtttcctactc

SEQ ID NO: 449346 - DNA, 481 bp, Homo sapiens
cagttaatttagtggatccccatgctctcaaaggatctggttacctgctgactgcttgtctggctcaaagagtgtcaattttgggatataattttatgggatctgatgaactgagaaatgtcattgaagacataaagttaagtcctttagaagctataagcacgggctgggaggactcagttcattgccacattagagtataatggttgccctccctgtctttagaatcaaacatcttgggttctaatgcaatatctgcccttgttaactaagagccctcaggcaagttaattaacctctcagagctttttttttataccctgacaggatttgtgtctttgggttgtttagggattaaatgagattaaaatatacatgcaatctgaataagcattacctacggattgtaatcaaatcagamctttgtttttgtttcctactagccctttaacatttattcagtgagagaagtttcctactc

SEQ ID NO: 449347 - DNA, 586 bp, Homo sapiens
aatttagcagactacataaatctgcattattctacataatcccatgtcttagaccaagcttggtgggttttagttctgttaccagagtccacgtcatacattgtaaatggctcactccaaaataaagcaaaaaccctagaacttctccagtcccctcattttctttttgtttttaagagcagttaattgggttgaacctggcaggaacaccttaagcaggacttcccccacaccccacctccaataagagcttcctcactagatcattttaattattgtctgggaaaggagttggatcagcctcagtgacttattttcaatacaggcaccaggctttgtcagagttagttttatctaataacaacttcttatcctgcgtccttttctagtatcaccctagctcctcctgaccttcacaggcaaacttctgtaaaaaatggtctattaggtatctccactttctgtcattctgctactccactgaaaactaaagttcactamctttggcccccactgctccactgtactagctcttatcaaggttattagatttctttgttgctaaaccaatagagtcttgttattt

SEQ ID NO: 449348 - DNA, 513 bp, Homo sapiens
tgacattacaaactaaggtggctgtggaaggagcagtatctgcctggatccaaaaagaggatctgaaagccaaaaaggatgaataatccaggcatcgggctcaaggcaggaggcagctgttcatttgtggcttgatgagcacttgactaaggtagtttaagaaactacttctaacgcagyttagactcgctggagcatgtgcctcaccgaagaccccacccagcaggcatcacagagtagtggaagcggaaggacccccagacccatggacacagtctgaggagactaccgcccctttcatccctagggtgggacagcgggaaattgccagagacagtccgaggaaggccttctgtcctgtgcctctttggtaaatcaagcagcgtctttctgtgcatcaaatctagtctctgaaacttgaatccaaatttgctgacacaggggcttctatctgcaagaggtatgcagggatggccaaggtcaggggctcctttgaccacttagaatcagatc

SEQ ID NO: 449349 - DNA, 513 bp, Homo sapiens
tgacattacaaactaaggtggctgtggaaggagcagtatctgcctggatccaaaaagaggatctgaaagccaaaaaggatgaataatccaggcatcgggctcaaggcaggaggcagctgttcatttgtggcttgatgagcacttgactaaggtagtttaagaaactacttctaacgcagtttagactcgctggagcatgtgcctcaccgaagaccccacccagcaggcatcacagagtagtggaagcggaaggacccccagacccatggacacagtctgaggagactaccgcccctttcatccctagggtgggacagcgggaaattgccagagacagtccgaggaaggccttctgtcctgtgcctctttggtaaatcaagcagsgtctttctgtgcatcaaatctagtctctgaaacttgaatccaaatttgctgacacaggggcttctatctgcaagaggtatgcagggatggccaaggtcaggggctcctttgaccacttagaatcagatc

SEQ ID NO: 449350 - DNA, 449 bp, Homo sapiens
caggtcccagtttaagcttcaccggagtcctctgcctctggctgcaccagctctctgaggcaccagaaagagcttttctttttctttttcttcttgtttttttttttttttttttgaaacagagtctcactctgtcatccaggctggagtgcagkggcacaatcacagctcactgctgcagcctcaaactctcaggttcaagagatcctcccacctcagccgactgagtagatgggactacaggtgcgtgccaccgcacccggcaaatttttgtattttttatagagatggggtcttgctatgttgcccaggctggtctagaactcctgggctcaagcagtcctcttgccttagtctttcaaagtgctgggattacaagcataagcaactgcacccagtccagaaagctctttctaaagggcaaagctaatggtatcctgccccttgca

SEQ ID NO: 449351 - DNA, 449 bp, Homo sapiens
caggtcccagtttaagcttcaccggagtcctctgcctctggctgcaccagctctctgaggcaccagaaagagcttttctttttctttttcttcttgtttttttttttttttttttgaaacagagtctcactctgtcatccaggctggagtgcagtggcacaatcacagctcactgctgcagcctcaaactctcaggytcaagagatcctcccacctcagccgactgagtagatgggactacaggtgcgtgccaccgcacccggcaaatttttgtattttttatagagatggggtcttgctatgttgcccaggctggtctagaactcctgggctcaagcagtcctcttgccttagtctttcaaagtgctgggattacaagcataagcaactgcacccagtccagaaagctctttctaaagggcaaagctaatggtatcctgccccttgca

SEQ ID NO: 449352 - DNA, 449 bp, Homo sapiens
caggtcccagtttaagcttcaccggagtcctctgcctctggctgcaccagctctctgaggcaccagaaagagcttttctttttctttttcttcttgtttttttttttttttttttgaaacagagtctcactctgtcatccaggctggagtgcagtggcacaatcacagctcactgctgcagcctcaaactctcaggttcaagagatcctcccacctcagccgactgagtagatgggactacaggtgcgtgccaccgcacccggcamatttttgtattttttatagagatggggtcttgctatgttgcccaggctggtctagaactcctgggctcaagcagtcctcttgccttagtctttcaaagtgctgggattacaagcataagcaactgcacccagtccagaaagctctttctaaagggcaaagctaatggtatcctgccccttgca

SEQ ID NO: 449353 - DNA, 449 bp, Homo sapiens
caggtcccagtttaagcttcaccggagtcctctgcctctggctgcaccagctctctgaggcaccagaaagagcttttctttttctttttcttcttgtttttttttttttttttttgaaacagagtctcactctgtcatccaggctggagtgcagtggcacaatcacagctcactgctgcagcctcaaactctcaggttcaagagatcctcccacctcagccgactgagtagatgggactacaggtgcgtgccaccgcacccggcaaatttttgtattttttatagagatggggtcttgctatgttgcccaggctggtctaraactcctgggctcaagcagtcctcttgccttagtctttcaaagtgctgggattacaagcataagcaactgcacccagtccagaaagctctttctaaagggcaaagctaatggtatcctgccccttgca

SEQ ID NO: 449354 - DNA, 616 bp, Homo sapiens
cactcacctgtcttcaccatcagagaggtcaccattaatgttttgtgatccttctgggcaactgtcccatcacgcaaatctcccaggctcacaatggatggtaagactagcattgccattgtccccattgaacagatgagggaaggcagagaggtcactggaatggcaagtcaggagatatgcatttgagattctgctccatcatctactaratgtgggatatctgtctctgaaatgagaatatctatctcccaacggtactgatgggatgaaatgaagatgtgtattagaggactgcataagacccatcactccatgacatatttattggacccatgctatgtagctgtctataaagaatagctactgtttgctgagtctgtagggtatatagggtatcatacacaattcttggctctttctgtatgaaatttaatgtaatccttacaataacctcatggagttggttattataatccccattttatagatgaggagactgtgatttgaggagatttgcccaagtttgtatccttatactgataaccagaaaacttgaactcagagccaaattcaaagcccacattccatgctctttaatattaggagttaagac

SEQ ID NO: 449355 - DNA, 511 bp, Homo sapiens
acaacaatgttatgagttgggtagtccctttttaccattaagaaaacaaagttggagaggatacataacctgcccctggtcatgcagttaagtgacttgtggaaagtcatgcagctggtagctgtggagccagggtctgaatccaaagtttgtgtgtttcttccattccactctactccagtgcctccagtccagcagagcttggaaggggggctcagaagggaaggaaaaacaatccttataagaaccttgtacatggtcggcactttcccataaggtgtctcatttaatcctcacaactactccatcaacagggtatacttagccccaagaagaaaacccaggctcagagagtaaagtgacttgcccaagatcacacagttagtaagcaggaaactcaggattcatactgactactggtttccaaggacttgttatttctactggggtgcaccwtctacaacaccccatctgctggttttgcagttttgctttgctcccagtccaagat

SEQ ID NO: 449356 - DNA, 584 bp, Homo sapiens
atcaagcacctactgtgtgacaagcatggtacttgcagtgagagaataaatttgcagagcgagactccgtctcaaaaataaaaataaaaataaaaaaataaagacgtaatactatttttcccccattgagctcatgggcccagattaagagctcctgccctggatctgtgcatctcaaacttccatgtgcttctgaatcatctggcctctgttaacatgcagattctgattcaggaggtctggagtaggctcaagsctctgcattcttgacaaactctagggatgagtttgtcaagctggctcctgagatgggcacagtctggaacgtatggtactgggtaatagtcaccacctggaaccatgatgggaatctgagagcaagggcatcagctgctggggcccgagggtgggttggggccttaaagtgattccgtgaacttcacaagcttcgtggcagtcttgtggtgacaaggccattccagcatatctcctgatgaggatgcagaggacactctaacctggaatacattctctccacaaagctgaagggagcctgcaatctttttaatgctccaattagagcc

SEQ ID NO: 449357 - DNA, 584 bp, Homo sapiens
atcaagcacctactgtgtgacaagcatggtacttgcagtgagagaataaatttgcagagcgagactccgtctcaaaaataaaaataaaaataaaaaaataaagacgtaatactatttttcccccattgagctcatgggcccagattaagagctcctgccctggatctgtgcatctcaaacttccatgtgcttctgaatcatctggcctctgttaacatgcagattctgattcaggaggtctggagtaggctcaaggctctgcattcttgacaaactctagggatgagtttgtcaagctggctcctgagatgggcacagtctggracgtatggtactgggtaatagtcaccacctggaaccatgatgggaatctgagagcaagggcatcagctgctggggcccgagggtgggttggggccttaaagtgattccgtgaacttcacaagcttcgtggcagtcttgtggtgacaaggccattccagcatatctcctgatgaggatgcagaggacactctaacctggaatacattctctccacaaagctgaagggagcctgcaatctttttaatgctccaattagagcc

SEQ ID NO: 449358 - DNA, 465 bp, Homo sapiens
gggcagctctgggtagggaatgtgacacagcaatttggtctacgtggggccaggaatttccactgggaatagcaaggcagcagaccaggggatggtgtgggaggtggccaaggatggtagatagaattgctacataaaatacaagacacccaattaaatatgaatttcagataaacaacaaataattttttagtatttgtcccaaatatgccatacttatactgaaaaaaaatttgttgttatttgaattgcaaagttacctggccatcctgtaatttgctaaatctggccacccaaatgttggggkagataactaggcgatggtgtagcaggagattaggggattgtgggcagcggaccaggctagactcacctgggcctctgagctgggcctctgtcctcaggggtttcgcagagttgtagactgaggacctgtttcctatccaggccaatttcacgggactt

SEQ ID NO: 449359 - DNA, 465 bp, Homo sapiens
gggcagctctgggtagggaatgtgacacagcaatttggtctacgtggggccaggaatttccactgggaatagcaaggcagcagaccaggggatggtgtgggaggtggccaaggatggtagatagaattgctacataaaatacaagacacccaattaaatatgaatttcagataaacaacaaataattttttagtatttgtcccaaatatgccatacttatactgaaaaaaaatttgttgttatttgaattgcaaagttacctggccatcctgtaatttgctaaatctggccacccaaatgttggggtagataactaggcgatggtgtagcaggagattaggggattgtgggcagcggaccaggctagactcacctgggcctctgagctgggcctctgtcctcaggggtttcrcagagttgtagactgaggacctgtttcctatccaggccaatttcacgggactt

SEQ ID NO: 449360 - DNA, 598 bp, Homo sapiens
attcttttttaagtggctgaatagtattccgtggtatatacatatcacattttytttatccagtcctccattgatggacactcaggttgattccctatttttgctattgtgataaacatacaaatgcaagtatcttttttatataatgatttcttctcctttgggtagataaccagtagtagaagtgctggatcaaatggtagttctatttttagttctttgagaaatagccatactgttttccatagaggttgtactaatttgcattcccaccaatagtgtataagcattccttgttctctgcatcctcaccaacatctatttttttgactttttaataataactattctgattagtataagatgatacttcattgtggttttgatttgcattaaaacctgatgattagtgatgttgaccatttttttcctatgcttcttggccatttgtatgtcttcttttgaaaatgtctattcatttcctttgcccactttttaatggggttatttgttttttgcttttgttgttgtttgagttccttgtaaattctggacatcagtatcctactagatgcatagtttgcaaatattttcttcc

SEQ ID NO: 449361 - DNA, 543 bp, Homo sapiens
ctgaatagtattacctccttggttaaatatattcctaggtaattttgttttggtggctattgtaaatgggattgtgttctggatttgcttctcagcttgmgttttattggcatatagaaatgctactgatttttgtatgttgattttgtatcctgaaattttactgaatttatttatcaaatctaagagtttttcggaggagtctttagggctttctagatataagatcatatcatcagtgaacagaaataatttgacttcctcttttccaatttggatgccttttatttctttctgttgcctgattgctctgtctatgacttccacattaagttcttaataacgttttagtcctaaggaagctccttatgttcctgggttggttctgggagtgttttgagacctctctaccaccagtgcagactctgaaatttggatgactccctcagaaaactcagggcatccagagaacttagagacaactagttttgctacctgctctactcctaggtgagtggctttatctataagttccagggcacc

SEQ ID NO: 449362 - DNA, 543 bp, Homo sapiens
ctgaatagtattacctccttggttaaatatattcctaggtaattttgttttggtggctattgtaaatgggattgtgttctggatttgcttctcagcttgagttttattggcatatagaaatgctactgatttttgtatgttgattttgtatcctgaaattttactgaatttatttatcaaatctaagagtttttcggaggagtctttagggctttctagatataagatcatatcatcagtgaacagaaataatttgacttcctcttttccaatttggatgccttttatttctttctgttgcctgattgctctgtctatgacttccacattaagttcttaataacgttttagtcctaaggaagctccttatgttcctgggttggttctgggagtgttttgagacctctctaccaccagtgcagactctgaartttggatgactccctcagaaaactcagggcatccagagaacttagagacaactagttttgctacctgctctactcctaggtgagtggctttatctataagttccagggcacc

SEQ ID NO: 449363 - DNA, 586 bp, Homo sapiens
gaactcatgaaacaggccgtcctccaccgcttcgtcactaagctgggaccccaactcgcttatcttcagagtcttgtattccgcgccgtccccgccgccgggagctgaggaggcggccccagaggaacgtgactccccgcctccaccccgggagctgctgcgcgaytcgcccccgcccgaagaatttttggtgctcggggagctataactatgcaagcggctactggagctgcccccaccggtatcatactcgcggctgccacctcgactgctggacttgtccaggtggagactccgccgcgacccaccgccgctatcggtctttccgctgctgctcccattgctgccaccagagccccctaacttcttgctccgctcaccgcgggaagtcgagtcctcaccaccacgggagcgtttggccttcactggcgagcgctcttttcccttcattgttgcgggtcgtcggaggtcgtctccgcggagctgagtaacccgccgccccgcgctcgtttcacacagcggaaccgcacgccgccatcttggactccgccgcggcacagggtcccgccccgcagtcctcattggc

SEQ ID NO: 449364 - DNA, 614 bp, Homo sapiens
gggggttgaataggagttaacccctgcgctctctttgcaactgtctctcttctcagagtggtgggggaaggctgtacgacacgggtggggaaaggaggtgggggcggggagtattgaatggtggtggaagggtagagaggcgcggagtgaaccccacgccctgtctaaagtgtattttcagagccggcccgcctctcctcggttcaaggtcactgtttcctgggcacgcactgggttgcgggacagagtagccagkttctgccggtgctcggagaagagcgcagtgttttgcaagtgctggagtctcctgaggacacgcgcgtcgccgccaccgcgggtgtgggaaagcgcggacgtgctgggcggctgtgcttcggtaggcgaccaccgcccctggccgcgctccgggctttcacggaaactcccgagaccgggccctgggttcctcctctcctactcggctctgcagtcctactcaagcgggtggctctgggatcctgggggcctgggttgggggctagggagacgccatgtgatggacactccagggacacacagcctagcacagcagcttataatgggctctccggggccatttgcaataacagctgcaa

SEQ ID NO: 449365 - DNA, 614 bp, Homo sapiens
gggggttgaataggagttaacccctgcgctctctttgcaactgtctctcttctcagagtggtgggggaaggctgtacgacacgggtggggaaaggaggtgggggcggggagtattgaatggtggtggaagggtagagaggcgcggagtgaaccccacgccctgtctaaagtgtattttcagagccggcccgcctctcctcggttcaaggtcactgtttcctgggcacgcactgggttgcgggacagagtagccaggttctgccggtgctcggagaagagcgcagtgttttgcaagtgctggagtctcctgaggacacgcgcgtcgccgccaccgcgggtgtgggaaagcgcggacgtgctgggcgkctgtgcttcggtaggcgaccaccgcccctggccgcgctccgggctttcacggaaactcccgagaccgggccctgggttcctcctctcctactcggctctgcagtcctactcaagcgggtggctctgggatcctgggggcctgggttgggggctagggagacgccatgtgatggacactccagggacacacagcctagcacagcagcttataatgggctctccggggccatttgcaataacagctgcaa

SEQ ID NO: 449366 - DNA, 660 bp, Homo sapiens
tatcacagtgacacttttgctattgtgaaaaatttttgtatttttattataatttgttgagcctagagttaagctatttgaatacttataatgttaatattttggccagcaggaacagagtatctttttgtaacaaaattactattaacacactaattatccagcagatagaacaacacatcttgttctaatgaagtaaatatatcttatttggtttcaacttagagggaatgaagttgaaaatagtgagatcttttggtacaagactgtgtaacataacctgcgcttctcaacaaagatttgcttttctcacttctgcactcagtaggtatctttgaaaaatratatcctattggtactgatgcaccctggctaagttttgtaattcttgttgacatttgtttatggtgtcagaaaagtattattgagttccaaattctaaagatacttacttttctgtgacacaagtcactatgtcacacagttgatccttgaataagggttttactgtaggaacccactaatagacagatttatcttttcctttgctgctgcaagatagcaagacaaatctctcctctccctctcccttatcagcctactcaacatgaaggcaatgagaatgaagaactttatgaataataattcacttccatttaa

SEQ ID NO: 449367 - DNA, 552 bp, Homo sapiens
gacctgcaggggagatcacatttaaatagataaaattcttcttcttaataaaatgtctatactgttattgtatttcactttttcttaacctggtactatgaattaaggtcrgggccccaactcaacacacatacacatataaattccagggcaaaagtaaattgctttgttataataaaatctcttactataattctttctttctttctttctttctttcttttttttttttttttgagacagacttttgctttttttgcccaggctggagtctcactctgtcacccagcctggagtgcaatggtgcaatcttagctcactgccacctctgcctcccgggttcaagtgattctcctgcctcagccacctgagtagctggaattacaggcatgtgccaccacacctggctaattttgtatttttagtagagatggggtctcaccatgttggccagactggtcttgaactccggtgatccgcctgcctcggcctcccaaagtgctgggattacaggcatgagccactgtgcccggcctaatataatacgttctt

SEQ ID NO: 449368 - DNA, 563 bp, Homo sapiens
tttgtaaacaaaataaattcctaagcccccaccaactgactaaatggattccctcttggccaaggggaccccagagaaatctgaaaaactgaattaatgacattaaaggaggttggacacacctcattataccccctcccttttggagtttagacacaactgaccaacattacaataaattttaaaataaattaatttaataaaataaaagtaataacttttattaataaaaataataaaattaaagtacttaaaataaatttaaataaaattaaaatagagatcacaagactgaaaaaacagactctttgtggcaataagctaccaaattccaacctgactctggtgtaggattgcgtgacacatagcagacccagagagaaatcaaaatattttaacccaaaatatatttatttgacatattatgaaattgccccacaaagctgtctttgtgggggaaatttgtatctgtagagaatctccattartgcagacaggccttccctttgcaggcctttcctggatctaggagagattaaccaagcatctgatacctttaaaga

SEQ ID NO: 449369 - DNA, 594 bp, Homo sapiens
acaaaaattaaaaattaaaatattaaggccgggtgcagtggctcacacctgtaatttcagcacttcgggaggtcgaggcgggcggatcacctgaggtcaggggttcagcaccagcctggccaacgtgaagaaaccccatctctactaaaaatacaaaaattagccaggcatggtagcatatggggcctgtaaacccagctactcgggaagctgaggcaggagaattgcttgaacccgagaggtagaggttgcagtaagctgagatcatgccactgcactccagcctggatgacagagactctgtctcaaaaaaaaattaaaatattaaaatggcagattaactataaagaaatggccatcacatgggtagcaaagcacatacaraaataagcaaaaatgaatgctaaaagatcacggagaaatatcttcaatgtacctaaagtaaagaactctgagactaaacttctacatataataaactatcattgaaggaggaagatcattaaacaaatatacagatattaaaaaaacaaagtttatgcctcagtgacatctgcaaagaaactactgaagaatgggcatcagccacaaaac

SEQ ID NO: 449370 - DNA, 607 bp, Homo sapiens
acatggcagataagcatacactctccaaagtgctagtcagcaaacacctgagacataacagaaaaatgagaatacacttaatattttatcaacagtgtactaaaaatttcagttaacataactaaactatcaggtcccccaaatgagaagtcattttaaagccatatctaccaattccctatgtatattatgtaaattactgtattgttctctttgttaaaatatcagtgtcttgcctcagattatgctactaacaggagagttttcagaaagatatttctttggtaaacttatttttcttctcggaacaaataattactgaagaaaacaaagctaagagaccacacttcccctgactctgagtgctgagttggataaattactgttttcaagtaagcagaaagcaaaggattatattaaaacaaacaaaaaaaccccagaaaatattagactatccaaatgttaccattatatactaaaggatgaacctgaatacaggattattccccttaatatgattttaccctatttggcctcaaaaaggttgaaygacaggactaagtcatcaacttcctctccccaggaagatgctgggatgacaagaaaa

SEQ ID NO: 449371 - DNA, 593 bp, Homo sapiens
gcaaagaaggaatgggggggaatagagagcagagctaggggcaggagacagctgacgtgtgagcagacataaaaagaagtccactgtggcagcagagaagcaggagagaaggcaagtgagggagccaggcaccagctcacagaggtcatgtgtgtcaaaacgtagtaatggccttctcttctggagacagtagggagccatggaagatgtttgagcagggaaarcgacatgactggattggcctgttgggtaactcagaccacaatgcattggaagggagggggctagaggcaaggggactggcaagaaggccagtcctttttctatgcctattttgatgaaatattctagaagggaagtgaacaaaggtagtcctagagaggaagaacaaaacagataggatacttccttagtatttgctcattcgacaatttatttttgcatatacactaaaaccttttttattattaaaacgttttattgtaggaaaaaagtatgaaagtagagtgaataataaaatgagctcccatggatctatcacccagcttcaactattatcaatatttggctgttcttgttttaactgttctcca

SEQ ID NO: 449372 - DNA, 514 bp, Homo sapiens
  misc_feature (1)...(514): n = A,T,C or G
tgaaattcctccttctttcccatttatggcctccatttacagaagcgtgtactgtctctcttagctgtttgccaggccgccagtctcttgctgttcagctctcaactgcttccagcaagatctttctaaaatcccaggcttgccawgacttagcgcccacagctccacagtgactcctcattgctgttaaggtaaaggccttcccagtctagcccttcatgcttcttccatgttctatgggactgccccaggcttcccacctggtaccactgagcctttccatccttcccccactcgactgncaggtcaacacccacacccacgcttcaggactcaggtcctatgtttcgggccttcttctgtgcaccattcccttccctgtagcccttgatcatgatttgtttatacgcctccgcaccttcatggccctgaacccctcaagggccgaaactgccttacttttctttttgacttcccaacttaccttagtggagctgtagtcacatagaataga

SEQ ID NO: 449373 - DNA, 504 bp, Homo sapiens
tttgactgccgttctcgaccacatactgtgccagtcatcactggtagcaaatatttacagaatgtcaacatcacactgtgcatcctcttccggcccgtctctagccagcttcctcgcatcttcgccatcaycggagaggactatgatgagcgtgtgctgacgtccatcatgactgagatcctcaagtcagtggtggctcgttttgatgctggagaactaatcacccagagagagctggtttccaggcaggtgagtgacgaccttacagagcaagcagccatctttgggctcatcctggacaacgtgtcctggacacatctggccttcaagaagttgttcacagaagcggtggaagccaaacaggtggctcagcaggaagcagagagggccagaattgtggaaaaggctgagcagcagaaaaaggtggccatcatctctactgagggcgactccaaggaagctgagctgattgccaacgaactggccacctcaggggacagcttg

SEQ ID NO: 449374 - DNA, 538 bp, Homo sapiens
aggaaggaaggagggaaggaatgaaggaaggaaagtaggaagaaaggaaggaaggaaggaaggaaggaaagtaggaagaaaggaaggaaggaagaaaaggaaagaaggtaggaaggaaagggaaggaaaggaaggaaggaagaaaagaaggaatgaaggtaggaaggaaagggaaggaaaggaaggaaggaagaaggaaggaaggaaaaaggaaaaaggaaggaagggaaagaaagaaaaaaaacatggaagtaaatctttgtgccttggggtttggctaagactgctaaagtagtgtatgctaaggcaatattgacaaaagaaaaatagtttcatttgacttattctaaaggtaaaacttctttgcttcaaaaagaatgtcatttagaaagtgaaaagacaacttacagcatggaaaaaatatgtgcaaattacatayctggtaagggactggtatcccaaatatataaagcactctttacaactcaatattgtaaagagaaataatgcaatataaatatgtggaaagtttttgaat

SEQ ID NO: 449375 - DNA, 590 bp, Homo sapiens
tacctgcttaaatcagtacatctttattatttcacagagtcctctaggttgcaagtctgagatggcttgattggtttctctgctcccagttcctcaaggtcaaggtcaaggtgtccacctgctgggctctggttgggaggttctgggaagcatctgcttccaagtgcactcaggttgatggcagaatccagtccttggacctgtgggactaaggtcccagcttccctgctggctgtcagctgcagcccttccctaactcccagaggcccctctccagtcttgctcatggcccccacatctcagagccagcaacagtgcatggaatccttctcatgcttagaatctctctgacattggacgcatatttcttggctccagcctgagaaaattctctgctttktagagctcatgtgatggcactgggcccactcagagaatccaggaaaatctctctattttaaggtcaactgattagtaactttaatgatgactgtacagagcctagactagcagtacctatactcacagtacctagactagcggtgcctagactaggagcagctggtttctctaggcccctcacccctcac

SEQ ID NO: 449376 - DNA, 616 bp, Homo sapiens
cactcgaatctgtggggctccgacagtgtgggccccgcgaggacccccatcctccttgccctggggccgctacaggagggcgccgggacgcactaggtcctgagtgtccagggtccggcaggggcgtcaggttgtcgcctcccggatcccgccgctcgcggtccagggctcctggtttctacgctgggctggggacccggagcatgcatgtcgtggggcggagaaaaccttgggatggttggaaatgaaggatgggagggagaaccagagaaagggagaggaaggaagcagggagggccagagaacaaagagaaacctccgccaggaaaacgggaagaggatgacacaggaacagccctacactccaccaactctcagtctcctgctctctgccttgtaaggaacgcaggccccaccccctccagcctcacagtgtttggggtcacccattctagcggggtgaggcgtcgccttgtgggtgcggttggcatttccctgaggtctgtggacactgagcmccttttcctgggctcactgccatttgcattcttcttctgatgccagtgggcaaggggaggtccctaaacgccggttggaccgcgaccccagccggtgc

SEQ ID NO: 449377 - DNA, 602 bp, Homo sapiens
tttcaatgtcattgcagtaacataaatgtgtgaagtatttaggaaataaatttgacaaagaatatgcaaaacctgtacactgataattaaaaagcattatcgagagaaattaaagatgcatgtataaatggagcagtataacttgtttatggggtagaaaaacacatattcccaagctgtcatttctccttatattaattatagattcagtgtaattctactcatatttccagtaggctttttgggtagaaattgataggagttctaaaattcatakggaaattcacatgggaaggcagatataggtatacagatataaacagatgtgtgtgcgtgtgtgcatgtaaatatagatatatgagaaggtagatacagtctgggtccagtcaagagagggaatctgtacagtaattaaaacagagaaaatataaagaattactaactataacaagggattggagcaaccaggggtaaagagaactctacaggaatagcagctataaggagcagctacgcttttgaatgctgaggcagagcacccgagaaaaagtcccactcctcgcccctctgccaccgcctcaataaggttgaaatacagaact

SEQ ID NO: 449378 - DNA, 554 bp, Homo sapiens
ttgacaaaatggataaatatgttcaaccaaaatgtattgaggacttgttctttgcaaaataccatgcatacacacaattcctgctctgctccagtgagaataaccaggaaccctgaagagaaggcattgcattaagctagttattaccatcagcctggcaaaaaatgttctgtattacagggaagcatataattgggcaaaccaaaaatcttttcagcttttctgcattcaatgctgtaatttcatttatttatcataaaatgtgacttcacaggtttattaacagtcaaatccagatgcaaatgcaaatagagaaatatagtagaaaaccaaatagcagattctcattatctgccttttgttgaaatctatgccaatgctctccattgtaaagaagkgctgaattacagaattttaggcctgagagaaacctagaaattatttacccaattcttcccagttatgtctaatcctgaagtccaaagaacataactagtaactgtgagactaccagtaactcatgaaaacttgttggccatatctatgaaagctga

SEQ ID NO: 449379 - DNA, 578 bp, Homo sapiens
attatgacagattcagggaattggttcagggttctttgcatccaaaattcaaataagtaatcaaagtgaaattgcattagctgacctcctcagaccacctctgaaatacagtaagcatttattaagaatacccaaaataacagcatgacataactgcttctatatttcacaaatgcctttggctaarggggaggaggaatggagtcaggtaggggagggcacgtgagggaggaggacacaggaggaagagaagaagctacttgcacaaagataaatggaactcttattttaataattgccacagcagtatttttcttaagtcaagattaaaaatatgacgagcttacagaatgttatcgtccacagcaaaagtaatataaaaacaattgttattcccacataaattacttaatacaactgctactggttttacagattagtgctagcactgatgggccattgtataaaaaagacattctttctctgtattttttagtcttcagcttttggtattcctttgtctctttagtatattcttatgtcttatcttgaagtataatgaaatatttcactagtaa

SEQ ID NO: 449380 - DNA, 619 bp, Homo sapiens
gctcccaaagaatatcacgcatgatggggtgggatgcatataggccctttttaactttaagttccttttttaggttgccaggtacaagacttgataacttaaaagtccctcccagcaatggacaagtgacctcatttaaaaatctgattggaataaacttcacccaggccagactctccttagctttaaagattaacaaaaggtgcagagattgtagtgtctacattcctgcacctccagagagttctctggtaactctgccaggaaggtaggtgggccccttgagcataagtgaattggaacagcctgttttaaaacaggcaccagaacctggctacagaatgtttactgtgcagtctcctggagtgactaagtgggcaggcatctccaggagcccagccaggagagccctgctttggagagacacgtccccacctcccacatgctcccaaccaccaccctctctgccttcctgccactgggtgtgcaatgacacaggagacagagtgagtctatctgaggtgctataaaatccatcagtgcatatgaagaagaaaagctaaaaccgtggggaccacaatttatttccaaattttrtgtccttcaaaatcatgttgca

SEQ ID NO: 449381 - DNA, 593 bp, Homo sapiens
cataataagccctcaatgtcagtgactattattttaaattattatttgtattatttgtattacttagtaggaaggaacattatgaagatgctgaaaccaatctcttcagcagtatacaggaaaggtttcttgggtaatcattcctaaacttcatcttcaaattgctaaattcttctttatagaycttttaaataaaacaaatatatgaaataaagtggaagattctcttccatcattcatcatcagccccttttgtcctgagttatgatggcatcaattcataatgttatttttccctttttgtttgcttcagggaccacacagaaagctctacagaatgtgtgcagcctagaagcctaacctaatattgaatgtgtttcctcttatcttcactgttcctgcttctctgtcccctaccttcagttatacccttcttttattctctctctgattctctcatttcctccttgctcttctccatttctcttctggcattcagtaagggagtacatggaaaacagaaaaggagcgtggatatgtgtctttgatctcaatgtgcccagagcctggcacagtgcctaccacttcagggg

SEQ ID NO: 449382 - DNA, 568 bp, Homo sapiens
ctccttttaagtttggtaattacaaatgcaaaatgagtatcctcctgcagacagagccagaggactactcaagctgatgcaataacgggagctgtgataaataatctatgcctgttatggaaagctgaatggaggacagaaatgaagaacccatatgaaaatttggaatttgctcaaagctattctcaccataactccagggaagataagcagtattccaccctgcagttctgtataatttatcaacctttttccttttcatttctaacattcacccttcatggttaactgaagaaacaaagagctaaatagcttccttagccatttgatagagcaattatgagcatcctgactgatacactttctgcttaatctactaacaaatggtgtccattttcctcttaatctctaccccatctcccattcgacttgacacstgcacaacactgctttttgtgccctgttcctgtgcccctcttcatttgtttctttctcattacagtgctcttacgtaattattattacagaaggaaaacgagttctttatgacaattttcctcagctgccc

SEQ ID NO: 449383 - DNA, 564 bp, Homo sapiens
tttagagaagaaaggtgcctctggcaataaaaagaaaaaaagttttgaagcatgttaagaatgctaattttaatactgcaatttaagaaaatgttagcatgcctaagaaggggagacttttagtatcattttgcatataagcttattatatattattttataggtttattaaatatttataaagtttcctaagatttttagctgtacttttgctatcaatgttacttaagaataatatctcagtactcttttcgttttaggttattttatttagagaacatagtcagtggcagggtatagggagaagcaaaaaagctgggaagaaagacttagaaaagtcaaaaagagaaagaaaaggatcacaggggtctcagaawtgaaaacaggcctctgtaaaaaggcagaatagagagggaggctaaaaacagaagatgaggggtaggcccccttcttttttagaagagttattggcaacatactgcacacttgatgggaacttgggaaaggcctgattattgaatgtgcaaaagaaaaataaatggggcataattagtgatgtcctgg

SEQ ID NO: 449384 - DNA, 625 bp, Homo sapiens
tagtaaagccctacgctcctcagctggccttatttcaggtatatgagaamagagcttccaggtaagcttctttcatgatctaagagtgagaccaatatcaccaaacctgtctaaattcattgacagccaggggaggtcacatagcaaaagcatctagtccgaacatgtttcagaacccaggactgagcagaggacatggagggaaacatcaggttccccaaggccattgtcctcaaacatgtgacatcctgatagtcaccactgataacttcagtaagtatcacttcgatttcacccccttcttctactcacaactaaaacaaaacaaaaacatatgtaattaaaatatgtcattgctatgctcaaaatgataacttatgaactgggatttcaaattcaccttgttattctgaagcagagccttcagtttatggttgccctgctgttaagcctcaagttgctctttttttttttttttttctgagacaggtcttctctgtcacccaggccagagtggagtggcatgatcgcagctcactgcaacctccacctcttgggttcaagtgattctcctgactcagcctccctagcagctgggattacaggggcccaccactgtgcccag

SEQ ID NO: 449385 - DNA, 625 bp, Homo sapiens
tagtaaagccctacgctcctcagctggccttatttcaggtatatgagaacagagcttccaggtaagcttctttcatgatctaagagtgagaccaatatcaccaaacctgtctaaattcattgacagccaggggaggtcacatagcaaaagcatctagtcygaacatgtttcagaacccaggactgagcagaggacatggagggaaacatcaggttccccaaggccattgtcctcaaacatgtgacatcctgatagtcaccactgataacttcagtaagtatcacttcgatttcacccccttcttctactcacaactaaaacaaaacaaaaacatatgtaattaaaatatgtcattgctatgctcaaaatgataacttatgaactgggatttcaaattcaccttgttattctgaagcagagccttcagtttatggttgccctgctgttaagcctcaagttgctctttttttttttttttttctgagacaggtcttctctgtcacccaggccagagtggagtggcatgatcgcagctcactgcaacctccacctcttgggttcaagtgattctcctgactcagcctccctagcagctgggattacaggggcccaccactgtgcccag

SEQ ID NO: 449386 - DNA, 608 bp, Homo sapiens
  misc_feature (1)...(608): n = A,T,C or G
tgttcaatttcatgttttcaacgaaggttgaattactcctactgacattgctgttggttttccttgcagtagatgtttaggtttccatttcttnctccccttatcatttactaacttactgtaggttgaccatacctcaaaggctgtatggcaactgcatggaatcttaagcaagtttatggaaaattattgagcccactcttttcatgatcactgttctctgtgtgtcccgagggcactaactcagagtgtcctttgacccnttcatcagtgtgtcacccgrccaattcgctgagctcactttctcctctgtctctctctccctctccctctccctgtctttctctttcattcttttctacctggccctggtctatcccaacataaaggcaataattcattacctcattaatggatctgtcctttttctgtttaaacagttccttatgttagccatgaaatgtagctggggctgtgtggtttctgattccccctggcttattctttactttttcctacttttccaggctcagcagggagctgctggatgagaaagagcctgaagtcttgcaggactcactggatagatgttattcgactccttcagg

SEQ ID NO: 449387 - DNA, 583 bp, Homo sapiens
  misc_feature (1)...(583): n = A,T,C or G
ggttgaattactcctactgacattgctgttggttttccttgcagtagatgtttaggtttccatttcttnctccccttatcatttactaacttactgtaggttgaccatacctcaaaggctgtatggcaactgcatggaatcttaagcaagtttatggaaaattattgagcccactcttttcatgatcactgttctctgtgtgtcccgagggcactaactcagagtgtcctttgacccnttcatcagtgtgtcacccggccaattcgctgagctcactttctcctctgtctctctctccctctccctctccctgtctttctctttcattcttttctacctggccctggtctatcccaacataaaggcaataattcattacctcaytaatggatctgtcctttttctgtttaaacagttccttatgttagccatgaaatgtagctggggctgtgtggtttctgattccccctggcttattctttactttttcctacttttccaggctcagcagggagctgctggatgagaaagagcctgaagtcttgcaggactcactggatagatgttattcgactccttcagg

SEQ ID NO: 449388 - DNA, 583 bp, Homo sapiens
  misc_feature (1)...(583): n = A,T,C or G
gaaaattattgagcccactcttttcatgatcactgttctctgtgtgtcccgagggcactaactcagagtgtcctttgacccnttcatcagtgtgtcacccggccaattcgctgagctcactttctcctctgtctctctctccctctccctctccctgtctttctctttcattcttttctacctggccctggtctatcccaacataaaggcaataattcattacctcattaatggatctgycctttttctgtttaaacagttccttatgttagccatgaaatgtagctggggctgtgtggtttctgattccccctggcttattctttactttttcctacttttccaggctcagcagggagctgctggatgagaaagagcctgaagtcttgcaggactcactggatagatgttattcgactccttcaggttatcttgaactgcctgacttangccagccctacagaagtgctgttcactcattggaggaacagtaccttggcttggctcttgacgtggacagtgagtaccttactatgaaggtgataagcctccacctggtcttccagataggggtgatattcct

SEQ ID NO: 449389 - DNA, 236 bp, Homo sapiens
  misc_feature (1)...(236): n = A,T,C or G
attcgactccttcaggttatcttgaactgcctgacttangccagccctacagmagtgctgttcactcattggaggaacagtaccttggcttggctcttgacgtggacagtgagtaccttactatgaaggtgataagcctccacctggtcttccagataggggtgatattcctgttcccagtggcccttactgacccgagagatgtcattgccgcaggcaggacctatgggcgcata

SEQ ID NO: 449390 - DNA, 493 bp, Homo sapiens
  misc_feature (1)...(493): n = A,T,C or G
tttctgtttaaacagttccttatgttagccatgaaatgtagctggggctgtgtggtttctgattccccctggcttattctttactttttcctacttttccaggctcagcagggagctgctggatgagaaagagcctgaagtcttgcaggactcactggatagatgttattcgactccttcaggttatcttgaactgcctgacttangccagccctacagaagtgctgttyactcattggaggaacagtaccttggcttggctcttgacgtggacagtgagtaccttactatgaaggtgataagcctccacctggtcttccagataggggtgatattcctgttcccagtggcccttactgacccgagagatgtcattgccgcaggcaggacctatgggcgcatataggttgtaatgaaactgtagtctccgctggaagcctagacatgaaatgggtcagtgagcaaggctctattcctagtctccagccatgcc

SEQ ID NO: 449391 - DNA, 236 bp, Homo sapiens
  misc_feature (1)...(236): n = A,T,C or G
attcgactccttcaggttatcttgaactgcctgacttangccagccctacagaagtgctgttcactcattggaggaacagtaccttggcttggctcttgacgtggacagtgagtaccttactrtgaaggtgataagcctccacctggtcttccagataggggtgatattcctgttcccagtggcccttactgacccgagagatgtcattgccgcaggcaggacctatgggcgcata

SEQ ID NO: 449392 - DNA, 493 bp, Homo sapiens
  misc_feature (1)...(493): n = A,T,C or G
tttctgtttaaacagttccttatgttagccatgaaatgtagctggggctgtgtggtttctgattccccctggcttattctttactttttcctacttttccaggctcagcagggagctgctggatgagaaagagcctgaagtcttgcaggactcactggatagatgttattcgactccttcaggttatcttgaactgcctgacttangccagccctacagaagtgctgttcactcattggaggaacagtaccttggcttggctcttgacgtggacagtgagtaccttactatgaaggtgataagcctccacctggtcttccagataggggtgatattcctgttcccagtgscccttactgacccgagagatgtcattgccgcaggcaggacctatgggcgcatataggttgtaatgaaactgtagtctccgctggaagcctagacatgaaatgggtcagtgagcaaggctctattcctagtctccagccatgcc

SEQ ID NO: 449393 - DNA, 635 bp, Homo sapiens
caaagagcaagacagagtgggtggcgttgaagcatgggggacattagaacctgtcaaggctggagaatgattcattgaggtaatgatgataaacacttcatctctgagcatctatgtgcattttacctaacaatctcaagcgtccatacttgaagaaaggctcagaataagtcatacgaacacacccaaatgggaatcccttaggaatgggatctgaattgtaaatgcctgcctgaatttcacacatcaaattacaataaacagaatgatattttaagcagcttggtacttaaagggcaccatgyggagtcctgaggattttcttttactctagaattccagtctgtgccagttggagctttgcatatctctcgctcacttggacatttctggttgtggattctaaagtgaaacagaggtttctcatcaatagccaagtccttctcttgccacaacatagttcctgtaaagccaggtgcctccgcaatagaagataatgcctgtgagattgaatacacatggacaatagccagatcatatacaaaaatagaactccaacccacgacctgcagcaactagccaaggaaaccaatcccttatctatagtaaccaatccaggaagccagcccactgtc

SEQ ID NO: 449394 - DNA, 575 bp, Homo sapiens
ttacagactttataaagaaatgtggtgaaggggctgcagagtggtattttggtcttgtcaccaaccaagaaaatggaaaagaagtatactgaaagctgctaaatgcagcaaacaccacccctggaagggaactggaaggggccatgtatcaagtaggggttccttcagttgagtgtgacagaaaaccgaaaataggggccatgcacggtggctcatgcctgtaatccctgcactttgggaggctgaggcaggaggattgcttgascccaggagttagagacaagccctggtatatctaactcatctctgcaaaaaataaaaagaatcagctgagtgtagtggcatgcacctgcagtcccaattacttggaaggctgaggcaggaggattgcttgaggcaggaggtcgaggctgcagtgagccgtgatcgcgccactgcactccagcctgcatcacagagcaaaatcccgtccaatgccaaatagttacgtcttattcaagatagatgcattttctttctttccataaaaggagcccccagggtagatagtacgcttaggtacagtagctccacaa

SEQ ID NO: 449395 - DNA, 610 bp, Homo sapiens
tattttgatacacatgataaaaatctcattgaattggctatctcaaacccatgaagcaggcaatattattattatggttcagtaggattaggaagtctgtttaggcccaaccaggatcgaaatccagatgcatctggtttcaaaatatttaatgctttctgaaaatgtaccaaaactgttggacttcaggaaaaaaaatagccttggtgtgagaagcttttcccagtttgtcccatatgagaacattgtttggtggtagaaagaggcattttaaagctgaggaagatrtggtactgcaatattaatataaagagaaattgcaacagaataccgaccaatctgtcttggtcagaccattctgtgtaactataaaggggcagtatttttggctcctgagtcctttaagcagtgttttgttgcttctgcaacagcgacatagtaggtcccagctgaatttgtgttgcagcctggtgggcagccggtgtaaacaatccaaactgaatttccttgcttgcaaatactatggcagatccctgaatgcagagcagatgtgagaaataaactcttgaaccatttatatctgttgtaaattggaaggggaaaaaacatc

SEQ ID NO: 449396 - DNA, 566 bp, Homo sapiens
gattgtgaagaccaaaaacacctctagatttgtccatttcagagctgctggagctccagagtctctctcctgtgaagacttcttccccaaaatgcggccttggcgatgtattcacgaaatattcattttggctcctgattttktattcgtcatcttgtagtctttttcttttcctttcaggaaaaggcttcttcaaattgtataagcttcagactttgaaaagctgggatccatacctgcaataatgtatatactagatgtactggtacaaacgttggatacctactatatcctcagcactgtgctgggtgccgggacatgtgcaggaaaggagcaggaagcttcctactcgatcagttaaccacaccagcacataaaataactagccagcgttgcaatgcaatatgtaatcaaagactaaattgtgtaatccaaattatgtgcacagtagcctggaaattcacagggggaaatagaggttattaaaggatgtgaagcaattctggaatgcttcactgaagaagttttaagtggagccagaaaagtatgggagaaaggaaaaagaa

SEQ ID NO: 449397 - DNA, 600 bp, Homo sapiens
agaccaatagaacagaacaaagagcccagaaaaataactcccacatacatggtttagttatgtttaacaagggtgccaagtccatttaatggggaaaagacaatcttttcaacaaatagtgccaggaaaacagatatccagatgtaaagaatgaaattggatgtttactttatactatctccaaaaattaactcaaaataaattaaatacctaaacatgacagctaaaataatcaatatttacagagcattctgcaaagaaaagacaaaagttttagagaatgtgactataaagaagtcatatgtgggagtttgagggtttataaagcagttttcatatgattgtggtgatggttatatgaatgtatacatgtgttaaaatatatagaactatatacaccaaaaaacaagtcaataaaattttttttcagtaacatagatccccatgtttcatctatgtccatcttatccattttctcctagtcatagaatccatatctaagcyctctccattggccactggagtgatacttgcacttttccaggataagagaatagctaataaccaacttcacatgttaggcaaacactcaacaacatc

SEQ ID NO: 449398 - DNA, 599 bp, Homo sapiens
ggatgatgggtttttatccatttttgacaacctgacaggacaacaactgggacttaccctcaagctaaaagccttaagaatgtgggactcactcagttctcttccttggtttagcttttagtgcttctctagtatctgcctgcttttatttgctccctggtgccttaaagtagttgttttttaatattttgtctcaaggatattttttattatttgtgaaagtgctgagtttataggagctaatatatcattaccaattaatcacttttgaccatattttttgtgattttctaaaattggggatgtcatgcaacttatataatggaatttstgtgattatcaaaaactttcaaatttgagtaatgtatatgaataaaataatttcattgttacttgtttgaaactgcccttttacttacagacattgtgccaacaactagggactattagaagtttacagaagaaactgagtgaaaaccacctatctgtctaacagatatacttgccttttttttcttttttttcctcactacctatctgtataatcgatatacttgccttttttttcctcactacattttttattttaccttttttta

SEQ ID NO: 449399 - DNA, 564 bp, Homo sapiens
gtgcaaagtttcctgaaatgctcccaaaagctcccatagttgtgctgtagtcactttgtaaatgaccatgttagacaaatacarttgggttcatgaaaagatgtcttagtgccttcaatacaccaagaggcagaaagaatctcagaagcctcgttgctcaaaatagggcttatggaccagcagcatcgcgtcactggagcgctggttaggaatgcggatgctcaggccccacatggacctactgagctagcatcatccccaggtgatctgcatgcacatcaagcattgtcttacaggactgtgcagtatggagtgttcgccaaacaaatgtgtctgtggagtcctacgctgggcacttcctgggattatggggaattcactttgggatcactgtgatataagtgttcatagggacctgcagcctcccccacaccatgcccgactgtctaaaacttctcccaagagaacttgatggctcagatctcaggcctgagaggagtgaaaaaaggctcctggcacctaaccacccagctgtctaaactcttctcgccctccccacagtcc

SEQ ID NO: 449400 - DNA, 564 bp, Homo sapiens
gtgcaaagtttcctgaaatgctcccaaaagctcccatagttgtgctgtagtcactttgtaaatgaccatgttagacaaatacagttgggttcatgaaaagatgtcttagtgccttcaatacaccaagaggcagaaagaatctcagaagcctcgttgctcaaaatagggcttatggaccagcagcatcgcrtcactggagcgctggttaggaatgcggatgctcaggccccacatggacctactgagctagcatcatccccaggtgatctgcatgcacatcaagcattgtcttacaggactgtgcagtatggagtgttcgccaaacaaatgtgtctgtggagtcctacgctgggcacttcctgggattatggggaattcactttgggatcactgtgatataagtgttcatagggacctgcagcctcccccacaccatgcccgactgtctaaaacttctcccaagagaacttgatggctcagatctcaggcctgagaggagtgaaaaaaggctcctggcacctaaccacccagctgtctaaactcttctcgccctccccacagtcc

SEQ ID NO: 449401 - DNA, 497 bp, Homo sapiens
catcttgaacggggtgtgggtaaaggctgcagaaggacttgatgtcccttaagcccagcctcaggctgcarcgagccaagattgcgccactgcactccagcctccagcctgggcaacagaacaagactccatctctaaaacaacaacaacaaaacaacaaaaacagcctcaggtggcacttcttccaggaagccttcctgttcttccccagtcacaattactataccagttcccctttgcttccaggactctgtcctcctgaaacagcactgtttaatactcctgatagaataacagatgcgactatcgccccacagtgctgtaagctgggatggcaggtgttgggacatatggatccatttttccagcccattagaagatgaccatgagaacaggtcacaagagccgattggcattaccaaggagaagaagtctcccagaaaggagctgcagtgtttagtgatggcaggcacgtgggcactggggaaagagagtgg

SEQ ID NO: 449402 - DNA, 497 bp, Homo sapiens
catcttgaacggggtgtgggtaaaggctgcagaaggacttgatgtcccttaagcccagcctcaggctgcagcgagccaagattgcgccactgcactccagcctccagcctgggcaacagaacaagactccatctctaaaacaacaacaacaaaacaacaaaaacagcctcaggtggcacttcttccaggaagycttcctgttcttccccagtcacaattactataccagttcccctttgcttccaggactctgtcctcctgaaacagcactgtttaatactcctgatagaataacagatgcgactatcgccccacagtgctgtaagctgggatggcaggtgttgggacatatggatccatttttccagcccattagaagatgaccatgagaacaggtcacaagagccgattggcattaccaaggagaagaagtctcccagaaaggagctgcagtgtttagtgatggcaggcacgtgggcactggggaaagagagtgg

SEQ ID NO: 449403 - DNA, 497 bp, Homo sapiens
catcttgaacggggtgtgggtaaaggctgcagaaggacttgatgtcccttaagcccagcctcaggctgcagcgagccaagattgcgccactgcactccagcctccagcctgggcaacagaacaagactccatctctaaaacaacaacaacaaaacaacaaaaacagcctcaggtggcacttcttccaggaagccttcctgttcttccccagtcacaattactataccagttcccctttgcttccaggactctgtcctcctgaaacagcactgtttaatactcctgatagaataacrgatgcgactatcgccccacagtgctgtaagctgggatggcaggtgttgggacatatggatccatttttccagcccattagaagatgaccatgagaacaggtcacaagagccgattggcattaccaaggagaagaagtctcccagaaaggagctgcagtgtttagtgatggcaggcacgtgggcactggggaaagagagtgg

SEQ ID NO: 449404 - DNA, 497 bp, Homo sapiens
catcttgaacggggtgtgggtaaaggctgcagaaggacttgatgtcccttaagcccagcctcaggctgcagcgagccaagattgcgccactgcactccagcctccagcctgggcaacagaacaagactccatctctaaaacaacaacaacaaaacaacaaaaacagcctcaggtggcacttcttccaggaagccttcctgttcttccccagtcacaattactataccagttcccctttgcttccaggactctgtcctcctgaaacagcactgtttaatactcctgatagaataacagatgcgactatcgccccacagtgctgtaagctgggatggcaggtgttgggacatatggatccatttttccagcccattagaagatgaccatgagaacaggtcacaagagccgattggcattaccaaggagaagaagtctcccagaaaggagctgcagtgtttagtgatrgcaggcacgtgggcactggggaaagagagtgg

SEQ ID NO: 449405 - DNA, 565 bp, Homo sapiens
catggcctccagtgtcaaggacccaccatctaataggagacaagacttacacacatgaagtatattgataacagagcatggaaattctggattcatgtctaaacttttcagaaagaaaacacacagaaacacacacacacacacagcgggttggaatttggtgagtttgtaaaggaagggaggtaaattatttaaggaaatggcacacaaagataaccagaggagaacaataaactactagcaatagggtagttttaaattcagcattatcaataattatattaagtagaaatggtctaaaaaacaactaaaagacagagatgatyagacaataaagaagtaagatcaaaatatatgcaatctgcaagaaactcacttttaatatagatgagcatacatatatgtataaaattatatgatacatacacatgttaaatgcaaaaggatggggaaatatatactgtataaacactaataaaaagaaagagacttgtcctgcttatattaatgccagaaaaaatagactacagaatggggacaattaccagagacaaagaaggacatt

SEQ ID NO: 449406 - DNA, 565 bp, Homo sapiens
catggcctccagtgtcaaggacccaccatctaataggagacaagacttacacacatgaagtatattgataacagagcatggaaattctggattcatgtctaaacttttcagaaagaaaacacacagaaacacacacacacacacagcgggttggaatttggtgagtttgtaaaggaagggaggtaaattatttaaggaaatggcacacaaagataaccagaggagaacaataaactactagcaatagggtagttttaaattcagcattatcaataattatattaagtagaaatggtctaaaaaacaactaaaagacagagatgatcagacaataaagaagtaagatcaaaatatatgcaatctgcaagaaactcacttttaatatagaygagcatacatatatgtataaaattatatgatacatacacatgttaaatgcaaaaggatggggaaatatatactgtataaacactaataaaaagaaagagacttgtcctgcttatattaatgccagaaaaaatagactacagaatggggacaattaccagagacaaagaaggacatt

SEQ ID NO: 449407 - DNA, 587 bp, Homo sapiens
ctcctggtggcactagggcccagagtctggcttgtggagggygaggccatcctgttgggaagaggaggcaggtggggctgcttaatagcagtgctcagcgtatccttggcacctccggcaactctcagttcaagagacacctacagaccacagcacagcagtgatggtgctgacagccttcagggtctaccgtgtgctgtgtgcagtgcagacaggctttggctcaaaagcacctgctgttcttctctctgcctgctggtgcccagggttgaggtgggaaggaaaaaatggggcatggccagtgagaagagcacagactctttgtctgcaaatgccacttgttgtccctgtgccagagcacagctctgtggaccctgaggttctgttgtcctgagttctctgtcacagtggggagttcatggcagcagggaggccaagcctacaacctgtgactagcagacccctgctgccactgagccccttggtctgaactagctggcaccctggtatgagcaggggctcacagcacccacgaggctgctgggggagaaaagccatcaggattcctccctggtctgggacctggc

SEQ ID NO: 449408 - DNA, 587 bp, Homo sapiens
ctcctggtggcactagggcccagagtctggcttgtggagggcgaggccatcctgttgggaagaggaggcaggtggggctgcttaatagcagtgctcagcgtatccttggcacctccggcaactctcagttcaagagacacctacagaccacagcacagcagtgatggtgctgacagccttcagggtctaccgtgtgctgtgtgcagtgcagacaggctttggctcaaaagcacctgctgttcttctctctgcctgctggtgcccagggttgaggtgggaaggaaaaaatggggcatggccagtgakaagagcacagactctttgtctgcaaatgccacttgttgtccctgtgccagagcacagctctgtggaccctgaggttctgttgtcctgagttctctgtcacagtggggagttcatggcagcagggaggccaagcctacaacctgtgactagcagacccctgctgccactgagccccttggtctgaactagctggcaccctggtatgagcaggggctcacagcacccacgaggctgctgggggagaaaagccatcaggattcctccctggtctgggacctggc

SEQ ID NO: 449409 - DNA, 587 bp, Homo sapiens
ctcctggtggcactagggcccagagtctggcttgtggagggcgaggccatcctgttgggaagaggaggcaggtggggctgcttaatagcagtgctcagcgtatccttggcacctccggcaactctcagttcaagagacacctacagaccacagcacagcagtgatggtgctgacagccttcagggtctaccgtgtgctgtgtgcagtgcagacaggctttggctcaaaagcacctgctgttcttctctctgcctgctggtgcccagggttgaggtgggaaggaaaaaatggggcatggccagtgagaagagcacagactctttgtctgcaaatgccacttgttgtccctgtgccagagcacagctctgtggaccctgaggttctgttgtcctgagttctctgtcacagtggggagttcatggcagcagggaggccaagcctayaacctgtgactagcagacccctgctgccactgagccccttggtctgaactagctggcaccctggtatgagcaggggctcacagcacccacgaggctgctgggggagaaaagccatcaggattcctccctggtctgggacctggc

SEQ ID NO: 449410 - DNA, 587 bp, Homo sapiens
ctcctggtggcactagggcccagagtctggcttgtggagggcgaggccatcctgttgggaagaggaggcaggtggggctgcttaatagcagtgctcagcgtatccttggcacctccggcaactctcagttcaagagacacctacagaccacagcacagcagtgatggtgctgacagccttcagggtctaccgtgtgctgtgtgcagtgcagacaggctttggctcaaaagcacctgctgttcttctctctgcctgctggtgcccagggttgaggtgggaaggaaaaaatggggcatggccagtgagaagagcacagactctttgtctgcaaatgccacttgttgtccctgtgccagagcacagctctgtggaccctgaggttctgttgtcctgagttctctgtcacagtggggagttcatggcagcagggaggccaagcctacaacctgtgactagcagaccyctgctgccactgagccccttggtctgaactagctggcaccctggtatgagcaggggctcacagcacccacgaggctgctgggggagaaaagccatcaggattcctccctggtctgggacctggc

SEQ ID NO: 449411 - DNA, 491 bp, Homo sapiens
aataatttcagcgcatctagtgttgaccctgtagctttaattaattcaggtgaaatcccatttggccttgatagcagtaattatttaaagcaagccttgacataacatttcacactatgcatttttccacagtccagctcagcgagcggcctcacaaagctgatatcccaaatattctccaggaaaagtccagtgcttttccacatgggttccaaagtaaaagcccatttatgcaacaaagaagctggagtttatttcaacatagagaagatgcaaaaggcaacctcttcttaaataagatggtcttctaattctaatcaaagacagcagggggccccatctaagatgtaataacgtcgcaccaccrcggcaaagactataggtaaaaactcacctctccaatcatgccttctgcaggaaagccggcgcgctctctgctgcgggcataattgcccaggtgccagtgtttgcctcactcccaagcacttgct

SEQ ID NO: 449412 - DNA, 562 bp, Homo sapiens
ttgagacaaagaaaaatatcagcacagacaacagtgatagaaacaaactattattatgcaggcagaataataataatcccagatggaagttgagtgatacagagaggaattaagaacaaagagaatggtaactatgtgggtatatttaaaataatataataataatgtttaatgggttttaacaagtatagagtcttaaaatacataatagtatacaagttggmgggtggttaatggagctaatgtgtcctaattagaaggaaataaatacacatattaggaaaaaggctaataattaatcattaagaaatctacctacagaagcaaattaaaccctaagaaagtagaaggatggaaataattataagagtataaattaaagtaatagaaaataaatatacaatacagagatttaatgaagccaaagtggaatctctgaaaaggggcaaagccctgcctggtaccacaagaattcaggactgcaaaggggttagtgccacagaccctgcagccaccacacggatcacaggtgaccaatccctgggagaaatttcacagagat

SEQ ID NO: 449413 - DNA, 562 bp, Homo sapiens
ttgagacaaagaaaaatatcagcacagacaacagtgatagaaacaaactattattatgcaggcagaataataataatcccagatggaagttgagtgatacagagaggaattaagaacaaagagaatggtaactatgtgggtatatttaaaataatataataataatgtttaatgggttttaacaagtatagagtcttaaaatacataatagtatacaagttggagggtggttaatggagctaatgtgtcctaattagaaggaaataaatacacatattaggaaaaaggctaataattaatcattaagaaatctacctacagaagcaaattaaaccctaagaaagtagaaggatggaaataattataagagtataaattaaagtaatagaaaataaatatacaatacmgagatttaatgaagccaaagtggaatctctgaaaaggggcaaagccctgcctggtaccacaagaattcaggactgcaaaggggttagtgccacagaccctgcagccaccacacggatcacaggtgaccaatccctgggagaaatttcacagagat

SEQ ID NO: 449414 - DNA, 562 bp, Homo sapiens
ttgagacaaagaaaaatatcagcacagacaacagtgatagaaacaaactattattatgcaggcagaataataataatcccagatggaagttgagtgatacagagaggaattaagaacaaagagaatggtaactatgtgggtatatttaaaataatataataataatgtttaatgggttttaacaagtatagagtcttaaaatacataatagtatacaagttggagggtggttaatggagctaatgtgtcctaattagaaggaaataaatacacatattaggaaaaaggctaataattaatcattaagaaatctacctacagaagcaaattaaaccctaagaaagtagaaggatggaaataattataagagtataaattaaagtaatagaaaataaatatacaatacagagatttaatgaagccaaagtggaatctctgaaaaggggcaaagccctgcctggtaccacragaattcaggactgcaaaggggttagtgccacagaccctgcagccaccacacggatcacaggtgaccaatccctgggagaaatttcacagagat

SEQ ID NO: 449415 - DNA, 433 bp, Homo sapiens
atgcctgagaagtctcatattgatatggtttagctgtgtccccatccaaatctcatcttgaattgtagctcccttaattcataygtgttgtgggaaggaccccgcgggagataatcgaatcgtggggggtggtttccctcatactcttctcatggtagtgaataagtctcataagagctgatggttttttaaagggaaaccccttatgcttggctctcatcctctcttgcttaccacgatgtaagatgtgcctttcgcctctgccatgagtgtgatgcttccccagccgcatggaactgtgagtccattaaatctctttttctttataaattacccagtctcaggtatgtgaaaactgacaaatacacatatctgtgggatggaaatacattgtttatgagggtggaaatagaaggatatcagaattcacatg

SEQ ID NO: 449416 - DNA, 549 bp, Homo sapiens
taaagcctaaaccatgtaatgtctcgggcttcctctgctttttcaactaaaatcggctcttttccgggacaaatacgaattggaactctggctttgctggcttttcataactcaccaagtgctttttgttcctgttatatcccggggctaagttttctaatggctcttaaaagctgcttgtccacctgcacagaccttcaatctggccctttttaaggactccacccacttgctttttaagwtagcaccactttaggaggtggagaaattcttaccccaagccgcaagtcctcaggggttactgatttatgtttgaacttttgttccagaaggtgaacaaatgttgcactcttgaatccaagggctgctgtttttgcaagcatttgaggggtttccatgagtgttccttccacttcctcctttagctcccatttcttgaactacttccacacccttctcaacaggcaacagggccttcaaagtcatattctaggggagagaattccagcccctgtagcagttaatggagaaataagcttctaagaaaag

SEQ ID NO: 449417 - DNA, 414 bp, Homo sapiens
ataaaagttaatgaggtgagtcaggtaagactggaagattattttatgcaacagaaaataagcactgtagactctggttgtatttggtgagaaatcctctttgaaaagccagagccttcagagtcagcagccattggaggcccaggttcccagacagcagtatctatgtatgagactcaggtyctgagctggggtgcagactccctgaatatctcctgaggtacgactgcagtctctcacatagtgatctctattatgtcagtccttgaatggacctaatgttctgccaatcacacattctcctgtaattcctaaattagttacctaactcaagcataattcaaagactgaaaataatttcaattagctattttggatatagacacctacattctatttttttcttcatttctt

SEQ ID NO: 449418 - DNA, 568 bp, Homo sapiens
atgtcccaatctagcttaccggggactgtgaaggggtgttcaggagaaaaagtctcatagtaagactctgccctatattggtgtcctagagatacgagaggcttcacatgaagagaagccctaggccctaagtcttcccaaaagccttttatctttgtaatggcctgtttaaatatttcaaattttaaactttcctttcccaattcccctatagtttgcttctaaagctgatcctcttctctcttcaagtttctagtgatctctttataaaatccaatttgtactttttctcttcatatttcaaatgctgtagttttactctttggctaattttctctctgcctccaagcaacccaattccttaagccagagttttgagtacaggtctttattttcattttagttcctargttttaatgatttcactgagatgtcccaaccttaatttcaaatgacaacaaattccctgcacagtaacactctccttccttccctctgttcctcggatgccatccatcatgccactgtggtcacacggtgaaattttcatgactgttatttaaggctt

SEQ ID NO: 449419 - DNA, 580 bp, Homo sapiens
atcatgtgactatacagttggaacttccagccccatacagggtcctctagggaggagacaaggtcggagagttgagttgatcaccaacaaccaatgatttaatcaaccatgcytacacagcggagccttcataaaaacacaaaagtcaagtttccagatttctgaacacgtggaggtgctgggagggtggcatgcctggaaaatgcaaagaaactccacattccttcccacagaccctgccctatgcatctcttccctctaactaacttcttctgtaccctataaatgggggtaaacatgtttttctgagttctgagagccattctagcaaattaatccaacccaagggagggtagtgtgaaccctctacttacttttttgccagaagaacttgcagttggcatctgaatgagggcagtcttgtgggattgagcctttaacctgtggaatctgacgctatcttcaggcagatagtgtcagaaatgaactgaattatagtatactcatttggtgtccactagagaactggttgttgggagagaaaatccacacacattttggtgaccagaggtgaggtgtt

SEQ ID NO: 449420 - DNA, 580 bp, Homo sapiens
atcatgtgactatacagttggaacttccagccccatacagggtcctctagggaggagacaaggtcggagagttgagttgatcaccaacaaccaatgatttaatcaaccatgcctacacagcggagcyttcataaaaacacaaaagtcaagtttccagatttctgaacacgtggaggtgctgggagggtggcatgcctggaaaatgcaaagaaactccacattccttcccacagaccctgccctatgcatctcttccctctaactaacttcttctgtaccctataaatgggggtaaacatgtttttctgagttctgagagccattctagcaaattaatccaacccaagggagggtagtgtgaaccctctacttacttttttgccagaagaacttgcagttggcatctgaatgagggcagtcttgtgggattgagcctttaacctgtggaatctgacgctatcttcaggcagatagtgtcagaaatgaactgaattatagtatactcatttggtgtccactagagaactggttgttgggagagaaaatccacacacattttggtgaccagaggtgaggtgtt

SEQ ID NO: 449421 - DNA, 594 bp, Homo sapiens
ggcaatttcaacattggcttgtttttttctcattaatctgggtatacccttcaaaaactgccacaccacatgtcattagcaagtggatgatctagaaagggtcattgtgataacaggaagatagaccatcatctgctcctcttctgccttgtgtcccaagagcagctgctctgctggcaggggccgatggttgccactgttgtccaaacaggtcacctctatccccaggctccacagagccacttgattcatgctaatctacaggaattgtgtatatattgcagcatattgccataacaatgaacacacggaccactagtttgcagttacataataaaaacagtagcctaaattctgcataattatttttatggtgtcaggtacagctatatacttaagttttgagcaagtaacatacttttgaatataagtgaatttgaataacatatctgtctatgtaatgggtgtacaggtaaaggtaattggataatcagtctaccgttagatacctaatatatggaaagtgtaattaagatgattaatgctgactttaaacyatttaaataatttgtgatataagccttaataaaatac

SEQ ID NO: 449422 - DNA, 615 bp, Homo sapiens
ttaaattactttgattatttaatagagatatattttttcaaccagaaagtattgaacatagacagttttcggctgggtttgcactgtaaagtggcccaccgcttctcctgccgattttctatcaaattgttttatttgttattcctttaatctcttgtattagtttgtcagatgccatccatacatctctgaattttgttttcttctttttttctttgggtgtctattctgcagttctttcctgagaggacctaatgctttgcatcttgtggttctgtatatcataaaataatgtattacatattagctccagtttttgccagctttacagaatttctaaatcaattttcaaagcagattaaccataaatatcaagataaccgggaattaattggttccaaaggtaaaactattctgtgatgctccatgccatcagaccatttccaagattataatatcttcctttttccrcacttctgaattgtttaggcacacgcattgccatagagaaactggaaagtagctgttgcactccaggattgtctatgcctgaagaaaattaagaaaacaagtgcacaaaaagatgccccattaaagtaaaaatgggtatgatgc

SEQ ID NO: 449423 - DNA, 615 bp, Homo sapiens
ttaaattactttgattatttaatagagatatattttttcaaccagaaagtattgaacatagacagttttcggctgggtttgcactgtaaagtggcccaccgcttctcctgccgattttctatcaaattgttttatttgttattcctttaatctcttgtattagtttgtcagatgccatccatacatctctgaattttgttttcttctttttttctttgggtgtctattctgcagttctttcctgagaggacctaatgctttgcatcttgtggttctgtatatcataaaataatgtattacatattagctccagtttttgccagctttacagaatttctaaatcaattttcaaagcagattaaccataaatatcaagataaccgggaattaattggttccaaaggtaaaactattctgtgatgctccatgccatcagaccatttccaagattataatatcttcctttttccgcacttctgaattgtttaggcacacgcattgccatagagaaactggmaagtagctgttgcactccaggattgtctatgcctgaagaaaattaagaaaacaagtgcacaaaaagatgccccattaaagtaaaaatgggtatgatgc

SEQ ID NO: 449424 - DNA, 448 bp, Homo sapiens
ggcagagacacctaaatgtgatctgcagaggattgcatagagaaagctctgcctgtggctgacatactgagaactaacctgggcgccttacagcaaaaccatccatgaagcagatgtggtggggctttcctgatcttttagggcccagatgcatttcactgagatgcatgttgcctttttctgaaagcgtctcataattagtctttacatgtgtttcaatctggtttcacactcgttaactgcttaaattgtagaaagcgcattttatttcagtccactagggggaaccagagggattaggcatkggagctaacaagcctttaacattcttaatactgtaattagagaaatttctaggggttctcaaagtgagctgactttgagagagctgaataggggggtgttttttggtttcatttttgtgttttggtgtgtgtgtggggggggt

SEQ ID NO: 449425 - DNA, 538 bp, Homo sapiens
atgaaataatgtgtatgaagatatatcctaaaaagtcaaatgtgagaatgtcaacattgttcttcttatttgcactggccatttaaacattcaacactaaagctgctgggtgacgttgcagctggtaagttatggaaactgctcttaaatatgatctttccattctcataatccaaaatgcttttttattcttgtttcatttgaatgatttatttaaaaaaatcacagccttcctactcttcaggctttacagaaccgatattttttgggtgcatactatgtgtaaggccctttgcattctgtgaaaaacaacaaaacaacacttctctgtagtattctgtcaagcctgcacatatctgtaattccaaaaaaggtcttgccaaaagcagttgaattcygacctgaattagcaattttattaattacatttcaagcaagccaattacttgtttgtttaatggatttcttattatgaattgattatagaccattaatgttcgttaacacaccaaactagatttcatgtcccctgcaccat

SEQ ID NO: 449426 - DNA, 568 bp, Homo sapiens
catcttcatgcctcacactaatgttctctggagaacatccatcactgagaggctcttagcaatgaggaaaagaggctaccccttgggtagatgtcagccagcctctattcttggcactccaatgctagtgcaatggacccatcaacatagtagctttgtcagcaggtatggaggccatgcaaggccccaactgtattggctcattctcaccaagctggcatagctactgtatctacaaagttctgacttgtcagcaacaaaaaccaataacacacattcagcagagtaccaaccttcaaggacactagccaagaacttaggggcaaaytgattgcatccgatccctcatcctccctccagagaggacagtgattcatccttactggaattgtttcctgttctgaatatgagtttgtccttcttgctcatagtgtagcttctaggattattatctgacagcttacagaatgcttcatttactaacgttgttacctgtataacatcagtttgcactaaaggacccatagtgaaggaggcacaacaagacaacatgggcacaagactatgg

SEQ ID NO: 449427 - DNA, 603 bp, Homo sapiens
tagctacttcatataagtaaaacatcatatggtatttgtccttttgtaactggyttatttcacttaatgtaatatctttaagtttcatttatggaccatgtgtcattctttttaagattgaataacattctgttgtatataccacattctgtatatccatatttatccatcaatacacatttgggctgcttccatcttttggcttctgtgaataatgctgctgtgacaatcggtgtacaaattatcttttcaagtctttgctttcaattattttgggtatatacttagaggtgaaatttctgaatcatacagtaattctgtcaattttctgaggaaccagcatactgttttccacagtggctgtaccatttcacatttcaaccagcaatttcaaccacagggatcccaatttctccatgtaccacttgttatttttctgtttgggtttgttttgtttttttgatagcagccattctaatgggtgtgaagtggtatctcattgtggctttgatttgcatttataattagtgatgttttgaccatctttttatgtgtttattagccatctgtatatcttctttagaaaaataacaattcaagtcc

SEQ ID NO: 449428 - DNA, 592 bp, Homo sapiens
ttgtttctggccatatgctccattcagaacctcggaactagacaacatttttcctggaaggtctatttaagggggactgagtacctagcatctgggaaaagagccaatttcaagtttcctttcaggaattccaacagatcttaaagtatttcagggtccgattaaaccttcaccttgtttagatgttgtcacatccagacaatctttgttaaattcggctctctagtttgttaatattctcagatttatattttggctacttgcatgctaaaaagaaatcacatggagttggggaatttggttctgcaaaactgcgtggagatacgatttttaaaaaaacaggtacaattctacgtttttaaagtattatccatgccctaaaatgactcacatgcttcaatgcaggatacaaaaactttyttaaaaaatcatttgacttgcaggggtagagatgttaagagaaaatcagtagggaataacacatttatgaaggcgaaaatgcacaagttatgacacattttggcccagctccaaatccttaaagcactgatgtcttgttccatcttctgttttttttaccattactttcact

SEQ ID NO: 449429 - DNA, 667 bp, Homo sapiens
gctttgtcttgccagttctggtttctcacccttccaaagttggtcaaggaagaagtgaaaagagtaaagaggagcagcaaacttttacttgattagtgaagaagctagctggtgatctagtttcagtgcttttgtagccgttgcagatgtttaaagcttattctttcactggtgaatcttctacctcccacctcagtggctctagattttcacctcaattccttgacrgtgagaattcccttatgcgctgattggttgcttactccttcctcagcctcttggagctagcagtaccttcacctccactttgctgaggtctgtgcaaactctagatacccctcttgcatggacttgtgtgatcccaccggaggggggtcactcttccgtagaggccacatagggagcactcattctttgcacaaactctgctagtggtcccagttcatccctctctcttgttctcacatgcctcttcatgcagcttctcatcatttagattttctggggattaatcaggtaccaggttagcatgttcttcaaagtgcttgaggcacatgtcaagttcttcaagtcattccctcaaagcctttttccctaggctttaggtgtgggacaagcatcttccacccttcccccttgaagacacaggcccctgttaccacagctc

SEQ ID NO: 449430 - DNA, 560 bp, Homo sapiens
acaacacttgaataagaaacacttccatagcatttacaattctaagtgctttccatgtattgacttagttaatcctcacaaggatataaccatgaggtgctattactatccctactttacagatgaggaaatagaggcacagacttcagataatttgcccaaggtcccacagctaataagggggcagaattaggaaagcctggctgagtctatgctctcatcacttgctcaactctgcctggaatgcccttcccgtaccctctaccgcctctgcccaatcctccgggttctctgctccttccacacacccccatctcaggtcccagtcttttktagcattcttcactttttctgttacagatcctcagacaatgcttccttgaagaagacttgcctgtctaaactgccttcccatcccaatccctgttaccttctatcctttctctgctttattttcatttgttatctctcttcttcccaagaatgtaagctccataagaacaggatcatattttgaatcccctagaaaagtgcctagtgtaatatttgttgaatgaata

SEQ ID NO: 449431 - DNA, 596 bp, Homo sapiens
tcaaaacaccttgcagcccttgccattatattccccttttggcactgatcattaaaatccactaacaccatctccaggggcaaccttccccaagggtgctgtgcaggcctctagatccctgcagccctagagggcagggctgggtgtcgcttcaggattcctaagttggaggagggggaattggaagaatgggttttataagaaggtgcaattacaagctcgatcatattgtagttgctacagcacctaaggggagatgacacacattcattaatgtattcttccartatacactgagcactttgcagagtgaaggactgacaagtgcttctctcaaaccacatgaaatgcccctctgagctagatgctcgctatggctcctggggacagaactaagaccctctagtgggtggtaccatgaagcagattctataaaaggaatcatatttgatctgttgtaactgtccaacaatggtacagactctttactaggcagtggtttccccattatgggaaatgtttaggcagagggataaggggtttagagaagactcctacatgggtaggagttcagatcatacgattcctaagctttt

SEQ ID NO: 449432 - DNA, 560 bp, Homo sapiens
aagagtaggatcatcatcgtggtaaggactgaggattaggatctgaaggactttctaatgtaggggatggtgaaaaccatagtcctggatgagaaaacccaagagaattgcaagacagttgatagtccatttgtcttccaaaatcccctgcatgaggagatggcaatgctcttctcttggcagcagttcctgatgtgtcacaaccctcagcttctrgaagtgtttcattctttagagcccaaatccctcatgagctagtgaacttgtttcttctctggttctaagttatataaaacactttgcattcttaatgatattaaactccctcaacctttcaggatgaaataatctcctatcccttcatttttttcctccgcaagaagaaaattttattgtaacaaacagacctagataagttaaaaattaattacaggagactacttcagaattccaggaaccagtgaagctcaacaggccacatgcccaacctggatgaccttagctttttttttttttttttcctagctgatgttctagtcaacaaccaccacagttgatga

SEQ ID NO: 449433 - DNA, 560 bp, Homo sapiens
aagagtaggatcatcatcgtggtaaggactgaggattaggatctgaaggactttctaatgtaggggatggtgaaaaccatagtcctggatgagaaaacccaagagaattgcaagacagttgatagtccatttgtcttccaaaatcccctgcatgaggagatggcaatgctcttctcttggcagcagttcctgatgtgtcacaaccctcagcttctggaagtgtttcattctttagagcccaaatccctcatgagctagtgaacttgtttcttctctggttctaasttatataaaacactttgcattcttaatgatattaaactccctcaacctttcaggatgaaataatctcctatcccttcatttttttcctccgcaagaagaaaattttattgtaacaaacagacctagataagttaaaaattaattacaggagactacttcagaattccaggaaccagtgaagctcaacaggccacatgcccaacctggatgaccttagctttttttttttttttttcctagctgatgttctagtcaacaaccaccacagttgatga

SEQ ID NO: 449434 - DNA, 520 bp, Homo sapiens
caggctgctataaaaaattaccatagactgagtggcttcaataacaaacatttatttctcacagttctggaggatgcgatatccaaaaccggggcaccagcaggtccagtgactgataagggcactcttcctggttttcagacagccaccttgttgtaygctcacatggccaagacagagattctctttctcatgtttctttctataaggcactactcccattcatgtgggctctatctttatgagctaattacctcataaagtccccactttctaatatgatcacactgggggtaggatttcaacatatgaatttgggtgggagaggggacacaaacgttcagtctataacaggataggtctagtttggttttgcccttagtcctaagacataatcttatgctagggcatggttcttaatcaatgtgtggcctctcttgagtctccacttattgcctgagacactcagtatggtctccccactctggcttagctagagtttccatgcctcctaacactg

SEQ ID NO: 449435 - DNA, 532 bp, Homo sapiens
ttttatggaaaactattgagctcactcttttcatgatcacagtttgctgtgtgtcatgagggcactaagtcagagtgtcctttgactcccttaccagtatgtcacctggccaattcactaggtcactttctctctgtctctgtctctgtctctgtctctgtctgtctttctctttcattgttttctacctggccctgttctrtcccaacataaaggcaataatttgttacctcattaatggatctgtcctttttcttttcaaactcttccttacgttagccatgaaatctagctggggctgtgtggtttctgattccccctggcttattctttactttttcccacttttccaggctcagcagggagctgctggatgagaaagggcctgaagtcttgcaggactcactggatagatgttattcaactccttcaggttgtcttgaactgactgactcatgccagccctacagaagtgccttttatgtattggagcaacagcgtgttggcttggctgttgacatggatggtgagt

SEQ ID NO: 449436 - DNA, 616 bp, Homo sapiens
attatagctttatagtatattttgaagtcacgtagtatataatgtctctggcttttttcccctcaatattactttggctatttggggtctattgctttccatatggattttaggattttttttctatttctgtgaaaaattttactggaattttgataggaattgcatcgagtcaatagacggctttgggtagtataaacattttaactttcagtataaacattcttaacaaatttagtataaatgaatgtacctcagtgcaataaaggtgacaaacctttatttattcataaattgatattaatattaattattctaatccataaacatgagatatctttccatttatttatgtcttcctcaacttctttaatcaaygttttatggttttcagcatacagatcttttacctccttggttaaatttagtccaattatttggtagccatttaaaataggattgttgtcttgatttattttttggtagattttggtgagtgtatagaaaggataatgatttttgtatgttgtggatagaaaacatatccacaatttatgttttgtggataggaaacatatccataatatatgtttcgtggatacaaaacatatattgt

SEQ ID NO: 449437 - DNA, 604 bp, Homo sapiens
acagtattcttggtttgtagttttttcttcagcactttgaatatattatcttactctctcctgacctgtaagtttcctgctgagaaatttgctgatagtcttactagaactcccttataggtgatttgcttattctctctttctgctttcagaattatctctttgtctttgatttttgacagtttatgtcttgatgtcattgtgtttgaactgaattgaattggagacttttgaccatcctgtacccggatatttatatctttccttgatttgaaaagttttctgttattatttctttaaacaagctttctaccagtatgtttctctctcttgaagtcctgtaactcaaatattagctcytttcatgttccttcataagttcaataagctttttcctttttaaaggataaattcctttttatccttttttcttttttcccctttgactgtatgttttcaaataacctatcttcaagttcaaagattctttcttctacttgattgattctgtatctgatgtgttctgttgaatttttcatttcattcattgtattcttcagtttcaaaatttctgtttgactgtttaaaacaacttcaatctctc

SEQ ID NO: 449438 - DNA, 604 bp, Homo sapiens
acagtattcttggtttgtagttttttcttcagcactttgaatatattatcttactctctcctgacctgtaagtttcctgctgagaaatttgctgatagtcttactagaactcccttataggtgatttgcttattctctctttctgctttcagaattatctctttgtctttgatttttgacagtttatgtcttgatgtcattgtgtttgaactgaattgaattggagacttttgaccatcctgtacccggatatttatatctttccttgatttgaaaagttttctgttattatttctttaaacaagctttctaccagtatgtttctctctcttgaagtcctgtaactcaaatattagctcctttcatgttccttcataagttcaataagctttttcctttttaaaggayaaattcctttttatccttttttcttttttcccctttgactgtatgttttcaaataacctatcttcaagttcaaagattctttcttctacttgattgattctgtatctgatgtgttctgttgaatttttcatttcattcattgtattcttcagtttcaaaatttctgtttgactgtttaaaacaacttcaatctctc

SEQ ID NO: 449439 - DNA, 604 bp, Homo sapiens
acagtattcttggtttgtagttttttcttcagcactttgaatatattatcttactctctcctgacctgtaagtttcctgctgagaaatttgctgatagtcttactagaactcccttataggtgatttgcttattctctctttctgctttcagaattatctctttgtctttgatttttgacagtttatgtcttgatgtcattgtgtttgaactgaattgaattggagacttttgaccatcctgtacccggatatttatatctttccttgatttgaaaagttttctgttattatttctttaaacaagctttctaccagtatgtttctctctcttgaagtcctgtaactcaaatattagctcctttcatgttccttcataagttcaataagctttttcctttttaaaggataaattcctttktatccttttttcttttttcccctttgactgtatgttttcaaataacctatcttcaagttcaaagattctttcttctacttgattgattctgtatctgatgtgttctgttgaatttttcatttcattcattgtattcttcagtttcaaaatttctgtttgactgtttaaaacaacttcaatctctc

SEQ ID NO: 449440 - DNA, 592 bp, Homo sapiens
cttgggcagcccacattaaatgagagaacaataaaaaaaatataatgtctgaccattttggcccaactgaggtcaactctgaaaagccactgtagctccagwggtctctgtgggtcttcaggtgttactgttgggcccctgttacagctcaacttctctctctgccccattctccttccttttcctttctccctccttcaggcattaatctcaaggacactcttgaacaagcacttatgcaaaattctttctcagagactttcccagagaactcaatctgtaacagttaatagcaggaatgtactaagaaagcaggtgaaacaatagagttttggagctggcacactcacttattcagctggcaatgaggacctcatcactggtggtaggtggagttggtagatggaggtaatagatggcagatggagatagcttctagtataagactaagaagtgaagtctaatggcttcacttctctagtgggaaactgagatagtataatgaagagatgtgctgaaatgtggatgacatgatacatcaggcatttcaaagaaaagtataacaaagacttgagattgattaacaagcaag

SEQ ID NO: 449441 - DNA, 592 bp, Homo sapiens
cttgggcagcccacattaaatgagagaacaataaaaaaaatataatgtctgaccattttggcccaactgaggtcaactctgaaaagccactgtagctccagaggtctctgtgggtcttcaggtgttactgttgggcccctgttacagctcaacttctctctctgccccattctccttccttttcctttctccctccttcaggcattaatctcaaggacactcttgaacaagcacttatgcaaaattctttctcagagactttcccagagaactcaatctgtaacagttaatagcaggaatgtactaagaaagcaggtgaaamaatagagttttggagctggcacactcacttattcagctggcaatgaggacctcatcactggtggtaggtggagttggtagatggaggtaatagatggcagatggagatagcttctagtataagactaagaagtgaagtctaatggcttcacttctctagtgggaaactgagatagtataatgaagagatgtgctgaaatgtggatgacatgatacatcaggcatttcaaagaaaagtataacaaagacttgagattgattaacaagcaag

SEQ ID NO: 449442 - DNA, 560 bp, Homo sapiens
tcacagaccttaacaattgctccctcatataatggttatttatgtacattattcatgtcccttgccaaccattcgactcatctgaggggtgatcagtgtgtggcacaactttcaagcttgcccagcatttcccaaagtgcctggcacattctagatttgttacgaacaaaaggacagctgtcccagtatttggagaggttgctttgtaggaatacttcctagctccaaagaatctgtctcaattaatggtgcacctggaaactgaagatgattcctacattttgataaagaaggtggtgggccaaggagargagagagattttttaaatatttccataaaattgagagcgaagagcacaaagcaagaccactcaggccttagtccttgtcctgtgctgtggactccatgccctgccccaagcagtctcaggagcagacgtgtcaaccttccttcacagaggagtttagtctatgtttagtctctttttttgaactggatcttttctattaacatttaaacatgttcatgcctctttcaccttaaaataaaagccctcact

SEQ ID NO: 449443 - DNA, 556 bp, Homo sapiens
atacgttttttcacatcctttgcagaaaagaggatgagaaaccatttgcactcacatgaaatggttaatagtgtaaattttaactgaaatggttaacagtgtaaatttgcagtgtgtcccagacctgttagttctttgtcctacccaccctctgttacaatrtagtccaaagagatctggactgtttgaatgtcctggcctttgattcattttatcagtggtatcgtgagaatggggctggatgacaagaaatccaagaattggaagccttggtaagtcacacgcattccagagagtatgagataacctccatgaacattcaggggcccgccatcttagtaaaatgtttagggattcagtggccaaggatatgttgaaatatcccatccaaagaatagggcaaagtattgcatcttacgtctcccatggtgaaaaaagggatcacaatgttagttcctatagtggaaggcatgagagacttccagcttggagtggggcccagagtaggaaagtataggatgtaagcagccctgccacttgggccatacagcctgac

SEQ ID NO: 449444 - DNA, 556 bp, Homo sapiens
atacgttttttcacatcctttgcagaaaagaggatgagaaaccatttgcactcacatgaaatggttaatagtgtaaattttaactgaaatggttaacagtgtaaatttgcagtgtgtcccagacctgttagttctttgtcctacccaccctctgttacaatatagtccaaagagatctggactgtttgaatgtcctggcctttgattcattttatcagtggtatcrtgagaatggggctggatgacaagaaatccaagaattggaagccttggtaagtcacacgcattccagagagtatgagataacctccatgaacattcaggggcccgccatcttagtaaaatgtttagggattcagtggccaaggatatgttgaaatatcccatccaaagaatagggcaaagtattgcatcttacgtctcccatggtgaaaaaagggatcacaatgttagttcctatagtggaaggcatgagagacttccagcttggagtggggcccagagtaggaaagtataggatgtaagcagccctgccacttgggccatacagcctgac

SEQ ID NO: 449445 - DNA, 569 bp, Homo sapiens
agccaaagtgatgtcattcagtgtcatagtttattactctatctgtatcttaactcttaaatgtacaccaccatctccagtcttttgcccaagaatcacacttggatgaacaaatatatgttttcatctccagctgttttttaataggagtctcaaatttaacatgactaatatactcccctcactcaaaatctaacctttttctttttatctctgtttatatgtcaagatcacattgtagcttaaaccaaaaactgaggagtgttcccagatcttggtttttaatatctctcacctctaatgggarcaacacagcagctgctctgctgtagctctgtgtagctctgcctacaaaggacctgtatcaggcaatctaacttaaatgtaatttcagtcttagacagagaaaagaaagctattaggatgggaaaaaaaaaaaggtttttttttgacagggtcacactctgtcacccaggctggagagtagtggtacaattatggctcaatgcagcctctgtctcttggggttaagcaatcctcccacctagcctcccaaggagcagagacta

SEQ ID NO: 449446 - DNA, 569 bp, Homo sapiens
agccaaagtgatgtcattcagtgtcatagtttattactctatctgtatcttaactcttaaatgtacaccaccatctccagtcttttgcccaagaatcacacttggatgaacaaatatatgttttcatctccagctgttttttaataggagtctcaaatttaacatgactaatatactcccctcactcaaaatctaacctttttctttttatctctgtttatatgtcaagatcacattgtagcttaaaccaaaaactgaggagtgttcccagatcttggtttttaatatctctcacctctaatgggaacaacacagcagctgctctgctgtagctctgtgtagctctgcctacaaaggacctgtatcaggcaatctaacttaaatgtaatttcagtcttagacagagaaaagaaagctattaggatgggaaaaaaaaaaaggtttttttttgacagggtcacactctgtcacccaggctggagagtagtggtacaattatggctcaatgcagcctctgtctcttggggttaagcaatcctcycacctagcctcccaaggagcagagacta

SEQ ID NO: 449447 - DNA, 581 bp, Homo sapiens
aaaataggaagcagcaggcttagatgtgttccctgatgaattctactaaatgtttaagaaagaaattatgccatttttctacaatctcttctagaaataaaagcagagggaatacttcctacctcattccatgaagccagccttaacctaataccaaaaccagcaaaagacattacaagaagcaaaaactacagaacaagatctctcatgaatattgatacaaaaatcttctacaaaatattagcaaatttgatccaaaaatgtataaaaagatttatccaccgtgaccaagtggggtttattccaggtgtgcaaggctggctcagcactcaaaaattagttaatgtaatcaatcacatcaataggataaaaaagaaaaatcatgataatatcaataaatttaaagatgacaaaatcaagtacctattcatgacaaaaactctcagaaaactgggaatcaatgacaactttctcaactggataacgaatayctacaaaagaacttatagctaacaccatttgtaatggtgaaaaactaaaaactttcccactaagatcaggaaaaatgcaaagatgtcccc

SEQ ID NO: 449448 - DNA, 597 bp, Homo sapiens
aacactgtgaaaaacataagtatcaagaatgaatgcaattaaaagcatcgctctcgttgaccaagtccaactccatccagccctaataaatgtttcagtagcagaggttgaccataataagtacttttgcaggcccaaagccaaccccagataagcctcagtaggactttgtccaaattcttaattcaaaaatgcagtattcattttaaaagctaattttagtcatcctgttaaatctttgttacactgggctgctctattcacttttctcagtgtttactaatccttgaagataattgaaagcaattttatagaagcatgaaatgagttttcatggattttaatctacatgaagtggccttcaaaattatatttgatcctgagtagattatctgyttatgttttttttcactctctcctattaccttacctttgccgagtctcatgttgttcacaagaagaattttattaagtaattgttaaacaacataagtgagaacatacaattttttgtcaccaacttattaactaaaaagtatgttataatgcttatcctgaaaaactacttctatttcttgatagactaacatatgccac

SEQ ID NO: 449449 - DNA, 549 bp, Homo sapiens
ggctctttttgaacgtgagagagttttaacagacaagtgacagacacaacagcatatggaggagtggtattttctaggtgaaaccctaccctgcaggggtaaagtctaatactgtgaaggtttcatgggattgtgtcatgatgaacatgtttttcattctcaaaaatttagttaccacacaggaatttacccattaattatagtgtaaacgcatgctatttcctgatagttttgtagataacacagttggcatactaatacactcgagctctctgccagatacctacacaataacaaatgaattgtaatgacgaaaagattgtatcattttgttttctggagagctgtaaggagatctgagaatgtcaggtaatgtggtaattatgtttcaagtaacttgataatttaaaaaatattatgargtaatctgctgaaacttgcagttattctgtggctacatgttccattcccattatgttacacaaaattatgggttagaattcctatagctaccttttctactctctcaacaaaagatgccagccttaa

SEQ ID NO: 449450 - DNA, 600 bp, Homo sapiens
gtcattgcagcagcaaatcaatgtatatgtgatagtctactcatataaggactattgatagtctataaaactgtagttggtatttatgtggtgtatcttttatacatattttagatatgtcttctataacagtatataactaaatttttaaaagtctagtctggaaatatttgcattatagtactctgttcctttatatttaatgtaattgccatattgcatttaataaaatgtttaaatatattattatgtcttgtatttttgtatcaacttcctattttttatgctttctctctattcttaacttttttgattaatttgtatccttttgtgctttctctttcttaatttggaagttatttcctttcctattacttgttaaccttagcaatatactgacttgtcaaaatctaaaattaattaatacttttaatctccaactagataacaacaagaaccttaaaacaatatacctccatgcatcccccrgtttatatgttattttggctgtcatagtttctatctcttctaaaacaatttgggatatgatgatttttgcagttttatagtcagttattgttcagattcccccatgtgctt

SEQ ID NO: 449451 - DNA, 597 bp, Homo sapiens
gggcatcatgtttttctcatttgacatatgaattccttgaagatcactgctttattcattatcaccactaaacatagtcacaggccagaggttgtgccagatgtgcacagctgtatctttagtcactatattccagacattggcaacagcacatatcatgctaagctcctttcgtaaactttgaacamccatgcctctgttcactgctgacagcatgctcttcaagaaagtgttcttatattcagtctgcattgactaattataggtcaaatgactgaattaatacactgacatttgagagaaagttcatggcataaagatgatttttgatgaacacttcaggatgagcagaattgttgtcaaaaaataacaaaatcttgcagtcttcatccagtccagtttctctgcagaaagtgtgagccactggtacaaaatgtttgcaaaaacaatcagaaaacatgtccctggtgatccatgcctttttgttagcataataatgaactggtcataaattcactccttgaaagtagcaagaacaaaagcttttgcctatcatagcagaaatagtcattgtaatttgcctggtgcattagcaca

SEQ ID NO: 449452 - DNA, 590 bp, Homo sapiens
cctactaccaattatcagttctgctgttttattttggctttaacctggccctcaagaaggagttctgaccatgtttatcttgatctataatgacacgaggtattaccagttcagccttggaagtagctgatggtttgtctcagttcctggyttaaggctaaatcattatttgtctccacagcgatagctccatataaagtgatagccccagagggcaaattgatcccaacccctggcctaaaggagtaagcctggcttccctcctctgcctctcactgagcactactgactccagcagcccagccgtcacagcctacctgactgcttcaggctttggaaggaggcaggccatggctgagttctcactcatcactttgcatttcaattgttccctccccctataccacacagcccatgaagatcattttcatggaatgtggctctatcttaataatcattttactttcatatgttatattttggctctatcttatttatacatgttttgaaatggaaaagacgttttgaaagtctatacatttattatccatttaaaaaatcaattgctttaggtgaacttttatttgatt

SEQ ID NO: 449453 - DNA, 589 bp, Homo sapiens
tttgtcaccaattggcttccaattttggttataaaacgcctcagtgaatagcttcaatctgaggagatcatctactaaacactggataacatagaggaaaagcaaagctggtctgatcttcaatgaaggcatcaaaaaaagccatctttgctctgcatcaaggagtttgagtgagcagacgtgcagatgttactgatttagagtccactggtctagacctctgctcctccgttctcacatgctggagaaggcctgccttccggagagtcagagccagtcttgcrtttctgacaagggccactcacatgtgagaatgaggaagcagaagccctgctttacacagcctggtgtgaagccatctggaacacttttggcagttctaatccccactggataaaaaggatatgggaaaatctaaaaaatattcaagtataattctaaaaaatgacatagagcttagaatattagagctataagatggttaatatggaaattaatagcatattggtaggggaacaaattctaaaaaatgttttcaggcttctgtgccctcaaatggaaagcaaatggtgcaagaaaaggcaaagta

SEQ ID NO: 449454 - DNA, 516 bp, Homo sapiens
tgttttcagggagtgggctaatgaaggagttccttcctaggtgtgtgctgaaatgcgagaaggaacttgagagcaaaatatgtttcttgccatggaaaagcccacaagaactcaggagaaatagataaaagtattactgagcaatccagctgtgactagatattggaataggattccaatcaagacagagcgcatatctacattgcagagagctatggtggtcacaagcaatcccagagctctagccatgtttgctcaaagaacaggactcttagtccacccaggatagagccagagacaaaaaagtgacaaaacttcaccaccctttaaaactgacttttccaaactatttcctgccattgtccaccawgaaggctgtgccatgaccaagccagagtcctcattttcctccaaatatgatatcccttgcatgctgtattccccagggctggtgtgttcttcattctcttttataactaaccatattatattcatatgcaagattcagtttcagga

SEQ ID NO: 449455 - DNA, 599 bp, Homo sapiens
ttgaaatgttaaactaataaatattacatttaagataaatgtaatggccctgtgaaaggccatttaaaaatcaaattataaagtgatattgacagaaatggcagaaaaataattttgaaaattctctctttcatgacatcaagagaacactagccaaaattatcagaatctactttttaaaaactctggaaataataggcttacagcaatccctgatgtgtattcaagaaacatgggtgcatcttagtaggaacagcagactacaaagaacttaaacaaatgtacaagaaaaaaccaaaccccaccaaaaagtgggcaaaggatgtcaaccccatcaaaaagtgggcraattataatgaacttctcaaaagaagacatttatgcagccaacaaacatatgaaaaagagctcattataactaatcattagagaaatgcaaatcaaaaccacaatgagataccacttcatgccaattagaatggcgttcattaaaaagtcaggaaacaacagatgctggagaggatgtggagaaataggaatgcttttacaattttggtgggagtgtaaattagttcaatcattgtagattacggtgtggt

SEQ ID NO: 449456 - DNA, 599 bp, Homo sapiens
ttgaaatgttaaactaataaatattacatttaagataaatgtaatggccctgtgaaaggccatttaaaaatcaaattataaagtgatattgacagaaatggcagaaaaataattttgaaaattctctctttcatgacatcaagagaacactagccaaaattatcagaatctactttttaaaaactctggaaataataggcttacagcaatccctgatgtgtattcaagaaacatgggtgcatcttagtaggaacagcagactacaaagaacttaaacaaatgtacaagaaaaaaccaaaccccaccaaaaagtgggcaaaggatgtcaaccccatcaaaaagtgggcgaaktataatgaacttctcaaaagaagacatttatgcagccaacaaacatatgaaaaagagctcattataactaatcattagagaaatgcaaatcaaaaccacaatgagataccacttcatgccaattagaatggcgttcattaaaaagtcaggaaacaacagatgctggagaggatgtggagaaataggaatgcttttacaattttggtgggagtgtaaattagttcaatcattgtagattacggtgtggt

SEQ ID NO: 449457 - DNA, 599 bp, Homo sapiens
ttgaaatgttaaactaataaatattacatttaagataaatgtaatggccctgtgaaaggccatttaaaaatcaaattataaagtgatattgacagaaatggcagaaaaataattttgaaaattctctctttcatgacatcaagagaacactagccaaaattatcagaatctactttttaaaaactctggaaataataggcttacagcaatccctgatgtgtattcaagaaacatgggtgcatcttagtaggaacagcagactacaaagaacttaaacaaatgtacaagaaaaaaccaaaccccaccaaaaagtgggcaaaggatgtcaaccccatcaaaaagtgggcgaattataatgaacttctcaaaagaagacatttatgcagccaacaaacatatgaaaaagagctcatyataactaatcattagagaaatgcaaatcaaaaccacaatgagataccacttcatgccaattagaatggcgttcattaaaaagtcaggaaacaacagatgctggagaggatgtggagaaataggaatgcttttacaattttggtgggagtgtaaattagttcaatcattgtagattacggtgtggt

SEQ ID NO: 449458 - DNA, 624 bp, Homo sapiens
tgtcttcctactgataacagtgaacagcactggtttcaagtgtggggttgaacacacttttctttgacatattgaatttgagatgcctttgagatatccaagaagaaatcttcagtacacagttggagatattggtctcaaacaaatgaaygtccaaggctggctattcaaatttgataatcaagattgtgcatgcttaagtccaaaagatatgtacatataaagaaataaacaatacccaggactggaccaagataaattccaaacatttagcttccagaagaacagaatgagatggtgaagaaaaaactagaaatgatcagagaggcggaagattagcaaattataatgtcacagaggacaagagacaaacatttctgaagatttgagagttggtcaagtgttatgttgctaagagattaagcaaaaagatttttaaaaatataccattagatttagtagtgtgcaggttattaatgtttgtagagctgtatagataggatgatgaggaaataagctagccctaagtagattatagaataagcatgaggaaaaaactagagaatacaatagacagctttcttaagaacatctgttgcattaaagttagtgcttattacatga

SEQ ID NO: 449459 - DNA, 555 bp, Homo sapiens
aatattttcttccattctgtgggttgtctgtttaccctgataattatttcttttgctgatctgaagctttttagtttaattaagtcacacttattcatttttctttctgttgcacttcgttttggggccttcatcatacattctttgcttaggccaatgtccagaagagtttttcctaggttttcttcccagcctatgctgggactttctttgaaggaggaaagcaacaattatcctacattttagtaaacacaggcatttgttttctgaaaactactttatttctctttyatttatgaaacatagttttcctggatacaaaattgttggcagacagttattctgtttaagataggaccccaatcccttctggctaataaggtttctgctaaagataggacccaaattgcttctggcttgtaagttttctgctgagcttagattatatttttacatagaattcacatagtgtctaaaactccaacagcactttgcatgatagtgctctacagatcaagcatggtaaatttgagttcctaaactccaaagccttca

SEQ ID NO: 449460 - DNA, 556 bp, Homo sapiens
ggtctctatatcttactctttatcacaaactcctttaagtcttctcctggacatcttgctatatcatgtttttccatatcaagaaaggcttcaaaatgtgggcacattattcttccatacttacttygcagtaagtccttggtatgtggtatttttaaagatacatattataagaagtttaggttatcaatataaaattagtttaaatatctggaataaatttgctcccctcaaaatttacatatggatacttatttttagcatctgataaatctacaccacagtctcaatctaattgtataggactttttctgcttgaagacacaccaggtgctgggttacaaatcctgagggcaggagccagggtttaaacttttctcatgtaccaaccctccccttggtctcagcaagttacagacagtcaccaatcacctgtccaacctctactgggtgccatctaggtgatgttctaggggctgagggaaacagaaacaagagaatgtttgtgctttgtagagcttgtatttttataaaaggagatttatttttaaagata

SEQ ID NO: 449461 - DNA, 556 bp, Homo sapiens
ggtctctatatcttactctttatcacaaactcctttaagtcttctcctggacatcttgctatatcatgtttttccatatcaagaaaggcttcaaaatgtgggcacattattcttccatacttacttcgcagtaagtccttggtatgtggtatttttaaagatacatattataagaagtttaggttatcaatataaaattagtttaaatatctggaataaatttgctcccctcaaaatttacatatggatacttatttttagcatctgataaatctacaccacagtctcaatctaattgtataggactttttctgcttgaagacacaccaggtgctgggttacaaatcctgagggcargagccagggtttaaacttttctcatgtaccaaccctccccttggtctcagcaagttacagacagtcaccaatcacctgtccaacctctactgggtgccatctaggtgatgttctaggggctgagggaaacagaaacaagagaatgtttgtgctttgtagagcttgtatttttataaaaggagatttatttttaaagata

SEQ ID NO: 449462 - DNA, 601 bp, Homo sapiens
tgagccactgcgcctggccagtgcctcttaagttttaatgctattaatggtatttcctctcaaccacaggtttttgcatttgatgtagttaactctttttctcgaagtcttctgaatttgaagcctttcttcacaaggctttccatascccagaaccataaacacattctcctatattttcttctgtcatattttgaaaatcaaatgaatccagttccctctgtagtactcctaaaacctggaagcctcatttctggattctgtttgaacaacaatgcctctgcacacaacctcaatgtccccaaactgaaactgccaaaataagggaaggtggagatgctttccagtggggatctgctccaggattgtaggccccactcccagggtggcatctaaccaacccccatttggcctgggtgcagagcaaaggaattggctgggaaacctggcagtgaggattgataaatgctggcatacattaccaaggtcaaggatggaatctctttccatattagatgcagagattgttatcactctgtcatcaataaccatctccctcaccctgcctaacaacacataagagacaagatgtcagagccaa

SEQ ID NO: 449463 - DNA, 601 bp, Homo sapiens
tgagccactgcgcctggccagtgcctcttaagttttaatgctattaatggtatttcctctcaaccacaggtttttgcatttgatgtagttaactctttttctcgaagtcttctgaatttgaagcctttcttcacaaggctttccatagcccagaaccataaacacattctcctatattttcttctgtcatattttgaaaatcaaatgaatccagttccctctgtagtactcctaaaacctggaagcctcatttctggattctgtttgaacaacaatgcctctgcacayaacctcaatgtccccaaactgaaactgccaaaataagggaaggtggagatgctttccagtggggatctgctccaggattgtaggccccactcccagggtggcatctaaccaacccccatttggcctgggtgcagagcaaaggaattggctgggaaacctggcagtgaggattgataaatgctggcatacattaccaaggtcaaggatggaatctctttccatattagatgcagagattgttatcactctgtcatcaataaccatctccctcaccctgcctaacaacacataagagacaagatgtcagagccaa

SEQ ID NO: 449464 - DNA, 595 bp, Homo sapiens
gcagactaaaaaaaagactaataacctcctcgctcctcttattttttgttccccttagaacattattgtttttaatctattaatttggaagaaacacagagtcgttagagaagttttattttagttgatgataacaacaacaacaacaaataaygtcactgagtgcttaatatatgccaggtgttgtacgaattattagcccatttattttcatttaatgataactctaatattttctagctaccattaccctattttccaatgaggaaagtaaggtatagaaagctagttacataaccaagagtgcacagctctaagtggaggagctgtctgactccagagcccaggtctataacctctgtgaaagccatccttcatggtagagacactagaggtctgaataatgtggatggccagtgtccaccactgggctttgtgaccagcaggaaatctaagagttcaaggaagaacaagacaagcaagagtcctatgacacagagatcctagacacagctaccaatgcacggcaagtaactaaggaggttctcaataagagaaaacaggggtatgtttaggacgatatagaaagcacaaa

SEQ ID NO: 449465 - DNA, 595 bp, Homo sapiens
gcagactaaaaaaaagactaataacctcctcgctcctcttattttttgttccccttagaacattattgtttttaatctattaatttggaagaaacacagagtcgttagagaagttttattttagttgatgataacaacaacaacaacaaataatgtcactgagtgcttaatatatgccaggtgttgtacgaattattagcccatttattttcatttaatgataactctaatattttctagctaccattaccctattttccaatgaggaaagtaaggtatagaaagctagttacataaccaagagtgcacagctctaagtggaggagctgtctgactccagagcccaggtctataacctctgtgaaagccatccttcatggtagagacactagaggtctsaataatgtggatggccagtgtccaccactgggctttgtgaccagcaggaaatctaagagttcaaggaagaacaagacaagcaagagtcctatgacacagagatcctagacacagctaccaatgcacggcaagtaactaaggaggttctcaataagagaaaacaggggtatgtttaggacgatatagaaagcacaaa

SEQ ID NO: 449466 - DNA, 505 bp, Homo sapiens
tagttacataaccaagagtgcacagctctaagtggaggagctgtctgactccagagcccaggtctataacctctgtgaaagccatccttcatggtagagacactagaggtctgaataatgtggatggccagtgtccaccactgggctttgtgaccagcaggaaatctaagagttcaaggaagaacaagacaagcaagagtcctatgacacagagatcctagacacagctaccaatgcayggcaagtaactaaggaggttctcaataagagaaaacaggggtatgtttaggacgatatagaaagcacaaagctaggaaatacggggcaattagctacaggcaaaaagctaaaggaaagacggttaatcacggaaactctctgggaagagcccaacagttggtctgtggacagcaacagataatttatgctagatgaaatctagcactgacattagtttgtggtgttggaagtcatggccatgggcccaatccatgtttggagacaa

SEQ ID NO: 449467 - DNA, 587 bp, Homo sapiens
gagttcaaggaagaacaagacaagcaagagtcctatgacacagagatcctagacacagctaccaatgcacggcaagtaactaaggaggttctcaataagagaaaacaggggtatgtttaggacgatatagaaagcacaaagctaggaaatacggggcaattagctacaggcaaaaagctaaaggaaagacggttaatcacggaaactctctgggaagagcccaacagttggtctgtggacagcaacagataatttatgctagatgaaatctagcactgacattagtttgtggtgttggaagtcatggccatgggcccaatccatgtttggagacaagaaaaacgttgtggtatgccaggtaaataatcagaacaggggctgagctgggggmgcaggtgggcgtaggaggaagacaagctgggaacctagttcccagagtaataataaaaacacaagagtttatttagctctagagtttataaaactttttgcatcagtattacagttgatcctcgtattatctctgtgaggcaggggttatgacttgctttctacaaatgaggaaattaaatctcagagagattaag

SEQ ID NO: 449468 - DNA, 607 bp, Homo sapiens
cctctgaactgaatttgcccacctagttacaaccctgaataatcacagtctttctccataggataaacagggtgcagagaagaagagaacaaaattgagtcaggcaatctggtaagtcacttattgaaactaggagaaagaggagaggtcatacattactcaaatgggatcttcatgacagcayaaagagaatgaaaagggaattctctctccagaaaagcacctggtgtttaatcagcacttagtttcttgaccacatcatgaatgatgaatagatgaatgttgctcacctactatttatgatcagtttacattacagtatatcagcctcaaatttcttgattttatcctatttttgatgctttcatcccaaatcctctttattgcatacccctttgctttgaaattttattacttggaagctctgttctcataattaggaataataaaacaagtgggaggtcatagataacaggtgccattgggtattagaagggaaatgtggaatggtcaatgacttgagacaattaagaagacaaccaccatttgtgttttactgtttacaaggaatattcaacctttgataacctaattcaacttgcacaat

SEQ ID NO: 449469 - DNA, 607 bp, Homo sapiens
cctctgaactgaatttgcccacctagttacaaccctgaataatcacagtctttctccataggataaacagggtgcagagaagaagagaacaaaattgagtcaggcaatctggtaagtcacttattgaaactaggagaaagaggagaggtcatacattactcaaatgggatcttcatgacagcacaaagagaatgaaaagggaattctctctccagaaaagcacctggtgtttaatcagcacttagtttcttgaccacatcatgaatgatgaatagatgaatgttgctcacctactatttatgatcagtttacattacagtatatcagcctcaaatttcttgattttatcctatttttgatgctttcatcccaaatcctctttattgcatacccctttgctttgaaattttattacttkgaagctctgttctcataattaggaataataaaacaagtgggaggtcatagataacaggtgccattgggtattagaagggaaatgtggaatggtcaatgacttgagacaattaagaagacaaccaccatttgtgttttactgtttacaaggaatattcaacctttgataacctaattcaacttgcacaat

SEQ ID NO: 449470 - DNA, 607 bp, Homo sapiens
cctctgaactgaatttgcccacctagttacaaccctgaataatcacagtctttctccataggataaacagggtgcagagaagaagagaacaaaattgagtcaggcaatctggtaagtcacttattgaaactaggagaaagaggagaggtcatacattactcaaatgggatcttcatgacagcacaaagagaatgaaaagggaattctctctccagaaaagcacctggtgtttaatcagcacttagtttcttgaccacatcatgaatgatgaatagatgaatgttgctcacctactatttatgatcagtttacattacagtatatcagcctcaaatttcttgattttatcctatttttgatgctttcatcccaaatcctctttattgcatacccctttgctttgaaattttattacttggaagctctgttctcataattaggaataakaaaacaagtgggaggtcatagataacaggtgccattgggtattagaagggaaatgtggaatggtcaatgacttgagacaattaagaagacaaccaccatttgtgttttactgtttacaaggaatattcaacctttgataacctaattcaacttgcacaat

SEQ ID NO: 449471 - DNA, 622 bp, Homo sapiens
tgagctttcaaggactgcttaatttgaccccacaaaagacttgaagacaacacgagaaaaaatttgagcttggggtgagtttccttaactataacactgctccaggactggcttgcatgggtcactgctctatgagcccttcaccatctcttcccccaacctccacagtcattttagtgaattcccaggtcaaaactcacactgcccaatatattgttttttccttatgctgtaccatcatcttcacatactttattgactcttttcatcaagtggtatcagctctactatcttaagcatgcctttatttctacatgtttagctgagtgtattttcaggaacagccatttgttatatcctccaggttcaagccagctctctctgtgacaccagggatgtttcttccaataactccacagggagccctctttctgatgaatactcagacaaggtgaactggacacagaaaccacatgatgcctagtgcctcaccaccatattaaaatatttttatatacttcctttaaaaaactttccaatctttcaaattcattgcatttctttaatsatttcattcaaacatttcttcagatacccaactgcatggcaaaaagtgtgaata

SEQ ID NO: 449472 - DNA, 546 bp, Homo sapiens
aaggtggatggtctctggttcccccttgactagaaatctggggtgtgggtagcctcccaaaaggatggctctgtaagcgggtctcaccagcaccttcaacaaacccccgtgtgaagaaggtcagaggcrgggaagcccctctgcttgtggcctgacaacattttttatctaaagattctgagtaggtagtggttattttcatttctaaaaagcatacttttttgtggaggtggaggtgcattttaacatctctaaaacctgggtgcatcttaggatcaacagtgtcttaggtttgatgaaatacaccatataggctaggcttggtagctcatgcctataatcccagcacttcaggaggctgaggtaggaagatcgcttgaggccaggagttgaagaccattctgggcaacatagcaagaactcatctctaccaaaaaaattataaaattagccaggcatggtggtacatgcctgtaggcccagctactcgggagactgagacggtaggatctcttcagcgtaggaattcaagattacagtgagcta

SEQ ID NO: 449473 - DNA, 546 bp, Homo sapiens
aaggtggatggtctctggttcccccttgactagaaatctggggtgtgggtagcctcccaaaaggatggctctgtaagcgggtctcaccagcaccttcaacaaacccccgtgtgaagaaggtcagaggcggggaagcccctctgcttgtggcctgacaacattttttatctaaagattctgagtaggtagtggttattttcatttctaaaaagcatacttttttgtggaggtggaggtgcattttaacatctctaaaacctgggtgcatcttaggatcaacagtgtcttaggtttgatgaaatacaccatataggctaggcttggtagctcatgcctataatcccagcacttcaggaggctgaggtaggaagatcgcttgaggccaggagttgaagaccattctgggcaacatagcaagaactcatctctaccaaaaaaattataaaattagcyaggcatggtggtacatgcctgtaggcccagctactcgggagactgagacggtaggatctcttcagcgtaggaattcaagattacagtgagcta

SEQ ID NO: 449474 - DNA, 544 bp, Homo sapiens
cagctctgagctaagtacattccatgcagactctcagttgattcccgtcacagaacagcccagttagcctattctacagaagaagaaactgacgctagagataaaaagaacttgctaaaagccacaccactagtaagtagtggaggtgagacctgacccccaaaactttttgcccccagagcctgtgctctgaaccaccaaccaaactgcccagrcttctgttggtggtttctcttgcaacttggcaggtgaagtgtgacctcagccattggtgaggagttgtaatcagggtgcagaatctggacagggcctccttgcccactgccatgtgtagctgctggtcagttggtcttcacagacagcatatcctctgtgttcacagctatggcaccaatggcagaattggtgtgttgatactaacagaagttgttgtaagtcacactcctctgcagttatgtacagggcaaatatgattccaaaacccacagaaagctattacctcattttatcttaaagtcttaggagctagagaatcaccgtcacc

SEQ ID NO: 449475 - DNA, 513 bp, Homo sapiens
caaaagatactagagggcttcatgtttctgtaaactagtgagtttttgtttttcttctaaaaatgagtgctttgtgataactcattaaagggaaaaataaagtggaagggggttacgtagcaccatccaggaagatgaaaaagcaggtgagaatccaaatctggcagaagccagagatcaaaacctaaccattttacggaagggaaaagaagtgttctgtgacaagtgagatgattgattttgcagagtcctacagctggttcaaggcagcatcaggctcagaacccctttctctcagctcyctgttgtgattatttcaggaccttgttctgttttccacatggcctctaatctagacacctgacctggtgggagtaacctttcaaacttttcacataaaccaagaacatacccaaatcataagaagaaagattgctagatgctaaaatgccagctccctgccatgaacaaaaccctgtccctggggataaacttcaaagtaaagccagatga

SEQ ID NO: 449476 - DNA, 447 bp, Homo sapiens
tttgcttggggttggagtgagagcagagaagagctgaggaaaaaagtgactgtttttgtggcactctgggctgacttctttcaagttaatkattttacactattatggcatggagctgagtgaagaaggtgtttgtcatcctcaggggctatgatatttgacagtcatggattctatagatttaaatatacttgcatataaaatggtgaaataagcttacaccattggaaaatgcctaagggtacaaaagcaggcaaactggagagacagccaagtgactgccttttacatttttcaaccacaatgaaaaatcaactttcttcagagtaccaggttgaattccaccatttggaattatgctttttccttttgtaatggagcaatagtttcacctatcactaattccatctaggagattatcatacaagaataaagaggccacattgc

SEQ ID NO: 449477 - DNA, 583 bp, Homo sapiens
cattggtagctgatgcacttacttgtgagcatataaaacttctcagaggagagccagaaattttaacatgttggggggaaggaagctaaggttctgctgaacgtgtagaaaagagcaagttcctgtgacatttgggttgatgatgacaccctatctgccactacattccaatgtatgtaggggacaggggccagtggaaactcaggttacataaaaaacccttagttcttggtgagcagcaactggtgaaaccccttcytttttccctactagttgcctcttgagttaccatccccagtgccttcccactttcagaaaaggctagggctggaaattactcatttgcaataattctggttgaagtgagcctttctctccttttttttcccccaaaacaagagtgaattttctgtctaaaccctctgatggacacatcgatacagatcaccagtcttcctgaaaatcatttgaaggagaattgggagggaggtccccacatgacgtcaggagaatggtgaatgcaggctgcctggtgcctggcctccctcctgggacagaagtggcactccctcccacatgtttc

SEQ ID NO: 449478 - DNA, 583 bp, Homo sapiens
cattggtagctgatgcacttacttgtgagcatataaaacttctcagaggagagccagaaattttaacatgttggggggaaggaagctaaggttctgctgaacgtgtagaaaagagcaagttcctgtgacatttgggttgatgatgacaccctatctgccactacattccaatgtatgtaggggacaggggccagtggaaactcaggttacataaaaaacccttagttcttggtgagcagcaactggtgaaaccccttcttttttccctactagttgcctcttgagttaccatccccagtgccttcccactttcagaaaaggctagggctggaaattactcatttgcaataattctggttgaagtgagcctttctctccttttttttcccccaaaacaagagtgaattttctgtctaaaccctctgatggacacatcgatacagatcaccagtcttcctgaaaatcatttgaaggagaattgggagggwggtccccacatgacgtcaggagaatggtgaatgcaggctgcctggtgcctggcctccctcctgggacagaagtggcactccctcccacatgtttc

SEQ ID NO: 449479 - DNA, 609 bp, Homo sapiens
tcagatagagaagatccttgaaatcaaaataggatactactttaaaaagggaaatatcaaaaataaaaaaagattatcttggaaattaaaaacaycataactgaaatgaaacagtcaatagaatcctggaagagaaagttgaaaacatcttccaaaaagtagagcagaaagattaaaatatgggagaaaagatcaggggtcctatccaggacgaactactgtatatcagaatagaaagtgagtaatggagtaaaacagtgagtaatggaggagaggaaatcagtaactaaacacatgaaagaaaatccccagaactgaagaatatgagttgccagagaaagactcatcaactgtctaaatgaagcactcacaccaagccacatcttagtgaaatttcagaatactgaaggcaaacagaaaattctacaggcttctttggagaaaaacagatcaggtacaaagggccaggaatcagaataccttcagaattctcaacaatgaccctagaacctagaacagagtggaaaaatgtactcaaaattccaaaggaaaattatttccaagataaaactccaaacacatcatgaaactatatgactaagggagaaa

SEQ ID NO: 449480 - DNA, 609 bp, Homo sapiens
tcagatagagaagatccttgaaatcaaaataggatactactttaaaaagggaaatatcaaaaataaaaaaagattatcttggaaattaaaaacatcataactgaaatgaaacagtcaatagaatcctggaagagaaagttgaaaacatcttccaaaaagtagagcagaaagattaaaatatgggagaaaagatcaggggtcctatccaggamgaactactgtatatcagaatagaaagtgagtaatggagtaaaacagtgagtaatggaggagaggaaatcagtaactaaacacatgaaagaaaatccccagaactgaagaatatgagttgccagagaaagactcatcaactgtctaaatgaagcactcacaccaagccacatcttagtgaaatttcagaatactgaaggcaaacagaaaattctacaggcttctttggagaaaaacagatcaggtacaaagggccaggaatcagaataccttcagaattctcaacaatgaccctagaacctagaacagagtggaaaaatgtactcaaaattccaaaggaaaattatttccaagataaaactccaaacacatcatgaaactatatgactaagggagaaa

SEQ ID NO: 449481 - DNA, 508 bp, Homo sapiens
aggggtcctatccaggacgaactactgtatatcagaatagaaagtgagtaatggagtaaaacagtgagtaatggaggagaggaaatcagtaactaaacacatgaaagaaaatccccagaactgaagaatatgagttgccagagaaagactcatcaactgtctaaatgaagcactcacaccaagccacatcttagtgaaatttcagaatactgaaggcaaacagaaaattctacaggcttcttkggagaaaaacagatcaggtacaaagggccaggaatcagaataccttcagaattctcaacaatgaccctagaacctagaacagagtggaaaaatgtactcaaaattccaaaggaaaattatttccaagataaaactccaaacacatcatgaaactatatgactaagggagaaaaaagacattttcagataagcaagatctcaaataatttgcctcccatgcaacctttcttgtgaaactacttgaggatgtgctccatcaaaacaa

SEQ ID NO: 449482 - DNA, 508 bp, Homo sapiens
aggggtcctatccaggacgaactactgtatatcagaatagaaagtgagtaatggagtaaaacagtgagtaatggaggagaggaaatcagtaactaaacacatgaaagaaaatccccagaactgaagaatatgagttgccagagaaagactcatcaactgtctaaatgaagcactcacaccaagccacatcttagtgaaatttcagaatactgaaggcaaacagaaaattctacaggcttctttggagaaaaacagatcargtacaaagggccaggaatcagaataccttcagaattctcaacaatgaccctagaacctagaacagagtggaaaaatgtactcaaaattccaaaggaaaattatttccaagataaaactccaaacacatcatgaaactatatgactaagggagaaaaaagacattttcagataagcaagatctcaaataatttgcctcccatgcaacctttcttgtgaaactacttgaggatgtgctccatcaaaacaa

SEQ ID NO: 449483 - DNA, 592 bp, Homo sapiens
tctgtgcagctcctttgagtgactaattttctttttttactattggtttttgatgtttcctccacctagtgcacaccaggctgttttcatctgatggaaccagatcacaaaactgtttggacatctgtgaaaaacaaacccaatctgtatggtcaaaagaacattgaacagccattattcatgtgaagtgtttgatagaaaggcattctgtgtctggtgacttccaaacaacgtgtagtgcctttatcgcctgagtagatggggcttgcctttaacacatcctctttactagtctcaaagcactgagataatgactgaaagctgtgttagagaccaagccatgcaagaaagaaaatgtgtcatatcacatcaacttaaaacaactgcaaaccatcaacagtgtttccccartccctacattaaaatctataatcaagcagataatatgagcatgtcaatttctcctttgagtaataactactaacctcatggaaaccaagcctcttccttaggtgagttgatcattagtcttttactgaaacactgatttaaagtgggtcataaaactttccatttttttttcaaacaatac

SEQ ID NO: 449484 - DNA, 559 bp, Homo sapiens
tgagccaacaaacttccctctgcatcagctttaggtgggagtagggggaggtaaataaaaccagactaggaaaaagccaagagcatccgggagagctgacatgaccatgagctggagcctgtgtagagcaccctatttccacggaactcacccagcatgtgttggtcatcatttatgccactcctacttcccccaaagaacacagactgtagacacttggtattacagttttgactcttcatcagtgactccaaaagcccatgacgtagtcatttataatttaactaaaacagaaatctgtgctccctctgaggctgttgtgtagaagtgagtcatttaggaagtgagtgagtcccaacasgctgccctgcatctgcctctcagctttaaggttctcatttcattcaccatttcatttaatcctgataaaaacctagcagatggctgtctttatctccatgttgaagatgatgagctggcaaaatcaaatgctacaatcaggtacttgagatttagatagtctcaaagattttagagctcttaataacagagagtcaga

SEQ ID NO: 449485 - DNA, 562 bp, Homo sapiens
attgcttgctggttgatggagataaatgcccacatacatggtcatggaaatcttttgtgttgctggttgtggtgtgagagcagaggaaaacagtttgttttatcaacacaatgaatagtgattatttattaagcaccagtaggagtctaaccatggggttaaaaaataattagttcagggagataacaaaactaccagggtatatcatttctgaatttttcacttatgtcattcatttctttagttttgttttcccattcataaaatggaggtaaagatagtttagtaccaaggctcctctaaggatgagttttctcccatttaaatcacgattcatattgcgtgactggaaagtagaacatatggtccgtgacargggtgttggcaatttgtggaagaacaaaaaagatttgacaacaatttctaacttggttcatctctgtagtaaattaaaaattttgctctgatttgtgggcaatgggggtggaagtagggtagaaggaaagaaaaatttggtccttttcctgtcatccctttctttagggtcccccttttgttcccc

SEQ ID NO: 449486 - DNA, 593 bp, Homo sapiens
atgttcattgcagcactattcacaatagcaaagacatgggatcaacctaaatgcccgtcaatgatagactggataaagaaaatgtacatatatgccacggaatactatgcagcctgaatagccaaggcaatctgtagttaaaaaaaaaaacaacaaagctgaaggcatcatgatacctgacttcagctaccatgccataaaaaagaatgagatcatgtcttttgtggaagatgggtggagctagaggccattatccttagcaaactaatggatgaacagaaaattaaatactacatgttatctcttataagtgggatctaaatgataagaacacagacacaaagagggaaagaacagacactggggtctacctgagagtgaagggtgggaagagggagagaatcaggaaaaataastaatgagtactaggcttaatacctgggtgacgaaataatccatacaacaaaactctgtgacacaagtttaactatataacaaacatgcacaaggacccctaacttaaaataaaaggttaaaaaaaaaaaaggaatgagaaaaaaggggaaaaaaactgtaaagttaaaaaaaattta

SEQ ID NO: 449487 - DNA, 593 bp, Homo sapiens
atgttcattgcagcactattcacaatagcaaagacatgggatcaacctaaatgcccgtcaatgatagactggataaagaaaatgtacatatatgccacggaatactatgcagcctgaatagccaaggcaatctgtagttaaaaaaaaaaacaacaaagctgaaggcatcatgatacctgacttcagctaccatgccataaaaaagaatgagatcatgtcttttgtggaagatgggtggagctagaggccattatccttagcaaactaatggatgaacagaaaattaaatactacatgttatctcttataagtgggatctaaatgataagaacacagacacaaagagggaaagaacagacactggggtctacctgagagtgaagggtgggaagagggagagaatcaggaaaaataactaatgagtactaggcttaatacctgggtgaygaaataatccatacaacaaaactctgtgacacaagtttaactatataacaaacatgcacaaggacccctaacttaaaataaaaggttaaaaaaaaaaaaggaatgagaaaaaaggggaaaaaaactgtaaagttaaaaaaaattta

SEQ ID NO: 449488 - DNA, 580 bp, Homo sapiens
  misc_feature (1)...(580): n = A,T,C or G
atcataaaattgcaagattagaatggaccttagagaagtagagctcaccaccctctccagctcatctctctctccaacatctccaagtggtcacccagccgcttcccgctacaatgatggggagtgtcttactgcagaagacaatctgttccatctgtatttagctctggccacgaggaaattattccctatgaaccccaggatttcctttggctccaagtttacaaagcaataattagcactttgagttgggaaagctagacagcaanagtggttatgaaccccagctctagaatacaattgccttcctttgaactacarttgccttcctttgaacttgaaatgggctttctcagcttatcagctgtgtccttttctcatctgaacatggtggccatctcacagtgttgatttgagagtcagatgagataaagcatttggcatagtcactggcatgtatagtaagactttttaataaggttttatatataaagttactgattgttattattttccataactctatgaggtagaaattattattcacactttctagatcttagaaactgaggcacctgcc

SEQ ID NO: 449489 - DNA, 516 bp, Homo sapiens
ttgtgcctactggctgatatacggctgttaatcaacgtctgtatgtgcagcagaatgtctcagacttgcactagctataagtaggtggcaaggttgtgggatagtagcaaaacctctcacctcaaataatctggcagctatcaaaattcaccagaaaaaagcacctaggagttgtgtataaccgaactggcttagatcagcttacaacaggtggtaatgaccgagagctgtttgcaatattttattttttaaaagaaaaaaactcaaaatgtgctcrtcataagactaactaaaacatcaagttttttggcttgagccaggaattacaccagcttagtaactctggttaactctggtgaactagaactgctcagaggatctgattgatagttaatgggcagtcactggtaatgcttttctttttattttttttgctggaaggaaaaaagttaattcagacttaccagatagtttggtaggtattttttacattattagaataaaatcagttcccta

SEQ ID NO: 449490 - DNA, 516 bp, Homo sapiens
ttgtgcctactggctgatatacggctgttaatcaacgtctgtatgtgcagcagaatgtctcagacttgcactagctataagtaggtggcaaggttgtgggatagtagcaaaacctctcacctcaaataatctggcagctatcaaaattcaccagaaaaaagcacctaggagttgtgtataaccgaactggcttagatcagcttacaacaggtggtaatgaccgagagctgtttgcaatattttattttttaaaagaaaaaaactcaaaatgtgctcgtcataagactaactaaaacatcaagttttttggcttgagccaggaattacaccagcttagtaactctggttaactctggtgaactrgaactgctcagaggatctgattgatagttaatgggcagtcactggtaatgcttttctttttattttttttgctggaaggaaaaaagttaattcagacttaccagatagtttggtaggtattttttacattattagaataaaatcagttcccta

SEQ ID NO: 449491 - DNA, 446 bp, Homo sapiens
agagagaagtgaagacctcccttctgatttaccactcatatgacgactactrtcctccttctgttcctttatggtctttttcttctcttgttttactcctccttttattattcttttaaacaagcataaaatatttggtattgaaacacagcacatttccaagaacacaaaattataattggattttggatttccacactgcaaaataaaataatgttatattatttttgagatatcagtagagaaaatattataatgaatcaaagactgggctgaagaaacctttggcagaaagaaattgaaaacatatattttcttggatacataatattttcttcaatcatataaaagacaaaaaataaaccaaaaagacaaaacccagtacctattgtctccatttggccatagccaggtttataccacagtgcctaacccccatcacctgg

SEQ ID NO: 449492 - DNA, 592 bp, Homo sapiens
ccccagggccacaaaggggccttctgcctggggcagtatcaaggctgcagagttttcctccaaagccacacctccactggaaagggcgagttcaaggactctgtgggtggtagccatgggcaaatgcagagctgctgctgtcgctttgcagtgcctgtaggacttmgagggcctggagcctcggttccctgaacagcacccagatcaccctgtatcagggatacagttccttcccaccttccctaactctggagtaaaatcttgaggctgtcatctggggaagccaccttgtccgttcagccatgaagacagaaacagtgccatcgttccgggagactccagctggatccagctgtcaccttaataacctgttgagtaggcgaaaggtgatggctgtgggggtcttgcttgctggctcctggccatacaccttctggtcagcgtgtggctgctgtgccttctgtctgcattgctagtggtgctgggaggatggctgggctccagtgtctctggagtggcttcaagtccactgctcctggaaggcttcatcccattggccacctgtcctctatgccctgaggcagaaagacag

SEQ ID NO: 449493 - DNA, 633 bp, Homo sapiens
attttatattatccttgtaccgttctgtgagccaggagccagcctttgcggaggaaatggaggcagccatgaaagagttggtccaggagcttcagaggaggatgagcatgatggaccatcatgctcttgcccagagtkttctgcctctctgtcgtttttcacctgcagagctacattcaggcaaaggaggccactacagggaagaatggtccagttgagccttcccacctctgggaggcttactgccaggctactgccccacatcctgctgtgcacagccccaatgctgaagccacctatacatgtggtattgtgaatttgttgcttcaagggctggtgcccaagtcccacttggagactcatactggatgccatgtagtggttgaactcatcatatgcagtgtagtcttaccactgatcagccggctgtcagatcctgactggatccaccttgtcctcatgggtatcttttccaaggccagagatccagcaccctgcccagccagtacccctgaacagccctcagtgcccacatctctgccactgattgctgaggtacagcagcttccagaagggagggctccttctccagtagcagccccagggttcctaagtaaacagtgagccagagat

SEQ ID NO: 449494 - DNA, 403 bp, Homo sapiens
cagttgtcatccagaaccttcatatcactggcaccattacagcccgagagcacagtggcaccagattgcacccatgcacacgctgtactgtgaagtatgagacatcccttgtcggtgaaaacagcagcctgcagcagctggcctaccacattgtgaatcaccgctattgggagttcttgaatctgcaggccrtcaggagaagaaaccagatctatgaaagttcattagaaatgtgaagggtcctaaaaagctctttccagatcttccatttggaaacatggacagtgacagagtagaagcctgtaagagcctcctataataattcctgaagcaactgtatgccattccagcgattgctaacaacagtgaggaggtgcaggagtttcttgctgtgaacacagat

SEQ ID NO: 449495 - DNA, 403 bp, Homo sapiens
cagttgtcatccagaaccttcatatcactggcaccattacagcccgagagcacagtggcaccagattgcacccatgcacacgctgtactgtgaagtatgagacatcccttgtcggtgaaaacagcagcctgcagcagctggcctaccacattgtgaatcaccgctattgggagttcttgaatctgcaggccgtcaggagaagaaaccagatctrtgaaagttcattagaaatgtgaagggtcctaaaaagctctttccagatcttccatttggaaacatggacagtgacagagtagaagcctgtaagagcctcctataataattcctgaagcaactgtatgccattccagcgattgctaacaacagtgaggaggtgcaggagtttcttgctgtgaacacagat

SEQ ID NO: 449496 - DNA, 440 bp, Homo sapiens
agcaaacttacaaggaatagcttcttatttcctgttccttatggttataattagcctttaaagaactccagcaaaatgttctgtcaggccacaacatctaytggaaaggcaaagaaattaggaattgctggaggagaaggataaatcaggaggaattgctggtagaagaggatgcagacagtcacagggaagtggtatatattaaatacatgtgaatagctggcaaaaaggtgtcagggatgttactcggagccatttggcttcacacttgcctgttagtgccttgctttcgctgaattaccagagcctaccacttggaagaaggtcttggagttagactaatgagaaggcaatggggtgccaaaaacaagtgtcagagttctcttagattctgaagtaggtggtgagcacacaattaaagtggtttatggaagaaaaaa

SEQ ID NO: 449497 - DNA, 204 bp, Homo sapiens
ttcccataaccatttgtccttttaacttttttgcctgttttgcttctgtaagattgcttcagccaagctccycctcccctttctaaaccaaagtataaaagaaaatctagccccttctccggggctgagagaattttgagcactagcggtctctcggttgccagctaataaaggactcctgaattcgtctcacagtgtggggtt

SEQ ID NO: 449498 - DNA, 551 bp, Homo sapiens
aacactctcctaaaaagacatttttccctaccagataatcagaacttatgaaaattatagtaattaagatagcataggagtggtaaaagcatagacaagtagacaaatggcacagaattgagaccagaaagagactcacacacatgtggacactttctttaagactcctgcagccgacagaacagtggggacaggactgtcttttcaagcaattggtgctgggtcagttggatactcatttggaaaaaaaaaaaaatcaagtgagattcccacttcacactacactcaaaaatcagttaggtagaacrcaggtctaatatgaaacagtaaaagcaataaatattccactattgctctgcccatgcatggttactgaacacttgagatgtgccaataagcggaaaacttgcattggaatgttaaacagcaggaaaaaccaatgctacatatctcaatactttttatattcaaagtttgaaattataacaatttgtatatactgagttaaataaaacattattaaacttagctttattggattcccttttctc

SEQ ID NO: 449499 - DNA, 551 bp, Homo sapiens
aacactctcctaaaaagacatttttccctaccagataatcagaacttatgaaaattatagtaattaagatagcataggagtggtaaaagcatagacaagtagacaaatggcacagaattgagaccagaaagagactcacacacatgtggacactttctttaagactcctgcagccgacagaacagtggggacaggactgtcttttcaagcaattggtgctgggtcagttggatactcatttggaaaaaaaaaaaaatcaagtgagattcccacttcacactacactcaaaaatcagttaggtagaacacaggtctaatatgaaacagtaaaagcaataaatattccactattgctctgcccatgcatggttactgaacacttgagatgtgccaataagckgaaaacttgcattggaatgttaaacagcaggaaaaaccaatgctacatatctcaatactttttatattcaaagtttgaaattataacaatttgtatatactgagttaaataaaacattattaaacttagctttattggattcccttttctc

SEQ ID NO: 449500 - DNA, 550 bp, Homo sapiens
aaacctcgcaactgatggacctcttagtagagaaagatttctttaaayggatacaaaaagcacaaaacataaaggaaaatatccaatgatctctctttcctaaaaggtaccataaagagactgaataaaaaatgctacaaacttggaggagatatttgcaatacatgtaaacaacaaagggttagtgtgtagtgtatctagatacttctgtgaatcaaaaaagaaaaaaaaaaggaaaagaaaacccaatagacaaatgaaaaaaaaatcaatgagcacaaacttcaaagatgacaaaacaaaaatgttctatcaatatttgaaaagatattcaatctcattaaccagggtaaagaaaattaaaactataaaattagagaaaattgaactatgagaatgtatcaggtgctggcaagaatgtggggccacagaaactctccttcacttttgatgagggtgtaaattgtaacacttctgcggaatgctgattggcatttcatagtgaagttgaacatgcgtatttcctgtgatctgtcagtaccacttatcg

SEQ ID NO: 449501 - DNA, 572 bp, Homo sapiens
catccacccatccattcatttattcattcttccatgatccatccatctacccattcacccatccacccattcatttattcatccatccatccacctatacatcaattcgttcatctatccatccattcaaccatccatccagtcatcaattcacttatccatccatccatatgttcatgcattcatkcatccattcgtccatctattcattcattgacccattcatccatccagtcatttagccatccattcatttgttcatgcattcattcatgcttgccctgagaaagggaacacaaaagtgtcccactacatccctgtgatgctggccctgaaatgtcctggcccccagcaagtggataacaacctcctcctggcagaagctcacactcaatggtgcttgatctcaggggttcatggtccctgaagcccagacctaagatcctctagttagagtgggtcttcagggatgggcccatctctctcactgtccactgggactctgactatcagggcaactctgctcctgtcctcatccctgaacaccctcccctccaatggcattctccctg

SEQ ID NO: 449502 - DNA, 600 bp, Homo sapiens
tcattcattgacccattcatccatccagtcatttagccatccattcatttgttcatgcattcattcatgcttgccctgagaaagggaacacaaaagtgtcccactacatccctgtgatgctggccctgaaatgtcctggcccccagcaagtggataacaacctcctcctggcagaagctcacactcaatggtgcttgatctcaggggttcatggtccctgaagcccagacctaagatcctctagttagagtgggtcttcagggatgggcccatctctctcactgtccactgggactctgactatcagggcaactctgctcctgtcctcatccctgaacaccctcccctccaatggcattctccctgttgtttctgcacagacacctcatctaccttcaggcttcagcctcaatgccttggccccaaggaggatccagggcttctctgtcccctggcaactgctcatctggctaggaactcagacatcccaccctggaaaaccaccrtgcctcccccaccaggtggccctcctgagtgccaccgctgccacagcacacacacactgtgctgccttcctcaatgagggcccctctccaggcc

SEQ ID NO: 449503 - DNA, 605 bp, Homo sapiens
aaatgcaaatcctcctggaggctccctcatgctgctgggcagactctggaaacctgaacagggtggtggctgccaggagccacctgctctcatttctgagggtgtaaccaggcaggacctaacagaaggggcagcccagggatgccacagtgtgtccacagagggacaggaccaagccrcaagcctgcctcacagtccagctgccatggccctgagggatcctaaggggacccagagcccactcacacccactcctaagctcgtgacagagccagggctccaccttcccaatggagacaagtgtggagtgtggagcaggtgtgactgatacctgcacagaggccatgcacacttgcccctctcaacccacagcccagtgttcattctaaaacaaggcacagtctaatcagaaggagaggcccagcctgttcaatctggtcctgcattatacagatgaggaaactgaggcccaggaggctgagtcccaaggggacttcctcaggccacaggaaggtggcactcacaccctgacagccctgacccaggtctggctgcccccacagccaagagcctcaggcttggacgcccaccctggagtgaccagt

SEQ ID NO: 449504 - DNA, 540 bp, Homo sapiens
tcatgatcactggggctcggggacaagataatatggtcatctttcactaggagacttttcggaggtttgtttttatatctggcaactccaatatgttaaaatccccttgcatagccaagacttccactatattccttcagagatattctgagttcgattccaggctgcctcaataaagtgagtagcacaataaagtgagtcacacaaattttttggttttccactgcatataaaagttacgtttacactatmcttcagtctattgagtgtgcaatatcattatgtttaaaaacctaatttaaaatactttattgctaacaaatgctgacacagagacatgaaatgagcacatactgttggaaaaaacggcgccaatacacgtgcttgatgcaggtttgccacagatcttcaatttgtaaaaaaaaatgcagtatctgtaaagtgctgtagagtgaagcacaatgaaagaaggtatcctgatatatgtttttgcttagcaatatagtgagacttttgggcattagtctataggcaatatcc

SEQ ID NO: 449505 - DNA, 519 bp, Homo sapiens
gtttcaccatgttggccaagctgcttgtgaactcctgacctcaagtgatctggccctctcagcctcccagagtgctgggattacaggcctgagccaccgtgcacagcccagtttttgtatttttttttttaaacagagatggggtttcaccatgttgacgaggctggtctcaaattcctgaccccaagtgatccgcccacctgggcctcccgaagtgctgggattacaggcatgagccaatgcacccacccttgaatgactgttttgtctgtacatttctcatgtcttayatggcattgtaaaggcaatcaaatcttttcattcatgtggttttggaccttttcaataatggtattattctttgtacttagaagcttggcaagcactagaacccatctctcaagcaaaacaggctgaagacatcaggacatacagcagctgcagcttgagggaggttgcatgaaatattaatcctgcttctctcagaacagagtcctgcagcagagccaatgaagcaat

SEQ ID NO: 449506 - DNA, 479 bp, Homo sapiens
tgtggttatttggggttcctcgagatcccttatgaattttagaaaagatatttctatttctgcaaaaactcattgtgattttgatgggaattgtgtaaatctgtagattgctttggatagtattgacatcgtaaccgtattgtcttccaatccgtgaacgtgggttatgtctccatttactcatgtcttccttatagtgttcattatacaagtctttcacctccttggtcaaattaattcctaaatattttattcttttttggggggtaaacactgtgatgagtagcgagccaagacwagagatcagatttcccaactattcgttcccacaccttgactgttgcttagcccagctgattcactagactccagtcactaaccccaagtttctatcaggtgggtcaattttaaattatagggaaaaaacagaaaagaaaattggataactactttgtagcaagctggattttattcatagt

SEQ ID NO: 449507 - DNA, 555 bp, Homo sapiens
agcttgcttttatacattgttgggagttgtgagacatcagtcaatatgtttaagatggacattggttttgtccagaaaggtgggacaactcaaagcatggcggggggcttccaggtcataagtagattaagacaaatggttgcattctcttgagtctctgattagcctttttctgaatacacaatttacatgtgagaggagggtaraagaatcttcacttatgccttagtctggcttagtgaaatgatagagcagaagaagcaatgagatgtgcatttgtctcaggtgagcagagagatggcattgtgttctgttcatcctttgcccacaaggaaattccctaagggcaaatggtgagggaggtatgtagcttccttatctttgtagccatcttatttagtaataaattgggaggaagtttgcttgatgcagttcccagctgttttccctttggattagtgaagatttattatttcataccataaacttgctctgtgatttagttggtgttagtgtgatatttgagaatatagtatttgggatttgaagataatt

SEQ ID NO: 449508 - DNA, 453 bp, Homo sapiens
cctggctaattttttaaatttttcttcttgtagagatggggtctcactttgttgcccaggctgcactacgtactttgtagtagaattcttctttataaatatactttacctcatctgggcactggtctcatttttatgttgaaaacttggtggcaacacttgagaaatgctggttctctttgcyagttttggtggggcagcaggagaggtagacaacccctggggtagggttagaatattgatgctctgtgaggcagtacctacgaggtgatgaggcccatgtaactacttgaagagattaagggatccagtagagggtaactgtgagtcaggaatcccactgtgacccttactgcctataccaagagagtgccgttaaaccattcaatactgaaagtgggcatgaaaaaaatccaaagggtatcaccagctgacaaagggcagaaaatttat

SEQ ID NO: 449509 - DNA, 453 bp, Homo sapiens
cctggctaattttttaaatttttcttcttgtagagatggggtctcactttgttgcccaggctgcactacgtactttgtagtagaattcttctttataaatatactttacctcatctgggcactggtctcatttttatgttgaaaacttggtggcaacacttgagaaatgctggttctctttgccagttttggtggggcagcaggagaggtagacaacccctggggtagggttagaatattgatgctctgtgaggcagtacctacgaggtgatgaggcccatgtaactacttgaagagattaagggatccagtagagggtaactgtgagtcagraatcccactgtgacccttactgcctataccaagagagtgccgttaaaccattcaatactgaaagtgggcatgaaaaaaatccaaagggtatcaccagctgacaaagggcagaaaatttat

SEQ ID NO: 449510 - DNA, 537 bp, Homo sapiens
attaacctgttttttgttataggactgttggctgcgacagtttggacacttaggtaagaaaaggtgtcacacttttctgcctctgcaaagccgactgaatataggagagttataagagaaaccaaaatcccataatttgggtgagtgaaaactaaattatcaatatagcttttaagcaccttagtatctgttattgaatgtgtctagcaaaataaacttaatcaacaggtaatacttaaaataagtaaacatcaaatattaatatcaagttttggtttttattaacattaatatttgatgtttattaattaatattgattaatattaatataatattaatattaatagttgatgtttaktaattaaaattaatattttatcatatcaaacacatgttgcaattaatgataatatgaatattctaagacataaacaggtaaagattacacaacaaaaattccaaaagaaaaccgtgtaatgacgaataagcgtataagacatttgcaataccaagagtaatctaaaatatccaagtaa

SEQ ID NO: 449511 - DNA, 421 bp, Homo sapiens
acctgccatcagattgtgcctgctatgtctgtacaaattgggtgaatttactctagatctcaaaatatcttcttctttttccttttttttttttttttttgagacagactcttactctgtcactgaggctagagtgcagtgacaccatgttggctcactgcaacctccatctcctgggttcaagcaattttccagcctcagcctgagtagctgggattacaggcgcccaccaccatgcccagctaatttttacatttttggtagagatggggtttcaccattttgaccaggttggtctcgaactcctggcctcagrtgatccacccgcctcggcctcccaaagtgctgggattacaggcatgagccactgcgcctggccaatccccaaatatcttaacgttcctgggcatgccagaaagtg

SEQ ID NO: 449512 - DNA, 585 bp, Homo sapiens
ccaatgaggtatctctcaaataagtcacttggatattatgtaatcatcattgtggaattcactgatgcacatagatttctaggcatgcttatatttcaaacacaactaagttgtaatggagaaccatgattgttagcaaatttatttggattattttttctctatcagatcagtagacataaataagcatgttcttttttattttattttatttatttatttattttttgatacaggatttttgctcagttgctcgggctggaatgcattggcaagatctcagctcactgcagcctcaacttcccagggtgaagcgatcctcccatctcagcctcctgagtagctgggactacaggtgtgtgccaccacacccwgctaattttgtgggtttttttgtagagatagggtttcaccatgttgcccaggctggtctcgaattcctgggctcaagcaatccacccccatcatcctcccaaagtgttgggattacaggcgtgggccactgtgcctggccaggataatctcttaaaactttaaatgtaacagaataatgatacgcttagatgtacatttgtgatactaaat

SEQ ID NO: 449513 - DNA, 586 bp, Homo sapiens
gggacagttggattcatagggctcagtgctgggtgcaatggcctaatgtgtagatagtaatttataagtcatccgggtaaacctggtcactgcattgtacatgtggacacaatcacctaggaagagactagagaataccacggggagaaggcttagcactaagctcctgaaaagctcttgacagttaaaggttgtttggaactggatcaaccttcaggagtcatagaaaaaacattcaaagggggtaggagaaaaatcagactaagctgagtcaataaagtcagcagcagaagaaagtgctctaggaaggaaaackgttcattctattaaatgacaaggaggtcactggtgacactgggggtagggtgatgaaggtgaaagcctcattggaaaagggcaatgaggcaggaggctgttaggaatacattgtccagggccttacttgtttcactaggaaaactggaattggtcccatcagcattgggagctaacaaatttccacctactggcatgatataattgtttttgtaatacagaaacttaacttggcagcagtgtgtgaggtagatgggctgtgcagaacatg

SEQ ID NO: 449514 - DNA, 586 bp, Homo sapiens
gggacagttggattcatagggctcagtgctgggtgcaatggcctaatgtgtagatagtaatttataagtcatccgggtaaacctggtcactgcattgtacatgtggacacaatcacctaggaagagactagagaataccacggggagaaggcttagcactaagctcctgaaaagctcttgacagttaaaggttgtttggaactggatcaaccttcaggagtcatagaaaaaacattcaaagggggtaggagaaaaatcagactaagctgagtcaataaagtcagcagcagaagaaagtgctctaggaaggaaaactgttcattctattaaatgacaaggaggtcactggtgacactgggggtagggtgatgaaggtgaaagcctcattggaaaagggcaatgaggcaggaggctgttaggaatacattgtccagggccttacttgtttcactaggaaaactggaattggtcccrtcagcattgggagctaacaaatttccacctactggcatgatataattgtttttgtaatacagaaacttaacttggcagcagtgtgtgaggtagatgggctgtgcagaacatg

SEQ ID NO: 449515 - DNA, 546 bp, Homo sapiens
aactttatatcacatgctgtcataggcccattgattgggaaaattcatacagatatgtttttctcagcgcttctcgtgtccctccaggactcaggcaaaatctggagtctggggttgtggtctccaggaagaaatgcagaagctgtctttattctgggatcatccacaccacccatggctttaattatcaccttataccagtaggtttgaacctagttagagggaagatgcagcccgttttacacacttctctgcttttctaatttgctgggagatactaacatgagtggatatagaattttgtcaaatgcttgttctccttctattagtatgatcaaatggtttctctaatttagcctgttaatatggtgaatcagactgattaattttcaaatgttgaaccaactttaccttctttggatgaactccccttggtaataatgtattgtccwttttagacattgctggatttgaattgctaatattttgtaaaggacttttgcaaatacgttcatgaggataccactctgtagttttgtttgtttt

SEQ ID NO: 449516 - DNA, 632 bp, Homo sapiens
  misc_feature (1)...(632): n = A,T,C or G
nnnnnnnnnnnnnnnnnnnnnnnnnnnnnnnnnnnnnntttgtaaagtacttaatgatcctaggctgtttgcttatatttcagactgagacactataaagctgatttgatggttggattgtctgtgtatgaggactcttggccttcctgtagggtgattatctggaaaaataattccttagtaaatattcaaagtcagtatcttcaatgtttcctcctgttataatcagattctccagagatgcctgttcagacttgacttgggtcggctgtgtccccacccaaatctcatcttaaattgtagctcccataattcccacgtgttgtgggagggacccagtgggagataattgaatgatggagccagttttacccattctgttctcatggtagtraataagtctcaaaagatttggtggttttacaaggggaaacccctttcatatcgttttcactccctttcttgcccgctgccatgtaagaagtccctttactcctcctttgtcttccaccatgattgtgaggcttccccagccatgtggaactgtgggcccattaaacctttttttaaaataaattacccagtcttaggtatgtgtttatcagcagcatgagaatggactcatacaagac

SEQ ID NO: 449517 - DNA, 584 bp, Homo sapiens
tacacagtgaaaatgcctcaccttgttcagttcttcaagcagagagagcacacaagtctccctgatgacctgccacccagaggactcacacttggctgtgatgtttcccctgtagccactgctgcagggcagggtatattcatcatccttggacccaaatccaaagacaatgtcattacactgggctggaaacaaaagaaaacaacaaagaaaaatgatcctagaatatcctggcactctatataaaccatgtagtcatgttcaaatgttttagaactcatttttggagatgaaatccaggcaaaattcagaagtaagagaagtttgtctttgatgtcctgcttcatccctctcaacattccttactcattcctgatgccttaccctccctgaggctgactcctccttccaggkgtccgatctgtgccaacaatatcacttttaatgggctatcaactagtaagtattaggtgataataaggaaagatgtgattactctcaggaaatatttttactctttaaaggaacattagaaagccagacaattttccagacactatagaataaagcagtaatgttatggt

SEQ ID NO: 449518 - DNA, 588 bp, Homo sapiens
ttgcctatgtggcaagaattcctaaaaacactgtcttaaaaaatactgaacacctgaaatgtatgccctttgcttatcaaggttttctttcctccaaggtactggttttagtgagtccaaacctaggccactttcaccatatttagtaaacccgtgtccagttattgttttacatagttctgctttgggctttgcctgtactcctgccctaactgaaactctgtacacacctaattgttcagctgatatcactttgtcattcactttcataatcaacacacttagtttattccctgtttttattttacatactcaaggaacgtataaaamtaggccaaatatttaagaaaacagttttgccattgaaaattcctgatacaacttgctgtaagcactatcacctgccttctgttaaaagaccattttcaaaaggtgaaatcctgactccaatataaaatgacatgtgaaagagattttatttaactcattaattaatgaagggagtggtaaaacgttagaacttattcaaagggaaatcccaagagcagatatatttatatagagacaatcaggaatgctgaactgagt

SEQ ID NO: 449519 - DNA, 547 bp, Homo sapiens
aactgtaattaatttgattttattttgtaaattaatcraaaataatttgattttatttttaaattaatcaaaaattaatttgattttattttgagaccaggctggtctcaaactcctgggatccaacaatcctcctgcctcagccaccggagtagctgggacttgtacaagtgcgcaccatcgcacccagcaataactgtagttgatgacgctcctcctcctaacattaaacccacacaaaccagacactgctgggtcctggatgctagggatataatggtgaagcagacacagtccttgacctcacagagggacagcccagcaggagacagagagacaagtaggcaggcttccttgctttagtgttatgagagagacaagcatggtttgcttggaagaacaccaaaggggcccagaaattggaaaatgcattctgaaggatgtcagattcaaggaattggatcttggaggggaggacatacttcattgagtggagagaggtggggaaggagggaatgagaaagggcatgaggagagcacaggtgaa

SEQ ID NO: 449520 - DNA, 560 bp, Homo sapiens
cagcctggaactcttcaattatccccagagacatctttatggtgtcttcaccgtccttaaatctccaagcactagcgaagcccagtgtgtgcaccatgcacatacacatgtacacacttgcacacacagcctgctctcaggaaacggctgtgccttcttggaggaaataacgccattggccttctcaccaccaaatctgtgccaggatcagcctcaatacccatctcttttgccctcctgttttgtcccaagggaagagggacccttccctgcctccagagctcagctctcccgtgctcctgccctttattcccatagcctcactaggctcacctcttattggccctttcctgttagcatttaattatgcttagatccttctcatcttaaaacaataggagcagaagctcttcctaacccatatttttcctcagctgcacttccatcttcattttccctcaccacaaaattcttgaaaggattatggcgattcaygtcttcacatcatcaccaaccattcacattgtgttctgtctacgctaccccagtgtacctcagca

SEQ ID NO: 449521 - DNA, 584 bp, Homo sapiens
gttatttcatctctaaccactaggaggcttttcttgaataataccccacccctacctccaggtacagccattccctcctttaaacctcatggcactctgtacattcttgaacttggatgccattgtcctttattaccaccattgttcatttttgtttcagcacttttcacagtgccagaatggaataaatgtttctctgaatcagtgaatggactcttagcatttccagtcttacaagggcaacttacaaatctcaagtagcaacygtggatcagttttgctctacaagataactgccatgagaaaggagataaagctatctggcttgcctgagattttcaataaccaagagtatgagttttctcttagttagcatttgtggagtgcttactgagggttaggttgtgtgagaacattctctgctgttagccaaacattaaaatagctctttcaggataagtgcttttaatgctctttaatactttgaagataattgtaatttggggttaggaaaccctttagccatttaaatttataagttgttcaaattgagtttgcattttatttttacaggctagcaacat

SEQ ID NO: 449522 - DNA, 571 bp, Homo sapiens
cctcttctaaataaatcaattttaatgtttattcagactgaatttttcactaaaatttgtatttcatctcgaatatcacaaaatttatgactratagaacttgccctgaggaattaaaggcattctcttaagagttccccattgtatgagtaacaattcaaattccaggtcagtgggcacactctttctcgtctaatgcattagggcggctctacaggttacgaagcatcggaaaacaaaaaaatgactttaagttgtctttccttcagcattacaaaaaagaaaagaagctgaaataaaatattactaattcaccctgaaaggctcctcagttctccaaatttaggggcatttgcaatataacagtaatattttttaattcaatctaatttaagagctcccaaagaattttcatatgcatatgttgctcagagcatccatgagttaattgagtcagatattaagctaattttcagggggcaaaatagattaataaatagaaaaatgataattctattcatctacccattgagccagcatgttttgattgcctgcactctgggtactattc

SEQ ID NO: 449523 - DNA, 571 bp, Homo sapiens
cctcttctaaataaatcaattttaatgtttattcagactgaatttttcactaaaatttgtatttcatctcgaatatcacaaaatttatgactgatagaacttgccctgaggaattaaaggcattctcttaagagttccccaytgtatgagtaacaattcaaattccaggtcagtgggcacactctttctcgtctaatgcattagggcggctctacaggttacgaagcatcggaaaacaaaaaaatgactttaagttgtctttccttcagcattacaaaaaagaaaagaagctgaaataaaatattactaattcaccctgaaaggctcctcagttctccaaatttaggggcatttgcaatataacagtaatattttttaattcaatctaatttaagagctcccaaagaattttcatatgcatatgttgctcagagcatccatgagttaattgagtcagatattaagctaattttcagggggcaaaatagattaataaatagaaaaatgataattctattcatctacccattgagccagcatgttttgattgcctgcactctgggtactattc

SEQ ID NO: 449524 - DNA, 577 bp, Homo sapiens
ttatatcaaaatcatttcacattattgagattgtttatattctattaatagctgagctaggttgtatgctctgtttttttcttttctgtacagctttttgtttctgttagatgttgtattttctttttacttgcttgaatatatgtgttctaatcaaaattcatccccaaactctccttctccagtaagtaaacctcttctaaataacactcagatgcattgtttttctttttctgagcaatctcttctgaagatccagcctggatctgccctgtaactgctgtctgggaaattccctttatccccatcagaaaggttctattccctctgcttccttttctattgcatcctttgttttgctggggtcatgtcttcatccttctaggtttactcccatatatggcatggcatggcatattcctcaacaattttgaggaaagggagcattggagggaaatttattgaaaacttccrtgcataaaaatatctttattcttcttcacatttagttgcttctaggttgcagtcatttctcctcaacattttgactgtattcttcattgttttctagcctata

SEQ ID NO: 449525 - DNA, 559 bp, Homo sapiens
tgcgaaacccagatgccatggatagctatttaaatacactctttgccaactttttattatatctttctttcttgacattctgccgtgctactggcaaactccagtgctggggcccctagcaatccatctgccctgttctctctgtgaccagtggagaaatacacaaaatattactgaagagcaasccacatccgggttctcacagctgcttcacaaagatttccagggctcagtaacctagctcttgagatttgaccccctcattactcctcaattcctttgcctgaaaatatgtttatatctctaattccaaaatcttcaccaacaaaccttacataatatttcctactcttcgatcaccatcctaacttttccctttcagtttgcctccaaacttctcaaaaaactgattggtaatcacccagactcttcctcctctcttcaaagctctactaaacttctatctccctaagccactctctttaaatgacttcgggctaacaaaagcttctctacttctcatttatctcatcccgaaacttttatgtgtcaatttttt

SEQ ID NO: 449526 - DNA, 602 bp, Homo sapiens
gtctttgaacttatgtccaaagttcaaatgatgagtaaaatgtctaaattattccgcatcttttatttttctcctatttgaaatcatgcccaaattatcccacttatgttttttccctttccactttaatgatgcacatctttgccataatgcctgataatcatttggatctgcatgtacgtgtaaatagagcaaaaaataaaatacagtcaagattacccttgactaatcccataataatacatagatagctgtgtaaatgcccatatttacaggtcagattggagactgacatgacacactgtcactcaataagcctgtgagggccagtgttttctcaaggttggaaatgatggctgtcctagttggtatcagatgaggtagatgacttgcatttaaggcctatgtgacatgagtgatgtttatcttttaatcctagaaacacactcggtgtgtcaagtcacccttagtgcaagaggaacatgggaactgaacccatcagatgaaatagctgagtcaagtctctcttctccagaccttactcctaatatttgtggaaattgggacaagaatamaaataagggccacataacacatctata

SEQ ID NO: 449527 - DNA, 509 bp, Homo sapiens
tctcccttaatttctctcttacatagaattctgggaatggtgaactgtgtaactgacctcagaaagatttactagagatgtaggtaattttcaaggcttttattggctgtagaaatggtctgggagacaaatgtcctaaaaatccccaatttcccttaactggcttcacaatctttggcaagtcactttacctctctgagcccccatgccctcatctctgcactaggtctgccttgacacttttgtttgcagggtttaggaccagatggaagtgccttgtaaactgaaaaataccacattatatatyatatcacattattatactttctgataaatggttacaaagctatctgaaatagaagtttacattttatttctgattaactttcaatattaagtgatagaacctaagaagcaaaagcgaacataaaattcaactggaaaatttgaaagagaaatggttttttctctaggaaatttgcactaataactttttcccaccatccccc

SEQ ID NO: 449528 - DNA, 594 bp, Homo sapiens
gcaatccaaaattgacaacaaagagtaacatctagaggaagtaattcctttattaccacctcactgttgatctccgagtatgcaaattctatttatgatgttgacagctgctgagctctgcgtcagaaacaaaatgtgtccaactcccgatkgtccaccccttttttccttggacatgccttagggcagtaaagattatacataaactagacataggtgactcactttccccttaattcccttacaacaccttccaccttcacataatatgctcaaataaatatataaggagtgcaatgtccatgaaaattatttgctttattcacctttgactatgtcttatcccaccttgcaacacaggcatgacactaagttatcacaagttttgattctttgcatttgcctttttttttttttttgctttattgtgcacacttcacaggtacgtatttgacttttaaccaaataatttgcacaggtgtgattttaaagtaacaacaacttgtaaatagttgcatggataatggcaaaaactttagtacagagttcagagtctcatttgatcattggataacatttggcaatgcagtaaaa

SEQ ID NO: 449529 - DNA, 627 bp, Homo sapiens
ggatatgttagataaagaatttctagattgtgaaatatgttctgggaagagacttgagaacaatctaatcccctggatatatttaagaaaaggataaatagttatctgtgtaatttggggttcagattaaatgcctgccttaagacagcgtcagtaagaactgaggcttaatgaagtcctgcacttcccatagcatgcaacaacaaaaaagagagatgacagtatttcagatccactgttgcttggaaattttgttagaatttcttgtaaaatatgtgtttaacagaaatcctgccagcatttacagttttaaatctttaaggaarggacacaaaagcaaagttggaaaaaattttagctttaccattatttgcttgttcaagattcttaaccattaatatctttaatttttacaaggctaaaggagccccaaatctaacaaacttaagtgtctttggtttaaggcatactattggtaacgagtaattttatctttaatagtttttataatgcatgtaaaaaaagctcccagatagaatattgaaggaaacctcttatgtgtgcttaacaaaattatttctacctaaaatattacatatttttggccttttagtcatgaatttaatt

SEQ ID NO: 449530 - DNA, 588 bp, Homo sapiens
ccacaaactgcatgttctcacttacaagtcagaggtaaacatcgagtacatatggacataaagaggggaacracagacactgaggcctacttgagggtggacggagggaagagggtgagaatcaaaaaactacctatcaggtactatgcttattacgtgggtggcaaaataacctgtacaccagacccctgtgacatgcaatttacctatatatcaaacccgcacatgtaccccttgacctaatttttttttaaaaagtagaaaaaaaaaaaaacaaggaagaagaagaagtaaaacgattgcagttgacatgattgtctatctgaaaaatctcaaagtatctacagagaaactgctagaactcatacatgagttcagcaaattctcaggatacaagatcaacatataaaaattaattgcattcctgtatactagcaatgaacacacagacatcggaatgaaaacacaataccatatactattgctcaaaaaacacttacgtgtaaatcaaggaaaacatgtacaggacgtataaactgaaaattacacaacactgatgaaagaaatcaaagaattaaagaaatggag

SEQ ID NO: 449531 - DNA, 588 bp, Homo sapiens
ccacaaactgcatgttctcacttacaagtcagaggtaaacatcgagtacatatggacataaagaggggaacaacagacactgaggcctacttgagggtggacggagggaagagggtgagaatcaaaaaactacctatcaggtactatgcttattacgtgggtggcaaaayaacctgtacaccagacccctgtgacatgcaatttacctatatatcaaacccgcacatgtaccccttgacctaatttttttttaaaaagtagaaaaaaaaaaaaacaaggaagaagaagaagtaaaacgattgcagttgacatgattgtctatctgaaaaatctcaaagtatctacagagaaactgctagaactcatacatgagttcagcaaattctcaggatacaagatcaacatataaaaattaattgcattcctgtatactagcaatgaacacacagacatcggaatgaaaacacaataccatatactattgctcaaaaaacacttacgtgtaaatcaaggaaaacatgtacaggacgtataaactgaaaattacacaacactgatgaaagaaatcaaagaattaaagaaatggag

SEQ ID NO: 449532 - DNA, 605 bp, Homo sapiens
cagtccaagctcctgtgcctggcaagcaggaccctccatgatttggtcctgccttcttccccaaccacatctctccatgtttcaagcctccccagggtggtcaccattccctgaatttcctgtgttctttccagactttctgactttggctcatgctgtttcatctacctataatttctttcacttccttctctgcttatgggatttccacttatgttttaaggcccaatgcaatacctctcctctgggaagccttccctgatggcatgacgtataaactgattagcacagggtttggtctagcatagatgctcaagaaatatttgtgcccattccctttgctgactgttcctcatttcctaggaattattcatctcactttcctctctattcccattgcagtttgcttattcttagatcaaagaatccttcatcattgggggtaattacagggctcagaagtcagatagctgtgagtcttctactagttgtgtgaccttagggaagtcatttcaattctgagactcagttttctcatatttcaaatgggaatrtcagtacctgcttcacagaattgttatatggatgaaaaaatgatatacaga

SEQ ID NO: 449533 - DNA, 602 bp, Homo sapiens
ccagtatgcagcagacatgctgcctgctgagtcttgcacagrtgttctctaaaaagcgctgaagttggaactgggagccctgggttcaagtctcagcccagggagatcattcactggctgcatgcatgcatgcagttataagcctcctcatcaccctggtgtctcaagagcctggatacctctacttgtctatatgactgatatgaactgagctccatgcttaagggttgtcaaaaagcagcaccttcaccctgatgcctacaggtcatagtttgtagagcagcctgagatgatggtactggattgctggcaggcccagctcaccgctgaattataccaagatgactgcaattaacagtccctagtttttttctcaagccacatttcctccacactatacttcagcagataacccaaatgtagaacttgccatttatccctgttaaatttcccatgaccatcttgagctcgtcaagatctttttggatctcaatttcatgctacagagaactcatcaccttctggcactatctcaggggcaaatgtggtaagagtgaattctcaatcctcctccagatcattgagaaaaagtgaaggaagcc

SEQ ID NO: 449534 - DNA, 602 bp, Homo sapiens
ccagtatgcagcagacatgctgcctgctgagtcttgcacagatgttctctaaaaagcgctgaagttggaactgggagccctgggttcaagtctcagcccagggagatcattcactggctgcatgcatgcatgcagttataagcctcctcatcaccctggtgtctcaagagcctggatacctctacttgtctatatgactgatatgaactgagctccatgcttaagggttgtcaaaaagcagcaccttcaccctgatgcctacaggtcatagtttgtagagcagcctgagatgatggtactggattgctggcaggcccagctcacygctgaattataccaagatgactgcaattaacagtccctagtttttttctcaagccacatttcctccacactatacttcagcagataacccaaatgtagaacttgccatttatccctgttaaatttcccatgaccatcttgagctcgtcaagatctttttggatctcaatttcatgctacagagaactcatcaccttctggcactatctcaggggcaaatgtggtaagagtgaattctcaatcctcctccagatcattgagaaaaagtgaaggaagcc

SEQ ID NO: 449535 - DNA, 604 bp, Homo sapiens
  misc_feature (1)...(604): n = A,T,C or G
gatagacaagccccatagctagtgaggagtagctgcagactagaacccaggtgttctgagccctagtcttaggccagacactgttacgtgagatgcacgtttccttcaannnnnnnnnnnnnnnnnnnnnnnnnnnnnnnnnnnnnnnnnnnnnnnnnnnnnnnnnnnnnnnnnnnnnnnnnnnnnnnnnnnnnnnnnnnnnnnnnnnntttttgtttgtttgtttgtattccgaaagaacaagagaaccagtyaagctgaatgcctgaagcaaatctctgttagcgatgttttcaggatgagggagagtggtgcaagaaacgtgcttccagatgcacatggtttcctgggactagggttcagggtgtcatccctgggtgttattaagtgtcagaaggagagcaaacaagggaaacatctgagatccagctaaggctacaccctggaaatgcaagcccagctcttgcaaaggacctcctttggccactcaccttccaggccttacaataacttgtttggactgcaggtttcttggtggactcacaggccattctgcttttatttggtcaacctcagttcacaagcacccagatgctgagatcct

SEQ ID NO: 449536 - DNA, 622 bp, Homo sapiens
  misc_feature (1)...(622): n = A,T,C or G
tgcctcctgaccctcaaaattcactatccccatcccgtttaaaaagagtagcaactggtttatctgtttckttttaaaaagttatcaggatggcgaaactggcccagagagaggaatggacttgcccaaagccacaggaactagcatgcatcccaggcttccaccatcctagagcaagttgtgcttcccattgacactcattttgtaaatgagacctgtgtggttcaggaggttgtacagctgacaggcagcagaacctgggtgtacaccagggctttttgcctcctagatcaagagaacctgagttctctgaccacagcatgctagaggccacataccaacagggaaaaccaccaagcggaaatgaggacagacaagtgcccttggggaggctcaggctggcgactaccccatgcagaggaagtgcacggaacttgatctgggagaaagaaggctgcctgctggctaccacctgagtctgcctgaccccagcccctctcacaggctctgaggccccagcacatcattactctccctgggctgctcacagcctgtcatccccaccttagcatgggccctggtgacatgcagnnnnnnnnnnnnnnnnnnnnnnnnnnnnnnn

SEQ ID NO: 449537 - DNA, 549 bp, Homo sapiens
tatcctacataccctaaaagacaagaggcagccagccttgaacctaatcaaatgaaaagtattcggacaaaagctcaggtcttgcatgtacgttcaaaacatcttgtgatattgaacactcctgcaagtgcttgatatgtctggcaaaaaaaaagatgagyctgtgccaggtaaggaaacagattggggcactcacagaggacacatcggcattttgccccggtggggcagaggagagccactgggaaacaagttgacttatttctttttgctgtgttcttgaacaattttaatattcttggggatgttgtaagaaacacaatagaaacaaatgggaaatggttaaaatattggagttgtaaactttccgtggcggactttcacctgagtttaaaataccaggaacctgttaagaaaaaaaataaagccctcattagcaagcaagcagttaattaagggcctgtagaatggtttgcatcgatttcaccatgaaaccagaaaactgtggctacaagtcaatttttccctccgtagctgcttacttaccat

SEQ ID NO: 449538 - DNA, 557 bp, Homo sapiens
gcaagagctgggaccgctgtagaaggacagatggtggccccaatggtggggaagaacatatttcccacttccagcaggctaagcaaacctcccaagttttactgatggccaagctgagcctcaggaacactaattacctatgatatggcatttactagcctgttacatttgccrtggacgataatggttaccatggaaaaactggacattcatttgaatctggatctttgaggttttgtgcggggggtgggggcttttttggtttttgtctgttcatttctttagaggcagggtctcactatattgcccagtctggtctcaaactcctgggctcaagtgatcctcccacctcagcctcccaaagcactgagattacaggcaggaaccaccgcacctggtctagatcttagttttctaaaggagttatttttaaatgtgagatgagacacaaacgcttgagtaagctgaaaagccaaatccagccttctatagaggagctcatttttatgtacagaccagcatctctctatttggaggattttgcttacccatgtgag

SEQ ID NO: 449539 - DNA, 606 bp, Homo sapiens
acctcgggcacagccctgcctcctgtgggcctggatctccccacctgtcagcactttgtgctgggggcctgcctgacccgagaggccctgcctgtctttcccacaggctcccagagactgaccggcttaaggctcgaggcgtgccagtgcccccggagtcaccctgcatcagctcttgccgcctgctgcctgggcacgggagaccacactggtggaggggatgagacagggcaggcccagccttgggacacccctgtccccacagctccagwgactgggtgcttcccccagccctgcagagcagcctgccccactgcagacagtgctggtccagggaggtcctcacaggacaaccagagttgtgatgcgggtgatgatcagaagctgtgagtgtggaggaggcaggttctctctgtctagccattgtacagatgaggaaacggtggcccaacgccacgcagtgcccagcaggggtggccccaggagccagtattccagttcaggcttgactgacctcataacccccaaactggctcatgctgcctcccggctatgctctaagatccccaaaggggaggccctcactagacccccatcctgtccaat

SEQ ID NO: 449540 - DNA, 601 bp, Homo sapiens
ctttctcatgttgttctcacaatagtgaataagtctcatgagttctgatggttttcaaaaggggagtttctctgaacagctctcttctcttttctgacatcatgtgagatgtgcctttcacattctgccatgattgtgaggcctccccagccatgtggaactctaagttgactaaactttctttcgtaaattgcccagtcttgggtatgtctttatcaacagtgtgaaaatggactaatacataggctgatatggtttgtctgtgtctcagcccaaaatctgatcttgaattataatccccacatgttgggggagggatcttgtgggtggtgattagattatggggcagttcccccatgctgttctcatgatagtgagtgagttctcaagagatctgatggttttataaggggattccccactacccsctttgctctgcacttctccttcctgccgccatgtaaagaagaacatgtttgcttttccttccaccacgattataaacttcttgaggcctcccaagccctgtagaactgtgaattaattaaacctctttcctttataaattacccattcatgggcagttctttatagcaacatg

SEQ ID NO: 449541 - DNA, 583 bp, Homo sapiens
tgagtaaactattaaaaaaaattaggtaactataatggaataggtgcttgtagataatcttgtcatataacttaaaatctaaagttatattaagctaaataacaagtatttattaaatttctgggtcatttccagtttttttaaattatagaacaacatttttctaaaaaatctgttcttaaaggaaawttttttttctaattcaaaggttatttaaaagttattcgtgaatttaagtataagtaatcagtgaataagaacaatttaaataaatttataaaaataaagaggtattttttggcaagaaaagttaaaaggaaaataattttatataaaaagtaatcttgtaaatttttatccaaaaataaaataacttgttatttaagaaagaaggatgtctgggataaaacagaatgttcaagaatgtcataaattatttttatcacattgtctataattaaaggaaaattatttataatagtcttcctaaaaattgggttttgctatagcaaaaaagcaggtgcacactaaagaattggttagaacaatgaaattttattaagagattgatttacttttaata

SEQ ID NO: 449542 - DNA, 593 bp, Homo sapiens
aagactaccaaacacccttatcaattagtagcataggggatattccaagacctcagtttctagccgctgaccaatagctaattatgcaaataggcccatctgctaaatgtgcaggatttaagcaactcagacctgctgggttaacacttaccaggacaaatgaatttgtaaaataaaatcctcaattgatctaaaagaaagcaaaaagaaaaaaaaagtggaaaaactgaataaaagataagaatagaaaacaaaaagaaaggtaacaaacatagatacattgatgattatattaaatgtgattaaaagtcagtgttttcacactgaaaagaaagaaaaagaaaagaaaagaaagaaaagcaaaagaaaagaaagaaaggaaagattaaacctactgcctataagraacatatctaaatatgaaggcataaatagtttcaaattaaaatgatagaagaaatatggcattccaacactaatcataagagagctggaattgcaacttaatattaaagtaagtatagatttggaacagggcatattatcaggaataaaaagtatattgtataatgatagaaagtctaataagttag

SEQ ID NO: 449543 - DNA, 646 bp, Homo sapiens
atacgcagtttgctagaggataattttgatctaaaagatgagtaggttgaaaaaaataaataatgatataacatgcaaatagtaaacaaaagagagcaggggyggctatacttattttagacaaaataaactctaaatcaaaaactggtataagagccaaagaaaaatattatactttgataaaagagtcaaatcaccaaaaaggtataaaaattataaacatatatacaccaaaactcagagcttgaaaatgtatgaaggaaacattgacataatgaaacatagaaattcacagctcacagtaagtcagagacttcattatctcatttgcaatagtgaataaaacaaccagactaacattaataaggtaatagaggactacagcagagataaatagagtatataaaaacaataaattaaatcaacagaaccaaaaagttgatcctcaaagagttctacaatattgacaagctttagctacactaacaataaaagaggaatgatgccaattactgaaatcataaatgaaaatgggatattactaccaatatcacagaaataaaaaggattataagagagtactgtgaacaacggtataccaacacattggataaactagatgacatggataaattcttggaaacac

SEQ ID NO: 449544 - DNA, 575 bp, Homo sapiens
tagctaaggcactagtttgaaaatggctgcattaggctgtttttgtgtggctataaagaaatacctgagactgggtaatttatgaaaagaagaggtttaattgactgacacttctgcaggctgtacaagcatggcaccaatatccccttggcttctggtgaggtcctcaggaaccttacaatgctggkaaaaggtaaatgggaaggaggcatgtcacatagcaagagcaagagcatggattgggggaggtgtcacacacttccatacaaccatagctcgtgggaactcaaatgagagcttacttgtcaccaacgggatggcccaaaccattcatgaggaatcttccaccatgatccaaacacgtctcaccaggaaagcctcaatccagcattagggattgcatttcaacatgagaattgagtggggacaaatatacaaactatatcaatggcaacctcagaagttgggatgctcttcttcaggatcttgtacataccttaagccaatgtttattttatggttctattcttcagaaggtagaacacatgggtccaggaacaaagtagtaaaagtag

SEQ ID NO: 449545 - DNA, 575 bp, Homo sapiens
tagctaaggcactagtttgaaaatggctgcattaggctgtttttgtgtggctataaagaaatacctgagactgggtaatttatgaaaagaagaggtttaattgactgacacttctgcaggctgtacaagcatggcaccaatatccccttggcttctggtgaggtcctcaggaaccttacaatgctgggaaaaggtaaatgggaaggaggcatgtcacatagcaagagcaagagcatggattgggggaggtgtcacacacttccatacaacyatagctcgtgggaactcaaatgagagcttacttgtcaccaacgggatggcccaaaccattcatgaggaatcttccaccatgatccaaacacgtctcaccaggaaagcctcaatccagcattagggattgcatttcaacatgagaattgagtggggacaaatatacaaactatatcaatggcaacctcagaagttgggatgctcttcttcaggatcttgtacataccttaagccaatgtttattttatggttctattcttcagaaggtagaacacatgggtccaggaacaaagtagtaaaagtag

SEQ ID NO: 449546 - DNA, 575 bp, Homo sapiens
tagctaaggcactagtttgaaaatggctgcattaggctgtttttgtgtggctataaagaaatacctgagactgggtaatttatgaaaagaagaggtttaattgactgacacttctgcaggctgtacaagcatggcaccaatatccccttggcttctggtgaggtcctcaggaaccttacaatgctgggaaaaggtaaatgggaaggaggcatgtcacatagcaagagcaagagcatggattgggggaggtgtcacacacttccatacaaccatagctcgtgggaactcaaatgagagcttacttrtcaccaacgggatggcccaaaccattcatgaggaatcttccaccatgatccaaacacgtctcaccaggaaagcctcaatccagcattagggattgcatttcaacatgagaattgagtggggacaaatatacaaactatatcaatggcaacctcagaagttgggatgctcttcttcaggatcttgtacataccttaagccaatgtttattttatggttctattcttcagaaggtagaacacatgggtccaggaacaaagtagtaaaagtag

SEQ ID NO: 449547 - DNA, 342 bp, Homo sapiens
gagtttaaccacagggcatgataatactaagaaataacctaaaggatttatttcctgtattctagacatctttactttaattgtggagtaatactccaatttccccttggtagatggcattagttaccacagccagtatagtaatttcctccttttcctgttgattcagaggcacaaggagctcaaggtgacctagaagcagtcttacttttcaatgaaatcattgttgtgtgaaagtattcatcattttggaacaaagacatctagccatctcagctatatgaagcaaaaaaaaaaaaaaaaaattgytagtagatcactagggagagtagttagtggtga

SEQ ID NO: 449548 - DNA, 513 bp, Homo sapiens
atgttaagaccagataaagtggacagtggactccagagcaaagaaaattattgcagacaaagagaaatcttacattatgagaaaagaatcagtataccaggaagacataacaacctgggatatgtatgtatcaaataatgtagcctcaaaataaagcaaaaactgataaacctaaaaggaggaatagacacattcacagttatagctagtgacttccaaaacctcacaatcagcagttaatagaactactagacataaagtcagcaaagatataaaagaactaggaaacacmattaaacaacagaatctaattgatttttatagaatagccccctcaacaacaagataatacacataccttttcctagcagccattcaccaaatagatcatatccagggtcactaaataatccctcaagatataaaataactgaagtcatgtggagtatattctttttctataatggaataaaactagaaatcattaacagaaagacaaaagaaaactttcca

SEQ ID NO: 449549 - DNA, 633 bp, Homo sapiens
ctgcagctgaggagaaagggacatagtcttaaatccatcatccaactgagtaaaattggggggtttataatagtgaggaaggcaggaaattagggaaggataaggaagcaataattatggataagaggtctgatgtctcagggcctggatgtggtcatctgatgagtttccattctatgcctgaggattagttttctcaagaaggaactcaaatgagaccaatgcacctttcaagttttaagaccttgcagggtcaatttctatgattatttttaaaaatagcttgtaatcctagasctttgggaggctgaggcagcaggattgcgggaggagtttgagaccagcctgggcaacacaacaagaccctatctctacaaaattaaaaaaaataattagctcagcactgtggcaggcctgtcgtcccagttactcaggaggctgagcaggaggattgtgtaagcacaggagtccaaggattcagtgagctatgattgtgctgctgcactccagcgtgcgtgacagagtgagaccttgttaagaagaagtaaagtttagttttatggaaaaattgggcaggttcaattaggttcaaaccttcaaaaaaggttcagctcttttaattttaaatttaag

SEQ ID NO: 449550 - DNA, 633 bp, Homo sapiens
ctgcagctgaggagaaagggacatagtcttaaatccatcatccaactgagtaaaattggggggtttataatagtgaggaaggcaggaaattagggaaggataaggaagcaataattatggataagaggtctgatgtctcagggcctggatgtggtcatctgatgagtttccattctatgcctgaggattagttttctcaagaaggaactcaaatgagaccaatgcacctttcaagttttaagaccttgcagggtcaatttctatgattatttttaaaaatagcttgtaatcctagacctttgggaggctgaggcagcaggattgcgggaggagtttgagaccagcctgggcaacacaacaagaccctatctctacaaaattaaaaaaaataattagctcagcactgtggcaggcctgtmgtcccagttactcaggaggctgagcaggaggattgtgtaagcacaggagtccaaggattcagtgagctatgattgtgctgctgcactccagcgtgcgtgacagagtgagaccttgttaagaagaagtaaagtttagttttatggaaaaattgggcaggttcaattaggttcaaaccttcaaaaaaggttcagctcttttaattttaaatttaag

SEQ ID NO: 449551 - DNA, 567 bp, Homo sapiens
cctacactgttcatccccactcccccaccgcactggaacaccaaattttaacaaccatttgcacacagaaaagcaccatcacaccgtcacaacaaacaaaaatcaggtgagcaatcatactttctagttttaacttcatatagctaaaggaggcgtgggggaggacaagagagatagtcttgaatcactgatgccacccatccctcatgtctaggcaacagctgagtagtaaggagaaagaatctgtgcactttgrggagagtgcagtgacactctctgtgggacaatacattgaactcagtgctgccctgtcacagcagagaatgaactcttgctgggctcagccagtggctgtgcatgtagggagcatttggactcaccttagtcaaaggggattcacccatcccagtgatcagaatttgagtttctcaacaagcctttccactgtgggctaaaattctctggcgtactaggtaaacttgaaagacagcctacaacacaagaactccaattcctgggcaactcctagtgttaggtttggcttagagccagcaggctagggtggca

SEQ ID NO: 449552 - DNA, 585 bp, Homo sapiens
acttggcatgtcacatcagtatcagaactgcagttgatataaactttgcgaagaagaaaaaatttcactcaattcttcaaggattcaggtgatggttgaaaacaagatagaggacataaaaaagaatttgggcttcaatcagcaagaattttaagtaattctggggtaaaatgtctgttttaactaatttaggaaagctgaatttatatagactacatagagaaaaagcagctttttgtctctctccaatgagtgactatatttatttctattttagggttgttagtaatatattaacagatttaaacagagatgatggtaaagaatgcaataagacttgtatatatgggaaaaatttaatcatattttccccaccctctccaaaacatagattaactggactttgaaacatgagattaggaagaaactatttggcacactccaagtttagatgtgaaaatttctcttgtatttattattaaagaagaactggcaaaccaagcatttcattgcagccttatgygcaaaaattccgtacattacattttctccactagctttttaccttacataagttgttgaaat

SEQ ID NO: 449553 - DNA, 649 bp, Homo sapiens
cagcataccattgggtcttgcttttgtttgaatccagtttgtcactctgtgccttttaagtggggcatttatcctatttatattcaagttagtatttatatgtggatttgatcctgtcattgtgctgttagctggttattatgctggcttgtttgtatggttgctttctagtgacattggtctgtgtgtttaagtgtgtgtttgtattagctggtgttaatggtggagggtctccaggttcttggtgtcttgaacaaagaattgcacaaaacacacaaacaaagcaaggaagagatgaagggatttataaaaaatgaaagtacactccacagtgtgggagtggacccaagcatgggagcacaaaggccctgttacagtttttgtgagtttaaacrccctctacttgggatatgccctatgtaaatggagaggatgaagtaaaattacaaagtcatttacttggtctatgccctatggagaggatatttcatatcatagctgaagtgtgaatcagccttatgttctctgcctccaaaccctattttcctgtctcactggtagcagtcttttttttctacatttagtgctcctttcaagatctcttgtacagcaggtccagtggtaatgaattccctcaatatttgctcat

SEQ ID NO: 449554 - DNA, 555 bp, Homo sapiens
gaaaattttctgacctaatcctttccttcatttggccagagaacttcctattttccctgctttcatccagaagattctcagctcactaagttacccaatactaatgcattaccatattagggtctataatgggtagaagggcattttaaatgttgcatatgttacatcatgtcatttttataactctcttggggaggtatttctgccctgttttacaaatgagaaaagagaaactcagaggtraaaaactgtgtaggctcatggaagtgaataattagtaaagataagaataagaccatgctttccaacatataactcatgctacaacatagaggaagttagaaagtgacccattgcctttgtcaaagcatttgatgatggaaccctaggggatggcaagctaaacctaaagaaggaagtgagactcagatggaaggggcttgaccattggatgggatgaaagcagataatgcagcccaggtcagtctcagaaatcagtcatctccttatgccagactccaggagctgctttttaaaccctagtgaagaaagggg

SEQ ID NO: 449555 - DNA, 467 bp, Homo sapiens
tttgctaatatattctaaagaattactttccaaacacactgtcttataagaagaaaaagaaagctttcaggatctagaaagaaaaagaaaaaaataagatttatatcatagaaatatagttgtaaactacccatttctccctgcctcaaccccgccttcagttacgtgacagtgtcagaagtctagcaagactacagaaaatatgttaagcgaatgacattttccaacactacagatatagattccctagtaaaaaatgaacattaaaccactttcacccccccgccatttattttgacatggcaattgcctactcaaacctgcatcttggaggatgtaatgtgataatatttctatatrgttcaaagactaaggcaacagaggtagtaactgtgcaaccagtgtgctttatccatgaacttgccatgaacttatgaacaaggggggaaaaacatcctagtgggaag

SEQ ID NO: 449556 - DNA, 593 bp, Homo sapiens
  misc_feature (1)...(593): n = A,T,C or G
acatngtttaaaaatctctcagataattttgatttagagcaagtttggtaactattgctgcaatagtcaatggccccttttcctgagggaagcacaatttacagactgttctaagtgttcatacattcttcttactctcttaactctgaatttttttctgcccttcattgaaaagtcaccatgatgttcttctttatagctaatatttaatagaagccacaggacttcaactgctgactcaagcactatcagcacataaaggtttactgtattagtgtgttttaatagttgatcgatatagaacagtattatggggaaaaacacaggaaaacatataatgacataattgggttattaaacatgagaaattattttcctgagactcagcaaatttactttattgatattatgttttmtatattgaatatttggaaaatggaagtctttaacctgtcttatttatatatcttggagttggccaaatgtttggtggagtagaatcagaaaaaagagaccttatgtgccagctcaaatgcctgtttctctgagcaactatccttctttcttctgataccttagctgctctttcctct

SEQ ID NO: 449557 - DNA, 539 bp, Homo sapiens
cctgaaggatgcttggggtatttacgaaatctaggtattgaatttatagtagtataagtctcactaggttatggaaagtgattatttaatatgttgctggattttatttgccaataattctttgaggatgtttgggttaatttcccaagtgagactagtcctgtggttttctatattgtgctgtctttattatgttttggtatcaatgttattctggctttggaaacataatatgaaaacatcattttaatttcttccaaggagtccttcctgggaatctatttcaaagatttaattgcatgtgtactcaaagatatacatttaagtatgttctgtggaaacaatctgtttttcagtacaggagtatggtgaaagattatagctataacaatgaatgatatagctctatagtacatgctaatatatgtactgatatggaacaatctttaagatgtattattacatggaataaaccaaccagaccacaaaacagatgwttttgcttttgctaaaaaaatggtgttgaatgactaaatggg

SEQ ID NO: 449558 - DNA, 533 bp, Homo sapiens
ccttgggcttcccgagtgaggcaatgcctcgccctgcttcggctcgtgcatggtgcacrcacccactgacctgcacccactgtctggcactccctagtgagatcaacccggtacctcagatggaaatgcagaaatcacccatcttctgcatcgctcacgctgggagctgtagaccagagctgttcctgttcggccatcttggctcctccccccgagatttcttttatatgaatttatctagtagtttttgtttgtcacctttaatgtaagtacttggattgggaaggctgactgagggcttacggacaatacatagtcctatacagagcccagtggagaagcagcctaggagtttgagcagaggttcaaattttgtcacatttattgtgtgtatttgggcaagattttgtcacatttattgtgtttatttgggcaagttatttaacctctgtaaacctcaattgttttaagttgtctaatggaaatgatcataaatactttttaaggttgagtgtaacatgtgatagtaaata

SEQ ID NO: 449559 - DNA, 533 bp, Homo sapiens
ccttgggcttcccgagtgaggcaatgcctcgccctgcttcggctcgtgcatggtgcacacacccactgacctgcacccactgtctggcactccctagtgagatcaacccggtacctcagatggaaatgcagaaatcacccatcttctgcatcgctcaygctgggagctgtagaccagagctgttcctgttcggccatcttggctcctccccccgagatttcttttatatgaatttatctagtagtttttgtttgtcacctttaatgtaagtacttggattgggaaggctgactgagggcttacggacaatacatagtcctatacagagcccagtggagaagcagcctaggagtttgagcagaggttcaaattttgtcacatttattgtgtgtatttgggcaagattttgtcacatttattgtgtttatttgggcaagttatttaacctctgtaaacctcaattgttttaagttgtctaatggaaatgatcataaatactttttaaggttgagtgtaacatgtgatagtaaata

SEQ ID NO: 449560 - DNA, 533 bp, Homo sapiens
ccttgggcttcccgagtgaggcaatgcctcgccctgcttcggctcgtgcatggtgcacacacccactgacctgcacccactgtctggcactccctagtgagatcaacccggtacctcagatggaaatgcagaaatcacccatcttctgcatcgctcacgctgggagctgtagaccagagctgttcctgttcggccatcttggctcctccccccgagatttcttttatatgaatttatctagtagtttttgtttgtcacctttaatgtaagtacttggattgggaaggctgactgagggcttacrgacaatacatagtcctatacagagcccagtggagaagcagcctaggagtttgagcagaggttcaaattttgtcacatttattgtgtgtatttgggcaagattttgtcacatttattgtgtttatttgggcaagttatttaacctctgtaaacctcaattgttttaagttgtctaatggaaatgatcataaatactttttaaggttgagtgtaacatgtgatagtaaata

SEQ ID NO: 449561 - DNA, 587 bp, Homo sapiens
aagcatacatttatcatctttagggttatatttgaggcaatactcaaattctcaaatatcatggtaatgaataatttcgtttcaaaacttaagtaaagcaaagttgagcatatgcagggagtaggaaaaagaaggattctggttgctgaatggttgcgctcactatgcagattcaccataaacrcccaggccattcaattatttacttcatcaaaatcaaaagctagccaggcacagtggctcacgcctgtaatcccagaactttggaaggcaaaggcgggtggatcacaaggtcaagagatcgagaccaccctggccaacatggtgaaaccctatctctactaacaaaaattagccgggcatggtggcaggcacctgtagtcccagctactcaggaggctgacgcaggagaatcgcttgaacccaggaggcggagattacagtgagccgagattgctccactgcactccagcctggagacagagcgatactctctctcaacaaaataaaaaatgaaaaaataaaaataaataaaaagctgtctatttagcaagcacctgctattggacaggtagtgttctaagttg

SEQ ID NO: 449562 - DNA, 620 bp, Homo sapiens
ttatcttgtgcttggagagtgaaacaacaatccaggacagaaggttaaaaataacaaacgagtamaatagttaataagtactaatggagttcagagatataggatacttcatttgaagttgctggcttcttctgtaactggtacactttggagtgtgaagacaatttagacaggctctttgtattgattcttttctctgtccttgtaaagaaatataatgagttacattgtcacccaagataattagaatacccctttggcactcaaatagcaaaatatacttgtctgcgtatccagagtacatcaagtgtcctcttctaaaactgtctggtaatattacccatatgatagattatataatgctgctattaaatttggagaacattaacagaggaggatgaaggactgatgagtcattcccaagtaaagccatctgattctatttgtgcaacagactaatcaaaatcagatgtagctaagtctcaattcagatataattttacaggtggaaaataatagtgtattttcataataccaaagagaatacactttcggcaagtttcccaaaatatgtttacctagcatatcatatgagaaaaagtatcagagttgaaataaaa

SEQ ID NO: 449563 - DNA, 471 bp, Homo sapiens
cagatctatataacctgaataactgtgtaactttatttcactggatagacaaattagcagcactggtcctttgattcatttgttaatgcactatgtatatcattatgatattgtcctttttattacaattattaattaaatcagccatgcacataagcattcacttgtaatgagtaaaaaaaaaaaaaaaaaaaaaaagatggagaggttgtacaagattaattactctactgatgtgtttctcccagattgaggcaatttgacagtggcatcttcaagctactggtacagcacatacatttcccacagctgacaaagggtcagtaaatttggaagggaaaggaagctttggtatttggtgttktcattgatcagccttgaaatatggcttgcttatgaggattaggtaccaaaaacacatagaaaaataaattagagtttccaatttaatcacaaaattttactagaagc

SEQ ID NO: 449564 - DNA, 302 bp, Homo sapiens
tcagcggggaccaaagtctcacccaccttgggatcctgtttgtgatgccaatcattaggktctaactgaggtccaaggggagctgatggggtggcaggtagctggaaaaacactcaaggaatcataaacataaacagttttgacatggctttactctatccctgggcatgagtgagcctgggtgtgagcacgggcatgagctgatctgggcacaagccatatgtacagcattcacagagtaattgtatcttttacagacagtagtggctctgagccaagcacaagctcatgtgagtggttac

SEQ ID NO: 449565 - DNA, 302 bp, Homo sapiens
tcagcggggaccaaagtctcacccaccttgggatcctgtttgtgatgccaatcattagggtctaactgaggtccaaggggagctgatggggtggcaggtagctggaaaaacactcaaggaatcataaacataaacagttttgacatggctttactctatccctgggcatgagtgagcctgggtgtgagcacgggcatgagctgayctgggcacaagccatatgtacagcattcacagagtaattgtatcttttacagacagtagtggctctgagccaagcacaagctcatgtgagtggttac

SEQ ID NO: 449566 - DNA, 238 bp, Homo sapiens
ttcagcatcccacagccgggagagrtgagctccagtccagagtggtatcttttactctgagattaggttgtgtctgttatttggttgtaaaatgtactatgttttataaaaggctaatgaagtagagggttggttgattgtttggttttaaaaacaatatacatgttttacataatgagaagttggcaattatatgggtttttgtatgtggcaaaaacataaaatttaccatgttaac

SEQ ID NO: 449567 - DNA, 584 bp, Homo sapiens
tttctaccttcttgatgacggcaattagcgctataaactttccttttaacacggctttcactcagtttcagagattttggtgtgttgcgtctctattcatttcaaagaattttcttatttctgctttaatttcattgtttatccaaaagtcattcagaagtaagttatttgatatccatgtaactgtgtagttttgcaagatcttcttggtatggatttctattttttattgcactgtggaccaagagtatggttggtatgattctgattttttgaatytattgagacttgcttaatggccaaacacatggttaatcttagagtattttccatgtagagatgagaagaatgtatattctatggttgttgggtggagtatctgtagatgtctattactttggtcaagtgtttaatttaagtccagaacttctttgttagttttctgccttgatgatctgtctaattttgtcagtggagtgttgaagttccctgctgttattgtgtgactgcctaagaccacacaatagcactagttctagaagtacttgtagctctagaagcacttgtttttacgcatttaggtg

SEQ ID NO: 449568 - DNA, 569 bp, Homo sapiens
gttccaactacccgcacattagaaagtgagattcacaaggacagggattgtgtgcattttgttaactgctatgtaggcaatgtctgtaccagtacttctctatacagtttatgtttaataaatattgatttagtaaatcaacaaatttgaaaattgaggattcagcacttttacaccttctaagtagtaaaataaacaattttgttccaggtagtccagttaaaaaagttcggatagcacctactgaattttcacttagaaaacataacatgttgaacagaaagtaatttttaactcttaagaaagcctttaaaattttacaacaaagattctgcaccatcacccttccaggaaaggtgcatcagacataatgttattcatatttaattctttaccactttctttctgaacccttgagatttcaacctctgagccaagattccctgattgttggcctattactaagtgcagaagcgagaatttcccagacattcttaaacaaaatccratttgacaagatgacaacagctatgtgaatattagaatcttcaattgctataatgacacag

SEQ ID NO: 449569 - DNA, 582 bp, Homo sapiens
gagtatgcacacccaaagaaaatgtttgagaggctcccagaatctctagcaagtctgactggtgaagactgctgaagacggaagagrcatatgctttctcaaaggcagaaacaccaatggagagctacaattccctgaagaattgggaaaatataaatatgataggaataccacaattccctagatttgatttcaaagcaagagaaaagttctcctctatgtctactagttcttcgccttatatctctgaatttacaaatgtaagaatacagcagaatctcagagtctaactcttatttagccccaaatccaacaagaatgactcttgaactacacaaaagcattgtaagtcttcaaatggaagaatgtacaagctaccatccttgcttacaaagacaccatttctgagggagaataaagtgaaggaataactacagatgaaagttctattataaaaaatagaatactttgtctaatgaagaacatttacctgtttctatctctttctaaaattaatcactgccagtcatagagtcagtcacaccataataccaatttcagtttcagacactgaggcaattt

SEQ ID NO: 449570 - DNA, 582 bp, Homo sapiens
gagtatgcacacccaaagaaaatgtttgagaggctcccagaatctctagcaagtctgactggtgaagactgctgaagacggaagagacatatgctttctcaaaggcagaaacaccaatgsagagctacaattccctgaagaattgggaaaatataaatatgataggaataccacaattccctagatttgatttcaaagcaagagaaaagttctcctctatgtctactagttcttcgccttatatctctgaatttacaaatgtaagaatacagcagaatctcagagtctaactcttatttagccccaaatccaacaagaatgactcttgaactacacaaaagcattgtaagtcttcaaatggaagaatgtacaagctaccatccttgcttacaaagacaccatttctgagggagaataaagtgaaggaataactacagatgaaagttctattataaaaaatagaatactttgtctaatgaagaacatttacctgtttctatctctttctaaaattaatcactgccagtcatagagtcagtcacaccataataccaatttcagtttcagacactgaggcaattt

SEQ ID NO: 449571 - DNA, 573 bp, Homo sapiens
ataaatatgataggaataccacaattccctagatttgatttcaaagcaagagaaaagttctcctctatgtctactagttcttcgccttatatctctgaatttacaaatgtaagaatacagcagaatctcagagtctaactcttatttagccccaaatccaacaagaatgactcttgaactacacaaaagcattgtaagtcttcaaatggaagaatgtacaagctaccatccttgcttacaaagacaccatttctgagggagaataaagtgaaggaataactacagatgaaagttctattataaaaaatagaatactttgtctaatgaagaacatttacctgtttctatctctttctaaaattaatcactgccagtcatagagtcagtcacaccataataccaatttcagtttcagacaytgaggcaattttcctgcttttctatttcctggtgtgtagtagatacacaatcttctttgttttcttccccttcaatcccatgtgagagttgatccaagtcactgtatatactgggttgcattcatccaattacaggcctttatattccttgaaa

SEQ ID NO: 449572 - DNA, 573 bp, Homo sapiens
ataaatatgataggaataccacaattccctagatttgatttcaaagcaagagaaaagttctcctctatgtctactagttcttcgccttatatctctgaatttacaaatgtaagaatacagcagaatctcagagtctaactcttatttagccccaaatccaacaagaatgactcttgaactacacaaaagcattgtaagtcttcaaatggaagaatgtacaagctaccatccttgcttacaaagacaccatttctgagggagaataaagtgaaggaataactacagatgaaagttctattataaaaaatagaatactttgtctaatgaagaacatttacctgtttctatctctttctaaaattaatcactgccagtcatagagtcagtcacaccataataccaatttcagtttcagacactgaggcaattttcctgcttttctatttcctggtgtgtagtagatacacaatcttctttgttttcttccccttcaatcccatgtgagagttgatccaagtcactgtatatactgggytgcattcatccaattacaggcctttatattccttgaaa

SEQ ID NO: 449573 - DNA, 571 bp, Homo sapiens
tgcttcctacaatgtagtgctgaagtactagatctcttagcctgctttcttccttctaccaaatccatttctaagtgtttctggcaggactgaaaggatatagcagagatgattactttcatgcgcgtcgtccgtattaagagaccaccaaaaaggctttgtgtgagcaataaagcttttaatcacctgggtgcaggtgggctgagtccraaaagagtcagcgaagggagataagggtggggccattttataggatttgggtagataaaggaaaattacagtcaaggggggttgttctctggagggcagagtggggggtcacaaggtgctcagtaggggagcttttgagccaggatgagccaggaatttcacaagaaaatgtcatcagttaaggcaggaacaggccattttcacttcttttgtggtggaatgtcatcagttaaggcagaaacgggccatctggatgtgtacgtgcaggtcacagggatatgatggtttagcttgggctcagaggcctgacattcctgtcttcttatattaataagaaaaataaaatgaaatagtggtaaag

SEQ ID NO: 449574 - DNA, 571 bp, Homo sapiens
tgcttcctacaatgtagtgctgaagtactagatctcttagcctgctttcttccttctaccaaatccatttctaagtgtttctggcaggactgaaaggatatagcagagatgattactttcatgcgcgtcgtccgtattaagagaccaccaaaaaggctttgtgtgagcaataaagcttttaatcacctgggtgcaggtgggctgagtccaaaaagagtcagcgaagggagataagggtggggccattttataggatttgggtagataaaggaaaattacagtcaaggggggttgttctctggagggcagagtggggggtcacaaggtgctcagtaggggagcttttgagycaggatgagccaggaatttcacaagaaaatgtcatcagttaaggcaggaacaggccattttcacttcttttgtggtggaatgtcatcagttaaggcagaaacgggccatctggatgtgtacgtgcaggtcacagggatatgatggtttagcttgggctcagaggcctgacattcctgtcttcttatattaataagaaaaataaaatgaaatagtggtaaag

SEQ ID NO: 449575 - DNA, 510 bp, Homo sapiens
gtgaacaatagtcttaaaatgtggattgagactggatttatatataaaatgaatgaggtccagtgtagctgctccatttattaatatttttgyaatcttaacaatcagtgctgatggctatgtggccagttttttggggtgatgttgctgcaggcttttctggtcatcccagatagctgctgcctggagggaggttatgactgtaaagtttctgtccattttgtgagtcagaaatataagtatctgtagttatcagcaggctttccatgtgctacttctgactgacactagaaaatataggggactattctaattcagaactagttagtgggttgggctgtgtcacttatgagctgacagccttggctagcaaagcaaatagcctgtggttcacagatttatgaggcattggcaaaagccagaagggagaagaggagcgagagttatggttctcaatgtggagcaaacttctattggtgtcagagagtagaggacagcagggtccacaga

SEQ ID NO: 449576 - DNA, 510 bp, Homo sapiens
gtgaacaatagtcttaaaatgtggattgagactggatttatatataaaatgaatgaggtccagtgtagctgctccatttattaatatttttgcaatcttaacaatcagtgctgatggctatgtggccagttttttggggtgatgttgctgcaggcttttctggtcatcccagatagctgctgcctggagggaggttatgactgtaaagtttctgtccattttgtgagtcagaaatataagtatctgtagttatcagcaggctttccatgtgctacttctgactgacactagaaaatataggggactattctaattcagaactagttagtgggttgggctgtgtyacttatgagctgacagccttggctagcaaagcaaatagcctgtggttcacagatttatgaggcattggcaaaagccagaagggagaagaggagcgagagttatggttctcaatgtggagcaaacttctattggtgtcagagagtagaggacagcagggtccacaga

SEQ ID NO: 449577 - DNA, 617 bp, Homo sapiens
cttctgactgacactagaaaatataggggactattctaattcagaactagttagtgggttgggctgtgtcacttatgagctgacagccttggctagcaaagcaaatagcctgtggttcacagatttatgaggcattggcaaaagccagaagggagaagaggagcgagagttatggttctcaatgtggagcaaacttctattggtgtcagagagtagaggacagcagggtccacagaaatagaaggatcttataactatattccctatgataaaaacgcaatgaagaaaaatgaccaggtatttccaagtaggcaccayatagtactgatctatgctgaagaaatggatgtcatatttaactccgagctctacagaatttgtttctccttttttttttttttttgtggcagggaggggcagggtttggcaggggctataagaaagcatatttcattgtataatctaagtcaatataagaatgattctttttacagaaataaagttatagacaatcatattagaataaatcaattttgtaaagaaaaacatgtcatcaattggagagctcttttatcattatttggttttagtcaaggagtgaatcacattaaggtcat

SEQ ID NO: 449578 - DNA, 617 bp, Homo sapiens
cttctgactgacactagaaaatataggggactattctaattcagaactagttagtgggttgggctgtgtcacttatgagctgacagccttggctagcaaagcaaatagcctgtggttcacagatttatgaggcattggcaaaagccagaagggagaagaggagcgagagttatggttctcaatgtggagcaaacttctattggtgtcagagagtagaggacagcagggtccacagaaatagaaggatcttataactatattccctatgataaaaacgcaatgaagaaaaatgaccaggtatttccaagtaggcaccatatagtactgatctatgctgaagaaatggatgycatatttaactccgagctctacagaatttgtttctccttttttttttttttttgtggcagggaggggcagggtttggcaggggctataagaaagcatatttcattgtataatctaagtcaatataagaatgattctttttacagaaataaagttatagacaatcatattagaataaatcaattttgtaaagaaaaacatgtcatcaattggagagctcttttatcattatttggttttagtcaaggagtgaatcacattaaggtcat

SEQ ID NO: 449579 - DNA, 576 bp, Homo sapiens
ataaattcatatatatacttaataaactcatatatattaataaactcatatatatgtatatgagtttattaagtattatatatatgagtttattaagtactaactcacacaatcacaaggtcccacaataggccgcctgcaggctgaagagcaaggagagccagttggagttccaaaactgaagaacttggagtctgatgttccagggcaggaagcatcccacatgggaggaagatgtaggctaggaggctaggccagtctctcttttcacgtttttctgcctgcttatattctagccgcactggcagctgattagattgtgcccactcagattaagggtgggtctgcctattccagcccactgactcaaatgttaatattctttggcaacaccctcacagacacacccaggatcaatactttgtatctttcaatccaatcaagtcgacattcagtattaaccatcacaaatayctataacatgcaaaaaaatgttaatcaactgtttatgttatcagtaaggcttccagttaacaataggctattagtaagtaagttttggaggagtcaaaagtt

SEQ ID NO: 449580 - DNA, 478 bp, Homo sapiens
tgggttacaacatgctcctttagttcagcgtagctcattattacccactttctgaagcctacttctgtcaatttagccatctcagtctcagctcagttttgtgctrgagaggtgttgaggtcatctgaaggagaagaggcactcttgcgttttaagtttttatcatttttgtatggattctttctcattttgggggcttatgtaccttcaatttttgaggtttctgacctttgaatgggtttttttgtgggatctcttttcgttgatgacattgttattgctttctggtttttttttttttttttttttttttttaataacagtctggtcactcttctgtagggctcctgttgtttgctgggagatagctccagaccctagttgccttggtttttcccttacctggatgtattaccagtgaaggctgtgaaacagcaaagatggcagcctgctccttcctctgaaagctctgtcccgg

SEQ ID NO: 449581 - DNA, 522 bp, Homo sapiens
gaaggtgctgaattcacttgttgttttcatttctctccatgagagccatggaccacagctgtttctaatcggccctcatataatatttttaaagggtctggcacatagtgctatataattaacggttgtttggtaaatgacataacctttctgattgcttgcctgttgtttggtgaacatttacctatctgttaagatgttgctyatgtctctgggaaaaacaaacttaggcattgtgctttcatagtgcttgttacatcttcaattaagcatttatcatgttatcatttaattatgtatttatcttttcagttaggccatgccaaatatagaggctatgcatttttcactgtggtacccagtctccaaaataaaacagcatctggcacatagcaggcactcaaatactttttttttcttagtgcggtgtgcaaagccttcctatgacttgcctcaaatgtgtggccttgtgtttcattactgcctacccctggacccttgcactagaaatgtcccctgcac

SEQ ID NO: 449582 - DNA, 582 bp, Homo sapiens
gtgttttcctcatgagctttacctgaagtgcactaacactaaatttaagtgcgtaactcccaatcaagcctgatgaaaatgaagtatactcatctgtactcaaagaaaagagctgaagtgtgatgcttctgttagttgggtgacttatttctatttcgtttgggaaaaagaaagtgaagaaagaatttttccataagcattgttgttaagaagttagaatataaattggatacctgcagaaccgtcaatgctagtatgttacacacttttcctcaatgctcccaccacactgatataagatgatttccagtaacatcctattatatatcttatgatttcaacagcaatgactacaatcrtttttacttttcaaaaatctcccctaagtctttatctaaaaaatgttcatactgtttaacttcttccaataaaatacctttgggataattgtattttacccaaagtatttacaaactatagttttcatttttaaaattctacttacttatctttctatatatggtccttgctaataatgtgcacgtggtattatgctgcagatcagaagaaattgttccaaat

SEQ ID NO: 449583 - DNA, 596 bp, Homo sapiens
  misc_feature (1)...(596): n = A,T,C or G
agaaagaaaatgttgagagattatttttcacgttamataccaacagttgtattcttatattaatataaaactaatactaatatttaattgtaaaaattcaaaaaagtacaaaaatgttttctaacagtaacctctaaatttctctgtaattcgtccacatgtctatgttctccataaagactgagctccatagaactgtgtttagagcatagtagaagcttgacaaatatttattcgttagtaaaaaaaaatatcattaatggaaataaatgcatatgggcttctgctctgtgtaattactataagcattgatttgattgcttcacatattgtcacaagttaaatgtaacatgcccattagtgtcctaaaacagattatttgggactaaaattgtttgaggatttctgaatttttggtatactttactttcaatatttaagggaaaaaatattctcccttaagaganataatgtttccaattttgagggaactgatattcatgaacaaaccatcctagatcctataatgncttattagagtaatttgttttcctagctgtctcttatattaaatcataagctnnnnnnnnnnnnnn

SEQ ID NO: 449584 - DNA, 596 bp, Homo sapiens
  misc_feature (1)...(596): n = A,T,C or G
agaaagaaaatgttgagagattatttttcacgttaaataccaacagttgtattcttatattaatataaaactaatactaatatttaattgtaaaaattcaaaaaagtacaaaaatgttttctaacagtaacctctaaatttctctgtaattcgtccacatgtctatgttctccataaagactgagctccatagaactgtgtttagagcatagtagaagcttgacaaatatttattcrttagtaaaaaaaaatatcattaatggaaataaatgcatatgggcttctgctctgtgtaattactataagcattgatttgattgcttcacatattgtcacaagttaaatgtaacatgcccattagtgtcctaaaacagattatttgggactaaaattgtttgaggatttctgaatttttggtatactttactttcaatatttaagggaaaaaatattctcccttaagaganataatgtttccaattttgagggaactgatattcatgaacaaaccatcctagatcctataatgncttattagagtaatttgttttcctagctgtctcttatattaaatcataagctnnnnnnnnnnnnnn

SEQ ID NO: 449585 - DNA, 627 bp, Homo sapiens
tttctttggaatgttcctcggagcccattaaggagtgctttaatccaagaggatctagatgatcaagaaaaattaagctcctaataacagcaaaatcgtaagaaatttggacaaaatgactctccgcatcacagattttgtttactagtgggtaattaattctccacatatgttgggaacatctgtcgccgtgacctgccatcggatctgcgaaatgactgctgtgcggtttcccggcaggtcattagcagcgctctgaaaggaagctccttcctcctgccctcagcccgggcaactttctctttagctgggagtktctccatgtaagttcctgggcgtgagatgccctccgccacttttctctgtgtcaccggcgggcacctctagccaccccccgtggtcccccaactagatgtaaagcaggaggaaagcagtttcctggtcatggggaaaatcagctggacggtcaggtgctcgaggaagcctcgctgaggcagtcgggctgtcttgctaggtgggggtgaaactttcccagcgcagctgaataggatccaacaagagtctggatgtttctgacttgtgactttccagtctaattagtgaaaaattgggctcaggtttctaagg

SEQ ID NO: 449586 - DNA, 711 bp, Homo sapiens
ttttgtttacaattggaaaggcattgagaccaggaggccagatgcccaagaggataagtcattaggcaagcaggctggtttcccagactgttttcaggagatcttgccagagttttacataattctacatcctctcagagcttccgttcctatcactggaattgatctttccaggtgagaaaataaatttcccaacctgagcacataagcactgggaagaacatttctatttttacytttaatttacttcagaaattggggtactaagaggataagttaccaaggtcatgtatatagtaaacgatggagctagaatttagcttatgctattactcatcaagttatgctgtctgcaaaatgacaatgggtaggctatgttggatttcttgtgccttggttaatgaaataataagttggaaaactatgagctctaccaaactcagagtgtttaggagagaattaatggaatggtttcataatccctttatcaatatagtgggaaataaaatactttatttcatagaaatgttgtgaggattaaatgagataagatataaaacatgtttagcgtactgtctagttccataagtgttacatttcattttattataaatattgtttccatagtatctcacctattcttttcaaagttcagatgtttggttctttgacatctcaacatatgaacaaaaaagtacatattaaaaataa

SEQ ID NO: 449587 - DNA, 566 bp, Homo sapiens
atttacattaatatttacatttttaaatgtattyatttaaaacaacaaaaatctaaattctaaaaatatgaatgacataaccacatgtacaatatgacatggtacatcattattttaaagagcctggcacagtaccttgtaatcaagcacattaatatttctgtatagtaaaacatacaaatattcccaccaaatgggatggatagacaaataaataatgctttattttaatacaaattaggttttactgctaaaggggttaaaaaaatacttttcagagtctttgtgatatcaaaataattgatgagggatgatgacttgtctatatgtatttgtttattcgttcatagtctgtgaccacactagcctataactttcatcagggcagggaccagcctatttgttcatcacgtacctggctctgttcctggttatgacaggcattcaaaagacatttattagatgaatgattaattttttccccaaatgagtcttggcttgttctttgtgctcacatgaaatactgtagccatgattaaatgtcacctgtagacttccacagaaat

SEQ ID NO: 449588 - DNA, 566 bp, Homo sapiens
atttacattaatatttacatttttaaatgtattcatttaaaacaacaaaaatctaaattcyaaaaatatgaatgacataaccacatgtacaatatgacatggtacatcattattttaaagagcctggcacagtaccttgtaatcaagcacattaatatttctgtatagtaaaacatacaaatattcccaccaaatgggatggatagacaaataaataatgctttattttaatacaaattaggttttactgctaaaggggttaaaaaaatacttttcagagtctttgtgatatcaaaataattgatgagggatgatgacttgtctatatgtatttgtttattcgttcatagtctgtgaccacactagcctataactttcatcagggcagggaccagcctatttgttcatcacgtacctggctctgttcctggttatgacaggcattcaaaagacatttattagatgaatgattaattttttccccaaatgagtcttggcttgttctttgtgctcacatgaaatactgtagccatgattaaatgtcacctgtagacttccacagaaat

SEQ ID NO: 449589 - DNA, 579 bp, Homo sapiens
tctcatgctcccacctcttttgctacagtctctgggccttggggagttgaatarctttaatttctggccctatgtctcaggtatgctctttatttgattggcattttctgccaggcctgaagatgaggctttaattgctgtcagcatttaagatttagcaagacatggtttcctttttagacccaggagtcaaagccctataactcaatgtcacaaggacttcaaaagcacatacaaaaagacacatggatgcaataaccttaatttaaaaagaaattttttaaatcttttttctaagccaaccaaaacttaataataatggcacaggaattattttgataaaacaaaaaatctgttaagccagttatcaaaaggcaaaataaaagaccttctgcagggcacagaatattatgtggaagaaaatctttcctttagacctttaaaaaactattgttagcatcaggcaacaacaaacagaatccaaggaaaaaatcttatatgaactgaaaatgagttgaagaagactgttactaattcatgccctgtaaaaggggagaaaaactgaaaatggtgagatgc

SEQ ID NO: 449590 - DNA, 641 bp, Homo sapiens
aagtttttgcagtgttttcttctagtagtttaatagtttgaagttttagatttaagtttttaatccattttgatttgattttttaatatggtgagagacaggggtctagtttcattcttctgcaagtggatattgagttgcccagcaacattttttaagactggttttwtcctaatgtatattcttggcacctttattaaaagtgagttcactgtagatgtatagatttatttcctagttctcgattctattccatcggtctatgtgtctgtttttatgccaccaccatgcagttttggttactatagctctgtagtataatttgaagtcaggtaatgtgatgcctgctgttttgttctttttgctcaggatggctttggctcttctggttcttttgtggttccatataaactttaggatttttttctatttctgttaagaatgtcattggtattttgatagagattgcattgaatttgtcaatttctttgggtagtgtagacatttaaacaatattgattcttctaatccataaacatggaatatctttccaatttttggtgtcttcttccatttctttcatcaatgtttcatagttttcattgtagagatcttcacttctttggttcagtttaattcct

SEQ ID NO: 449591 - DNA, 603 bp, Homo sapiens
gtaaattcagtgtagttttaaaacaacaatgaaaagcttacccataatgagcatttactatgtgctaggcaaattagtgacatgtacaaccatttaattgaacatcacatgatgtaggttctaatgtaatttctttattgtatatgaagaaactgatgcacagaagtgctagcatcaaataagcacatttggggatgattaaacctctaaacatatttaacattacaaacaaacgtttttgaaaaagcacagagtattaaaaatagtcattatccaaaattgatgtaagtattcctttgtgtcttttaagtatagcttttcatataaaaggtaattcgatttgtgttctagtgttttcccttgtttttayatactctctgttttaaagatctaatagttacatgtttaatacttccaaaagttctttgcaaaatgcaagatcgtttacattgcccattttgtttgttactcctttatgtcatatttacagatcaaacattctagtcaaattgtgttttattttgggaaattgaggtaatcttttaaaaagttgcagcaaccaaaaaaaccttcttcttttgcatgaaggggtattgaatgtga

SEQ ID NO: 449592 - DNA, 575 bp, Homo sapiens
agcatctgtaaaatgagggtaaccatggctctgctgagagtacacaaatgccaccttagcagggtgctggacacagagcctgaatccagctggtgctggctgcactcatcgcaatggccctgtagacgtctagctgtgcagcctccctctggccgacacgcacttccccttcagttccagaagctggatctgggagtggagggatttgactaggatcagggtaaaccaactgagcctgcaatgggtgactgggtagggctgtggggagacagagggccaaggtggaagtagatgtcacaaaacttttccccagaattgaaaatccaggtgaacccaagtcagcaaaaagaggggctgagcaacttttcagaatggctggacgtgaccagtggctgcaatrccagggctctgaaatcagtggtgtttgttgtgaaatcagctggaatcccaaagcagaggtaaatgtgtgtttagagtgtgtgggaacatttttcctatacttgattccagcctgtccaccccatcagctgatgaggctcaaagccaattccagccatcacagctcagccagctgg

SEQ ID NO: 449593 - DNA, 566 bp, Homo sapiens
ccatgccttggacttggaaacttacgagatcaagcaattagtttcccaactggattacttagacaatcatatgtaaaggtctatgaatattaagaattttaaaggcagcaattgctcatcttttcacaggaaaaaataaaaatacaaatccatttcccttataacctttgggcccataaacaaaaaggaatatggaaatgtacaaatttgtatgtagagaaaaaaacgctttaactcatgagggtttatacatattcccttccatactgctccttggggaatayttttcaccaaattttactttgaagctacattggagatctggcacaaggcccagactgtcttcaaattttgtcaaaattttaccagcattgcaaataatatatagaagttgggaacttcattaaagagatgttatctgatatgacttctatattcaatgacagaaatgacaattttgtggctggaaggccacaagatgcacgtgatatgtgactgatagcgtatgctaaaaaacagaatgagaaaagaggaacaactatctcaaaaataaaattacatgtgac

SEQ ID NO: 449594 - DNA, 581 bp, Homo sapiens
gctgaactcaaccaaaccagagaaaacaagagaataatgaaacagttgttttaagacactaagttttggagggctgagtgatgcagcaatggaaaactgaaacagttatcattcaattcagttcaaaattcaagggacctttgaaactctaacatgaatattctatgcatcttggtgtaataaaggactaggcaaaaggagaacataggtcacctcctagaggaggttgcagccttgttggacactctcactcatgcatcctttcaaaagcattgtttcgagcaactactatgtgtaagatgmtaggaaaatctcttacctccactccctttgggttccttccccttcaccagttgttttccattcccatttaacctccagggccagagtcagctgctcctttcagactgaatgcaccccaaactctccctgaaggcccaatgctggaaactctcaggaaagacagtgaaactctagggagcatcacctcaattaggagaaatggcttgattcacagtagaatcactattgctactaatagtgacaaatcctctcccccaaatcttttaggtcagaaggaa

SEQ ID NO: 449595 - DNA, 563 bp, Homo sapiens
  misc_feature (1)...(563): n = A,T,C or G
cctcctcacagcatatatacacccacacaccacatataccatatacacactatatatatatagtcacracccacttaacagcagggctgtgttctgagaaatgcattgttaggtgatttcatcattgtgcaaacattgtagagtgcacttacacaaacctagattttatagcctatgacacactgaggctaaatggtataagccattgttcctcagctacaaacctatacagcataactgtactgaataccctaagcagttgtaacacgatggtaagtacttgtgtatctaaacatagaaagcgtacagaaaaaaaatatgctattataggctgggtgtggtagctcaagcctgtaatcccaacactttgggagaccgaggcaggcagancacttgagttcaggagttagaagaccagcctggccaacataatgaaaccccgtctctacctgaaaatacaaaaattacccaggcatggtgatgcatgcctctaatcccagctactcgggaggttaaggcagaagaatcacttgaacctaggaggcagaggttgcagtgagccg

SEQ ID NO: 449596 - DNA, 612 bp, Homo sapiens
tgtaacagtgtatgctcatatatgtttgcaaaaagatgrtctgaaattggaacttatatttaaaagggaagaagagcataaaagttggaaaatttgcagtgcggccatgtggtagaaaagaaaagcccattttctgtggaggaattcaagccagctgcagaaatttgcataagtaaagaggagccaaatgttaatagcaaagacaatggggaaaatgcctccaaggcatttcagagacctttgtggcagcccctcccacctagacctcctggaggcctaggagggaaaaatggttttgtaggccaggcccaggaccccactgctctgtgcagccttgggacattgtgccctgcttcccagctgctccagctccagccctggctaaaaggggccaaggtacagctcaggctgttgctccacagggtgcaaaccagaagccttggtggcttctatgtggtgttaagcctgagaatgtgcagaggttgagttgaagcgtgggagctgtattagtccattttcacactactgataaagagtagtatgagactggagactgggcaatttacaaaagaaagaggtttaatggacttacagttccatgtggctggtgag

SEQ ID NO: 449597 - DNA, 612 bp, Homo sapiens
tgtaacagtgtatgctcatatatgtttgcaaaaagatgatctgaaattggaacttatatttaaaagggaagaagagcataaaagttggaaaatttgcagtgcggccatgtggtagaaaagaaaagcccattttctgtggaggaattcaagccagctgcagaaatttgcataagtaaagaggagccaaatgttaatagcaaagacaatggggaaaatgcctccaaggcatttcagagacctttgtggcagcccctcccacctagacctcctggaggcctaggagggaaaaatggttttgtaggccaggcccaggaccccactgctctgtgcagccttgggacattgtgccctgcttcccagctgctccagctccagccmtggctaaaaggggccaaggtacagctcaggctgttgctccacagggtgcaaaccagaagccttggtggcttctatgtggtgttaagcctgagaatgtgcagaggttgagttgaagcgtgggagctgtattagtccattttcacactactgataaagagtagtatgagactggagactgggcaatttacaaaagaaagaggtttaatggacttacagttccatgtggctggtgag

SEQ ID NO: 449598 - DNA, 492 bp, Homo sapiens
tggggcctgcagtccctttgttttggccaattcctcccttttggaatgggagcatttacccaatgcctgtatccccattgtatcttagaagtaccttgttttgattttacagaattataggcagaagggacttgtcttgtctcaaatgagactttggacttggacttttgagttaatgctggaatgagttcagactttgggtgactgttgggatggcatgattgtgttttgaaatgtgagaagaacatgaaatctgsgagtgtctaggggcagaatgatatggtttggctctgcacccccacccaaatctcatgctgaattgtaatccccagtgttgggggagaaacctggtgggaggtgattggatcatgggggcagatttccctcttgctgtacctgtgatagtgagtgaattctcatgagatctggttgtttgaaagtgtgtagcacttctctctctttctctctttcttgctttctctttctctcttc

SEQ ID NO: 449599 - DNA, 653 bp, Homo sapiens
ctcatgtgaaaagatcctgcaaaataacctagctctgggtggtgtcatctcacacggggagcacttatcctgagtgcataggactgtcccccaaagctgtcctgaggcaccctgtgggtcagctcagggcctcctcctggctggttgtcctgcagacccccatctcacaggcttggaccccacaagtcaagtggggctcatccccatccctccttaggctcagaaattacctttgtacctaagttyggtgctcacaaagctgtgcagaacaccccatcggtacattcccaagcttgtctcccaaagggtccccaggtgagtcacccattgttgtgccctggtgagtcatatttccctggtgggaccagttctcttctgaaccccagtccgaccttgcagtccccactccttggggcccctgctgcataggaccttccgccatgccctccattagactctcagcactgccggctcctggccttagccctgcccccaggtttgtcactagagatggatagcagctccagtgggggcttgagtcctctccagtgaggtgggtgaggctgctggccaggcctgagcagggtggacccttagttccaggcctggccacttgaaaggctttgtttgtccccagggcaggccacctggag

SEQ ID NO: 449600 - DNA, 601 bp, Homo sapiens
ccatggtcctctgtggcatttctaatgccgctttattgtgcccctgaacaccttgggtatccatcaaagcccttctcacagtgcagcagagtttttcacaagtgcatmtttgcccccaggctgtgagtacagtgaggactgattccacatgctagttacatcccctgcccttagtacaatgtctactatgtactaataatattgataaccaacaattattgagcagttagtgtgtgctagatttttaaaagtccctcttgaagcaatgacccccaattgcaacaagtatgctctgtgtccagagcttggtttataataccgttttccaataaagggaaacagagttgcttacagcaatgggcaattctgggactggggcaggaaatatacaagacgagcctggaggatctggtagtgccaggaaggaagtcagtgctcaaaaagcagaatgctaaggctatgttaaaggaacacaggaaggaactgaaagacctcccaatggccaaagctaagaacaagtcaataaaaaaaagcaccgaattaagacttaaagtgtaaaacaaatacccatgagtccatgctgatatagatggctgattaa

SEQ ID NO: 449601 - DNA, 601 bp, Homo sapiens
ccatggtcctctgtggcatttctaatgccgctttattgtgcccctgaacaccttgggtatccatcaaagcccttctcacagtgcagcagagtttttcacaagtgcatatttgcccccaggctgtgagtacagtgaggactgattccacatgctagttacatcccctgcccttagtacartgtctactatgtactaataatattgataaccaacaattattgagcagttagtgtgtgctagatttttaaaagtccctcttgaagcaatgacccccaattgcaacaagtatgctctgtgtccagagcttggtttataataccgttttccaataaagggaaacagagttgcttacagcaatgggcaattctgggactggggcaggaaatatacaagacgagcctggaggatctggtagtgccaggaaggaagtcagtgctcaaaaagcagaatgctaaggctatgttaaaggaacacaggaaggaactgaaagacctcccaatggccaaagctaagaacaagtcaataaaaaaaagcaccgaattaagacttaaagtgtaaaacaaatacccatgagtccatgctgatatagatggctgattaa

SEQ ID NO: 449602 - DNA, 614 bp, Homo sapiens
catatttgcccccaggctgtgagtacagtgaggactgattccacatgctagttacatcccctgcccttagtacaatgtctactatgtactaataatattgataaccaacaattattgagcagttagtgtgtgctagatttttaaaagtccctcttgaagcaatgacccccaattgcaacaagtatgctctgtgtccagagcttggtttataataccgttttccaataaagggaaacagagttgcttacagcaatgggcaattctgggactggggcaggaaatatacaagacgagcctggaggatctggtagtgccaggaaggaagtcagtgctcraaaagcagaatgctaaggctatgttaaaggaacacaggaaggaactgaaagacctcccaatggccaaagctaagaacaagtcaataaaaaaaagcaccgaattaagacttaaagtgtaaaacaaatacccatgagtccatgctgatatagatggctgattaaataaatggaggaggaaaggcacatcttgcctgcagaagaattctaaataatctacgtagacactccaccctccaggaggtgccgcctaactcccagctgagtaagtgtgggctgtgc

SEQ ID NO: 449603 - DNA, 590 bp, Homo sapiens
actcacacattcagcattcatttgtggaggcttttgcaatttaccatgtgctttttgcrcactgtatgagtcaggatgcatctgaaggcaagattcaggaatccagctaaaagtggcacgactgccctgtccagaaagaagtggttgaagagttccagcagtggctcagtcatgagccccgtgacacccacaagggccctggcaccttccatccttccatctagcatcctcagggggcatgtagtaggcttggctctctgcaaccatcatgtggctgaagacagagaaggacaggaggaggtaaagacagatagaagacgaaagagggaggaggaggaaaaagtgtcttttaggaagccggccaaccatgacggttgcgcacatatttcattttaacttagagatcatcatttcacaataaataccactttataaatgtttaaatacaatttaaggagataaagcagagactcattagccacttggtaacagatgcagaaatatcaaaatgatcattaccaaaattatcaaaaaacaaacaaatcaaaaacccagcatggcttcaggtgcagggctgagaagcgtctttt

SEQ ID NO: 449604 - DNA, 524 bp, Homo sapiens
acagcaaagaaaataagccacaaaattcaagttcttattgcagactagtatcaacttaacaagatttttttaaaataatggaaaacgttagaatatgacatcctagggaaggatagaagattcttgcatatctaatcaaaatgttatcatccccgaaacatattcatcatatgacctttgtcagctgcttcatagtaaagaaatcctttcaaaaaggcaaaagtttcaaacagagcattatgggctggaagaaattcacaaaaaagaaattgcattttcaaccagagagcctcagtgccaaggctgcactggggagatcgctatgaccctcttgccgttgtcttaaactgtcaaagtttgactccttttggattttgaacaattcaaaaamgatcctttcataaacagtttcataaactacgacatatctaattcctgggctttgaacacggagctgagtacagcacagggagcctactgagaatttctcctgaaaccataaagcaatctaggaggtgagttac

SEQ ID NO: 449605 - DNA, 527 bp, Homo sapiens
gaagaaggactgttcaaactttatatggaggggacccaagattgggaaggcagaggaaacaaagggcgtctttgattcacattatttttctcttgtcatcattgcaggcttaagtgtgtgtcatcactagaaatgtattctgttgatgtctgtcatttcagcattttcatgttgtcaaaaatgagaccagacagaagaagagtgtattctttcctgctagaactcrcacaacactgtcattaatgcctctggcagtcaggactttaatcagttaaatgtaatagtggtgataacgttaaagccttgtatggcagtctacccgggcagcctagagagccctgtgcaactctgcatttgaaaaatcaatcaactagggctgtcttttgtcctgggctacttggatagctggtatgaaccacccagcactagcctcctgcttgttgagatgacacttttcctgaagccatgcccactcttgacaaagaataattaggtgccctgcataagtgtatggggacctgcaggtg

SEQ ID NO: 449606 - DNA, 484 bp, Homo sapiens
actatactatattaggtagaaaatcatattattgtgtgtgagatgcatggtaaawtgagtgtatgcagtcttctgggaaaaaccattaataagtattaccttgttaaaagattttagaaaccatgaaatacaaaagcagggcatgtgaatgtatttatgcttttaatgcttgagtgcaatatgtaactacagctttatgaaaacttaagcaacatgtatatatatacatatataaataataaactttattttagagcattttaaagttcacagcaatattgaacagaaagtagagaaagttacagtatactcaccagtcaacacacatgcgcaatctctcccactatcaatatgctgcaccagaatggttatatttgttactattgatggacttaacactggcacatgattatcacccaatgtccatagtttatattgtttcactcttgatattgtattttttgggttttgaaaaatgtctaat

SEQ ID NO: 449607 - DNA, 546 bp, Homo sapiens
tttactattatttaatgcccttcttttttttttatctttgttgatttaacgtctgttttgtttgaaattagaattataacccctgcatttttctttgtttctcttgctyggtagatttttctccatccctttattttgagccagttactgtgattgcatgtgaaatgggtttcctgaagacagcataccattggatcttgcttctttacccacttgccactctgtgccttttaactaaaggcatttagcccatttacattcaaggttagtattgatatgtgtggacacacacagtcctacaccagagccctgccctactgctaacactgctacgagtacagatgtgcaaacagttgctatcaggtcctttgccccccagatcatactgccactgttgctgcggccaacacctgtacagaggccagcaccctggcacccactagcaccccacagcagctaaatgcatgtactccaccgtgctgctgctgctactgcttctggcacatgcaaatgagtatggatcccactgccactgccctgcaaagt

SEQ ID NO: 449608 - DNA, 550 bp, Homo sapiens
ttttccttctcgccaaatatgttaggctctgatataacaccagcaatttaggctctggtaaaagaatttctcctgaggactggccttgttaaaaaggacagtaaatatatggtgaagtatttcaaaataggtcctgcaccatgactgggttcccctagagtttatcttttagtttycccccacttctggcacccagcaattcatcaattaattatcagcttaggattttccacctcagtgttacttgtccccattgaggtttctactcatggatatctgcttcagtaatttgtggttctctatatccacctatctggctctctaatgttggggacagcagtttgccctgtgacatctcttctctaaaaaatctaagaagcattgttgactcttcaatttgtttacctttttacttggtaagacataataaagacttttgagctccttaaatgctgggctggaagcagtatttttaaaaatggcactgttgctaggaaagaccaattaaatcttaatgtttaatgattgtagtaagaatgcagcttgtttt

SEQ ID NO: 449609 - DNA, 558 bp, Homo sapiens
catacactcacaggtacacacatacattttctgtgactatactttgagagcctggtttcctagttacttttgcatactattgtaccttacattttggtaatccaaatgtgagtaagccatgattgtgccactgcattccagcccgtgtggcagagtgacggcatgtctctaaaaacaaacaaacaaacttatcttaatgcaaaagaaattggatacattttcatgattaatttgaatgtttccttcagctattctataataactttatgcaaagttcatactgtcagaattaagaaagatgtattattgattttttttctgaagatacatcttcaatattatattttttataatctagtgttccattgccattgtaccttcatcacttgattcagtcacttcattcatttcttcaaatatttatagagcaaatgggtagamaactagctgtgcctgctagagctttggcatcagttattattttcttttttaatctttagcataatagagagccatgttttctatcttaagagtaacagagctttataagtgagttaa

SEQ ID NO: 449610 - DNA, 555 bp, Homo sapiens
aagtgagttgagtccacagaaagttttgagtgtcaggaaaggagcaatttgaaattgacgttgtagagaataagttgaaagagatactaagctttctgggcagggttgaacatgtgcttcagtttcactcttgttagtaccactttttccagcaatgctgtgctgcttcagattcagaagacattgatagttgagttactccagggctggggttgggttaaacagttcaaaggaaagagagagtttagtgagtttaagatattggcaaaagtaatattgagatttatatcatggaaaaatcatctgaacatggtataatataaaaaaggagaaaaatctaatgaattgtaagactgtaggtctttaatgcgcatgaggctccagtgggattggaaaatattaccggtaaagaaactgaataaacaaagtggggagaaaaaagagtctaaartcatagagcaggaaagttgagtaattcattttgaaagtaaagtaaattcaggtgttgaaaatagtgttatgtgaccatgattggctgaagcactaaaaaaagtg

SEQ ID NO: 449611 - DNA, 586 bp, Homo sapiens
tgtctgagctgaagtcaacatttctaatattatgtataacaaaacatattacaatatagtattcaattttctttgcatggcggatgtgttgttgtatgacattcaaaacaaaattaatggtaaaggttttaaatttcattcatggagaaacctttcctgtagaacatacttaaaaagttaattctaaatccttgctttaggaggttacacaaatattgataatgttattttcttatcacttttagacagtcaggttcataaaagcaagttcaatgagcataagatggtttctaaattttaatttatttttgacagcaaacaaaatgaacaaaggtgaggaatccatttgtgtacctaagatatctttaaaaagaagatacctttatatttgtcaaatatgttgctcccagtaaaagaaaagaagatctatgcaagtggttcaagagtaaaccttaccttattagcttttcataatattttmgaagaaatttaaaacaaaattgcaaagcactattcttacactgatattttaccagttcactaaaacattcagaaaagaaatttaccctaaaatttgttagtcatt

SEQ ID NO: 449612 - DNA, 607 bp, Homo sapiens
agaatttacaattacaagaattcggcagtaaattatctacgagaggggagggaaaataccttgatgcttaggctatctgaatcatataagggactgagtgagcttaagatggggcctggaggtcagaaggagcctgcctaaagtttaaaaagctgagggaaggcttcaggtcaccttcattactccttatttattttgctatcattttctagcactctgttccttagctcatggtgccccagccaaagaatactttcttcaattatccctcccatcgagttcatatccaaggtagcatctcttgagtgctttctctyatattagagagttcttgatgttgtaaatgcaagagaatgcattttgagtttttgttttgttgcatttgtaaaatatttcttaccactttgaggatcatttatgccattctgtttgctttagtctttatattttcagttggaggctctcctcaagtatctggttatccttggctgtttgatcatatttaatagattttaaaaggctcactgcaaactctaggtgcttactcaaagctgaaaaactgagtttcactgtggggtatatagtgggtaatttagttagaaaatcc

SEQ ID NO: 449613 - DNA, 606 bp, Homo sapiens
gtgtattctaaagttacctatttcctggtaggtgaccagcagataatcatatttcttaaactgagctttcatatttattatgagaactaaaacagtttgggtgacttttctatctaaatatattttgccattaaaataatagaaatgcttaaagaaatgaaaaatcagtgctggaaagtatttcaagaattttaagtgagtttatgttttgtaaaattcttrttacactaattaactgttagtattgtagatcagatatttcaaatgtgaaataatatgatagttcttagtaatttaacatgaaactatatacatttgtaaaggatacagtagcaacatgtcttaaagttggatggttttcagttgtgattaaaaaaaaatgtttgatgtgtttatcacatggattacagtaaaatattcacaatgaatggatttgtgtactattataaaatataattatcttggccaggcatggtggctcatgcttgtaatcctagcactttgggaagatgaggcaggcatgttcagtgtttcactggggagcaaaggtttgcatttctacccggtcttagccctgattctgtccttgtctttatagagcactca

SEQ ID NO: 449614 - DNA, 606 bp, Homo sapiens
gtgtattctaaagttacctatttcctggtaggtgaccagcagataatcatatttcttaaactgagctttcatatttattatgagaactaaaacagtttgggtgacttttctatctaaatatattttgccattaaaataatagaaatgcttaaagaaatgaaaaatcagtgctggaaagtatttcaagaattttaagtgagtttatgttttgtaaaattcttattacacyaattaactgttagtattgtagatcagatatttcaaatgtgaaataatatgatagttcttagtaatttaacatgaaactatatacatttgtaaaggatacagtagcaacatgtcttaaagttggatggttttcagttgtgattaaaaaaaaatgtttgatgtgtttatcacatggattacagtaaaatattcacaatgaatggatttgtgtactattataaaatataattatcttggccaggcatggtggctcatgcttgtaatcctagcactttgggaagatgaggcaggcatgttcagtgtttcactggggagcaaaggtttgcatttctacccggtcttagccctgattctgtccttgtctttatagagcactca

SEQ ID NO: 449615 - DNA, 606 bp, Homo sapiens
gtgtattctaaagttacctatttcctggtaggtgaccagcagataatcatatttcttaaactgagctttcatatttattatgagaactaaaacagtttgggtgacttttctatctaaatatattttgccattaaaataatagaaatgcttaaagaaatgaaaaatcagtgctggaaagtatttcaagaattttaagtgagtttatgttttgtaaaattcttattacactaattaactgttagtattgtagatcagatatttcaaatgtgaaataatatgatagttcttagtaatttaacatgaaactatatacatttgtaaaggatacagtagcaacatgtcttaaagttggwtggttttcagttgtgattaaaaaaaaatgtttgatgtgtttatcacatggattacagtaaaatattcacaatgaatggatttgtgtactattataaaatataattatcttggccaggcatggtggctcatgcttgtaatcctagcactttgggaagatgaggcaggcatgttcagtgtttcactggggagcaaaggtttgcatttctacccggtcttagccctgattctgtccttgtctttatagagcactca

SEQ ID NO: 449616 - DNA, 533 bp, Homo sapiens
acatttggaaaatcatctgaaatgtattatggtttaaaaaaagctcgaattagttttgacaaaattttgagatactaattcttgcatttatgtagtagagtcataataaagaataattgtgcagtcattattgaaatgaaaaaaaacaaacgagttcttactcccaaaataggcaagtgtagctgagtccacataattgaggggttaatggtgtaattggaattgtccaattttatttccaggtagaatacaatacttaytaaagaattaaatataaatatttgctaatttgaaaaagtcaataaaagctcagttgttaaaactcaacaataattgtttagaacttagaccaacaaaagatattttggaggaggaatattttatattttacatgttttagacttcccagtgcataatgatactggatgccactgtttttaaattctccacagaaaatataccccctttattacctgcaccagggaaaggcttcctcaagctttgtccctgttattccaatattatgtacaaat

SEQ ID NO: 449617 - DNA, 588 bp, Homo sapiens
ttgatagattctcagagtttcgtctaagttaggctagactacatggagaaatatggttagctgatgtcttagaatacattcaaaaaatcaggcacactcttaaagtagttatgagaggtggaagcagkggtctgttaggctgccattatcctatagtttcatttgggaagagctgaaataaattaacccatgttttagtatcatttctgaaaggagtgagactcatatattactaccattttctccgggtttgcatcgtctggatgagactcatatattgctatcactctctcctggtttccattgtctggataagggcagagatatttgtctctcttttgctgttcattgtttcagccactatcataatctgcatttctcaactgggaaattagcatttgccttttatgttaccattgctgaagcatactgaaaatgataatagtgtgttaatatatttacttacttacttactttaaaaattgtacttaattataaacaacaaaaaaaaaaggaattcattaaggtgtgaaaaatattccttgaggttcttgctctttctttctcagcaagagttaatgagaatag

SEQ ID NO: 449618 - DNA, 541 bp, Homo sapiens
tctaataattttcagagactgaattaacaaataaactcaaattacacctgttcaagctgtacattcctggcatatttgttaagtctagattatatgtcactgaaaacataagcatctcaataagttatgcctgctccacagacatcattaacaggctgcatgctacaatctaggaggcttcaacagggaatttgatgaattgtgagcaccactgtgaacagccgtgattaatattgtaaatgttgaccaaatggtacccaaacaatgtagaaatggataattctcataaaacagagttctgasagattttatacacaaagattggatcatttaattcatttacttattagtccaagaccatggcttcaaattttactttagatcagttagccacagactgtcagactatgtcagatagttgtccttgggttagcagaggtgggtaagatcaatgaggagtcactcttattagaaaaaagctagtcaaatgtttgttctaaataccaaacccaaatgctttgcatttgctgaccctcatgtg

SEQ ID NO: 449619 - DNA, 607 bp, Homo sapiens
tatttgttaagtctagattatatgtcactgaaaacataagcatctcaataagttatgcctgctccacagacatcattaacaggctgcatgctacaatctaggaggcttcaacagggaatttgatgaattgtgagcaccactgtgaacagccgtgattaatattgtaaatgttgaccaaatggtacccaaacaatgtagaaatggataattctcataaaacagagttctgagagattttatacacaaagattggatcatttaattcatttacttattagtccaagaccatggcttcaaattttactttagatcagttagccacagactgtcagactatgtcagatagttgtccttgggttagcagaggtgggtaagatcaatgaggagtcactcttattagaaaaaagctagtcaaatgtttgttctaaataccaaacccaaatgctttgcatttgctgaccctcatgtgacagacatattcrtagcatgttgcatggagtctttggcctttgtagtcagatgacctgtgtgcaaattttagtttcacctggatgaaacctgaagaagttactgagtccctattacacttagtgtcctcatgtataag

SEQ ID NO: 449620 - DNA, 554 bp, Homo sapiens
ttagcctctctattcttctttttaaataaataaataaatgaaacaatgaataaacaagttatgaatccataaaaacggtgttttaagaattaattaagatagttaatatacatagagggcttctttgcacataactggcttataacaagcagctcttttaaaaataatatcattattattatttgtaaagctgatacattttaactgccacaccttatgaaaagaaagttttctagcttaagcattagttatttggatgtaactcttaaaaaaaatcgtatcattatgactactagcaaaaatgtgatgattagtattattttttctaaaaatgcatttcrcagctatattgattaaagttgtgttgtcagaccttattttttttttttaactagcttaagtaggggaaatttaaaagtgtataatgatcctcaatttttctccatcccattgtgtttgcaaaatacaatatgaggatattgggtaactgtttctgttagagtaaaggtttctgagaatattttaatatttgataatgtttatcattgtgaaat

SEQ ID NO: 449621 - DNA, 550 bp, Homo sapiens
gaccatgttatgtcatctaattaattcttctgttaaatgtttcaacagagagccaagactaagttacctcaagactatgtattcctccctattttggagtcagtttccatttctacagtgttgtcatcatcaccatcttcatcatcattatcatcatgttcttaataagtacatctaatagtaggtattaagcaacaagaaacactgtttccatatactggctgtcaggtgccacataaatyctttaatagaaatataattcatgaattgcagaactgcataatttaacacataatacataatgcatggcaatgactctgtagttaatggggaattcacaagtcacatttaatcatcacccattacaagtgctaatatattaatatttttattaatttaatgttattaaacaaatgctaaagttttgcctaattttattaggcaaaattaattgtatgcaatatattttcactaggtttctaaacctgaaaattttttaagcaattgaattagaaacattgttaaataagaattaaaatattagagtcct

SEQ ID NO: 449622 - DNA, 618 bp, Homo sapiens
aggacaataaatcactataatttatatagaacaagtataatataaaaatatgaacaatttggctgactctcttttcggactcagccckcctgcacccaggtgaaataaacagccatgctgctcacacaaagcctgtttggtggtctcttcacaccgacgcacatgaaatttggtgctgtgacttggatcaggggacctcccttgggagatcaatcccctgtcctcctgttctttgctctatgaaaaagatccacctgcaaactcaggtcctcagacccaccagcccaaggaacatctcaccaattttaaatcgggtaagcggcctcttcttactctcttctccaacctctctcactatccctcaaccactttctcctttccactctttaatctctcccttctcttaatttcaattcctttcattttctggtagagacaaaggagacacgttttatctgtggacccaaaactccggcgctggtcacggactgggaaggcagtcttcccttggggtttaatcattgcaggaaagcctctctgattattcacccacgtttcagaggtgtcagaccatgcagggacacctgccttggtccttcacccttagcggcaagtccc

SEQ ID NO: 449623 - DNA, 577 bp, Homo sapiens
tggccctggctgcaagtcttattgtccaggagaaactacaactgtagcaactctcctcccaccacaggcctgtgacagaagacagtataattcaagtacctacttttgagatgctttccacagtactggctgtggaaacccctactgtgctccagagcagacacttcaatctctggcctgagattaaaatgcctgcacagctacactgttgaggcactaaggaatggctgactttgtccctggattaaaaataacatgctgctctcagttttatgtcagggaaaatgcctgtagcttttcctggtgtgtttttctcacagaatctttaagtctccctcccaagttagctccagggcttggaagaaacaaagttctttcccatagcctgggttgtttagatccccagtgaaaaggtgagtcacagtgcatgtctcatgtcttgaggcctcactcacctttgtcaggtggatgccatcacagggtttatytgtctgcattttcctccccagaatctgggatatccttccttattccagtggattcccattttccttcctgaattaaagctcacagagtt

SEQ ID NO: 449624 - DNA, 307 bp, Homo sapiens
cctgctttatctatgttgttgcaaaagacatgatttcattcttttttatggctaagtagtattacatggggtgtatgtgtgtgtatatatgtgtgtatatatatataaaattttcttatatatatcaataaaaattatacatatctataagaattttatatataagaattatagatatatacatatatatatataattttctttatcgaatcatcagttgatggacacttargtttattccacaactttactatggtgaatagtgctgtgacaaacatgtaagttcaggtgtctttttgatatagtg

SEQ ID NO: 449625 - DNA, 629 bp, Homo sapiens
ttaagtccttttgtctgttttgtatagtggtgtttgcttttgaggacttagttataatttttgttgtttgttttggccaatgtccagaagacattttcaaaggttcccttcaggaatttttatagtttcagatcttacattcaggaatttaattcatcttgagttaatttgtatatggtgagagatatggatctagtttcattcctctatgtatggcaatccagttttcccagcaccrtttattgaataggatgtcttttctccagtgtatacttttgtcaattttgttgaagatcagttggttgtaggtatgtggctttattgatgtattctatattacattccagtgatctatgtgtctctatttataccagcaccatgctgttttagttactgtaaccttgtagtatattttagacaggtaatgtgatacatcaagctttgatttttgcttaggattgttttggctattcaggctatattttggtttcatattaatactatgattgttttttctaattctgtgaaaaattatataaattgcattgaatctgtagattgttttaggaagtatggtcattttaacaatattgactcttccaaactatgagcatagaatgtttttccat

SEQ ID NO: 449626 - DNA, 629 bp, Homo sapiens
ttaagtccttttgtctgttttgtatagtggtgtttgcttttgaggacttagttataatttttgttgtttgttttggccaatgtccagaagacattttcaaaggttcccttcaggaatttttatagtttcagatcttacattcaggaatttaattcatcttgagttaatttgtatatggtgagagatatggatctagtttcattcctctatgtatggcaatccagttttcccagcaccatttattgaataggatgtcttttctccagtgtatacttytgtcaattttgttgaagatcagttggttgtaggtatgtggctttattgatgtattctatattacattccagtgatctatgtgtctctatttataccagcaccatgctgttttagttactgtaaccttgtagtatattttagacaggtaatgtgatacatcaagctttgatttttgcttaggattgttttggctattcaggctatattttggtttcatattaatactatgattgttttttctaattctgtgaaaaattatataaattgcattgaatctgtagattgttttaggaagtatggtcattttaacaatattgactcttccaaactatgagcatagaatgtttttccat

SEQ ID NO: 449627 - DNA, 613 bp, Homo sapiens
ggttaaagcactctgtttttccatggtgccatagtttttatgttagttccttctcatcctggagaaattgtcatttattttttaatttactttcttttagatggtacttttttaaattttttctcttgagggcgtaactgtaatgtatgttgtgtagggctgtttggcttcaattctgggtgctttcaggggccaagcctctgtatgagttccttggttgtagataaccttggttataaatacagttcctttatgtggtggctttttcaaatgctgattatagtagcaatgtactcggcctatgagcaggactaacaccttctgtgggactgaggttatggaagtctcaggaaacttaccttattccgcagcacaatgctcttctgacagaagatttttaatttgattgtgcagtycaatctccagttcattaggtggtagttacgggtaacagctgtctgtggtatatacttgatctttgtttactgagaagggctctgttgtcacatgtagtgggctggtctgtcaaatgactggtgtcctgacttccctgctgaagggtacaggtgggacaaagctgggcagagctggaccaccaaactcaccctcagat

SEQ ID NO: 449628 - DNA, 476 bp, Homo sapiens
tataactataaaatatattttttatatctagtgattgtttttgtttttcaaacctactattccttatwtctgtatagcctctctgtcttgtgatggccatttgcctgacatatcttttgctatctttatttttaaccttcctgtatctttgaatataaactgggttttctagataaaacaggcagttgaattttttttttatttttaatccagtgtgataaactgccttttgatttgattgtacaacagattagaatttaatgttattattgatatagttaaatttacatctgccaattaatttttatctttctaatgtctcttttgtcctctctcctttaccagttttgcattaagataatattttcttgtgtaacattttaatttaatgatttttctttgtattttttgttattttctttgtggttgatttaggacttatatatcttaatttataagaatctatttcatattta

SEQ ID NO: 449629 - DNA, 476 bp, Homo sapiens
tataactataaaatatattttttatatctagtgattgtttttgtttttcaaacctactattccttatttctgtatagcctctctgtcttgtgatggccatttgcctgacatatcttttgctatctttatttttaaccttcctgtatctttgaatataaactgggttttctagataaaacaggcagttgaattttttttttatttttaatccagtgtgataaactgccttttgatttgattgtacaacagattagaatttaatgttattattgatatagttaaatttacatctgccaattaatttttatctttctaatgtctcttttgtcctctctcctttaccagttttgyattaagataatattttcttgtgtaacattttaatttaatgatttttctttgtattttttgttattttctttgtggttgatttaggacttatatatcttaatttataagaatctatttcatattta

SEQ ID NO: 449630 - DNA, 599 bp, Homo sapiens
acatattatatgtatatatgctccaaacccaaccatacatcattatatatgctgcaaacccaacaatacatcatggagctagcagtctccacttaattgcttaccaataaaatttccattatttcagagagtacccttcaacttgaacttgcctacattcttttctaaataaagttaactcttttgggcagaacttcagarttctcagttcttattacctggctctcttcttgggcaaaatatgcaccactgctctggagctaatgggaaggagggtatgggttaaggttcaaattacatagatgcttgctattgttactgagatttgtgtttcttgaaaaaaaatacatataatttgctgtatatcttagaacaatttctggagactttaaatgtagatatataatatatacataattatatttcattaatgtataatatatacatactatatcattacacatataacatcatatataagattatagatacatgatatataataaaacaatgctaacacatatatgtataattaggtacatgattttgtgtatgatataacatatatgtatattattatattattgttatcaattgtg

SEQ ID NO: 449631 - DNA, 602 bp, Homo sapiens
tgtaaaccttattttttcaatgyctgctcataaaagctatccaatacaatttagttccctgtttttctttcagatatccaaatctgtcactctcatcatgccatttctataacaagtcagagagtctatcttcagctttatctgtcattgttctccctcattttgcagtttgttccttgggttgaataatacctctgtaaaatgtttcacattagtcttaataaaaaaagtaatgtttatttttgtaataatttatgtaagatatagctcagtgaaaacatattctccttgcatgttatcacacacaattgtttttgaatgacacaataatgtattgacattttatacttctgatttcacagtatatttgccattacttgttagtaacaaagcatcagtcataaatttgaagtctgtggaattggttaattttacctcatttgagtaaatctcaaatgaggtaaagtataggaggtaggaggaaggaaggaaggagaaagggagtataataactaattggagaaaaatatatttgataaaataatccttgtctgtataaaacaattttcaataataactgatatgtttccctaaaggtagtt

SEQ ID NO: 449632 - DNA, 621 bp, Homo sapiens
atgtcaacagataattgcattatagcagaagtttaatataaaagacacaaaagttttaggtgtgtcctgagaagtgattgatttctrtagggcagaagtaaaggagaaatttaaaaaatatattatgaatgttgcgatgcccaagtagatcttgagagtaacagaagtaatagagtttgacaaggctggagttcctgtaagaaaataagcatattactaaatccactttattctaattaattatttgttcagatcttaacttttataacaggatatgttgaggacctgaatgttctagtcatctgtttcccctgagcacataatgcaatcaatggcctgtgataggtgctcaagaaattgtcaatgcataagtgattcaatggataaaggaagagggacgaatatttgacaggcccatcccctcctcacttgctctgagctgtgtcctgagattatgattgataggatatcttatgaataaatccatcaaaactgagcaaactgggaaaatattaacaatttaatggttgatttttagctaagtcttataatccaaggcaaatacaatttcctcttttatactctccagtacttgttatgtactcatgttttgtagacaat

SEQ ID NO: 449633 - DNA, 512 bp, Homo sapiens
ctcttcagaaatataattttctggtaaaaataaaattatatggagttaagtgacaactctgtgctttttgtatatgcagccactctatcatgcagatatggtagttaagttgctcagttttaatttggggcaatagactgagcagccatttaagaagctgaagagtagcttctctttttyggttttgtgtgaatcgtgggtgtaatttaaaaggcaaaaatggagaaagcctttctggtcctggatagtgaagcttacaggaataagaagagaaaaattgaatttaaaaacaacaacaacaaaacatctgtttcctcagaattagctgctactacccccttcttctttttttttttttcaatgtgtacgagaatccagaatttcttcagtgccacaactgaaacaaaaggtgtctggattagacataagtgtagactacagcaaaatgcttcaaaagatccaagtggcaccacttacataagccctcaggtacccgttaccttacaggatga

SEQ ID NO: 449634 - DNA, 589 bp, Homo sapiens
cacttaggacatttttacttgatatcactttttaaggtgaattcatttgtaggaaaaaaagcaaatgaaaagcagaaaaattagttaattagcttgggattagccatggattttgtccatatgagaaaattcagtgaccttaagtaatgatttattttataagaactcacagacctttatttattactatgttacattgtaaaaatgcttcacctgagccttggtttcttcaatacaccatggagctaaaaagttttattttgcaggattctgtatatattgcagttttattataaagcacacttaaagaaggctaataaactcctcattgatatgcaataaatattagtttctctatttcctttgtggaaaccatgaaattatatatatatataatttttgaacactttyatcaaattaatttttaaaagcactcatttactaaatatgactacagtggaaagaaggacttaatagtaatttagattatgcttcatcaatcattagaggaaatgtgagattggatcaaagaaacaagtcatcttccaagaatagttgctctgaaactgtcattttttatttcagtgtg

SEQ ID NO: 449635 - DNA, 574 bp, Homo sapiens
ttcctctatcaaaccattcttactctacatattcttcttctgctttctagcagaagaagaaaaaaaaagaatgaggaggaataagaagaggaggaggaaggaaagwagaacagaaacacaaaatcttactgtgtcattacatgacctatgattaatctcttccatcttatttacattttggataaataggtgactcttttctcaaagtaaaaaggaagatatatttacttacttgccaattatcttattgaagtgttaaagttttatttttctctggattattttaagatgtacttactattaattcattttattgaaagttaacatggtaaactatatttccaggactatagaagattcaaagatgataaaatatgtatggccttttcttcacaggctttaaaatctaatgacaatttcataagcaaccataaatttgaacatttttgatatctgtaacaatatagtactttatgtaaatggttatagcaaaaataatgccatagttctatgaggaaagaaattttaaaattcctgattcttctcctttagaaatatgtacatatttatctat

SEQ ID NO: 449636 - DNA, 574 bp, Homo sapiens
ttcctctatcaaaccattcttactctacatattcttcttctgctttctagcagaagaagaaaaaaaaagaatgaggaggaataagaagaggaggaggaaggaaagaagaacagaaacacaaaatcttactgtgtcattacatgacctatgattaatctcttccatcttatttacattttggataaataggtgactcttttctcaaagtaaaaaggaagatatatttacttacttgccaattatcttattgaagtgttaaagttttatttttctctggattattttaagatgtacttactattaattcattttattgaaagttracatggtaaactatatttccaggactatagaagattcaaagatgataaaatatgtatggccttttcttcacaggctttaaaatctaatgacaatttcataagcaaccataaatttgaacatttttgatatctgtaacaatatagtactttatgtaaatggttatagcaaaaataatgccatagttctatgaggaaagaaattttaaaattcctgattcttctcctttagaaatatgtacatatttatctat

SEQ ID NO: 449637 - DNA, 528 bp, Homo sapiens
  misc_feature (1)...(528): n = A,T,C or G
acaattttggatggcaatttggaaatatccctttggctcggtaaatctattctatgatttttcacacttgtgggcaaagatatgcatgtggacaatgtccagatgtcctctgggtcactgttggtaatagaaaaaaaaccagaaaaaaactaaaatctcaattgattatgttacaaccatatgatgggatatgacatatttaaaataaagcagagcttaatctaaccagcataaaaaatatayccaagacgtagagttaagtggtcacccctaagagctgagatttcttgttacttatattattctgtactatttaatttctgttactgtgaattttcaatattaattaatgaaacacattaaagaaatcattcgtatggggaaaaaaaatctccagaactagatttagctctaggctttgcttggagaaagaaaagtaaagtttggttagtatcatcacagtttttgcccacttgtatcaaataaacaagacctttggaaatgtatgcatctaagtctnctggcttg

SEQ ID NO: 449638 - DNA, 538 bp, Homo sapiens
gcccgaggagtggacagccaaggtgtagggataaaatccaaatcttccctctcaggtccttccatttaataacttcattcagataagagtagatgcataatagcaggattctggacacttaaatgtgaatgtggatgagtaataatatttcctgaggcaccacactggcctctacacgccagctccagaagtaccagaaagggatgcaatttacatagaatacaacacgaaaatcttgggagtgtgcaccctggagtccttgcygtaggatattgactaatagaaaacaactccagcgctgtccagtttaaaatcctcagagaagaacgaggggaaaactgggtaggtacgggtagctgtgagaggctggagactgcgagagcattaaatagtcatccttcttcacaggaaactgtgaagttctccagcacctctgagtctctcctggaaatcttcacctcccatgacttaaagcaaaggctttgaggagctgtctgctctcacttcctctgaccccctagtacacactgttaatgcc

SEQ ID NO: 449639 - DNA, 489 bp, Homo sapiens
ctttctctctgtctccatagggctcacctttagaaatgaccraaaaagaagtggatgcacacccacccctcatttactctaatcaggcatgaaatctttgtaacgaagtgaaaaaactgttcagggaactggttccattcatcattgtttgaactgagcatatgtgaagggtagaaatagaatattcacatataatgaattgataacagactgcccctgggtggggcggtggtgattggggctgaggggggaacgcacacgagctgtaaaactcccagcacctcaaagcctgtttctaccagtttccctatggacagtcagtcctgaattatttctagttaacagactgtaacacaatgctccagtctctttatgatcagaatgggggtggggggtgggggcttggctaggcgctccttgcctctccatttgccatgatggacagaagtatattgtgcctcagttcgtgtgtgtggagacagctgtgtg

SEQ ID NO: 449640 - DNA, 489 bp, Homo sapiens
ctttctctctgtctccatagggctcacctttagaaatgaccgaaaaagaagtggatgcacacccacccctcatttactctaatcaggcatgaaatctttgtaacgaagtgaaaaaactgttcagggaactggttccattcatcattgtttgaactgagcatatgtgaagggtagaaatagaatattcacatataatgaattgataacagactgcccctgggtggggcggtggtgattggggctgaggggggaacgcacacgagctgtaaaactcccagcacctcaaagcctgtttctaccagtttccctayggacagtcagtcctgaattatttctagttaacagactgtaacacaatgctccagtctctttatgatcagaatgggggtggggggtgggggcttggctaggcgctccttgcctctccatttgccatgatggacagaagtatattgtgcctcagttcgtgtgtgtggagacagctgtgtg

SEQ ID NO: 449641 - DNA, 545 bp, Homo sapiens
gactgtgagaaaggcatgattggttttgaaatgtgaagacacgtgatttgtgaggggccaagggtgtaattatatggtttggctctgtgtccacacccaagtttcattttgtagctcccatamaattcccacatgttgtgggagggacccagtgggagataattgaatcatggaggcggttctttcccatgcttgtctcatgatagtgaataagtgccacaagatctgatggattctgaaatgagagtttcccctgcacaagctgtctctactgctggctgccatccatgtaagacatgacttcctgctccttgccttccactatgattgtcaggcctccccagccatgtggaactataagtccattaaacctctcttttctaaattgcccagtctcaggtatgtctttatcagcagtgtaaaaatggactaataaaatacacttactacatacccacaaaaattaaaaataaaaaaattatttaaacatacacacacacataaaataaggcaatactttgaataatgctacacatataaattcg

SEQ ID NO: 449642 - DNA, 545 bp, Homo sapiens
gactgtgagaaaggcatgattggttttgaaatgtgaagacacgtgatttgtgaggggccaagggtgtaattatatggtttggctctgtgtccacacccaagtttcattttgtagctcccatacaattcccacatgttgtgggagggacccagtgggagataattgaatcatggaggcggktctttcccatgcttgtctcatgatagtgaataagtgccacaagatctgatggattctgaaatgagagtttcccctgcacaagctgtctctactgctggctgccatccatgtaagacatgacttcctgctccttgccttccactatgattgtcaggcctccccagccatgtggaactataagtccattaaacctctcttttctaaattgcccagtctcaggtatgtctttatcagcagtgtaaaaatggactaataaaatacacttactacatacccacaaaaattaaaaataaaaaaattatttaaacatacacacacacataaaataaggcaatactttgaataatgctacacatataaattcg

SEQ ID NO: 449643 - DNA, 545 bp, Homo sapiens
gactgtgagaaaggcatgattggttttgaaatgtgaagacacgtgatttgtgaggggccaagggtgtaattatatggtttggctctgtgtccacacccaagtttcattttgtagctcccatacaattcccacatgttgtgggagggacccagtgggagataattgaatcatggaggcggttctttcccatgcttgtctcatgatagtgaataagtgccacaagatctgatggattctgaaatgagagtttcccctgcacaagctgtctctactgctggctgccatccatgtaagacaygacttcctgctccttgccttccactatgattgtcaggcctccccagccatgtggaactataagtccattaaacctctcttttctaaattgcccagtctcaggtatgtctttatcagcagtgtaaaaatggactaataaaatacacttactacatacccacaaaaattaaaaataaaaaaattatttaaacatacacacacacataaaataaggcaatactttgaataatgctacacatataaattcg

SEQ ID NO: 449644 - DNA, 530 bp, Homo sapiens
tgcctttgcagtcaatctcctgctccaaatctttttttttgtttgtttactttttatttggaaccgatttaaaatttacaaagaatttgcaagaataagaatagcacaaacaacataggtatgcccttttcccttggcagtgtttgagggtaagttaaatgtattgtggcctttttttccctaaactcttaagcgtgtttttctaaaaatagggataatctcttacataagcgcagtacacttatgaaaggtctgtacatttcacttttatgcaatatttgtgtccaatctattatccatatcccagttttgttggttcacccaataaygtccttagtggtgttcccccacctccagtacagggtccagaggaggctcagggattgcatttggttctcatatccttttagtttctttaatgtggaacttttccacaaagtcattgcttctacgacactgaatttttgaaaaatacagtcccctctccctttttttttaacagacggtttctcatttgggatttaactggt

SEQ ID NO: 449645 - DNA, 559 bp, Homo sapiens
atgaaatttttgaggctttaataagtcttaagctgtgggcagatataaagtggaaaaatctgacagtggagtttggcaaaaagcaatgcaaataaagtcttaatcttcaaatggtctttttttctttttctttttaaaagatgccttctagtctgtcatcttttgctttctcatttcccatgatacttaaaccacaaagggaaaaataccactgtaacaactcccatgtgtagggttatatgaagggagttcatgatattgggaagtcagagagggattttcagtgaattattggagcaaagctatgatgatactaaagatggttgaaattcaaagaggagactatcatttatcggaaggactgtcaccagggcatctcatggaattcaaagaggatttgaataataaatgagaaagagcaagtgccagggcagttgggttaggggactcaaggcacagccatcaacaggacttgaccccatccccttccaagcttgagagccctctctgcasacctttatagccaggttgtggcatcagggtgcactcctggatcaat

SEQ ID NO: 449646 - DNA, 596 bp, Homo sapiens
tttctgaacatctgtgtattattgtaaggagagacacagagagatgagaccacaaaccaaaagttacacccttctggtctgaaaggtttggacagacactagtgtttctggaagacagagaatccacaaacataagaatgtgggtgtgaatgtttgcacacaaagaaaggcacgttttgaaagcacgtttgcagaccacggtgtgaaataaaaactgttgagacttaccggtaagagcacacgtcaactgtggggctctgactgcaagaaggggacgcagaggactcagcagaaagcgagacaactcctgctcccatggacccacaaaacaaagcactaaacagactccatagtcattttccttacacgtcatttcctggtagaattcccacctcckaagaggaaacctccgtgaccacataagaaaaaacattttttaatttcattccaatttttaaatgagtccaaactaaaacaaagattttatgactctccctctcagtctgccatgcggatttccgcctctgacaaatgccaggaatccttgtggctactttagatgttcaaaccatttattaagaagaatgagagggtgc

SEQ ID NO: 449647 - DNA, 605 bp, Homo sapiens
ataaattacaatttactacaattgctgaagctgggcggaatatcagaatccaaaattacctcaagttgaatcaaaggaccaacgaacaccatagaaatggaaaaaagttccttaacagttagctttttattgctattcttagtgccaatttttttttctaatcatagccagagccaaggctagaaatttaaaactattttgtaaatttagtaaatcatttccaaattattctggtagggaatgcattgctcactgcacaactgtacatagtaggaaattacatccattttcaaaggcaaatrtattcctaaatctttcaaatttagtgcccttcaactttcagtaactcaagaaaactaaaagaactttatattatttttcttaatcctctcagcagagatcttttaaataaaactttcgtgctaaaccatcatttcttaaatggatatttcattgaatactatcccattaaaggttaatagtatagcatgaagaaagtgttccacagtcaaatagattgagaaaccctgggtcaaacttggctgtcagacttcatttctgcaggaattctcaaagcctttgagtttaaatatgctaatgtgaaa

SEQ ID NO: 449648 - DNA, 649 bp, Homo sapiens
ggctggtgatgctcacgtaagattgcatggccagggcagctttagagaagagctggctggtttccctggttaaaatcacagcagtctcagtgctgatgagggtagtgagtttaaacttgaatgaggcaagtagtatcataaaaggaaaaataagaaaatatttcactgtatcatgatcagttgcagcaagcaaccctaaacctggctttgcagatggcaagcctatttgttttgtcacaagtagacagggcaagataccacaaaccccttgtcatatcctctgatgaggctcagcaatggcatctgaatctgtagaacgggcacattttagtttgcaagaactcaccagtaaagcccaaactaatraaccaggtccttcacatttcctttaattatataaggattttctttgtgtttctgtctttacacttgaagacccatgaaatccttggaatccaaaggttttccgtggccttcagatgaaacagttataaaaggagcaacatcactgtcaattcagtaacagtataggtcagaagttctcaaactttcttagttcatggctcccttcatttcccagtaagtttccttgtgacactcaaagccaaaagaaacacccaacagttccatttatgaagtaagtccaaac

SEQ ID NO: 449649 - DNA, 416 bp, Homo sapiens
gggtacatgaaggtggccttcggtcacctaggaaggctccttgctgaccgtttcctggacgtggaggtacagaacgacctgrgccgagtgaaagcgaccagcgaaggtcacgccggcccagcagcctggagaatgagacccaccacccacaaacccactggtggagagcgggcgaggtccccgtgtgcggtgaaggagcagggcaccaaggaaggcgggcagctgcctcttgttttcggccaagggagacgttgaggtgtccctcaggacaggagttcatttgcgtgggaggggagaagggcgcttctgactactttgcattggtgtgtgggctggacacagtgagaaggaaattaagcctccgcggtgacagtgtgtgtgatcgcggaggaggaggacgcccgcaggctggcccg

SEQ ID NO: 449650 - DNA, 416 bp, Homo sapiens
gggtacatgaaggtggccttcggtcacctaggaaggctccttgctgaccgtttcctggacgtggaggtacagaacgacctgagccgagtgaaagcgaccagcgaaggtcacgccggcccagcagcctggagaatgagacccaccacccacaaacccactggtggagagcgggcgaggtccccgtgtgcggtgaaggagcagggcaccaaggaaggcgggcagctgcctcttgttttcggccaagggagacgttgaggtgtccctcaggacaggasttcatttgcgtgggaggggagaagggcgcttctgactactttgcattggtgtgtgggctggacacagtgagaaggaaattaagcctccgcggtgacagtgtgtgtgatcgcggaggaggaggacgcccgcaggctggcccg

SEQ ID NO: 449651 - DNA, 527 bp, Homo sapiens
ttggcagctgtactcttctaaaattggtcaggaggtattaggttggtttttctttctttacttttaaaattggccttttcccactttataaaagcaaggcatatctttatccttcctgaatattcttatgtgaattgcttcaaggtagaaacaccttcagagtgcccaacaaggacgtaatacaaatattggtgtcccccagtgttggtgtttccttctagggagcatwcaacttcctgtccattacagatgcatttccccccaaaattactttttctttttaataatgattgacattaacttgaaatggcaactcaacttggaacacatttttaattgcttgaaagcttatggcactaaggattgtttttaaagttaatttaaatatatttatgtatttctgctgtagcggaacaggatgaccatttcattttgaaaagctgttgtcgggtgggtctctggaaaggggatcatgggctggagtttcgtgtgtagaatgtctatggggggtgcccttggggggaacc

SEQ ID NO: 449652 - DNA, 603 bp, Homo sapiens
agctactcaggaggctgagattaggaggatctcttgagcctgagaggtcaaagtttcagtgggccgtgatcacgccactgcactccagcctaggcaacagagcaaaacccrtctcaatcaattaatcaaaaaaacactatgacagacaagagagactgcagaagaaagaaacaagctaattccctgctttttacacaagggactcccattttcattttgcactgtgccctaaaaattacgttgcaggttctactctgagaaagtgtcatttggactagaggcaagagcatttcaggaagagagaactccaagtgcaaaggcccggggctggaacaagcttggtgtattccaccgtgaaacagaaagacagtggccagagccccgtgagcaggtcccagcctggaaccaggtgcaggaaggagaaggcagacccgaggggctgagaaaggaggagccctgggaagtccaggctgggcagtaagcacattggagtccaggtgttggtgctgaggaggaaagcagagacgcaggccctagagggaaggggacatgcggggaggagagggaggaacatcattgctgaagactcagcccacttcactt

SEQ ID NO: 449653 - DNA, 586 bp, Homo sapiens
ggtagttctcatcagtctaggtgagtgactctcaaactttagcatatatcagaatcagaacccaggagggcttaataaaacagattgttgggtcctactgccagagtttctaatgaggtctggaaggaggccagagaacttgcatttctaacaagttcccaagtgatgctgctacttctggtccagggattgtatttggggaatcactggtatagtccatttcctggaagggggcctgtcagctggcagcactcccaacagctggggagaacaaggtgataaatcctgagaggagatctgggaagcagaccacaacatctactgctagcatggactctagagtctgtaagaggcataatcctgtagattccaccacttactagatctttgaccttaggatattatccaacttctctgagcttcatttctaaagtgtctataataacacctaatgtaaggaatattgtgagaaaaatttgctactatttatttgttccttkacccagtggttggcaccactatccaaccagttgcccaagttagaatgttgggaatcatcttggtcttacctcttcctgtcatctaa

SEQ ID NO: 449654 - DNA, 503 bp, Homo sapiens
ctatgttctaaacatgggatatgctgtattaaacagagatgaaagtctctaccctcatggagcttacattctagtgaaagaaagacacacattaaaaaataaataaataaaatatgttaaaagttagatggcattaccagctaagcaagaaggggaataggaagtgctgtgggagatacacttttatttaggcctcactgaaaagtgatccttgagtaaaatcctgaaggagatgaggcagtacaccaagtggatatctgaaagagtggcattcccgggtgatgctaatgctgccttgagtgycagcaggcttgtcatgagactcaccatgtcaggggcagatacacctccagcagagcagaggctgcagaagaaccagtctaggctggatgaaaaggctggtgttcaccaaagtatctccagtcagcggtagccacactgagatggagatagtcaaggagaactaccaggccctgaccaagcaagagagaccaaatcataaa

SEQ ID NO: 449655 - DNA, 575 bp, Homo sapiens
tttttcttggtatgtatttaaataatattattttaaaaatgaygagacctaaacttataccactgttcttcaaggagagagattaaaactcatattccaactatgtttgaggagactgacatattttatgtttcttaattatctttaaagttcccaattgcattactgttgaaaagactcaatttactatgtgccaatgaaagaataaaagaacctcccagacaactgctatttcagatgagaaagtatttcattcctttgtactgtcagaatataaaactttcatgtgaaggacgttttcaaccttcttttgttctactcaaagtcatggcattgtttaggtcaagactgacattcaacacaagtataaaatattaatttaataaaattgtccagtatatagattttctgttatttattaattggtaatgccttatatctttgtctctcaaaaatattttatgatatatgaaagcagtttcaaaatgagcttgacaaaattgatcaatcttttgaggtttttactagcctactgagattatttaacccttctccaaatttcctgttctttcatc

SEQ ID NO: 449656 - DNA, 617 bp, Homo sapiens
attttacataacagttttttaattgagaaattaacaattcttttctcttggaaatatttagtacatattccctttttttaggtctttattttttttcagtctggggagtgaataattttacagatatagaatgtttgctaaccacataacactttgcacttaacagaaatgccgtgaaatgtcctgaatttatttcatcgttctgcactcagggttaccccatgccaaaacttggcactgcaggattttaatygttaacttgtcctttacataatataactatcccctagttgactaaaataatcttctagttgctaccaataaaatcactactggttcaggtttactcgccattttttttccaaaataaccaccatttaaaagaaattcctgtttgtgcttatgccactctttattctggaaaagtgttcattcctctttcaagctttactttaaaatattcctctttccaaaaaaaaatcctgaaatgattctgtgtaaaatggttccaactgaggacctctttctctgggctgcaggtgttctgtggcattgtgtatgtgtgtaatggtgtgcacagagggtagcaggacaaaacagagatttgtatcatgaat

SEQ ID NO: 449657 - DNA, 585 bp, Homo sapiens
attccttttataatatagcgggagatctttatgcaatcctacaacttcaaccaccgccactactttgatccttcccaaatctccatttccagcctttcgataactgtatgagatattaccatgcttgcagtctaacaggttagattgccacatgttcatggatgctggcagaagactcaaggcacttgggtcagagacaaagacctttcttactcatagcacagcaaactgagtaagcctyacattcacgccagttatctttttccatacaggcccatgagggtactgtagatgtagagaggccagtttgatgcagtgggtttgcaccgaaactgagaaaatctgagcttaggatacccccaaattttaaaatggactgcaagaaaacctgtccaacctgtgctccagaggaagacattatctcctagccccaaatttagtggcaaaatgcctgtaatgaaaatgtataatctcaaccatttttaagtgcacagttctgtagaattcaatacattcataaagttgtttaattaacaccagtatccatctccataactctttcatcttgcaaaaatggaaactcaa

SEQ ID NO: 449658 - DNA, 585 bp, Homo sapiens
attccttttataatatagcgggagatctttatgcaatcctacaacttcaaccaccgccactactttgatccttcccaaatctccatttccagcctttcgataactgtatgagatattaccatgcttgcagtctaacaggttagattgccacatgttcatggatgctggcagaagactcaaggcacttgggtcagagacaaagacctttcttactcatagcacagcaaactgagtaagcctcacattcacgccagttatctttttccatacaggcccatgagggtactgtagatgtagagaggccagtttgatgcagtgggtttgcaccraaactgagaaaatctgagcttaggatacccccaaattttaaaatggactgcaagaaaacctgtccaacctgtgctccagaggaagacattatctcctagccccaaatttagtggcaaaatgcctgtaatgaaaatgtataatctcaaccatttttaagtgcacagttctgtagaattcaatacattcataaagttgtttaattaacaccagtatccatctccataactctttcatcttgcaaaaatggaaactcaa

SEQ ID NO: 449659 - DNA, 582 bp, Homo sapiens
tagtatatatatatatagttatatatattagttatagcaaaacatatatatatatatgttttgctattgttgtttaatttataacaagatttctcaatcttggcactatccacatgtccttggcagataattcttttctgtgrgggcgtcttgtgcattgtaagatgctagcagcattgctcctttctatccattcaaccccagtggcacccccaatctagttttgacaaccaaaattatctctgggcattgccaaatatcccaggaggattgcaagagtgggataaattgcacgctgtttgagaatcagtgatttagagccactctctggcactttctagctctctacagagtattcaaacagagtaaagattctgtacaagtttctgtaactgatatttatgaattagtagaaatatacatcccagccagaagatagtgcactatagtaccaatgttttaagctgtttcacagaatatacatacatattaatgaatgggatatttactgtgtagaacaaaagcagtgaaggatatgatgctccaaaagctgcggtggtaaaccacatggaccatattaac

SEQ ID NO: 449660 - DNA, 582 bp, Homo sapiens
tagtatatatatatatagttatatatattagttatagcaaaacatatatatatatatgttttgctattgttgtttaatttataacaagatttctcaatcttggcactatccacatgtccttggcagataattcttttctgtgagrgcgtcttgtgcattgtaagatgctagcagcattgctcctttctatccattcaaccccagtggcacccccaatctagttttgacaaccaaaattatctctgggcattgccaaatatcccaggaggattgcaagagtgggataaattgcacgctgtttgagaatcagtgatttagagccactctctggcactttctagctctctacagagtattcaaacagagtaaagattctgtacaagtttctgtaactgatatttatgaattagtagaaatatacatcccagccagaagatagtgcactatagtaccaatgttttaagctgtttcacagaatatacatacatattaatgaatgggatatttactgtgtagaacaaaagcagtgaaggatatgatgctccaaaagctgcggtggtaaaccacatggaccatattaac

SEQ ID NO: 449661 - DNA, 582 bp, Homo sapiens
tagtatatatatatatagttatatatattagttatagcaaaacatatatatatatatgttttgctattgttgtttaatttataacaagatttctcaatcttggcactatccacatgtccttggcagataattcttttctgtgagggcgtcttgtgcattgtaagatgctagcagcattgctcctttctatccattcaaccccagtggcacccccaatctagttttgacaaccaaaattatctctgggcattgccaaatatcccaggaggattgcaagrgtgggataaattgcacgctgtttgagaatcagtgatttagagccactctctggcactttctagctctctacagagtattcaaacagagtaaagattctgtacaagtttctgtaactgatatttatgaattagtagaaatatacatcccagccagaagatagtgcactatagtaccaatgttttaagctgtttcacagaatatacatacatattaatgaatgggatatttactgtgtagaacaaaagcagtgaaggatatgatgctccaaaagctgcggtggtaaaccacatggaccatattaac

SEQ ID NO: 449662 - DNA, 582 bp, Homo sapiens
tagtatatatatatatagttatatatattagttatagcaaaacatatatatatatatgttttgctattgttgtttaatttataacaagatttctcaatcttggcactatccacatgtccttggcagataattcttttctgtgagggcgtcttgtgcattgtaagatgctagcagcattgctcctttctatccattcaaccccagtggcacccccaatctagttttgacaaccaaaattatctctgggcattgccaaatatcccaggaggattgcaagagtgggataaattgcacgctgtttgagaatcagtgatttagagccactctctggcactttctagctctctacagagtattcaaacagagtaaagattctgtacaagtttctgtaactgatatttatgaattagtagaaatatacatcccagccagaagatagtgcactatagtaccaatgttttaagctgtttcacagaatatacatacatattaatgaatgggatatttactgtgtagaacaaaagcagtgaaggatatgatgctccaaaagctgcrgtggtaaaccacatggaccatattaac

SEQ ID NO: 449663 - DNA, 579 bp, Homo sapiens
caattgctagccagcttaaaacatttgtatttcagagtttttaaccttacactttgtgatactgttataaaacctcaagtaaaatttaagtttcttaaatgtagaaattacagcttatattttttctggatttattttccagagcacttggtacagtgttgttagcataatagattgtcaaaaatgattgtttactaaataagtaagtaattaaataaataaatgtsagaacttatgctatttataatggaagcttcaatactataatatagaaagtaaataatatctaatatttgcaaacattttttgttatatcaaagagcacatttattcttcatagcaatcctatgagatactcagcaatagtcctattattcccattttgtagctaaggaaatacaggctcagaaagattaagccagttatctaaggccatgcaactgtttagcaatatatcaaggactttacctttggtctttaaagacttgccaatacattagaatacatttcacaataattaaatacgcagaaaatgcaggcaaatatacaatacatatatacatatatattgtttaattg

SEQ ID NO: 449664 - DNA, 581 bp, Homo sapiens
tatttttgtcttagctttcatttaaattaattccaacctmaaagcaagactcaaaatgcaaaatctggagcaaaccttaggctagtgatgttcaaactctaatgtgcttaaataagaaccacctggggagttgctaattcaggcaatgtgggagaggatggactcttctacctgctttttagcaagcctctaacattattctgaggtaggaggtttatgaaacctattttaagaataaccgccttagaatcatcagattcaacttcctcattttacagatgaggtagttaaggcccagagaagtaaaatgatgtaggaaaattcacacagcagaaaagtgttttaacaagggcttagtttcttggttcctagtttagtgattatttacactatatctcactggattttctgaaaattcatttgcagtatctcaacatatgaattttaagctaatcttgcatttagatcagtctcaattttctactactgaagtcctaggttatacttgtgaaggctttagtgtgctgtgagcatctggctctccttgcctatcagtcaattcttaatataagaataattgg

SEQ ID NO: 449665 - DNA, 572 bp, Homo sapiens
tgaattttaagctaatcttgcatttagatcagtctcaattttctactactgaagtcctaggttatacttgtgaaggctttagtgtgctgtgagcatctggctctccttgcctatcagtcaattcttaatataagaataattgggccaggttcacacctgtcaccccaggactttgggaggtgaaggcaggaagatttcttgagtccaggtgttcaagtctgcagtgaactatgtttgtgccactgcactccagcctgggcaacagagcaagaccctgtcccttaaaaaaatgattacaacatctatacagtgatatatataccatgatatacggtaactgacagtctacctctctttcattattgtgaactcagctctcaggctagtgggggcagatagagtttcagggcagtggctgaggtgatttccagcatctcattttacatagatatctraaaaacaggtttaaaaatgcagaaggcagtgggagtatgtggggaaagcaggtaaaaaataagaaagatgattcatttttttcttcatcaccaatgtatctcctgaccttttggtca

SEQ ID NO: 449666 - DNA, 602 bp, Homo sapiens
gactaatggtatattcccaccaaagcttgataaacttaaaatatctgccaagaaatctatgtctcagaagaatatgtgtctggctcatggcatgtagagatggaggcaggacaatatggtctggaggcagggaacctaaggacttcctagaactaaatcaaactgaaaaaccccaactttctaagcccaagtaaatgacattgtaacttcacttcagcctcttcatttgcaaagggtgtacaccaartaaataactttgtaacttcacttcagcctcttcatttacatggggtgtacaccaagtaaccaatggaatacctctagagggtatttaaatccctgaaaattctgtaaccagcactcttgagctgcttactggagcctgctcccactctgtggagtgtactcgtttcaataaatctgtgcttttctttccttgctttatttgtgcattttgtcccattctttgttcaagatgctgagaactttgacaccctctactggtaacagaaatgactgggtcaaatagacaaaaaacaaagttttgaacaagctgtatgtactctacatctgagcagaaaattttaatacagctgcatagt

SEQ ID NO: 449667 - DNA, 515 bp, Homo sapiens
taatattgttaaaatgcccatcagttatgaatttaatccctatcaaaatcccagtaacattttttgacagaaatagaaaaaatccaaaaattcatatgtaaccataaaagacgctgaatagccaaagcaatcttgagcaagaaaaacaaagctggaggcactgtacatcctaattttaaaacatattatttagctacagcaaacaagacagcatggtactggtacaaaaacagacatgtagatcactggaataaaatatacaatggtgttgaaaaactagatatccacatgcagaagaataaaattataccttcatctcacactatatayaaaaatcaactcaaattggattaaggacacataaatttaggatctgaaactagaattgctagaagaaaatatgggaaacactcaattatgttgatctgggcaaagatttttttaatatgaccccaaaagcaaggtaataaaagcaaaaataagtaaatggtattaaaccaaactaaaaagctctg

SEQ ID NO: 449668 - DNA, 584 bp, Homo sapiens
tctcacctctaactgaccttgaggttctgagcaaacaggaaatgaaggctaaggcagagttacaaacttcttacctcagcattgaaagcatgcctcaagacacacagagacacacagggagcccctctacaagggtgggagacatcaattcaatacatttaaggaaatctctgtctagtcattagcwgatcactaagctaactaagcagacttcagtagttacaaacaacaaaatatataaactttacaaaactagtccaagaaatgcactaatcaaacaaataacaaaaacagcaaaataacaaaccctgggaaagaagagtaatctaattttcagaatttcacatcatattatttagaatttaaacaaaaaattatcagacacgcacagaaacaagaaaatagccaatacacaaaacaaaaatagatcagttaataaaaactctccctgaagatgccaagatgttggacttactagacaaagattctaaatcagctattataaaactattcaaataactaaagggaatcatatctaaagaattaaagtgtaataatatctcactgtgaaagaaaatcaatag

SEQ ID NO: 449669 - DNA, 326 bp, Homo sapiens
cacacatacatgtatcatagtcaaattgtcatatgaaattgttttctagaaattgcaacatttgtaatttgagatgggcttttgagtttaaaatttatattcaggtgtaagatttttcctttggctgaaaaaacctcacccattttctcakctataagaagaaaggctttgagatagaatcaccagagcaagatggaggaagaaccctatccatccacaggaacatcaaattgaatgactatccatgcaagaatacaccttcacaagaactaaaggaatcaggtgagaggtcatggtacctggttttagcataataactagaaaat

SEQ ID NO: 449670 - DNA, 521 bp, Homo sapiens
ggaagttactcaatctgatggcaaaggattctaatgtttaacaacgaaacatcagaaattttttataaaaatctctgctaatagaaacaatacaaattcagaatactctaatactgtaactgtggtatataaaggactcatatatttagtttgaagacagacaaaactattaaaaaataayaactagaaaaatttattatgcattaggcagtacaaaaatatagaaattgagatatctaaaagtcaaaatgtgaggagtaaagtataaagttttttttagttttgtttctcttttctttgtgaccaatgttaacttgtcatcaggttaaaataattagttacataagatgttttctgtaagcctcacggtaaccacaaagtgaaaacctataatagatatactaaaaacaaaaagcaatgaattaaaacataccatcagagaaaaacaaccacaaaagaagacagaaagtaagaaagagaagatttacaaaacaacagtaaaattagcaacaaaatatcaa

SEQ ID NO: 449671 - DNA, 613 bp, Homo sapiens
cagtcagacaaaaataaagaaaacaattaagaaaaatgaacaaaacatcccagaaatatgggattatgtaagaaggcaaaattaacaattcattggcattcctgagagaggagaataagcaacttgtaaaatatatttgaggatatagtccacaaatattttcctactcttgctagagaggtcaacatgcaaatccaagaaatacagagaacttcagccagatacgatataagataatcattcctatggcaattaatcatcagattcatcaaagggattgcaaaagaaraatccttagaggcagctagagagaaggtgccagtcacctagagaaggaattccatcagcctagcagcagacctctcagcagaaacattacaagacagaaaagattgggggccaattttctttatttttcttcatcttttattttaagttcagggatacatgtgcaggatgtgcaggtttgttacatagctaaatgtgtgccatggtggtttactgcacagatcatcccatcacccaggtattaagcccagaatccagtggctattcttcctgacactctccctcccaccacaactcccacaggtgcccagtgtgtgttgatccc

SEQ ID NO: 449672 - DNA, 604 bp, Homo sapiens
ctacagtttcaatgcaatcactatcaaaatgccaaaaacataattaaaagaaatttttaaaatctctatagaaccacaaaagaacccaaatagtcaagctattctgggcaaaaagagccaaattgaaggcatcacactacctgacttcaaaatatactacaaggctatagtaactaaaatataatattattgaacaaaaacagacacatagaccaatggaacagaatagagaacccagaagtaaagctatgcacttacagtcaactcactttttacaaaggtgccatgaacatacactggggatargagagactctaaaaatggtgcttggaaaactaaatcttcatgtgcaaagaaatgaaactaggccccaatctctcaaaaatcaatgcaaaatacattaaaggcttaaatgtaagacctgaaactataaaactactagaagaaaacgcaggagaaatgctctaggacattggtctagccaaaaattttatggccgtgatcacaaaagcacaggcaacaacaacaaaaatagacaaatggaactatattaaatgaaaaagcttctgcccagcagaagaaacaatcaataaaaaggcagctt

SEQ ID NO: 449673 - DNA, 592 bp, Homo sapiens
aaaaaaagagcaaggtagagaataacttaagtcagtggagtcaaaagtttgagaggccatcaggaagttacagcaattaggtgaaagaaactcagacggattatttggatagtcctctaggagcagacagatatttaaaaaaacaaaacaaaacaacaaaaaaacttgctttggctaatggctaaatgttgttaggaagaatcattttctgggacctagtcatacagatttttgtgatgttaagctcaagctgataagtccccagaggacttggaagacattttattgccctcatttggaaggtgaagccattgacctcaaaccctaggaatgtgttactttgttcttttaataatcataacgactttttccagtgcaagccatgtacaaatgcaagatgcttggactgagttgaaagtgctctataaaaaagatagtccaaacgatgatkggccttggaaactggtgccaatgagaccaacttctacccagccaaacaaagtcatgtgaccagttttcgaggctaaatgagagctgaaaaattcagatgaagggtcccctgctgattaggttgtgtcagaagcaaagaact

SEQ ID NO: 449674 - DNA, 581 bp, Homo sapiens
ggtgcactctgccagccctatcagtgggtcttagaaagtgctgtccaacaccatggggcactctcagagaatgctagcggattgtttacataagctttttggttctgagggacaccagtgstcctcctctttaggcctagactctcaggcaaagatgcctggtggggcaaattagagatccaacagacggcctctgagaaagctagagaagcaattccttggccactgctattgtcccctgcagatgagactgaaagttttcagagaacctgcgagctgatttgcatcaataacagctcttagttctaaagaggtaccaggcaatgacagacagcttatgacccagcaagggattgagactcatggtttaaataaaacgaatggagagccctttgggattgctttcctgtgtgatctaggagaatttagaggcatggattatttgcctgcatgatgaatgaggtaatcttggtaaactaacttagtggtaccttgtgggctgtgtcactataaaacccctcctttagactgtcatgacagaataggttttgctcaaggaggataagcaaagtcagagaatg

SEQ ID NO: 449675 - DNA, 581 bp, Homo sapiens
ggtgcactctgccagccctatcagtgggtcttagaaagtgctgtccaacaccatggggcactctcagagaatgctagcggattgtttacataagctttttggttctgagggacaccagtgctcctcctctttaggcctagactctcaggcaaagatgcctggtggggcaaattagagatccaacagacggcctctgagaaagctagagaagcaattccttggccactgctattgtcccctgcagatgagactgaaagttttcagagaacctgcgagctgatttgcatcaataacagctcttagttctaaagaggtaccaggcaatgacagacagcttatgacccagcaagggattgagactcatggtttaaataaaacgaatggagagccctttgggattgctttcctgtgtgatctaggagaatttagaggcatggattatttgcctgcatgatgaatgaggtaatcttggtaaactaacttagtggtaccttgtgggctgtgtcactataaaacccctcctttagastgtcatgacagaataggttttgctcaaggaggataagcaaagtcagagaatg

SEQ ID NO: 449676 - DNA, 589 bp, Homo sapiens
tccacagtggcacctgaggatgtataccaagtcagagttcaaagaggtcatagtgtagaattacataactcacatcatttgaatactagtttaccaatgatttatctccacaatctctgacaccaggatgagggtgaaacagataatgctatatggtgtgaggtctgaagccaccaaaaacatgacccttacccaaacacaactatgggtgggtcccactgggccactacaaacctccatttttatgactccctctactgaatatattattgatatagatgtatcttctgtgtgaatccccaatcacatcagcctcaagccctaaggggaactactgtggttaaggtcattttagtgaagcatgtggaagactgtwaacttactaaaccacaagtgtctagagattggtctccaaaaattgcctgagggagaaatagaaatcactgcccttattgctcagctcttcatgatcatgaatccaaagatgttcatgagactatttctccatgcaataattaagttagcttgtgtgtatcaccttgggtgcctataaactccattgattatgggaagcttaatgctatggtac

SEQ ID NO: 449677 - DNA, 506 bp, Homo sapiens
ctccctggggcccccagactgacacagaaagctgcatggagtctccgcagagccgctattcaggcccatgtggagctccaagggctttggattcctgagcaccctgggaccagctgccatagctctgccaagaagggaggcagggatctcccatgcgccccaggataagggccccatctaggatactgaaatgtggacagactggaggcctcacctctggggcaccttgccaagcaaagccaatcggcctaggtccccagcacagcaacccacctcaccccaccccscaacctgatcacttgggctggctgcagctctgcatttctctgaggcagagattccagaggtaacacaataggcccacagcttttgccactgccatagtctccccagtccccattgccctgaggatagagagacagtatagagctcaaaagctatctcgtgcctccaacatgcaacacgtgccataaagaaaaacagccacactgcttttcatgcaggtc

SEQ ID NO: 449678 - DNA, 560 bp, Homo sapiens
tggcccaccacaaaattcagatattaactgacaaattactaggctgaaatagcagctacttccagcacagcaattacttactagctgagagagtgatgaaaaaaagtagtaactgaggactaattcctggaaaatctgagcaaaggctttcttgaagagatcttttgttaatgaaaacggaatctcaaaggtggagactgatggggctctccaggaaagcactcagggacatgtagtaaccaaggggtgctcactgactagcgtacacattgtaatagttcctatgactaaaacaagtgttatcactcagcttcttccagtgaatctttaaatgagtcagagagcctggtgaaattttccccaaattctctcagttttcaaaagtgaacaaaaatatggagtagatcaggtccttatgtccccattacccaaggacctctgctaagaaaagtaatgaattgggagatgggaaagaagtacaytttttaagcattttgaatagtggtgtcaagatgactgtgatcttgacaacccttgacgccaagatgacaggcaaatag

SEQ ID NO: 449679 - DNA, 563 bp, Homo sapiens
tatatccctcttaactctgcttacaaagcagccaattcttttctgagcttatctcttttttggtagtaaaaccgcctttgcaaaaattatgacagggagagaaatctaacataaytggcttcatcttgtctctaacctcacaagccaacagcccttgcccattcctgggcataggccaagctaactatgggaagaatttagtgtctagtttaacctttaagcaaagatagtaatagccccttcctcaaactacccctccttgtttggggactgaaactacctttgtagaaaccaatgaagggccacaagattagaattatgagagaagcctgcattgtgctaagacctatgcatagttaaatgataaatagtcattatctactaactttcttcctgctcagaagtcatacagccaatggtcacaagacttgaaacttccccaacatcactattgtaaaatctaagactggcgtttgagatatttttcagattttgcattctggtagaacaactgatgccatttggactggtgaccccaacccagaaaattagcccacaaagac

SEQ ID NO: 449680 - DNA, 563 bp, Homo sapiens
tatatccctcttaactctgcttacaaagcagccaattcttttctgagcttatctcttttttggtagtaaaaccgcctttgcaaaaattatgacagggagagaaatctaacataattggcttcatcttgtctctaacctcacaagccaacagcccttgcccattcctgggcataggccaagctaactatgggaagaatttagtgtctagtttaacctttaagcaaagatagtaatagccccttcctcaaactacccctccttgtttggggactgaaactacctttgtagaaaccaatgaagggccacaagattagaattatgagagaagcctgcattgtgctaagacctatgcatarttaaatgataaatagtcattatctactaactttcttcctgctcagaagtcatacagccaatggtcacaagacttgaaacttccccaacatcactattgtaaaatctaagactggcgtttgagatatttttcagattttgcattctggtagaacaactgatgccatttggactggtgaccccaacccagaaaattagcccacaaagac

SEQ ID NO: 449681 - DNA, 539 bp, Homo sapiens
accaggttccaatgcattcgataatgcctcattgaatgaaagaaagcagagattagttgaacaagaataaataagcattctgaaaaaaaaatctgaaaatataaccacacacaccttaaaaagggaagatgtaccctgatgataaattttggttgaataagcctactgtaaatcctcagtgtgaaatgccctccagaaatstagtgagtgtgcaggatacattagtagagacacagtacttagaacaagggaggtgaatgagccactctcttcagccttcaggggactattgtcctatgttcaaatttttggtatttggccaacatcttttggccataattttggagtaccgtgtgcagcatgcaaaaccatgtcatgggcagaatgggaggaccaggattatttggactggaagagagactcctgggaaagagaaggggctaagagaatggaggacgcacacaaattgtctttaaatgtatgcagagggatttaaacatggaagagggatttgatttattctatatccatctggagtg

SEQ ID NO: 449682 - DNA, 561 bp, Homo sapiens
aaggattcagggtgatggtgtttccctatgtcaagacagactctggaaggccatagttggtcttctttggtgtctaccaaagtctctgccacaacactgaaaacagagtagatacatggtaagtatttgttgaatgaagttattactttgcattagtggcaagtagaataagacatacattgtaaagcagtatttagctagagcaagtaggtggttacttgtctttctgccttgctgctctttctatacccattcggggctccccagcatggcctggaaatggctctatttctgaacttaagcaaaaactgaaatctaaaaattactggaatctataaggagtgttagaaggaaaccaaatttgtcctaggcaaatcatgccttcttgcttacctcataacatttattttttggatgtttggaggcwagggttttcaaatcaatgtagacctttggtgccaacaaatggcacatgaaccatttcattatgttgttggatggcggagtggcactcaatgatctcggtagaatcaaagcacgtgagagtgagagttccccgtg

SEQ ID NO: 449683 - DNA, 544 bp, Homo sapiens
aatgaccctgtctcctttgtttggtgtactctcctggcaaaactgctggcgagtgcgccgtttctgcaaaaagtataaaaatggccttgctgaagaaattaaatttatgttcaaatactatttctttatggcaccagggaacaagcatttcaaacaattttgtatcaattcatgtgaaaaattatctaaataaatatgtgaaggggcccataagatgataaactccttacaaatagagaaagtcacagattttatatgtaaagtccacatttcacagyctttgacagttaatagatatccaatgtttatttactgtcataagtgattctaaaatgtctccaaggattaaaaaactgtatgaatgtgttcctgtatacaaactaatttagcagtacatagctatattgtatacattatatcctctcagtgtatagagattatttataattccttgattatatgttttcaatgagacattttcgcattatataaagggattacttattgttattgcataacaaaaccaaatagccagtattctatt

SEQ ID NO: 449684 - DNA, 544 bp, Homo sapiens
aatgaccctgtctcctttgtttggtgtactctcctggcaaaactgctggcgagtgcgccgtttctgcaaaaagtataaaaatggccttgctgaagaaattaaatttatgttcaaatactatttctttatggcaccagggaacaagcatttcaaacaattttgtatcaattcatgtgaaaaattatctaaataaatatgtgaaggggcccataagatgataaactccttacaaatagagaaagtcacagattttatatgtaaagtccacatttcacagtctttgacagttaatagatatccaatgtttatttactgtcataagtgattctaaaatgtctccaaggattaaaaaactgtatgaatgtgttcctgtatacaaactaatttagcagtacatagctatattgtatacattatatcctctcagtgtatagagattatttataattccttgattatatgttttcaatgagacattttcgcattatrtaaagggattacttattgttattgcataacaaaaccaaatagccagtattctatt

SEQ ID NO: 449685 - DNA, 551 bp, Homo sapiens
tacgagctagaaatagagatgagaacatatcagaaaacatccctgaattcagggaatgtcatatcttgtttgcttttttaaatggcaccatataactcctttgtattgattcaccagatctctctttgttcatggggcaaccttatgcccaatccrtgtaaattttacaataaaattaactatccccaaagcctgaagcagttattctcccgagaaggccacaataggatctgcaattgctgtttcataagtggaataacacagcacaatctgcctagctgattaggggcgactctggtcctgcacctcatgtgtcctgaagtcagggctcagcttctgacaaaatctccctctgtctcgtttcattgttcttgtcttgttccttcacctgttcttaaaatgccattctcaagtcctagtttagttcgattgccttcttcaattctcttccttccctccctgtcttcttttatgcacaaaaatacctattaatcatgtactggggaccaggcactgtgccagtctggcaatataaaagggagtaaaacgag

SEQ ID NO: 449686 - DNA, 551 bp, Homo sapiens
tacgagctagaaatagagatgagaacatatcagaaaacatccctgaattcagggaatgtcatatcttgtttgcttttttaaatggcaccatataactcctttgtattgattcaccagatctctctttgttcatggggcaaccttatgcccaatccgtgtaaattttacaataaaattaactatccccaaagcctgaagcagttattctcccragaaggccacaataggatctgcaattgctgtttcataagtggaataacacagcacaatctgcctagctgattaggggcgactctggtcctgcacctcatgtgtcctgaagtcagggctcagcttctgacaaaatctccctctgtctcgtttcattgttcttgtcttgttccttcacctgttcttaaaatgccattctcaagtcctagtttagttcgattgccttcttcaattctcttccttccctccctgtcttcttttatgcacaaaaatacctattaatcatgtactggggaccaggcactgtgccagtctggcaatataaaagggagtaaaacgag

SEQ ID NO: 449687 - DNA, 551 bp, Homo sapiens
tacgagctagaaatagagatgagaacatatcagaaaacatccctgaattcagggaatgtcatatcttgtttgcttttttaaatggcaccatataactcctttgtattgattcaccagatctctctttgttcatggggcaaccttatgcccaatccgtgtaaattttacaataaaattaactatccccaaagcctgaagcagttattctcccgagaaggccacaataggatctgcaatkgctgtttcataagtggaataacacagcacaatctgcctagctgattaggggcgactctggtcctgcacctcatgtgtcctgaagtcagggctcagcttctgacaaaatctccctctgtctcgtttcattgttcttgtcttgttccttcacctgttcttaaaatgccattctcaagtcctagtttagttcgattgccttcttcaattctcttccttccctccctgtcttcttttatgcacaaaaatacctattaatcatgtactggggaccaggcactgtgccagtctggcaatataaaagggagtaaaacgag

SEQ ID NO: 449688 - DNA, 657 bp, Homo sapiens
attttgcaactaatggaactcacaactgcaaacattaaataccaacttttcttcaaaagatttatttttctgcatataaatattatttactttcattcttattttgctacttattttaaaaaaatgacatatttctgaagcccttgtgaaaggtgcaacagacattatcaagaatgagggtgaaaatacacatgtattgcagcagagaaagtatgtttccccccaaatatccatacacttgaagataaatcaataatattccaatattagagctgtgagtggcagaaaaatgctttggggacaatgaaagatcaaggctgatgtacatggagagattgctaaagtattcaaacaaacaaacatattctggtgcacagatactctcatcatgttgcacagatatgggaagttccyataaattctatatctataattaaaactatatcttttactcatttacttttaagtccaccactaattccattattttccaaggtgattgaagcattagattactagcagataggacaacttatgttaaggaacttctgaagaaaattttgcccttgaaatatcatctgtacttctctattttaccatctaagcaaagaaaatattgaaccaaaaatcccggtagctagagtcctcatatgtctt

SEQ ID NO: 449689 - DNA, 583 bp, Homo sapiens
ttcctataaattctatatctataattaaaactatatcttttactcatttacttttaagtccaccactaattccattattttccaaggtgattgaagcattagattactagcagataggacaacttatgttaaggaacttctgaagaaaattttgcccttgaaatatcatctgtacttctcyattttaccatctaagcaaagaaaatattgaaccaaaaatcccggtagctagagtcctcatatgtcttctgctcctaaaccatggataacatggccccctgctgtgacttgtttattttcttactatgcccaaacacacccaaatcttacagatgtctccaagcttccagggagataagggaagcagaagatttgacaaggattctaggtgaatttttgcacagagaacacgaaacccagcatgagtacctcagtctaggtgaatttttgcacagagaacatgaaacccagcatgagtacctcagtaggaaaaaacaatctcggacaaagaacaagggaaaggaagtaagatgccaaggggatgcctctatatctagtcaagtcttgggaggagaggattaaa

SEQ ID NO: 449690 - DNA, 571 bp, Homo sapiens
tgcgtgtgtgtgtgtgtttataacatacaatatacaggatatattgtaatatataatgagtatgtatcttcacattgaaaaaatcctcaaagaatatactatcaaatatcaacaatagctgtccctgtttgaggggatttcaggtgagttggaaaagggggatttcaggtgacttggatccttttcttccttttgcttctcagtattttctaaattcgtatgcaatgactttgtacacatcacttttggttataaggcaatagaccaaagtaaagcctgattaatacttaaatgtaactgcatttctgtctacagttcttgaggtgaggactgcttcagttcccctttgtcttcttcatcctcaaacctgaggttttgtaatcaataaggaaggagtcagacaatgactgatctggttgcttcctgttcacaagggatgcagacaggaagaccaggatcagratttgaggaatacaattactttgcattggcctataaatgcttctgtgtgtcaggtctagggtgccaactcagcatgacaaaaatatcagtgcttgtgttaatagtccct

SEQ ID NO: 449691 - DNA, 589 bp, Homo sapiens
caggaacacagctgtcttaccaaacagaaggaaatggaagggccacatcttcattcagacaattgactaaccaggagacagaaaggattaccgtaaaagggtctgatttgtaggtgtcaggtagcattcttagctaacattattatgatttggtttatgaaccacagtgggagaatcatctcatccagagacaggagctcttgtgcaattaaactggaatgaaacatcttgtgtgtcctttttacctacctctccctaacctgttcccacttacatacatttgttttctctttttcttggcttatttctgcttaacttgtcacagctcctatctgaagtcctggtatttcgctttgcctcatctcctacttctgtcatttgcatgatgtgctgatttaaatatccatctgctgacttttatcaccacccattctcaacacaattctgtgcctcagaaattgtaggcttgccatgttcttgttccagaaaccactgggayaataaagtgagcagattagatgaactacagaagggatgggcctgaggcacagcggcctgctcctctcccggatcttgctaaggcagggcc

SEQ ID NO: 449692 - DNA, 602 bp, Homo sapiens
ttgaaaattagaaggctcataatctgagagagagggaaaaattgtttctagaagtgatgcttggaaattttcaccaaattagatgtgtttataaaacaaacgtgaataatttccatacrtatttccccgtagtttttgtgtctaattcttacattttcataggtggatgagagcaccttaccagtctatagatgatagattcagacactctgcttgggatgattttatagctccctttctaaagaagctcatgttaagtaggttaaagaacatgtttaataaacactctttgatgaactcagatgccattttatagaagccttcagttatttcactaatatttaagacaatgattttttagaactattttaatcaaatgtttaaaatgttgaagtcatgtgcttaagaaaggagatattttatggaataattcatgtcgatcttctttatcaggagactattccattgacctcaggcaatacagcatgtcttgtgattgttctctagtaaaagctataacagaacacttagccctcaactctcactgaccttacttaaggtcaatgacacatgagtgaggtggttagctgaagccaagaatt

SEQ ID NO: 449693 - DNA, 602 bp, Homo sapiens
ttgaaaattagaaggctcataatctgagagagagggaaaaattgtttctagaagtgatgcttggaaattttcaccaaattagatgtgtttataaaacaaacgtgaataatttccatacatatttcccygtagtttttgtgtctaattcttacattttcataggtggatgagagcaccttaccagtctatagatgatagattcagacactctgcttgggatgattttatagctccctttctaaagaagctcatgttaagtaggttaaagaacatgtttaataaacactctttgatgaactcagatgccattttatagaagccttcagttatttcactaatatttaagacaatgattttttagaactattttaatcaaatgtttaaaatgttgaagtcatgtgcttaagaaaggagatattttatggaataattcatgtcgatcttctttatcaggagactattccattgacctcaggcaatacagcatgtcttgtgattgttctctagtaaaagctataacagaacacttagccctcaactctcactgaccttacttaaggtcaatgacacatgagtgaggtggttagctgaagccaagaatt

SEQ ID NO: 449694 - DNA, 602 bp, Homo sapiens
ttgaaaattagaaggctcataatctgagagagagggaaaaattgtttctagaagtgatgcttggaaattttcaccaaattagatgtgtttataaaacaaacgtgaataatttccatacatatttccccgtagtttttgtgtctaattcttacattttcataggtggatgagagcaccttaccagtctatagatgatagattcagacactctgcttgggatgattttatagctccctttctaaagaagctcatgttaagtaggttaaagaacatgtttaataaacactctttgatgaactcagatgccattttatagaagccttcagttatttcactaatatttaagacaatgattttttagaactattttaatcaaatgtttaaaatgttgaagtcatgtgcttaagaaaggagatattttatggaataattcatgtcgatcttctttatcaggagactattccattgacctcaggcaatacagcatgtcttgtgattgttytctagtaaaagctataacagaacacttagccctcaactctcactgaccttacttaaggtcaatgacacatgagtgaggtggttagctgaagccaagaatt

SEQ ID NO: 449695 - DNA, 621 bp, Homo sapiens
gagtgaggtggttagctgaagccaagaattcagaaaatgtcttgctaaatataaagrtattttctcagaattagtgagcatacaacaggatcaacatgtggacaatggtgtcattagctttctttaggagctaaagaagggatattttgttctgtgcttagtttctctatgaagacatcgtagaaccactgtgttttgtttcagtgtaagatatttcttatctatggttgtttttctctttagtgagctcataaacttttgagcaataaattttgcttttgtgatcctctcctttgaactataagagatttagtaccactattttgttagggcagcccaatagactaacataagttttggtactgaaaggtggggtgtggctatacttaaaaatgtgaaagtggctttggaactgagtcatgggcagaggctggaagtgttttaaggctcatgctagaaaaagccatggttgccatgaaggaacagtgacggaagcatggatgtgcagcactgttcactatagcaaagacatggaaccagcccaaatgcccatcaatgatagatgggataaagaaaacgtggtacatatacacaacggaatactatgcaaccataaaaaga

SEQ ID NO: 449696 - DNA, 621 bp, Homo sapiens
gagtgaggtggttagctgaagccaagaattcagaaaatgtcttgctaaatataaaggtattttctcagaattagtgagcatacaacaggatcaacatgtggacaatggtgtcattagctttctttaggagctaaagaagggatattttgttctgtgcttagtttctctatgaagacatcgtagaaccactgtgttttrtttcagtgtaagatatttcttatctatggttgtttttctctttagtgagctcataaacttttgagcaataaattttgcttttgtgatcctctcctttgaactataagagatttagtaccactattttgttagggcagcccaatagactaacataagttttggtactgaaaggtggggtgtggctatacttaaaaatgtgaaagtggctttggaactgagtcatgggcagaggctggaagtgttttaaggctcatgctagaaaaagccatggttgccatgaaggaacagtgacggaagcatggatgtgcagcactgttcactatagcaaagacatggaaccagcccaaatgcccatcaatgatagatgggataaagaaaacgtggtacatatacacaacggaatactatgcaaccataaaaaga

SEQ ID NO: 449697 - DNA, 593 bp, Homo sapiens
aggaaaaactcaagaaatattaaattttaaatatgtttagccaattagaaaaatatcagttacacatgcaagttgaaaaatctaatttttagaattatgtatttataatttttcaagtataatatcatatgattgtatgtttgttcttgctagcaaagaaacataacatgacttttggaaacttttaattaatttgctaagttaacaaataggcaaacacatacattgtcagaggaaataacgaaggttttcggtgcagaaatgcagctggtggtgtactcatgcacttagacaygtaatatagcataaaaaattcactatttgtaaaacagtgttgcagtatatatcaataaccacaaaaatatccataataacaatgactcagttatatcatatttaagaaatattcatacattattttgtagaaatcagtcaaaaagaaaagttagagaatagtcggtaaatgtgatatcaagcaatatctttgactgaagatagccatatatctaggctgaaggatgaagtgttcctcatacaaattttggctaaataacaaattttgtgttgaaattatactggttcagatatgaaat

SEQ ID NO: 449698 - DNA, 616 bp, Homo sapiens
aggcattcagaatcctgtttgttctaatgtagaatcgttggtcaaacctcgacacatctacttctcaggttctgttctgactcatgacaggctttggagaagaagaggaggtgctggctttctccatgtttcttgttgcagcctgccttgacttatctgctattgtcagatgccagcattggggcaggcatgggggggcagacaaacgaaatcagatgggagctacagtcattatgagacagataccccaattacggccttaagctggaattaaataccagtacgatgatctttcaagaaaaaaaagcaaacataaaaaaatgaagacgctcttttccaactggaatcgtggagrgtgttgaaaagaagaggaagttgcctgctgtaccagaaaccctttagagaaagtaaaggaattttgcagagctgaagataagtgcctgagaaagaagtttgcccataagatgcttcaaaaggcaaggaggaagctcatctatgaaaaagtgaaacactgtcacaaggaatataggcagatgtacagaactgaaattcaaatggcgacgatggcaagaaaagctggcaacttcttcgtacatccaaaacccaaattggcgtt

SEQ ID NO: 449699 - DNA, 560 bp, Homo sapiens
ggaaaaaacacgagaaccaccattctactgtcttttttatgtgaaaattgaaaattcatccagaacaacaaactctattagttccactgggggaaagagaaagaaacatgatgaaaattgtcatttaaaacagagaaagagggaaggcacatgaacaagtggtcacagagcaaagagaaaagccagaaagggaccagaaaaaagaaattccttaaagaaaaagccaaaagtatcaaaagcccgacaagacaaatttgattatttgaaaaagatgttgacaatggcttcataaaagttgtgttaatttttttaaagaagatttaatgagaatggtgcaatgagaatcctgaaaaggtaataatttgagtartacatggaaggcatgtgaatatattgttagtgtagacaacactttggaaatatttggttgtaaagagttagaaagaagttagaaaggttgagggagatctagggtcctaatagagatttttttgtgagtgatttttgttttggtttgaaaatggaaaaatgtgattataaaaaatgtgtaaggtatgatt

SEQ ID NO: 449700 - DNA, 553 bp, Homo sapiens
gatgagcctttcttcctgctagaagaatgggacttgaaagagggaggtattcactttgctcttagggacataactatttctcattgatctccccctctactattcattctaaatttcctttgctcaaagatatcaaccctcttaatccaggtggcttacattatggtgcaacccaatmcctcattcctaaaacatctgagtctattcaagagggttccctgagtttcgtacatatttttatccatctacactatctaatagcaaccaaaccttctcctgctgaccatggtcaattgccactgacaagatcatgactcctcttcttgcccactggcacctagacaccaggtgtcaacattcccaggtaacatctgtaggtatacttcaatgaaaactttgctctattactcagagacagaatcacctcctgcaatctggggatagtatctccaacactacagagctcacagctaaagtaacaaggacaaatcaaagtgcttgtaagtagggccacttttgcttctattccatggttctcaggcccagctactct

SEQ ID NO: 449701 - DNA, 547 bp, Homo sapiens
ccacaacattgtgcactgagaatttttttccttgctactgtatttcaagttcttccataaatgtagctgaaatgcatttgccatccattttctgagtttacgttacaccaactcaacctttccattatgtgaggctggattttccctccttcttcagttggtatagaaacatcccttatgatgacaggtatgatttcaaggtaaggtactggtcaaaacagatgggagaaatgaaggtctaggctatcatctcatgcatttgtgtatgtcctctcggcccacttaattctagatgttccattyctatcttgcaaataaactgccgctatgcctaccatctttgttacctgcatggccagagaaggctgcagtgccagaattgctcaggataagcttttctggatgcctggtcacttggtatccatggctgagtgtccagtctttactaagtttcagtagcatactttttttttccaaaatcatgtagttttctgctgtaggttgcttagccttgctccagaaaactagcgtctacattgaggttctc

SEQ ID NO: 449702 - DNA, 481 bp, Homo sapiens
ctaaaaaaactattttcagctatattcagatagattcttcacagaaacagaatcaktagggtataggggtgtgtgtgtgtgtgtgtgtgtgaatacgcatctcactaatgttaatgttggatattccttttaagcagcaatgcacactacactctgaattacctcagatctacctctttcttccttctggtcctcgtacacactggcctactacaaagctgtctcagcccatccatctcacatgacatatgtcaaacattgcacatcaacactgagaagagtcgtgatgtctttcaagaagccattcctgaccctccatcttctcaaaaatctgaggaaaaatccaacttatgtgttcctagaatatttcacttccagcccttgcaaatgttatttgtaaattttgattatttttctttgtcccttaagcaacttgttaaatgtttggcatatactctatacttaaattgtaatgaatgag

SEQ ID NO: 449703 - DNA, 597 bp, Homo sapiens
agtctagcaatgttcatcccctgtctcacttcttcccttcctctttttcttcttttctttcttcctctaaaaagtacatatagtatctagaaaattgacaggcataggaagaggctttagatgcttgatttgatttggatttgtatctaagcccaaatctcatgtcaaattgtagttctcagtgttggaagagaggcctggtgggaggtgattggatcatgagggaagatttcccccttgctgcttgtgcgatactgagtgagttcttagaagatctgattgtttaaaagtgtgtagcacctccccttttcttctcctccttctgctccagccatggaagrcatgccttcttccccttccccttctgccataattgtaagtttctttagtcctccccagccgtgcttcctgcactgcatgtggagccatgagccaactaaacctcttttctctataagttacccagtttcaggtatttctttaaaaatgtgcaaacagactaatacatgcttaactactttttatcaagtaaatgccactcagggtggacatctttttgtgcaagtcaaggaagcttttgatttttgcattttgata

SEQ ID NO: 449704 - DNA, 587 bp, Homo sapiens
tttattcgtttttggcatcagggamtagtgttcatggaagctaatttttccagggacctcaggttggggaattgtttcaggatgaaactgtcccacttcagatcatcaggcactagttagggtctcataaggagcacacaacctggatcactcacgtgcacagttcgcagtaagtttcctgctcctatgagaatctaatgccggtgctgatctgataggaggcagagctcagggtaagcaatggggagcacgtgtaaatacatatgaagcctcactcaccggcctgtcactcccctcctgctgcgtggcccggttcctaacaggccacggaccaatactttttcacagcctgagggttggggatccctgcgtaaggctagattaataattgtattctaactggccaatgctgtactgattttttgggctaagatgtccagggtgaagttatccagaaaccaagtgttatctggttatgtccaaacataataaaatattggtcgccatcaaaaaaaaaataagtttatatggttaggagcagatataatggtggatatagtataataatctagtgatttttaaaaatt

SEQ ID NO: 449705 - DNA, 587 bp, Homo sapiens
tttattcgtttttggcatcagggaatagtgttcatggaagctaatttttccagggacctcaggttggggaattgtttcaggatgaaactgtcccacttcagatcatcaggcactagttagggtctcataaggagcacacaacctggatcactcacgtgcacagttcgcagtaagtttcctgctcctatgagaatctaatgccggtgctgatctgataggaggcagagctcagggtaagcaatggggagcacgtgtaaatacatatgaagcctcactcaccggcctgtcactcccctcctgctgcgtggcccggytcctaacaggccacggaccaatactttttcacagcctgagggttggggatccctgcgtaaggctagattaataattgtattctaactggccaatgctgtactgattttttgggctaagatgtccagggtgaagttatccagaaaccaagtgttatctggttatgtccaaacataataaaatattggtcgccatcaaaaaaaaaataagtttatatggttaggagcagatataatggtggatatagtataataatctagtgatttttaaaaatt

SEQ ID NO: 449706 - DNA, 497 bp, Homo sapiens
actgatgtttattatgccatggctgcaattaccatgtatagctgaagcaacgacaatggcttttattttctagtctttcaaaagatgatattcatgattattctattgggagagggttgacattagcctgggataacctcagttttagatgctmataaatcacttacatataatttaaaaagtcagtaaaatattattttatcatattacatattatgttatttaaaacatgtagaccttattatacaaatgcactaaatatttaattatacattgatttttcaaaattatttctgaattatctatctatctatctatctatctatctatctatctatctatctatctatggagagaatgatatgtacaacaagcatcctaaaagttttttaaatatgtgtcacaagaactgggccacatcaacatataatttgaaacctaactgtatgaattatctgttcaagttttgtttatgcaacatttttttctctcctcga

SEQ ID NO: 449707 - DNA, 496 bp, Homo sapiens
tgaagtgtaaggaatatatctrcttccttaaatatatgttaaattatttaatattttttcttgatattttctaaaaagaaaaaaaacttaaagacatacaccatgagcatcccaaaagattgttaaatgaatatgtcaagataatgtaggaaaaactacttggcatttcttaataagaaagcgagtgggaaaatttactatgattaggtaacaatataatgataagaaagtactattttatgtatattctagtcatgttatttgaaaaaaattaataagaaactatgtagttagcataaaatgcctgttgaactaatgctattgggaagtcagctctcaggggatattcagtgcagggccaaacttgctttgtgccttatgagaaagaaatgcctataagctcatggtgagatctaattgaaatatacgtaaatgcttttatagcatgttctcaaaaagctcacataaatctgaatgaaatgccgtttataaaagc

SEQ ID NO: 449708 - DNA, 625 bp, Homo sapiens
aacttaaagacatacaccatgagcatcccaaaagattgttaaatgaatatgtcaagataatgtaggaaaaactacttggcatttcttaataagaaagcgagtgggaaaatttactatgattaggtaacaatataatgataagaaagtactattttrtgtatattctagtcatgttatttgaaaaaaattaataagaaactatgtagttagcataaaatgcctgttgaactaatgctattgggaagtcagctctcaggggatattcagtgcagggccaaacttgctttgtgccttatgagaaagaaatgcctataagctcatggtgagatctaattgaaatatacgtaaatgcttttatagcatgttctcaaaaagctcacataaatctgaatgaaatgccgtttataaaagcagagtattttgaatagacacacataattcatgtacatactaaacaattcatgtacataataaagaattaggagccaaaacttctatttgaaaggtcacttttctagaactggttactgttgggctgaaagtaatgtattctatatagaaattccagaataaaagcacctaattttcttttgctacgtctttttaaaaatttattatttattta

SEQ ID NO: 449709 - DNA, 625 bp, Homo sapiens
aacttaaagacatacaccatgagcatcccaaaagattgttaaatgaatatgtcaagataatgtaggaaaaactacttggcatttcttaataagaaagcgagtgggaaaatttactatgattaggtaacaatataatgataagaaagtactattttatgtatattctagtcatgttatttgaaaaaaattaataagaaactatgtagttagcataaaatgcctgttgaactaatgctattgggaagtcagctctcaggggatattcagtgcagggccaaacttgctttgtgccttatgagaaagaaatgcctataagctcatggtgagatctaattgaaatayacgtaaatgcttttatagcatgttctcaaaaagctcacataaatctgaatgaaatgccgtttataaaagcagagtattttgaatagacacacataattcatgtacatactaaacaattcatgtacataataaagaattaggagccaaaacttctatttgaaaggtcacttttctagaactggttactgttgggctgaaagtaatgtattctatatagaaattccagaataaaagcacctaattttcttttgctacgtctttttaaaaatttattatttattta

SEQ ID NO: 449710 - DNA, 625 bp, Homo sapiens
aacttaaagacatacaccatgagcatcccaaaagattgttaaatgaatatgtcaagataatgtaggaaaaactacttggcatttcttaataagaaagcgagtgggaaaatttactatgattaggtaacaatataatgataagaaagtactattttatgtatattctagtcatgttatttgaaaaaaattaataagaaactatgtagttagcataaaatgcctgttgaactaatgctattgggaagtcagctctcaggggatattcagtgcagggccaaacttgctttgtgccttatgagaaagaaatgcctataagctcatggtgagatctaattgaaatatacrtaaatgcttttatagcatgttctcaaaaagctcacataaatctgaatgaaatgccgtttataaaagcagagtattttgaatagacacacataattcatgtacatactaaacaattcatgtacataataaagaattaggagccaaaacttctatttgaaaggtcacttttctagaactggttactgttgggctgaaagtaatgtattctatatagaaattccagaataaaagcacctaattttcttttgctacgtctttttaaaaatttattatttattta

SEQ ID NO: 449711 - DNA, 625 bp, Homo sapiens
aacttaaagacatacaccatgagcatcccaaaagattgttaaatgaatatgtcaagataatgtaggaaaaactacttggcatttcttaataagaaagcgagtgggaaaatttactatgattaggtaacaatataatgataagaaagtactattttatgtatattctagtcatgttatttgaaaaaaattaataagaaactatgtagttagcataaaatgcctgttgaactaatgctattgggaagtcagctctcaggggatattcagtgcagggccaaacttgctttgtgccttatgagaaagaaatgcctataagctcatggtgagatctaattgaaatatacgtaaatgcttttatagcatgttctcaaaaagctsacataaatctgaatgaaatgccgtttataaaagcagagtattttgaatagacacacataattcatgtacatactaaacaattcatgtacataataaagaattaggagccaaaacttctatttgaaaggtcacttttctagaactggttactgttgggctgaaagtaatgtattctatatagaaattccagaataaaagcacctaattttcttttgctacgtctttttaaaaatttattatttattta

SEQ ID NO: 449712 - DNA, 561 bp, Homo sapiens
gattgtaggtgcataccaccatgcctggctaatttttttgtattttactagagacacggtttcaccatgttggccaggctggtctcgaactcctggcctcaggtgatctgcccgtcttggcctccyacagtgctgggattacaggcgtgagccactgtgcttgactcttttgctgttgtcataacaatgttagaaactatgtaaatgtctaattcacaaaacataagagacatttttaatgaagaaataaatgcccatctaaggtgaaaacagtgggcgatatgtagatatcttataaaaactcattataatcagggccactattttacctcaggtaaaatacaagttaatttctcaaggagatttattattatttaatatgatattgataaaataatttcacagataaatttttacttaaaatgttaacattactattgataaaataatttatttttctttttataaggtcataaatccaagacttggagaatatgcatacaattatgaatatacaaaattaaaagtggttgtgaaatgtattttaatatattcagatgt

SEQ ID NO: 449713 - DNA, 561 bp, Homo sapiens
gattgtaggtgcataccaccatgcctggctaatttttttgtattttactagagacacggtttcaccatgttggccaggctggtctcgaactcctggcctcaggtgatctgcccgtcttggcctcctacagtgctgggattacaggcktgagccactgtgcttgactcttttgctgttgtcataacaatgttagaaactatgtaaatgtctaattcacaaaacataagagacatttttaatgaagaaataaatgcccatctaaggtgaaaacagtgggcgatatgtagatatcttataaaaactcattataatcagggccactattttacctcaggtaaaatacaagttaatttctcaaggagatttattattatttaatatgatattgataaaataatttcacagataaatttttacttaaaatgttaacattactattgataaaataatttatttttctttttataaggtcataaatccaagacttggagaatatgcatacaattatgaatatacaaaattaaaagtggttgtgaaatgtattttaatatattcagatgt

SEQ ID NO: 449714 - DNA, 561 bp, Homo sapiens
gattgtaggtgcataccaccatgcctggctaatttttttgtattttactagagacacggtttcaccatgttggccaggctggtctcgaactcctggcctcaggtgatctgcccgtcttggcctcctacagtgctgggattacaggcgtgagccactgtgcttgactcttttgctgttgtcataacaatgttagaaactatgtaaatgtytaattcacaaaacataagagacatttttaatgaagaaataaatgcccatctaaggtgaaaacagtgggcgatatgtagatatcttataaaaactcattataatcagggccactattttacctcaggtaaaatacaagttaatttctcaaggagatttattattatttaatatgatattgataaaataatttcacagataaatttttacttaaaatgttaacattactattgataaaataatttatttttctttttataaggtcataaatccaagacttggagaatatgcatacaattatgaatatacaaaattaaaagtggttgtgaaatgtattttaatatattcagatgt

SEQ ID NO: 449715 - DNA, 561 bp, Homo sapiens
gattgtaggtgcataccaccatgcctggctaatttttttgtattttactagagacacggtttcaccatgttggccaggctggtctcgaactcctggcctcaggtgatctgcccgtcttggcctcctacagtgctgggattacaggcgtgagccactgtgcttgactcttttgctgttgtcataacaatgttagaaactatgtaaatgtctaattcacaaaacataagagacatttttaatgaagaaataaatgcccatctaaggtgaaaacagtgggcgatatgtagatatcttataaaaactcattataatcagggccactattttacctcaggtaaaatacaagttaatttctcaaggagatttattattatttaatatgatattgataaaataatttcacagataaatttttacttaaaatgttaacattactattgataaaataatttatttttctttttataaggtcataaatccaagacttggagaatatgcatacaattatgaatatacaaaattaaaagtgrttgtgaaatgtattttaatatattcagatgt

SEQ ID NO: 449716 - DNA, 523 bp, Homo sapiens
tattgggcagctagagttatatgtatccagatgttaacttacctcaatacacagataatacctgtgtatacctacataygcaatcctaattcattgtccccagggctgtgtcctttaatctctcaattggggagatcagatctctttttattcttcctcctgtggttgattgcagagaggagttgctaatcatgccagttcttttttccctggatttggtggcaaataaagctttgctaaatggctcctacacttccattaatatctcattgaatccactattgcctgatactctggatctagaacactctccactgccaccacctcttgtctcatggatcacaaatctggagctcaaatggacatgttcacaccttcacggggaagcactttgttacattcaaccaatttatctaagtttctgtgggcaagttagaaatattgtagttacttcctgtgtggaaaagctgtttcagaatacgtaaaacaaatccaacatagagttccttcaccacaccattcc

SEQ ID NO: 449717 - DNA, 523 bp, Homo sapiens
tattgggcagctagagttatatgtatccagatgttaacttacctcaatacacagataatacctgtgtatacctacatatgcaatcctaattcattgtccccagggctgtgtcctttaatctctcaattggggagatcagatctctttttattcttcctcctgtggttgattgcagagaggagttgctaatcatgccagttcttttttccctggatttggtggcaaataaagctttgctaaatggctcctacacttccattaatatctcattgaatccactattgcctgatactctggatctagaacactctccactgccaccacctcttgtctcayggatcacaaatctggagctcaaatggacatgttcacaccttcacggggaagcactttgttacattcaaccaatttatctaagtttctgtgggcaagttagaaatattgtagttacttcctgtgtggaaaagctgtttcagaatacgtaaaacaaatccaacatagagttccttcaccacaccattcc

SEQ ID NO: 449718 - DNA, 640 bp, Homo sapiens
caacctcttggtgattcctttccatttccacagctactaccgtagtccaagccaccgtcttcttttaatttgactataatagctacctaacatttactctttattccttgaatctgttctccactttgaactgaaaggacccattttaaaaatgaaatcgtaagcacataactcccttaagtccccttgctagcttcccattgctcaacatcaaatccagactccctaaatgtggtccacacaaactggatgaactgaaccctgcccatctctggtcattctccttactcacaaasgtccaattgcacagagcttccttgtatgtgtcaaatgacacaagccccttccttcctctatttctgcacacattcctttggtatgtatgctgttttctgtgaatttttaaaatactgattaacagagatatttgaaactttaaaggaagggatgaggcaaacacaggggaggtctagagggacataagtagttaaggaagatggaactgaggtcttacttaaatgtttactacttcacaattttcaccccagtcttgcatccaagtcttcactatttatttacttagcaaacagttatatcagttgtatagcacttagtttgtgcaaagcagcatcccaagtga

SEQ ID NO: 449719 - DNA, 643 bp, Homo sapiens
taacaaatataaatgagagagaaatatataaaggatgtcctttctaggctctttttgttctccagaagcacctgtttctgggatttcagtcaattccacttacttgaattaaaagagtagagctcagtatccaatctccacagggagaagaaccatgtttaatactgatcatttttagccaygttttcaatgttgaattccacacaattaaataggcaatttcccccaggtggtggtaatattttaagacatgatgatgtctcaaagatgaatttttcaataatattaatacttaaacatagagctttgtatgtggtggtaacttagaaaaatttattcatagccacacacttttgcttgtttaagtgacaataggatacaaaggacataaggaatttcaacttataatattcagcgtttataatgaagttaaaacaacaaatatgtagtcaaaggcaaaaactcaatatttaaagacaagaatataaaaatatttaactctgtatttctccaaacactgaacacagtaatttagcacagtacattggcactctcagaattcaactcggccaatttaataggagactttacttgtttctcgaaatatatgtactgtatttttttctttttttttttttaaatt

SEQ ID NO: 449720 - DNA, 643 bp, Homo sapiens
taacaaatataaatgagagagaaatatataaaggatgtcctttctaggctctttttgttctccagaagcacctgtttctgggatttcagtcaattccacttacttgaattaaaagagtagagctcagtatccaatctccacagggagaagaaccatgtttaatactgatcatttttagccacgttttcaatgttgaattccacacaattaaataggcaatttcccccaggtggtggtaatattttaagacatgatgatgtctcaaagrtgaatttttcaataatattaatacttaaacatagagctttgtatgtggtggtaacttagaaaaatttattcatagccacacacttttgcttgtttaagtgacaataggatacaaaggacataaggaatttcaacttataatattcagcgtttataatgaagttaaaacaacaaatatgtagtcaaaggcaaaaactcaatatttaaagacaagaatataaaaatatttaactctgtatttctccaaacactgaacacagtaatttagcacagtacattggcactctcagaattcaactcggccaatttaataggagactttacttgtttctcgaaatatatgtactgtatttttttctttttttttttttaaatt

SEQ ID NO: 449721 - DNA, 643 bp, Homo sapiens
taacaaatataaatgagagagaaatatataaaggatgtcctttctaggctctttttgttctccagaagcacctgtttctgggatttcagtcaattccacttacttgaattaaaagagtagagctcagtatccaatctccacagggagaagaaccatgtttaatactgatcatttttagccacgttttcaatgttgaattccacacaattaaataggcaatttcccccaggtggtggtaatattttaagacatgatgatgtctcaaagatgaatttttcaataatattaatacttaaacatagagctttgtatgtggtggtaacttagaaaaatttattcatagccacacacttttgcttgtttaagtgacaataggatacaaaggacataaggaatttcaacttataatattcagcgtttataatgaagttaaaacaacaaatatgtagtcaaagrcaaaaactcaatatttaaagacaagaatataaaaatatttaactctgtatttctccaaacactgaacacagtaatttagcacagtacattggcactctcagaattcaactcggccaatttaataggagactttacttgtttctcgaaatatatgtactgtatttttttctttttttttttttaaatt

SEQ ID NO: 449722 - DNA, 643 bp, Homo sapiens
taacaaatataaatgagagagaaatatataaaggatgtcctttctaggctctttttgttctccagaagcacctgtttctgggatttcagtcaattccacttacttgaattaaaagagtagagctcagtatccaatctccacagggagaagaaccatgtttaatactgatcatttttagccacgttttcaatgttgaattccacacaattaaataggcaatttcccccaggtggtggtaatattttaagacatgatgatgtctcaaagatgaatttttcaataatattaatacttaaacatagagctttgtatgtggtggtaacttagaaaaatttattcatagccacacacttttgcttgtttaagtgacaataggatacaaaggacataaggaatttcaacttataatattcagcgtttataatgaagttaaaacaacaaatatgtagtcaaaggcaaaaactcaatatttaaagacaagaatataaaaatatttaactctgtatttctccaaacactgaacacagtaatttagcacagtacattggcactctcagaattcaactcggccaatttaataggagactttacttgtttctmgaaatatatgtactgtatttttttctttttttttttttaaatt

SEQ ID NO: 449723 - DNA, 645 bp, Homo sapiens
gagaactggatttaccatagttaagcgcataatttaccatgcttgaggcactgtattttcctcatactgtccttgaatgtcagagtttatttagagctatttttcacagrtagggagcaagggatagagtggagggagggaactctgtgttcttggctgcaccttctaagagttgagtttccatcatggtgatatggagtggggtggggattaggtcacggctcaactacgacagactcttactgttcttaccaaaattgagtaggttttcttaaataattgtttctccatttgctgaatgccctcaacaattttcagagagttttcatgttttatttaattaatgtacttttacagtttttaccaatcatggtcgttccctggagaaagggccatggggatcctcacattgccattctggaagtcacatctcgatattttgcattttaatgagcttacaaagctatcaaagccaggccactgctcactagattaaatgtccctttgttacccattagaaaaagcctctctgttctgactttcagacagtgtgccatcacctgccaggaaattgtcataataaatatacaatctacaatagcaatcaatataaaaactgcctttagagttgttcattatggcact

SEQ ID NO: 449724 - DNA, 579 bp, Homo sapiens
acacagtcataggtttttttgtgtgtttttaaaaaacttttattttaatttctggggtacatgtgcaggatgtgcagatttgttacataggtaaatgtgtgccatggagttttgctgcacaagatcactcccatcagcataacccatcagcataatgggtattaagctcagcatctattagctattcttcctgatactctccctcctcctcctatccctcacactccaacaggccccakcgtgtgttgtttcccccaatgtgtccatgcgttctcatcattctgtttccactgattgataaatgagaacatgcagtgtttgcttttctgttcctgtgatagtttgctgagaataatgacttccaactccatccatgtttctgcaaaggacatgatctcattccttgttaaggcttcatactattccatggtatgtatatgtaccacattttctttatccagtctatcattgatggacatttagattgatttcaattctttgctgttttgaatagtgctacagtgaacatatgtgtgcatgtatgtctttatggtagaacaatttatgttccttcgggaa

SEQ ID NO: 449725 - DNA, 629 bp, Homo sapiens
gaaaaaatcagatggcaaaataccagttaaataagtaaagattccagagtgcgtgacaatagaaagttaaaggtaaatttttctaaaataataacataattcatctagctcaccttacttaagaagattaatgtatgcaaagctctctgaagtccttggaaaaaaagccacagaaatagagttcgtaattatagctacatctcctagtgcctaaacaaatcttggttaaaagtcacatgaattcattcagatcaccagacaaccattttagtaaactaaaagtaaaaactctcacatgctagtcaagaagccaaagagttaaatgcaacctgcaagggatctcattccaaccaggattcaacttgggtagyataagaatctgattcacatatttttaatgggcatctttcagacatttaaaggagaaaaagattaataaattatctccaatccctactcctaacatgcaaggaatgaaaagactgccacctgtataggatttgagtttcataggcatgtttactacatcaaagcatcaagggacaggctttgagagaagacagacaagatcaagagacttgcacattttaaataagatgtgaaaattatgacataaaaaaggatcagaa

SEQ ID NO: 449726 - DNA, 594 bp, Homo sapiens
tgagaaatctactgttggcaaagaactgtgacagctgcctcatatatatatatattcattgtataaatgccaagccattggaaaaaaaatgcaattggcagctacatccagggtaaactagtaactgcaaaatcttgtattgcttgactacccaagtattaactgaaatagtcatgcccatcagacacaggcagagtttatatagtgaaacaacttraaacagagtttattaacagcaaatattcctacactccatagcacaggagtgacctacccaaggacatgagtctcaggcaccccagcccaatgccaaacaactgtattttttactcttagttacattcaccttccacatttgctcttacttcttactgtgttccagcatctgttgaactcctaaatcctgtcttaaacttctgttcccaacaatgtttagcctttggaatttgacttctctagtttcaaccctccatcctctctagaatacagcttagactgattccctgactttttttactctcagtcaatatccagaaaatgatgccagtggatatctagacatgaggcactatccataatgtcccactagactgt

SEQ ID NO: 449727 - DNA, 503 bp, Homo sapiens
gtggagtgaaggtgttgaatgttgtgtactcaccacaggtaagaattttaagaggcaacttaatggtttgagagccatctaattatcatcaggttgttctttggttggtctgctctttgttttaagtttgcaggactagaaactagctttaaatcaaagcttaagaaggtgaaagttactggtacttaacagagagcmccccccttcaaccacgtgctctcttgcggagggaggaagagaaataatgagacactatgcccttcctacagctccagtaatattcaattttggttcatccgtcaaaggcagggttaaagctggcaaagtggaagaattctgagtgctgcttaaactttcataccccactacccacagtcttattattcaggccagtctggaacaaggctgcaggattgttgggtcaccgtagaagagaaaaatcattattggagctgctggactaataatagaaggtgactgagtgaagacatagctcaaagtgg

SEQ ID NO: 449728 - DNA, 583 bp, Homo sapiens
caataaatactagaattaatggatggaaggctgaggacaggcaggatatttacacagcctcttctcacaaaggggagaacagtgaccacctggcagagamcacctgcaccaaaccatcaaaggaacatcaccaatattgagccaaagtggtgtcacgtgactcctgtgacgcactgagaaggttccgctgctgtgaattgcagctgaaatgcacaacctgaccccagtcctgaggagaaacctgacaaacctaaagagagggacattctacaaaataatgaactgcgcttttcaaaggatcagtgtcaaaaaagatagaggctgagacactattctagaataaagagatgaaagagaagaaccacaaaatgcaatgtgtgattctggattaaataccacatcagggaaaaaaccactgctctaaagaacaatattgagacaactggaaaaaggtacagtctgtagttacatgaggatgatggattgagataacacttcttgaattttgcacagcgtactgtgattatataagagaatgtccttgtttgttaaaaaaaaaaaaaagttcagccttttgatgtaa

SEQ ID NO: 449729 - DNA, 583 bp, Homo sapiens
caataaatactagaattaatggatggaaggctgaggacaggcaggatatttacacagcctcttctcacaaaggggagaacagtgaccacctggcagagaccacctgcaccaaaccatcaaaggaacatcaccaatattgagccaaagtggtgtcacgtgactcctgtgacgcacygagaaggttccgctgctgtgaattgcagctgaaatgcacaacctgaccccagtcctgaggagaaacctgacaaacctaaagagagggacattctacaaaataatgaactgcgcttttcaaaggatcagtgtcaaaaaagatagaggctgagacactattctagaataaagagatgaaagagaagaaccacaaaatgcaatgtgtgattctggattaaataccacatcagggaaaaaaccactgctctaaagaacaatattgagacaactggaaaaaggtacagtctgtagttacatgaggatgatggattgagataacacttcttgaattttgcacagcgtactgtgattatataagagaatgtccttgtttgttaaaaaaaaaaaaaagttcagccttttgatgtaa

SEQ ID NO: 449730 - DNA, 651 bp, Homo sapiens
actggttttggagttggcaaacccagatctagctcttggctctcttgtttaccagcttagtggccttggggaagctgctgaataattttttcatctrtaaaatggggatagtaatacataggacacagctgttgtgatgaatacatttgatactgatattaaaattcttattgtagctgactagtgcatggtggatactcagaaagtgaaaatgctttatcccaatagttgtgaactggtgtcaccaacaacagtaataggaaggtacatcttgtttccagtatttcaataagctttatatttactcatggtgggggtcattcaaaacattctttaataaatgaggttgaaagagaaactctaaaaacttgtaggccttgaagatggaaaataataaacatcattgttggtggaccaaggctgggaaacattaatataatctaccctattgctgtcctttacttcacggaagcaaattgtaaatttagtgcttagaacatggtaatgatctcatcctgatttatctaggacaattatctctccttttatatggttttgccctatttttatttggactactctgtgtacattgctattggtgttttttattgtaagcaatctagcatcttttaaggaagccactagtctatg

SEQ ID NO: 449731 - DNA, 559 bp, Homo sapiens
tgatgaaatattatttccacttactatattggcaacatttaaaaagaataatataactgactccaggtgaacatgtgtggtaacaggtactctcattttccactgataggagtttaaattggttcagcattttggagggcaatcggcagaatgtgtctaatgtttagactcttacctggtagttgcacttgtagaaattttttatttgaaaaaaatttggacaggtggattgataaatatatgtgtatgtgcatgcacaatatttattgcagcaaattttgtaatagtaaacatttagaaaaataaaatgcccaacaatagggaaatagttggatatattctattgcattaatttcagacaatattttttagccattagaaagaggtagaccacatakgcataacagaaaaaatgtttgatgtatcagttaggattgtctaagtaatgctgcagtaacaacaacccctgaacctcagggaattaaaccaaccaaggtttattgtttgctgactttatgtatccattgtggttgtcaggggaattttgttcatagtagcc

SEQ ID NO: 449732 - DNA, 558 bp, Homo sapiens
ttcagttaccactcctctcttttccattggtgactcctattacatatatattaggctgcttaaagctgtcccgtggtcactgatgctttgttcacccttttctcatttgtgtgtgtgtgtgtgtgtgtgtgtgtgtgtgtgtgtgtgtgtgtggttcatattggatagtgtcttttgcttagttttcaagttcattaataattttttctgtaacatctaatctgccattaatcccacccactatatttttcatcttgtactgtacatggtattagatttaggtctttttatatctttaatgtccctacttaacatgctcagtttttcctctagcttcatgtatatatggaataaagttataataatggttcaaatatccttatctactaattttatcatctaagcaatttccrtgtctgttttgagtgatttttctccccattatggataatatcttcctgctttttgcatgcttgctaatttttttttagatgccaaaatttagacttttattttgtggtgtgctgaatatatttgcattctcttaaacagttgtga

SEQ ID NO: 449733 - DNA, 566 bp, Homo sapiens
tcctagaaaaaaagctgaagaatatctatagggatacataaatatccagcacttaaaaaggtaaaattcacaaggtatggcatccagcaaaaaaattaccaggcatggataggaaaggaaacgtcaactcacaatgaggaaaaaaaatcaataggaactgatctagacctgacatagatgttataattagccgacaaggacaatcaaacagctattataactatcttccatatgatcaaaaagttaatgagagatatggaagataagaaaagactggacttytgataaaaactacagtgtgtgaggtgagatgaaaaataccttaaatgtgattcatgggagattagactttgcagaagaaaagattagcaatagaaatcccaaaatgaagctctaagagtaagaagattgtaaaaaaaaaaaaaaaaagacaaagaaaaagaataaagaaaaaaaaatgagcacagcagtggactgtgggccaacttaaggcattctaatgtgtgattatagtagcagaggcagaagaaagacagggaaataatgacctaaagtttttcaaattt

SEQ ID NO: 449734 - DNA, 575 bp, Homo sapiens
tttcctatagtgttaaataccttagctattaaaaatgctataaatatgcacmttgttttcttaatatgaacttaataatgcatccaaacaagtgtacatgattattaagaagggtgcatatgtatgcaaaaatattcagaaagtgcataggagaaggaaagtaaatgctacaccaaattcaaattttaaatggaaaatatcatggaatatatctatatcaatatagctatatatgtgtatatagtcacatttgtatctatatttatatctacttatgtatatatatatgtgcataaatgcacagcaaatcacaaacacattttacagctttgattcacaatattcatagttttgtttacctacattattaattttctcagttcccctttaccaccaaacacatagctactactataaattcacctctattatcagttaatatgtaaacataaatcagttatttattgattattatacttcctgtttgttatcttataagtgaaacaactaatgaattatcatttatcttttcttaaaaatctgaaaatattttatattatgactataatgtaatt

SEQ ID NO: 449735 - DNA, 575 bp, Homo sapiens
tttcctatagtgttaaataccttagctattaaaaatgctataaatatgcaccttgttttcttaatatgaacttaataatgcatccaaacaagtgtacatgattattaagaagggtgcatatgtatgcaaaaatattcagaaagtgcataggagaaggaaagtaaatgctacaccaaattcaaattttaaatggaaartatcatggaatatatctatatcaatatagctatatatgtgtatatagtcacatttgtatctatatttatatctacttatgtatatatatatgtgcataaatgcacagcaaatcacaaacacattttacagctttgattcacaatattcatagttttgtttacctacattattaattttctcagttcccctttaccaccaaacacatagctactactataaattcacctctattatcagttaatatgtaaacataaatcagttatttattgattattatacttcctgtttgttatcttataagtgaaacaactaatgaattatcatttatcttttcttaaaaatctgaaaatattttatattatgactataatgtaatt

SEQ ID NO: 449736 - DNA, 596 bp, Homo sapiens
aggcttctgtctgtacatacaggcttttccatacatctaaaatttaagcgaatgatcccaagcctcaactcttacactctgtgcacctgcaagattaaccccatgtggaaactgccaaggcttacagtttgcaccttctgaagcaatggcccagtctgtactttggcccgttttagccatggctggagctggaatggcagagatgcagggagcagtgtcctgaggctgcacagggcaacaggatcctgggcctaacccaggaaaccattcttccctcctaggcctccagcctgtgatgggaggggctgtcactaaaatgccttcagggttttttccccattattttgtctattagtacttgacttccttttagttttgcaaatttctgcagcctgcttaaatccctcccctgaaaacgggtttttcttttctaccgcatggccagcctgcaaatttttcaaacttttatgctccacttcctttgtaagtataagttcaagttttacatcatttctttgctcacawatatgagaataggcctctagaagcagccagggcatttcttgaacactttttgttgtttaaaattttctctg

SEQ ID NO: 449737 - DNA, 581 bp, Homo sapiens
gaatagccaaagcagtcctaaacaaaaaaaagaataaagctggaggtatcacattacctgaattcaacttacattacaagcctatagtaaccaaaataacatggtatggatataaaaatacaaacaaagatcaatgaacagaataaagaacccagaaataaagctacatagttgtagccatctaatcttcaacgaagcagakaataacatgcactgggaaaaggacactctcttcaataaatggtttttggaaaatcggactgccatatgcagaagaaggaaataggatccttatatctcaaacaagaagtaactcaagatggattaaagatttaaatgtaaaatgtgaaactataaaaatactgcagaaaaacatagggaaaactcttcttgacagcggtctaggaaaagaatttatgactaaaacctcaaaagcacagtcaacaataacaaatatagacaaatgggacttaactaaactaagcaaattcttcatggctagagaaataatcaacagagtgaagagacaacctgttgaatgggagaaaatattcgcacactattcatctgacaggagatga

SEQ ID NO: 449738 - DNA, 594 bp, Homo sapiens
agcaggtcttagtaaaacaattaagtctcagtgtaacaaaagcattaagtgatacttaaatgtgtatttttatcctatatttcatgagaatatttgattgttataatgacagaagaaaacatttctggatgagcaaacagggaaaaaaaaaagactgctatacawctttagcatctctgtttatagcagccagtgaagcaaggtgaaaacatgagaacttgtgtgaacatgagagcttgccataaaacaattttggctgatttttaaaaggaatcaccagccgggtgcggtggctcacgcctgtaatcccagcactttgggaggacgagacgggtggatcatgaggtcaggagattgagattaccctagctaacactgtgaaacttcatctctactgaaaatacaaaaaattagcccggtgcggtggcgggtgcctgtagtcccagctattagggaggcttaggcatgagaatggcgtgaacccgggagacggagtttgcagtgagctgagatcacgccactgcactccagcctgagcaatagagtgagactacatctcaaaaaaaaaaaaaaaaaaaaggaatcaccaatacc

SEQ ID NO: 449739 - DNA, 599 bp, Homo sapiens
aatgtagaagttacagtattaggacagcaactgagcaatattttattattttattattaaacttttgtctctaaaatcacagctagcttatatttacattacataccaaaatgctatggatattgaacatagattagtacttgtgattactagtcattagctatatcatcattaatccacagctartttactaaatataagctctgagtcaacggccataccctcttgtcccagcatactgtttcatctctctttctgctcccagatgtcctcacaaatattacagcagaaattctaacttgaaaagatgtttatggaagtgaatagaatggagatatagctcttttgccaatattatgttactactcagtgcagcatgcttgatctctgttttcaaaataaaaggatatgtgagggcatcaagtttcagctattactttgtgattctctctttatccatcatcagaagggataattagctctgccttccttccctcagaagatgtttgtgcaaacgatttaaataaaacctctgggatatcacttactgagaggaagtgtccactgggtttgtttcatgtgacgaaaaagtcaatccc

SEQ ID NO: 449740 - DNA, 599 bp, Homo sapiens
aatgtagaagttacagtattaggacagcaactgagcaatattttattattttattattaaacttttgtctctaaaatcacagctagcttatatttacattacataccaaaatgctatggatattgaacatagattagtacttgtgattactagtcattagctatatcatcattaatccacagctagtttactaaatataagctctgagtcaacggccataccctcttgtcccagcatactgwttcatctctctttctgctcccagatgtcctcacaaatattacagcagaaattctaacttgaaaagatgtttatggaagtgaatagaatggagatatagctcttttgccaatattatgttactactcagtgcagcatgcttgatctctgttttcaaaataaaaggatatgtgagggcatcaagtttcagctattactttgtgattctctctttatccatcatcagaagggataattagctctgccttccttccctcagaagatgtttgtgcaaacgatttaaataaaacctctgggatatcacttactgagaggaagtgtccactgggtttgtttcatgtgacgaaaaagtcaatccc

SEQ ID NO: 449741 - DNA, 620 bp, Homo sapiens
ttttcggcaaagccattcaacaagtctctaggaagttccacagtttttcacattctcctgtcttcttctgaactctccaaactgttctaacctctgcgtgttactcagttccaaagtcgcttccagattttctggtatctttacagcagtgccmcactcaactggtaccaatttactgtattagtctttttttatgctactgataaagacatacccaagactgggaaatttataaaagaaagtggttaaatggacttacagttccacgtggctggggaggtctcattatcatggagggaggcaaggaggagcaagtcacatcttacatggattgcagcaggcaaagagagagagaatttgtgcagggcaactcctctttacaaaaccatcagatcttgtgagacttattcactattacaagaacagcacaggaaagacctatccccatgattcagttacctcccacttggtatttcccacaacttgtgatatttcaagatgagatttgggtggggacacagtcaaaccttatcactaatcttcttcataaatgctttccatttgggtcaatagagtaatacagattcctttctttcatttagcagtgtgcatttaagatt

SEQ ID NO: 449742 - DNA, 552 bp, Homo sapiens
gggccaagttgacatggtgccttgcatcccaggcaaacagagtcttgactgagctaaataaccctgccctgtgagctgaacaatcacagtgaactkcctccagaaaactggacaagctttccagagtctgagctgctgtggtgcttttcctccccaaagagtgaggtcatttgggcttgagacatagctacaccccaccagtcctgggtccttgatgctaatgcactcagccttgcagaaactgggatactgccatgttccatgtctcaagatccagagttatcactatacagtgtctcattccccaagacctgagttgccattgtgccctgttaggtctgagaacttaattgccgctgtgccatactttgaggggtccaagtctccagaataccccttcttcaccagaaatatgccagtggtgcaacccaggatcagcagcacctctgcttcatggctctctgggcctgagctgctgaggtatacctgcaatcacagatcatggctgtgtggggatctgcatctacctgtctgagagattgaacccacacc

SEQ ID NO: 449743 - DNA, 552 bp, Homo sapiens
gggccaagttgacatggtgccttgcatcccaggcaaacagagtcttgactgagctaaataaccctgccctgtgagctgaacaatcacagtgaactgcctccagaaaactggacaagctttccagagtctgagctgctgtggtgcttttcctccccaaagagtgaggtcatttgggcttgagacatagctacaccccaccagtcctgggtccttgatgctaatgcactcagccttgcagaaactgggatactgccatgttccatgtctcaagatccagagttatcactatacagtgtctcattccccaagacctgagttgccattgtgccctgttaggtctgagaacttaattgccgctgtgccmtactttgaggggtccaagtctccagaataccccttcttcaccagaaatatgccagtggtgcaacccaggatcagcagcacctctgcttcatggctctctgggcctgagctgctgaggtatacctgcaatcacagatcatggctgtgtggggatctgcatctacctgtctgagagattgaacccacacc

SEQ ID NO: 449744 - DNA, 637 bp, Homo sapiens
ggggtccagaatatgacttgaattatattatgaaaaggttattttggccaaaaaaatgcctgtagattgcaagattgaaaacaattgacatgagtaaacttagttactttctattttcagcaactatgcagacaatttaattccatttggccaaggatgtaggactccttaaactagaaagatgacttggataatattacaaaatgatttagttccagaagtgttattgattggcatmttgttttaggacattcagagcctgcccttagaggtgatatgttatccctgttgagttaggagacatagagttaaaatcagcgcaactcagaaggctgctcatggtgttttctcatacctgggtctatctgctccagaacttatttttacctagtcctttatttgtggtcacggtgctgatacgcactgtaggatatcctgtcgtccttatctaatgcttactgcaagaaacatgagctcataagcatatatatatgcgttatatactgtatatatatttatatatattgtttatatatatataaacaaaatcaatgggctggatcacagattcaataagaagcaaaaaatcaaacacaaagagatacatctactagcactatggtaaatgaaaagaaaa

SEQ ID NO: 449745 - DNA, 601 bp, Homo sapiens
acctatcgcctgagatacaagaggacccatcctggactacataaggtaagtaaaaatcccactgctactatcacagctggtgttcttctgcaagcaccacctcttgtctggagggcggccaatgcagttcatttcaacayttcttggtggaataacactactcaggaagtagaaaatggctgaatgacttcagctatcaccttcacctacaccactctggctaaccaggaggtcctgagtctcttcatgtgaccagttgatgaccactataaccagcactgaagaaagtcaacacactaagactatctttaaccaaggaatcgcacagagaccccatcactccactgttacccccattagagctggtgctactaccctcagctgggagacttgaggacaggtaacattactggatcctttgcatacattccccacttccaggctgtagtgtggcagcttcactgagtggctagacccagaggaacaacaacactcacagcagtctggctcccagggactcccattcttaggggacggggtgggagtgcaccacatcaaagaataccctgtgtgacaaaataatctggacagcacgccttga

SEQ ID NO: 449746 - DNA, 627 bp, Homo sapiens
gttttgttctgatgccccactttaagtatgcacacacacacacacacttttatttyaatgtttaaatgttatgtctttagacataggaggtctgcagaaaatgtactgaataacagaggtttgtatgctgggttcataagggattaaattcacatattttctatctccagggtaatttatctctcagtcacactatttatgagagaataattcatagtcctactactcatttgaaaattatattattggaaaaattttattattgaagttatattttgtttgagagaacatgttaatttgggatagatatgctaatgaaaagaaactaagaagagtaagcataatataaaaagtttaaaaagatataaggaatcacagtcctgacctgtctatctactcatacacacatttagcatttatacttaagggccccagctgtaatacaaattcccagaacagtctgattaatgaactagtaggttgcgtgggacatcacgcagtaactttaacaggcaaacactgacacattagcattcagtgatctcttcccagaaggaaaaacctaacagacaaagaagtatgcagaaagaagataaaagaaagacagcatgcattgaaagaagaaaa

SEQ ID NO: 449747 - DNA, 627 bp, Homo sapiens
gttttgttctgatgccccactttaagtatgcacacacacacacacacttttatttcaatgtttaaatgttatgtctttagacataggaggtctgcagaaaatgtactgaataacagaggtttgtatgctgggttcataagggattaaattcacatattttctatctccagggtmatttatctctcagtcacactatttatgagagaataattcatagtcctactactcatttgaaaattatattattggaaaaattttattattgaagttatattttgtttgagagaacatgttaatttgggatagatatgctaatgaaaagaaactaagaagagtaagcataatataaaaagtttaaaaagatataaggaatcacagtcctgacctgtctatctactcatacacacatttagcatttatacttaagggccccagctgtaatacaaattcccagaacagtctgattaatgaactagtaggttgcgtgggacatcacgcagtaactttaacaggcaaacactgacacattagcattcagtgatctcttcccagaaggaaaaacctaacagacaaagaagtatgcagaaagaagataaaagaaagacagcatgcattgaaagaagaaaa

SEQ ID NO: 449748 - DNA, 526 bp, Homo sapiens
ctggctgaggatggcttccagccaacagtcagccagcaaaagaggctactaccacaaaagagaagttctacagctgcaaaagaaataaaatttaccaacaacctgagtgaacttggaagtgggtcctccccaagtcaggcttcagatgagatcatagcctcagcagtctttttgttttgtttttgagataaggtcttgctctgtcaccaaggctagagtgcagtggcacaatcacggctcacttgcagcctcaatgtcctggactcaagtgatcttcccaccttagcctcccgagtagctgggactacatrtgcaaaccaccatgcatgactgatttttaaaattgttttgtagagacgaggtcttgctatgttgccatggctgatcttcaactcctggcctcaagtgatcctcccacctcagcctcccaaagtgctgggactataggcacagccactatgcctggcctggctgcagtcttataagactctaagcagaggtacttagctaagcctacctggcattc

SEQ ID NO: 449749 - DNA, 603 bp, Homo sapiens
ttgaattgatataatatttaacctaactttttaatatcagattttatgtttgaaattggtatactttctttctaattatatgtgatcattaccattggtgggawatgttcatatgagtaggtagtttaaaaagtgagaatattttttataactacttaacaatttatgacagttggaattatatctaaagaatctatcatccctttttttcagtgacaaatgtaatagtaaatttcttgcaaagatgatgattttgaatacaatcaaattttctcttgatgaacaaacacattattaggatagtcatactatagctagaaagaacactactaaaattgtagtcagcacaaattttatatatttctttatttctaaacattgtgccataagaaataaacactaatatatttgaagacagaattttatcctgcttgcagctccaataggaaagaacccctacctggcttcccctgcacaggcagttgtatcttgagctgtgcactctcctctttgggctaccaaagttgatgtccaacttggcctctcccagatctactcaatagaacagtgagtgccatatgatgctgggacggagggaggcac

SEQ ID NO: 449750 - DNA, 604 bp, Homo sapiens
agactgcctttggacttaagctgcttctcttccctgagtctccagcctgctcgcctagcctgccgattttggacttgccagcctccacaattgcrtaagtcaattcctaaaaataaatttctctatactgtatctacatcctattggttcatttactctgcagagtcctcactaagaaacctttcccctgaagctgctttgcatctaagctcaaatgttctccacaaagtcagttcaagtaacctcactccttcctctgctggtgttgctcttatagccatcataggtgatgtttgaaaagttgggaattctgcacggtgaggacaggtgtattagtccgttttcatgctgctgataaagacatacctgataaagacactgggtaatttataaagaaaaagaggtttagtggacttaccgttccacgtggctggggaggcctcacaatcatggcagaaggtgaaaggcacatcttacatggcagcaggcaagagagagaataaaaaccaaggaaaggggaaaccccttataaaaacatcaggtctcatgagacttgttcactaccacaagaacaggatgggggtaaccacccctatgattcagt

SEQ ID NO: 449751 - DNA, 604 bp, Homo sapiens
agactgcctttggacttaagctgcttctcttccctgagtctccagcctgctcgcctagcctgccgattttggacttgccagcctccacaattgcataagtcaattcctaaaaataaatttctctatactgtatctacatcctattggttcatttwctctgcagagtcctcactaagaaacctttcccctgaagctgctttgcatctaagctcaaatgttctccacaaagtcagttcaagtaacctcactccttcctctgctggtgttgctcttatagccatcataggtgatgtttgaaaagttgggaattctgcacggtgaggacaggtgtattagtccgttttcatgctgctgataaagacatacctgataaagacactgggtaatttataaagaaaaagaggtttagtggacttaccgttccacgtggctggggaggcctcacaatcatggcagaaggtgaaaggcacatcttacatggcagcaggcaagagagagaataaaaaccaaggaaaggggaaaccccttataaaaacatcaggtctcatgagacttgttcactaccacaagaacaggatgggggtaaccacccctatgattcagt

SEQ ID NO: 449752 - DNA, 604 bp, Homo sapiens
agactgcctttggacttaagctgcttctcttccctgagtctccagcctgctcgcctagcctgccgattttggacttgccagcctccacaattgcataagtcaattcctaaaaataaatttctctatactgtatctacatcctattggttcatttactctgcagagtcctcactaagaaacctttcccctgaagctgctttgcatctaakctcaaatgttctccacaaagtcagttcaagtaacctcactccttcctctgctggtgttgctcttatagccatcataggtgatgtttgaaaagttgggaattctgcacggtgaggacaggtgtattagtccgttttcatgctgctgataaagacatacctgataaagacactgggtaatttataaagaaaaagaggtttagtggacttaccgttccacgtggctggggaggcctcacaatcatggcagaaggtgaaaggcacatcttacatggcagcaggcaagagagagaataaaaaccaaggaaaggggaaaccccttataaaaacatcaggtctcatgagacttgttcactaccacaagaacaggatgggggtaaccacccctatgattcagt

SEQ ID NO: 449753 - DNA, 604 bp, Homo sapiens
agactgcctttggacttaagctgcttctcttccctgagtctccagcctgctcgcctagcctgccgattttggacttgccagcctccacaattgcataagtcaattcctaaaaataaatttctctatactgtatctacatcctattggttcatttactctgcagagtcctcactaagaaacctttcccctgaagctgctttgcatctaagctcaaatgttctccacaaagtcagttcaagtaacctcactccttcctctgctggtgttgctcttatagccatcataggtgatgtttgaaaagttgggaattctgcacggtgaggacaggtgtattagtccgttttcatgctgctgataaagacatacctgataaagacactgggtaatttataaagaaaaagaggtttagtggactyaccgttccacgtggctggggaggcctcacaatcatggcagaaggtgaaaggcacatcttacatggcagcaggcaagagagagaataaaaaccaaggaaaggggaaaccccttataaaaacatcaggtctcatgagacttgttcactaccacaagaacaggatgggggtaaccacccctatgattcagt

SEQ ID NO: 449754 - DNA, 525 bp, Homo sapiens
cctcactccttcctctgctggtgttgctcttatagccatcataggtgatgtttgaaaagttgggaattctgcacggtgaggacaggtgtattagtccgttttcatgctgctgataaagacatacctgataaagacactgggtaatttataaagaaaaagaggtttagtggacttacygttccacgtggctggggaggcctcacaatcatggcagaaggtgaaaggcacatcttacatggcagcaggcaagagagagaataaaaaccaaggaaaggggaaaccccttataaaaacatcaggtctcatgagacttgttcactaccacaagaacaggatgggggtaaccacccctatgattcagttatctccacctagtccctcctacaacacatgggaattatggaaactacaattcaagatgagatttgggtggggacacagccaaactatagcaacaagaccttctttatttcatttttacatttcccacagtagcacaataacttgagcatagtaaataattaa

SEQ ID NO: 449755 - DNA, 604 bp, Homo sapiens
gatatcttaaaacagtatatctattttaaatctattaatgtacaaaatatgtaaatctatatttatttctctgtcaattctacaccagtaatcatatcaaatatttgtaaatcatgagactaaacataatgtaagtataatggtgaagaatatctttatattataattataagaagtttagttccataagtgagatagaattattggaactattttgtttttatgtgcaataactttgcttgaatgaaatatcattccggattctactatcagtttaaaccggacaacaccttttatttagtcacagagactgtattttgaaatgcaaaagtttcaaatgaattgccactgagatatctgtcccaatattggaaggtagatagagtrggaatgaagttaagaaaggacaatgcgttttctcaaattctcctggttttcatgctttaatattgtgattgtcagttatataaagattattttctttatggttgctctaaattccaattcctgttacataatattatataaatggtctacagaatatcctaatagctttgcataaaatacaaattgttttccacttcaacacattctaagaaattag

SEQ ID NO: 449756 - DNA, 571 bp, Homo sapiens
gtattaaatattcgaaatctgatgtgtattttatacttatagcacagctgaaatctgaatggccacatttcaagtgctcatggccacttatggctattgcttagagaattagatagtatagacagtgcaagattattgctctctgcacaaggagatatactgcttagtgtttatgagcatagattctgcagccagagttactgtcaggttaatttcaaatctcactgttgttacaagatttaaaaactatgtaattttggataagttacttggtgtcctgttctcaatttggccatattacaatgaggcytataaatctccaaaaagatcacaatataatgaggattaaattagcaaaggcatgtaatattcttaaaactgttcaataatcattctgagttcctatctttgatcataggttaaaaaataaacatgaactgtttgttttgaattcaaatatgatttatctcaccctccttcattttaaagacaaagcttcccctttcaaattacagacattctatttaaattgtatgctagcttcttttgtgataaacattagttttgtgtt

SEQ ID NO: 449757 - DNA, 587 bp, Homo sapiens
aagattattgctctctgcacaaggagatatactgcttagtgtttatgagcatagattctgcagccagagttactgtcaggttaatttcaaatctcactgttgttacaagatttaaaaactatgtaattttggataagttacttggtgtcctgttctcaatttggccatattacaatgaggcctataaatctccaaaaagatcacaatataatgaggattaaattagcaaasgcatgtaatattcttaaaactgttcaataatcattctgagttcctatctttgatcataggttaaaaaataaacatgaactgtttgttttgaattcaaatatgatttatctcaccctccttcattttaaagacaaagcttcccctttcaaattacagacattctatttaaattgtatgctagcttcttttgtgataaacattagttttgtgtttctcaggctaatattttgtaaaagaaactgctaaactttaggttaagctatttcattgtagaacagtgtgtcagactttgtgaagaaatatgtagagaacaaataaggtcatttgcagagcaagctgtgacatagagaatggcc

SEQ ID NO: 449758 - DNA, 540 bp, Homo sapiens
gagatttctacaagcactacaatctctacaaattcaaatttaactcactactttctccaaaaagtccacagggataatamaaataaaaattaacactaccactaataaatactagatgagtcctggataatagattaataataaattattgatatttaacatatataattaaaagtaattaatttaatatataactaataaactctatcatcataaaactataagacagtaaatattttttccccgttttacagacaaaaagtagaggtgtaagtgaattgaatacatcgctcaagatacacagatgttctgagcagtagagggagtatttgaatctaggcagtctgacaggacatgctcttaataattactctatactgtgtctttttttttaagtatttaagcttgaaaacacacaaatactcattgttattataatggaaatattaacactttaatggtctaattggatatatggtataggtatttttattgtcctaattttacagacaagactgctgaattgcagagagattgaat

SEQ ID NO: 449759 - DNA, 540 bp, Homo sapiens
gagatttctacaagcactacaatctctacaaattcaaatttaactcactactttctccaaaaagtccacagggataataaaaataaaaattaacactaccactaataaatactagatgagtcctggataatagattaataataaattattgatatttaacatatataattaaaagtaattaatttaatatataactaataaactctatcatcataaaactataagacagtaaatattttttccccgttttacagacaaaaagtagaggtgtaagtgaattgaatacatcgctcaagatacacagatgttctgagcagtagagggagyatttgaatctaggcagtctgacaggacatgctcttaataattactctatactgtgtctttttttttaagtatttaagcttgaaaacacacaaatactcattgttattataatggaaatattaacactttaatggtctaattggatatatggtataggtatttttattgtcctaattttacagacaagactgctgaattgcagagagattgaat

SEQ ID NO: 449760 - DNA, 563 bp, Homo sapiens
taatgttattttataattaggataccattaaatatatcagatatattcaatactcccttgtgaaaatcatatcaacagcttcctaaaatacatattcaaatatatatgttttataaactaaccgttgtatctcaataccaggcaatacatcagtcaatagctaaatagtcatcaaatcacttaaccaagtataagataaagtacatcacaaagtatacttgctttaraatgagcgggggagtaacactattatcactgtcatttaactgaatcactacagatgaagagaaagtgagtattttaacaatcatgcctatttattatttccactttattattcagagaaaaatggataatatctctgccaattctaaaagtgaagtatgttaaatagtatgaggttactgaaacaactagaaatgtagatatgagtaggaagtggctaaccgagtatgtctgtcatgaaaattattttctattgacatcatcactattcagtttaagagtcatattaaggatcagaagtatgatcttcggtttgtagatgatggcattgagaagta

SEQ ID NO: 449761 - DNA, 613 bp, Homo sapiens
tacacggctgcctagatcacctgaggccatttattacttcccctagaaatgtctgcttttccttctccagagagctgaaggtgggccatcatgaagttagaggcaaaagatacaaggaaactcattttcactgatcagatctttttattcattaagggcattaaaamaatagaccaaactagagtcctgctgaatgttccgactatggtaaagcctattattttgttgttattttttgtgtgtttgcttttaacaagaaatatatccagcatttaccatgtgcaaggctctattatgcataattttgaaaaaaagaacttttctaagcttatactttctcatctttgaaatgagaataattgagctcttaatgcataggcttttgttttattagttataaatatatatatatatatagcattatcagcatacaatgctattatatataattattatatgaaactaagacctggtcttagtatttttctccttgaaacacttcaaaatctcctctgcaattacttccaccccactccaccatacacaagctcctcatgcaagaacctccatgctgtgaattttgatatttctcccaagacatctcctgctgctg

SEQ ID NO: 449762 - DNA, 567 bp, Homo sapiens
gaaggaaataggtaatatgataatgcctcgggaagaatagaactattgtgaacaggatggccagggaaggcttgatatatgagctgagagaaaatatatgaggaattactcatgtgctatggactgaattgtcccatccctctaaattcacatgctgaagccttaattgctcatgtgaaggtgtttgaagatggaaactttggaaactgattatgtttagatgagatcaaaagagtgatggtcctcctgatgagagcagtgtccttatgagacactacttgcttataagcttgctttcactcttctctgtgtgagtacatatctagaaggtgaccgtctgcaagctagaagaactctcaatagaatccaaccttgctggcaccttgatctgagaatttcagcctccacaactatgagaaataaatttytgtcattcaagtcacccagcctattgtattttattatggcagcccaagctgattaagacattatgcaaagatccagtcgataaattaacaaatataagcagaaaccatgaggtgataagcggcttaaaatttcagtgga

SEQ ID NO: 449763 - DNA, 631 bp, Homo sapiens
aatgagaatcattaaaacaagtaaataaaaagtaatagattaaaatatatgtgacacccaacactattttcataatatgaatgcaataaaagaatcatagacctagatttcagagatatttcttgtgttcgtttaccatgaactgtgcaaagtgatgatagggttctgatatacatctgtttcaattaaacagtgtatagtgcaatgcaagtactgcttgtatcctctgtgtcactttaggactcattggataggaaaatattcatgggaaaaataatttggaaaataaacaaattgaagattcaagtaggggtatgattagtgcttgttttcctataacggcgcatttaaacacagcatattctattcrtgacagtatcaaaatttgcagcacttaaacaataagagaaaatctccagtgaaaggagacacaattttgtacaactttataaaataggtaaaatagataatgcaaaacagaagacaggcatatgagtattttaattccttgtctatattcaccaaagttgatggcatacgacatagtaaatagggagtaagagctttgacccctcaaggttctttaaatcctgaaggcattccacttttgatgggcttgagttcagagcaa

SEQ ID NO: 449764 - DNA, 574 bp, Homo sapiens
ggtccacaaactgccatccagtttataaattagagcccaagtgtcaggctgcatctaggcatatggatagcaaacttacactagggaggactaaaaatcttttcttcctgcctctgaaatatccttgcttacactcttgtaggaggaattcagctaatatcattctaaatattagctcagcaatttttttaacagctgtacccctggattttcagtttatccaaataagcggaatcaaaagatggcttgttgaaatttaatttgttcttgaatcagcaaaggaggtcatttaagcataaaaaactttttcctagaacatatctacaaaacgcagttccacaccactgggcacaggaaagcttctccatgaacaattggctccttaagcacaggagagagtcttggcctgmattctaaagttgagctgcctttcttcatcatatttagaggaggtgccaaaaactcttcatctatgctacgtatattctgtctctatgtatgaaatattgtacaccaaccaagaataaagctttagtatttctttcctataatggatatgagtttgctttagaac

SEQ ID NO: 449765 - DNA, 636 bp, Homo sapiens
cataaaccattcatgagtcatgccttttgtcctgtaagataggatacactaattattacaccaatcaggactgactttgtagctggggttgtcaacttcccccatataaatgggttagataactgttttcagaacattgaastgtcttcttttcctttgtttccttttttgtcttctttttttattgtaaggaaagaaaggtaaatgaatatgtgttgtcaaaaacaagagatgttcactacattttattttagtaaataaactttagtaaatccatttaaattacataaaaaggatgaaacgtttagtaaataagtttgaaaggcttgccattacttttttatgaacagttttaatctaagagatattaaatatagccaacacaaaacagagtacattattttgtattctaagaagcagatgtatattttcaaaactaaaatgaataatctattattgataccaatagggagctcttcatttgaatagcttttggaaagagattaagatataatagatctagaaatggatatttgaacctctgaccccacagtgtctcaattcactatctcatttttcctgcctaaaaatgttttaattaggaggccccagtctccagagatagcctgtatatag

SEQ ID NO: 449766 - DNA, 554 bp, Homo sapiens
attactatctgttaaaagtaaatcccaacaactacctcattaggtggttgggtatatatatatatatacaagataatgttttaaagctgtcacacagcctgacaagtgttatgtgctcttttttttacaaacagtagctgtagttattataggcgtcaagatatctacatggaaacagagttgacatgtstatatgaagtctttaaaaagatccatgatagaaatacagattaaaattctgtaggtagttgttagaggaaagagtgcctagattatatcacttggtgaaaagaaaaagggcaaatcaaagggtagaatcttgaataaacaccaaaaggttaaaagaaagatagagtaaatatatttggtgaagataactgcctataagcaaattagtattctatatacatggtatgttacatacaatgtactgtggggtctggggcatacttctgcagtagatataggactggacacactcttcatgtagtagggaaagacaattcatgtcattcacactcgttcgtatgattacgtttgtcacaaatacaatt

SEQ ID NO: 449767 - DNA, 554 bp, Homo sapiens
attactatctgttaaaagtaaatcccaacaactacctcattaggtggttgggtatatatatatatatacaagataatgttttaaagctgtcacacagcctgacaagtgttatgtgctcttttttttacaaacagtagctgtagttattataggcgtcaagatatctacatggaaacagagttgacatgtgtrtatgaagtctttaaaaagatccatgatagaaatacagattaaaattctgtaggtagttgttagaggaaagagtgcctagattatatcacttggtgaaaagaaaaagggcaaatcaaagggtagaatcttgaataaacaccaaaaggttaaaagaaagatagagtaaatatatttggtgaagataactgcctataagcaaattagtattctatatacatggtatgttacatacaatgtactgtggggtctggggcatacttctgcagtagatataggactggacacactcttcatgtagtagggaaagacaattcatgtcattcacactcgttcgtatgattacgtttgtcacaaatacaatt

SEQ ID NO: 449768 - DNA, 525 bp, Homo sapiens
agtattagaataatagagtattagaatggtatgtttcaaagacacactgaagtgtcatcttggaggaaatagcatgtaaatattggttgccatcctccagggcatagtgtacacataaaactagagagcattgcatcaaagggtactttgtctcctatagaaagaatacgtgtgttggggaaactgagggcaggggcaaacttggccaacttatcacttctattgactcactaagggacttgtacttcctgtccctgtaactctgatcctcagagtgtgmactcttaccttgggacagatcaggtttccttgacttaaaagctatggctgctggctagaaactttgggctccttatgtccagggaccaatatgcaataaggggagtattcatctcaacagaggtagttgaccctgattaggcaaaggtaactctctgtatttactcagaagtggcacagaggtgcatatgttaaattcaggcaaaaatctcttttatctcttggtatatctttgccaactgtgac

SEQ ID NO: 449769 - DNA, 618 bp, Homo sapiens
ctgggtggaggatgaagaatgctgaataataaatttcctcccagaaagacagccctctgacttgggacttgaaactctaaggatatggagccctgtgttcttagctgcacaagtcagaaacagaatttcttcctcacttagctgagtgtaaatattagaagctcttgcttttcttactgaatttgtatggattttcttaaatgtttattactctgatgtaagaccattttcagagtctctctctctctctctctctccacacacacacacacacaacacacacacacagagttatcattttcattaggtagtaagccttcaaagtttctcattctttcatgctagcagtagattctgtccgtaatttgtctgtctgtttgttggttagttggttggttggctggtttttctagacttagtggaatgaatagaggaaagggtgtccacttcccagaggcagagtcctcagatttgttttgattttgayatggtctcgtgtatcgctcttgtttagaccttctgatgttccttcttagaaagttgttcactatccaaagattaatactaaatattttatttaatttctgtacaaactttgataaagtttttatttgaaaa

SEQ ID NO: 449770 - DNA, 562 bp, Homo sapiens
tacaattccactattaaccatatatatgacgcaagtgcacagaaatctaaggaacattaaacatttaattttctaaagttatgtaggaccttcttaagttatagcaatgctaaaaaataaagtataatcacaggtataaatacacatatatgtatacattttaaaagtaatcatctctaaactctttcaacccaggtaacaatgtgagtttggtgaactctgagcatattgtaaaggaagtccggtaagagataaaagatagaagcccaggaaacatttaaaaaaaaaaaaagctgagttaaatactaattatttcactattcaatgtctataacaatttaatatgctaacatctattggaattaactgaacataaagaaaagcataaaggaagcagaattttccaaacctgtttgatttgggcacctcattttcaaggaacacttcattgaaccaatttttaataaaacacattttargatatattagcttttataaagacgtggtgagccaaaattagtatgtagaatcaatttccaaaaattacacaaattaagatgtg

SEQ ID NO: 449771 - DNA, 562 bp, Homo sapiens
tacaattccactattaaccatatatatgacgcaagtgcacagaaatctaaggaacattaaacatttaattttctaaagttatgtaggaccttcttaagttatagcaatgctaaaaaataaagtataatcacaggtataaatacacatatatgtatacattttaaaagtaatcatctctaaactctttcaacccaggtaacaatgtgagtttggtgaactctgagcatattgtaaaggaagtccggtaagagataaaagatagaagcccaggaaacatttaaaaaaaaaaaaagctgagttaaatactaattatttcactattcaatgtctataacaatttaatatgctaacatctattggaattaactgaacataaagaaaagcataaaggaagcagaattttccaaacctgtttgatttgggcacctcattttcaaggaacacttcattgaaccaatttttaataaaacacattttaggatatattagcttttataawgacgtggtgagccaaaattagtatgtagaatcaatttccaaaaattacacaaattaagatgtg

SEQ ID NO: 449772 - DNA, 580 bp, Homo sapiens
aataagccagttatagaaggattccacttacattaggaactatatttgtcaaactcgtagatgcagaaagtagaatggtggtgrtcggggctggggtaggagaaaatagagttgctgttcaaaagacagagttttagactagcatgaaaatgttctagagattttctatacagtatcatatatttataatttgtaatcttggacatatattttacaatattgcactagacacttaaaaactagagcattgattttttgttatgtattttctgttgcaataaaaaatgcgttaatcttttcgtaagaaaatattaagcctgtgaaccatgtttttaccatgatgttcttttacatccagatttttcagctagtgaataaaggcccagggtttcaaatcagccctaactttcaaacctgtgcagttcttattatacaatgatacaaaactactgtgattccattacatttttataaatatagtaagccaccaaacatgtatttccttgttttgtcactagttatgtgaacttgaaaacatcatgcatctgctctgttcctcaatgaccacatgtgtaaatga

SEQ ID NO: 449773 - DNA, 580 bp, Homo sapiens
aataagccagttatagaaggattccacttacattaggaactatatttgtcaaactcgtagatgcagaaagtagaatggtggtggtcggggctggggtaggagaaaatagagttgctgttcaaaagacagagttttagactagcatgaaaatgttctagagattttctatacagtatcatatatttataatttgtaatcttggacatatattttacaatattgcactagacacttaaaaactagagcattgattttttgttatgtattttctgttgcaataaaaaatgcgttaatcttttsgtaagaaaatattaagcctgtgaaccatgtttttaccatgatgttcttttacatccagatttttcagctagtgaataaaggcccagggtttcaaatcagccctaactttcaaacctgtgcagttcttattatacaatgatacaaaactactgtgattccattacatttttataaatatagtaagccaccaaacatgtatttccttgttttgtcactagttatgtgaacttgaaaacatcatgcatctgctctgttcctcaatgaccacatgtgtaaatga

SEQ ID NO: 449774 - DNA, 580 bp, Homo sapiens
aataagccagttatagaaggattccacttacattaggaactatatttgtcaaactcgtagatgcagaaagtagaatggtggtggtcggggctggggtaggagaaaatagagttgctgttcaaaagacagagttttagactagcatgaaaatgttctagagattttctatacagtatcatatatttataatttgtaatcttggacatatattttacaatattgcactagacacttaaaaactagagcattgattttttgttatgtattttctgttgcaataaaaaatgcgttaatcttttcgtaagaaaatattaagcctgtgaaccatgtttttaccatgatgttcttttacatccagatttttcagctagtgaataaaggcccagggtttcaaatcagccctaactttcaaacctgtgcagttcttattatacaatgatacaaaactactgtgattccattacatttttataaatatagtaagccaccaaacatgtatttccttgttttgtcactagwtatgtgaacttgaaaacatcatgcatctgctctgttcctcaatgaccacatgtgtaaatga

SEQ ID NO: 449775 - DNA, 314 bp, Homo sapiens
aaactttcacttatacgacccatggagggaattgaatcaaatatatgctaatggaaagactgacatatctttttatttaggagttttgagctgtgaagaatttcacactaagtaatgtgaaagaaatttcatcacttaaaaatataagctgatagattagtcacctgttcctagaggcaatacttatatttgctttccaagctgtccattaattgggttttatcagaactagttcctggcattgagattacckagatagataatgtagaagatgttcttaatgcatgaaattcaaaggactataaatagaatct

SEQ ID NO: 449776 - DNA, 600 bp, Homo sapiens
tgttcgttttatttaggattattttggctattcaagttattttttggttccatatgcattttagaattgttttttctaatttatgaaaaattacattggattttcatgggaattgcattaaatctgaagatttctttgggcagtatggttattttcacaatattgattcttccratctatgagcatgggatgtgtttccaattgtttgtgtcatttattatttcttcaccagtgttttacagttctcctggtagagatctttcacgttgttcgttaagtatattcctatgtttggtttcatttttttggcagctgttgtaaaaggtattgagttcttgattggattatcagcttggttgttgctgtagtatagcagtgctactgatttgtgtacattgattttgtaacttgagactttactgaatttgtttatcaaatctaagagtcttctggaggagtctttaggattttctaggtatacaatcatataatctgcaaatagcaatagtttgatttcctcttttccaatttggatgcatttctttctcttgcctaatttctctggctagtatttccagaaatatgttgaataaaagtaat

SEQ ID NO: 449777 - DNA, 600 bp, Homo sapiens
tgttcgttttatttaggattattttggctattcaagttattttttggttccatatgcattttagaattgttttttctaatttatgaaaaattacattggattttcatgggaattgcattaaatctgaagatttctttgggcagtatggttattttcacaatattgattcttccgatctatgagcatgggatgtgtttccaattgtttgtgtcatttattatttcttcaccagtgttttacagttctcctggtagagatctttcacgttgttsgttaagtatattcctatgtttggtttcatttttttggcagctgttgtaaaaggtattgagttcttgattggattatcagcttggttgttgctgtagtatagcagtgctactgatttgtgtacattgattttgtaacttgagactttactgaatttgtttatcaaatctaagagtcttctggaggagtctttaggattttctaggtatacaatcatataatctgcaaatagcaatagtttgatttcctcttttccaatttggatgcatttctttctcttgcctaatttctctggctagtatttccagaaatatgttgaataaaagtaat

SEQ ID NO: 449778 - DNA, 571 bp, Homo sapiens
atttttcatttatgatactaaataaagttacctttatagattaatttactttgataaaagacttgctttgacttacaaaatataaataaataacagtcaaggtgacttgctaatatggcagtatttatgaagagagtactggaatgcttagattttggttaaaactgttctattgctctggtattcagtatgttcaggaaaactgctatgttctgtcaagatcacaggatcctcattgatgtgtctatactgattgtagcctggttaactcttattccctctgtaaatgaagacaacccatcctaaaatggtcatttggagaattctgggttccaagttcttaaatctgtaagcattacatagataacacagctatgatgcaaaaagtcatgttggctattgcagaaagctctgtgagtactgactgaggggaagcgggtgtcatagcttcaaaatatgtataatgttaaagactcaaattgctgaactaataataggtttttgctcataaatacccagtgggtygaagtgaccatacaggtgtcaaatacatgaatattaacagaaaagc

SEQ ID NO: 449779 - DNA, 559 bp, Homo sapiens
tgacacttagcataagccagacacacattgcttactgttattaaaaaatggcaaaaaaaaaaaaaaaaaaaaggctcagagtactagggagtagggggtagcagtgaaaaacttggaaaaaaatacatattttcttgcatttagcctcaccaagattttagtctattgcaactgtaaaaagaaaaaaaaaatgaacttaaatgtaattatgaaaagttactcaccaagagagtgatggtaatatgatcaataaatttgagggaaaatctgcctrtatcttcatagataatataacatcctgtacatttttgacttattgaaaattctaaaaattgcaatgatgacccccctctcactttgtcaactccttatgtgtctaattttcctcaggccataaacataaaatctcatcacttctatttttcctttgaaccctcttttagacattttaatgctgcaggaaatctggactcatcgatgccatttcttttctctctctctgatgaactgacactgacttttgttactgcctgcctgttgtttcaaaatgtcttcaaat

SEQ ID NO: 449780 - DNA, 559 bp, Homo sapiens
tgacacttagcataagccagacacacattgcttactgttattaaaaaatggcaaaaaaaaaaaaaaaaaaaaggctcagagtactagggagtagggggtagcagtgaaaaacttggaaaaaaatacatattttcttgcatttagcctcaccaagattttagtctattgcaactgtaaaaagaaaaaaaaaatgaacttaaatgtaattatgaaaagttactcaccaagagagtgatggtaatatgatcaataaatttgagggaaaatctgcctgtatcttcatagataatataacatcctgtacatttttgacttattgaaaattctaaaaattgcaatgatgacccccctctcactttgtcaactccttatgtgtctaattttcctcaggccataaacataaaatctcatcacttctatttttcctttgaaccctcttttagacattttaatgctgcaggaaatctggactcatmgatgccatttcttttctctctctctgatgaactgacactgacttttgttactgcctgcctgttgtttcaaaatgtcttcaaat

SEQ ID NO: 449781 - DNA, 591 bp, Homo sapiens
ttgtctgtttagcccatctcagagcagagcattctcagggcttgggtgacctttgccaaaagcatcaaagacataaatacgggccacagcagactggaacaagatataacagttgggacaagcaacagacagacttttcttgtgacatccttccctgggtttgtataggggtgatactggtttcctaaaataagttagcggggaatctctcttcctaatttttttaatagtttcagtagtattggtatcaattcttctttctgtcaaattaccaaagtcattttttcatggaattagaataaatacaatcctaaaattcatatggccacaaaagagaacttcaatagccaagccaatcctaagcaaaaagaacaaagctgtaagcatcgcattccataacaaattatactacaagcctatagtaacaaaaacagtatggtactggtattaaaaayagacacatagattaatggggcaaaatagagaaaccagaaatacagccacaaacctacaaccaactgatctttgaccaagttagcaaaaatctagactggtgaaaggacagtctattcaataatgatgctggaaaag

SEQ ID NO: 449782 - DNA, 591 bp, Homo sapiens
ttgtctgtttagcccatctcagagcagagcattctcagggcttgggtgacctttgccaaaagcatcaaagacataaatacgggccacagcagactggaacaagatataacagttgggacaagcaacagacagacttttcttgtgacatccttccctgggtttgtataggggtgatactggtttcctaaaataagttagcggggaatctctcttcctaatttttttaatagtttcagtagtattggtatcaattcttctttctgtcaaattaccaaagtcattttttcatggaattagaataaatacaatcctaaaattcatatggccacaaaagagaacttcaatagccaagccaatcctaagcaaaaagaacaaagctgtaagcatcgcattccataacaaattatactacaagcctatagtaacaaaaacagtatggtactggtattaaaaatagacacatagattaatggrgcaaaatagagaaaccagaaatacagccacaaacctacaaccaactgatctttgaccaagttagcaaaaatctagactggtgaaaggacagtctattcaataatgatgctggaaaag

SEQ ID NO: 449783 - DNA, 591 bp, Homo sapiens
ttgtctgtttagcccatctcagagcagagcattctcagggcttgggtgacctttgccaaaagcatcaaagacataaatacgggccacagcagactggaacaagatataacagttgggacaagcaacagacagacttttcttgtgacatccttccctgggtttgtataggggtgatactggtttcctaaaataagttagcggggaatctctcttcctaatttttttaatagtttcagtagtattggtatcaattcttctttctgtcaaattaccaaagtcattttttcatggaattagaataaatacaatcctaaaattcatatggccacaaaagagaacttcaatagccaagccaatcctaagcaaaaagaacaaagctgtaagcatcgcattccataacaaattatactacaagcctatagtaacaaaaacagtatggtactggtattaaaaatagacacatagattaatggggcaaaataragaaaccagaaatacagccacaaacctacaaccaactgatctttgaccaagttagcaaaaatctagactggtgaaaggacagtctattcaataatgatgctggaaaag

SEQ ID NO: 449784 - DNA, 578 bp, Homo sapiens
ataatcatcatcttcaagcattgacttctccatctcagaaaggctcaaaccttttgattgctaggttctcatgtttgttacacctcagtttaagtgccaattggcaattctctggcaacactttcttagactcacttagattagytgtatttaatatgcggtcacatttcacattatatttttcttatgttaatattttaaaacactaaatactctccattgggtcataaacaatatttgttttagctttgaatataaggacctattatagtatccattttatggttaacttataacaaataataatttcagtgactgaatgattgaaacaatgcatttttttcataggtgttttcttctcaaggctgttctgagatagagtctaataacgtgttgagtgcttctaaataaacaccgtttaattatataattaattctggaaaacagatcataaaacatgtataatatggaataaattatattaattttaaaattgcaatgttatttttatatttaaaataaaatacagattgaagaagaacacaggtacaaaaaaacatatatctattcatctagac

SEQ ID NO: 449785 - DNA, 578 bp, Homo sapiens
ataatcatcatcttcaagcattgacttctccatctcagaaaggctcaaaccttttgattgctaggttctcatgtttgttacacctcagtttaagtgccaattggcaattctctggcaacactttcttagactcacttagattagttgtatttaatatgcggtcacatttcacattatatttttcttatgttaatattttaaaacactaaatactctccattgggtcataaacaatatttgttttagctttgaatataaggacctattatagtatccattttatggttaacttataacaaataataatttcagtgactgaatgattgaaacaatgcatttttttcataggtgttttcttctcaaggctgttctgagatagagtctaataacgtgttgagtgcttctaaataaacaccgtttaattatataattaattctggaaaacagatcataaaacatgtataatatgkaataaattatattaattttaaaattgcaatgttatttttatatttaaaataaaatacagattgaagaagaacacaggtacaaaaaaacatatatctattcatctagac

SEQ ID NO: 449786 - DNA, 619 bp, Homo sapiens
gtgctactggcatctagagagcagaggcttgggctgctgttaatagtttaccatgcacgagacagccccctatatggaagwattatctgacccaaaatatcaatagtacaaaggctgagtaagtctgcagtagggtaaggaagccagcattttaagaaatataagataaaaaattcagaatgtccagtgtatgttgtaggatgacaggctttttaatgagatatttttaagaacaggatgatggcactctttctgagcggtaaaagaacatgtgccttgaagtgaggacagggcttgctgatcttggcaaaggcattccgacatctaactttaaaattaaataaatgcagaagttaatttttgttcatgtatgtcaaaaagaaaagagaaaactgatgtgaataaaattattcagttagaatagctgacaaagcaaatgagaaaatgagctcatgatacttggtacatattactcttctcacaggacacacgccatgaaatgtgctatacggccttagactgaaggattaaagcaaactgtttccaccatatcatttgggagaaagttctgcaaagtaatagaattgcacaacgattttctcagtagagtaattataaa

SEQ ID NO: 449787 - DNA, 619 bp, Homo sapiens
gtgctactggcatctagagagcagaggcttgggctgctgttaatagtttaccatgcacgagacagccccctatatggaagaattatctgacccaaaatatsaatagtacaaaggctgagtaagtctgcagtagggtaaggaagccagcattttaagaaatataagataaaaaattcagaatgtccagtgtatgttgtaggatgacaggctttttaatgagatatttttaagaacaggatgatggcactctttctgagcggtaaaagaacatgtgccttgaagtgaggacagggcttgctgatcttggcaaaggcattccgacatctaactttaaaattaaataaatgcagaagttaatttttgttcatgtatgtcaaaaagaaaagagaaaactgatgtgaataaaattattcagttagaatagctgacaaagcaaatgagaaaatgagctcatgatacttggtacatattactcttctcacaggacacacgccatgaaatgtgctatacggccttagactgaaggattaaagcaaactgtttccaccatatcatttgggagaaagttctgcaaagtaatagaattgcacaacgattttctcagtagagtaattataaa

SEQ ID NO: 449788 - DNA, 567 bp, Homo sapiens
gcaaaactgatacagaacaactgggggatgcatagcagcacagcagtttaggaaaccaccattggatttggccaggactgggtgtggatcttggttttgtccctttctggatgtggtctttgacaatgttgctcagtctttccgtgtgtccttaaacatcagtaatggctatagtatatttaacatggtctctggcgtattatgagtactcaaattgtagccactgtgtttattctagtaccactaaaatgtctcctgattttgaaaggagcatccccagagcattgtgtggcycatttacagatttgtaaaatgtaacatttacctacaccctcaatatctgctgaacactttcaataggcagtgaccatgggtcctccttgaaggtcataactagttaagtcaggaggattcttcaggggtttaggagagaatgagagagctgactcccggaagtgggaagggaatcaccctgactatttcctgtctttgctgctttcctttctcataagggagggctctgggaatgggaggcagcagcatccttgtccatactacacatccttt

SEQ ID NO: 449789 - DNA, 644 bp, Homo sapiens
atcaagaaaaacaaaacacagttctcagattctcagtgatgaaaatttacaaggagaaaaaaggaaatatgtgattaactgggtgaagtaaaatataacccaatcactaaggataataactcaaccaaataaatgagctcaggataggtagacatggccagcacagtggctcacatctgtaatcccagcactttgggaggctgaggcaggcggatcacctgaggccaggagttcragaccagcctggccaacatggcaaaaccccgtctctactaaaagtacagaaattggccgggtgtggctactcaggaagctgaagcaggagaattgcttgaactgggaggtggaggctgcagtgagccaagatcacgccactgcattccagcttgggtgacaagagtgacactctgtctcaaaaaaaaaaggaaagtagacatgagtctgagttgatctttaaaggattttgacaggtagcattatccaggtcaagagaagagtaaaatcaaaggcacggaggcttggccatagttagaaaccatttgggaacttgtgatttgaaggtaaagagttgtggttgtaactcaataataactttggatagtttattattctttcaggcagcaggaatgtaatgatgagaaaat

SEQ ID NO: 449790 - DNA, 369 bp, Homo sapiens
atcctacaattctgcaaatgccagattttattcaggcatcacaacctaaaccttctccagtgaggtgatatcatagaagggtaagcagggagtcagaacatacatttggtaggttagaagtaacatgctccactgtacctgtggtgtctgtgaagcctgcgtggggagcctgcactttcagccccaacygctattgatgaggcacacactcttattctgctgaggtggtgccagaggaggcctagagaaaagtagggactctcagaaatacccagcagtaaggagtctacccctcactacatagtgtcagggggaagcctggtagggagtaataaatgagcactcctccacttcccacagtgtggattc

SEQ ID NO: 449791 - DNA, 369 bp, Homo sapiens
atcctacaattctgcaaatgccagattttattcaggcatcacaacctaaaccttctccagtgaggtgatatcatagaagggtaagcagggagtcagaacatacatttggtaggttagaagtaacatgctccactgtacctgtggtgtctgtgaagcctgcgtggggagcctgcactttcagccccaactgctattgatgaggcacacactctyattctgctgaggtggtgccagaggaggcctagagaaaagtagggactctcagaaatacccagcagtaaggagtctacccctcactacatagtgtcagggggaagcctggtagggagtaataaatgagcactcctccacttcccacagtgtggattc

SEQ ID NO: 449792 - DNA, 607 bp, Homo sapiens
tctgagctttactgcttgcacagattgctgctggcatagtcagtagaaagagatataatgatggcacttcgagaggttggtaatgatcctaacaccagcaagcagagcagcatccaggacataagggtggaaattgctgttcccatttgattgccacctgtatactcataaaatcagagattaattttgaaaattcttcacacacacaaaaatcaaataatgtgaagaaacaacttaatctagatatttttcaaaaacaaagtactaatcaaaggacttcttatccataataatcccattttgcaaaatacatttattgcatctttaygatgatttttgccttggacataagtataatatctatagcagaatattaatgcaaaccatgataagttgaaatttgtgataatttagagaatgatatcaagcaactgctttaaaatcatagacttcagtaactaatgggaaacagatgtttagctgggcaaaaaatagaaattcttattccagattttattttggcctcatctttttcaaaggttaagtgttttggaattgagttggaaagggctaagtaaatcaagcaaataggctattaagaggggaa

SEQ ID NO: 449793 - DNA, 607 bp, Homo sapiens
tctgagctttactgcttgcacagattgctgctggcatagtcagtagaaagagatataatgatggcacttcgagaggttggtaatgatcctaacaccagcaagcagagcagcatccaggacataagggtggaaattgctgttcccatttgattgccacctgtatactcataaaatcagagattaattttgaaaattcttcacacacacaaaaatcaaataatgtgaagaaacaacttaatctagatatttttcaaaaacaaagtactaatcaaaggacttcttatccataataatcccattttgcaaaatacatttattgcatctttatgatgatttttgccttggacataagtataatatctrtagcagaatattaatgcaaaccatgataagttgaaatttgtgataatttagagaatgatatcaagcaactgctttaaaatcatagacttcagtaactaatgggaaacagatgtttagctgggcaaaaaatagaaattcttattccagattttattttggcctcatctttttcaaaggttaagtgttttggaattgagttggaaagggctaagtaaatcaagcaaataggctattaagaggggaa

SEQ ID NO: 449794 - DNA, 558 bp, Homo sapiens
aagcaaagaactgtcaaatcaaacctgatatacagtgacaatatccttcaggaatgatggggaaataagacattctcaagtgaaggaaaactgagaaattyatcaccagcagatttttcctgaaagaagggctaaaaaaaagttctctggactaaaaggaaatacaaaatatttaatcttggagcatcagaaaggaagtaaaatatgaaaataacaatttatgggtaaattatgttaaatttcccttctccccttgttttctaaacaaagtttgaatatttgagtaaaattacaacactatttaatgtgattctaaatgtataagataacatatttaagatgattatattacaaagaattatattatgaaggataaaattaggttaagggacttaaagtttatatgtgtcactaaacctggtaaaatgtatatgacagtagattggaataaattataaatatatattatccagagcaaccactaaagaactatataaagaaatagatactggccaggcacggtggctcatgcctataatcccagcactgtgggaggtc

SEQ ID NO: 449795 - DNA, 583 bp, Homo sapiens
aattttgctctatagtgaaagagtgatagtaaaaacaaaaaataatattttagtataattatgaaaatggcactaatttcattgaccccttgatagggttccaagtcacactttgaagacaactgggctgtagtatcatcaaacagaacttataatctactaatataaaacattcacaagttttgtttataatgttgaaaagctagtactaaaataaagaaaaataacagaaagtttaaatattgtgttcattattaacttcattttagcctactagaaaaccctctgaattaaagccccaacaccaatcctggacaaagactgaaagatctctttgctgagcaaaaattcaagaagacgatctagatagagtatttttttgacattggctaaagaagaaattgtaaaatyaaatatggttgtgcgcatggcttaacaaaggcacattctgagaaattcatcattaggtgatttaattattgtgccgtatcacagtgtgtacttacacaaacctagatggcatagcccactacacatctaggctatatggtacagcctattgctcctaggctacacacacacc

SEQ ID NO: 449796 - DNA, 508 bp, Homo sapiens
tatttgtgtatctatacatatcaaaacataaaaagggaatactaaaaatatggtattaaattaaaaaaataggatattaaagataaaaaatggtacaactataccgggcacttcccatgaatggagcttgcaggactggaagttgttctgggtgtcagtgagggagcagtgagtgaatgtgaaggcctaggttattactacacactacagtagactttataaacactggacactagcctrcactaaatttatgaaaaatatagtaactgtgcaatgattttatgacagccacattgtcattagacaatgggaatgtttcagctccattttagtatgtacggtccatcactgatcacaacatcattgtgtggcatatgactgtaaatacatttttctaagaaaaaactagagtgtccagtgacaaggcaaagactgatattctgactagaaaccactgataatttacatcaaagaggctgaacaaaggatagtcaaggcatgagacatc

SEQ ID NO: 449797 - DNA, 508 bp, Homo sapiens
tatttgtgtatctatacatatcaaaacataaaaagggaatactaaaaatatggtattaaattaaaaaaataggatattaaagataaaaaatggtacaactataccgggcacttcccatgaatggagcttgcaggactggaagttgttctgggtgtcagtgagggagcagtgagtgaatgtgaaggcctaggttattactacacactacagtagactttataaacactggacactagcctacactaaatttatgaaaaatatagtaactgtgcaatgattttatgacagccacattgtcattagacaatgggaatgtttcagctccattttagtatgtacggtccatcactgatcacaacatcattgtgtggcatatgactgtaaawacatttttctaagaaaaaactagagtgtccagtgacaaggcaaagactgatattctgactagaaaccactgataatttacatcaaagaggctgaacaaaggatagtcaaggcatgagacatc

SEQ ID NO: 449798 - DNA, 542 bp, Homo sapiens
ttgacaattttactacatattttacaattttattgttaaataatttctcacaagcttaagttaatgtctagaggttcaaattagaaactgttacgaaartttcttttttttatagggaagacattatataaaatatttggtaataccacaatttttttttttacttcaaagatgcagaaattattcagcattttctagacttaacttcaagaaggtggggggcatggcaaatattagatccccaaagatatatgtgtttcttattggtatacttatataaaataaatccaccttatcaatggaggaagtaaaataattcacaaataatagcatgtgtttgccatggcacacagttctccatcagagttatgttgctaacttaagttcaaagcatgaatggtaaatgactctcttggggattgagtacaaataatataatgacattttactttccatttgaaaccacaaatcactttcctcttcatattgacatgtaatttctcaatgcctattgctctagctatgctctgggagtcacttat

SEQ ID NO: 449799 - DNA, 542 bp, Homo sapiens
ttgacaattttactacatattttacaattttattgttaaataatttctcacaagcttaagttaatgtctagaggttcaaattagaaactgttacgaaaatttcttttttttatagggaagacattatataaaatatttggtaataccacaatttttttttttrcttcaaagatgcagaaattattcagcattttctagacttaacttcaagaaggtggggggcatggcaaatattagatccccaaagatatatgtgtttcttattggtatacttatataaaataaatccaccttatcaatggaggaagtaaaataattcacaaataatagcatgtgtttgccatggcacacagttctccatcagagttatgttgctaacttaagttcaaagcatgaatggtaaatgactctcttggggattgagtacaaataatataatgacattttactttccatttgaaaccacaaatcactttcctcttcatattgacatgtaatttctcaatgcctattgctctagctatgctctgggagtcacttat

SEQ ID NO: 449800 - DNA, 542 bp, Homo sapiens
ttgacaattttactacatattttacaattttattgttaaataatttctcacaagcttaagttaatgtctagaggttcaaattagaaactgttacgaaaatttcttttttttatagggaagacattatataaaatatttggtaataccacaatttttttttttacttcaaagatgcagaaattattcagcattttctagacttaacttcaagaaggtggggggcatggcaaatattagatccccaaagatatwtgtgtttcttattggtatacttatataaaataaatccaccttatcaatggaggaagtaaaataattcacaaataatagcatgtgtttgccatggcacacagttctccatcagagttatgttgctaacttaagttcaaagcatgaatggtaaatgactctcttggggattgagtacaaataatataatgacattttactttccatttgaaaccacaaatcactttcctcttcatattgacatgtaatttctcaatgcctattgctctagctatgctctgggagtcacttat

SEQ ID NO: 449801 - DNA, 611 bp, Homo sapiens
ttgagcccaggaattcgagaccagcctgggcaacatggcgaaactctgtctctgcaaaaaatacaaaactcttctgggtgcagtggcaaaagcctgtagtcccagctgcttgggaggctgaagcaagaggatggagtaagcccagcaggttgagcatgcaktaagccatgatggcaccactgcactccagcttgggtgacagaatgagaccttgtctcaaaacaaacaaacaacaaacaaataaataataaataatatttaacaaaataaaatgaaaagtaaaatctagtcaaatagacattgtttttcaatctgtgcatgtgtatacttgcttaatatcatggacatatttgcttctattttgtattttttacactaaactttttatttagagataatttaaattaacataaatttgtaagaaataataggaagagattccttgtaccatttacccagtttctctagaaactctggtataatatagttttgcacatttatgatatagtatcacaaccagaatattaacactggtacattataattccttgatcagaacatcactcgtgtttccctttgatagccacactcagttccctcttaactcacta

SEQ ID NO: 449802 - DNA, 503 bp, Homo sapiens
ttgggagaacaactttattccaaaaaagtacatttttttaagtaaacaagtcttagaaaatacttgcctgtggatatgatgctaatgtattctgagatgtaataaaattgggatatggatttatatgccataaatgaaaagtatttcctcacccagccttcagggaccgtcccccgttctcttggtgtgttcccctgctgattctaatcactctctaacattaaatcaatgctatttatttcttgtggtacataaactatcgackgtcatcctgaaggaaggcaaaaccagaaatattttgcttatacttgtcctcattgtcttggggcaaacactcctgactgctgattaattcacatcgaaggtctttcaatttatgttctttgagtgatttttgaaagtaagttcatatatttcttggattacatgaagaattgtatatgactctctgtagttcttagggtttctcctgttgtgatactgtgttgcctatttccccagaa

SEQ ID NO: 449803 - DNA, 616 bp, Homo sapiens
ttcagatctatagaatatacgacaattaagaccctagcaaatttgaaccttttaaaagtatcttgcattaaatcattatagtcaatggcaagaaggagtggtgtttgtcagtaggttttaaacttgttgtactaatgcaattattaatagcatccttttttagtctctaacgtgaccaattctgatgataaattatatgttcaccctaataagcctctctaatttttcctaattcttataagcttcttatmtttatgttgtagtttccttgtttctgctttatatattatttcaaagttagcaattctttattatatactttaatctgctgcaggtgtgtgtgtgtgtgtgtgtgtgtgtgtgtgtttatggaagggtgcagggagttttttagaggacataaaacattatttgtttcatttctgcatgtgttccttcttcatcttaaaagaaaagaaaaggaaacgtattgggaacatcataaaagatagataatagagaacataaattttcaccaaattaaacaccggctaaacatttaataatatatatttataaaatgtttaaattccttttttatattaaacagattttaaatgtaaaactaagttaatga

SEQ ID NO: 449804 - DNA, 589 bp, Homo sapiens
atatccaggcttcctgctttagaagttcccacatcaggtgatttcaagtggcctcagagtcttcccattcctgttccctcttttaagctggttccagtcttgagttctcccttcacccttgttcctcgtaaatggactggccatccagtgtaaggccccggcactgtcaaccccagcaccaggagatccttcaaataggtgggatgccccttaggaaagtgcatctcagtgtccctmagcagaaatgagtggaactttttttcttttgggatacccctagagaaagtgtggctcgtgtccccagcagacattagccccaagtggtaggacgttttccagtcccaccacgggaaaaaccctgtctattccttcaaactaatctctggtttgcatcctaaaacattgggataaatttggcccccagactctcaaaaataaatgcctaattgtcctgtgtaatatgttttggcctctgtataaactcctggatcaattaacctggactctgaatgggactttagattcttaacactcttttgcaactcgatttgctgtgtcacaactcttctaaatggcctgaagttgctta

SEQ ID NO: 449805 - DNA, 589 bp, Homo sapiens
atatccaggcttcctgctttagaagttcccacatcaggtgatttcaagtggcctcagagtcttcccattcctgttccctcttttaagctggttccagtcttgagttctcccttcacccttgttcctcgtaaatggactggccatccagtgtaaggccccggcactgtcaaccccagcaccaggagatccttcaaataggtgggatgccccttaggaaagtgcatctcagtgtccctaagcagaaatgagtggaactttttttcttttgggatacccctagagaaagtgtggctcgtgtccccagcagacattagccccaagtggtaggacgttttccagtcccaccaygggaaaaaccctgtctattccttcaaactaatctctggtttgcatcctaaaacattgggataaatttggcccccagactctcaaaaataaatgcctaattgtcctgtgtaatatgttttggcctctgtataaactcctggatcaattaacctggactctgaatgggactttagattcttaacactcttttgcaactcgatttgctgtgtcacaactcttctaaatggcctgaagttgctta

SEQ ID NO: 449806 - DNA, 589 bp, Homo sapiens
atatccaggcttcctgctttagaagttcccacatcaggtgatttcaagtggcctcagagtcttcccattcctgttccctcttttaagctggttccagtcttgagttctcccttcacccttgttcctcgtaaatggactggccatccagtgtaaggccccggcactgtcaaccccagcaccaggagatccttcaaataggtgggatgccccttaggaaagtgcatctcagtgtccctaagcagaaatgagtggaactttttttcttttgggatacccctagagaaagtgtggctcgtgtccccagcagacattagccccaagtggtaggacgttttccagtcccaccacgggaaaaaccctgtctattccttcaaactaatctctggtttgcatcctaaaacattgggataaatttggcccccagactctcaaaaataaatgcctaattgtcctgtgtaatatgttttggcctctgtataaactcctggatcaattaacctggactctraatgggactttagattcttaacactcttttgcaactcgatttgctgtgtcacaactcttctaaatggcctgaagttgctta

SEQ ID NO: 449807 - DNA, 603 bp, Homo sapiens
gaattcaaaatactgtttcctttgaacacacttggcagaacatttatattatctttaccaccagttgtattcatgaagaaaaggcctccatttggtccctggctcaagagtggccacaggaggttctygcccacaaccctcaggagtctggcctgggaagaacagcagttcctgatgttgatcctagatagggctaccagaagggaaacactggcagggaacgtagtaattaaatgactacttatttaattgtaggcataaaaaaggctgccataggaccagtcaactttgctaatctaaaagaggtaacacaggggtcaaatgaaaactcagctctacttcactctaggctggctgaagccgtgagaaaataccctaatatgaaccctcatagcccagaaggccccattaatttgactgttcattttatcagtgaggcttcttcagatattaggtgcaaatcccagagactagaccaaggaccacaactccattccccactttactggacatggctttcaagatctttaacaccagaactgtcaaaaccctccccacccatcttctggcactcagggaccaccgattagctcctgtccacac

SEQ ID NO: 449808 - DNA, 513 bp, Homo sapiens
gtgtaagttccattaatttcaaagccttgttaaagtaccatgtttaatgtcatttctttctttcttatagttctctatttttttttccacattgacctatatgcctatgtttttttcctagttaaacagctttcatctattttatgtcaagtgaagcaaatttcctttatttttttccttattgtcrttgcctggaaatctttcaggaaatcattaatattgggattaaaattattatttttatactcaagattcctgaaatgtttatataaacaatgatttttcttctacttttctgactcatctgcactggtgcattattgcaatcatgtcccgggaggaaaatgaagttgaagaaaattcaacatcatcataataattggacaaatcaaaatatgtcacatcagctagccaaatgaacagtaatacagtactctgctgctctcgttggagtcagacaaacctgagtttaagttccagttgtactatttaataacttagtaacaaagagag

SEQ ID NO: 449809 - DNA, 603 bp, Homo sapiens
tagttctctaaggtgggagttttggtctgtgatgacaaaacactgcattaaagtttctcgtgggtttattcaggacaaagacagtgttgataaggcccttatgtggctgcagagtagcttttaccaaaatgattctactattgtctctcaattgaaatgagtaagggaagaataayaagaaaaacacatacaactgaattatttatttttggtaatgtgtgttttataccttctaggagtttttttcaagggtatggctaatcattgcaaaaggaatactttcctctgtcaatcaaccattcaagacgtacagacataaatgaaattataaaagtgttgcctgatttcattatttttaaaagaccccctcttttttgatatgagtatccatgagtgatcaagtaagattttttttaaaattgtttaacatttacctctgtcaaaatagattttaattaaatttaaattctgatttttttaaataatgagccaaataaatattgactcagaacagaagatatggttgttttaaagggcttgacctaaattaacatcaagctttttgaatttcttggtaattttactcaatatctaagtcaacgt

SEQ ID NO: 449810 - DNA, 603 bp, Homo sapiens
tagttctctaaggtgggagttttggtctgtgatgacaaaacactgcattaaagtttctcgtgggtttattcaggacaaagacagtgttgataaggcccttatgtggctgcagagtagcttttaccaaaatgattctactattgtctctcaattgaaatgagtaagggaagaataataagaaaaacacatacaactgaattatttatttttggtaatgtgtgttttataccttctaggagtttttttcaagggtatggctaatcattgcaaaaggaatactttcctctgtcaatcaaccattcaagacgtacagacataaatgaaattataaaagtgttgcctgatttcattatttttaaaagaccccctcttttttgatatgagtatccatgagtgatcaagtaagattttttwtaaaattgtttaacatttacctctgtcaaaatagattttaattaaatttaaattctgatttttttaaataatgagccaaataaatattgactcagaacagaagatatggttgttttaaagggcttgacctaaattaacatcaagctttttgaatttcttggtaattttactcaatatctaagtcaacgt

SEQ ID NO: 449811 - DNA, 603 bp, Homo sapiens
tagttctctaaggtgggagttttggtctgtgatgacaaaacactgcattaaagtttctcgtgggtttattcaggacaaagacagtgttgataaggcccttatgtggctgcagagtagcttttaccaaaatgattctactattgtctctcaattgaaatgagtaagggaagaataataagaaaaacacatacaactgaattatttatttttggtaatgtgtgttttataccttctaggagtttttttcaagggtatggctaatcattgcaaaaggaatactttcctctgtcaatcaaccattcaagacgtacagacataaatgaaattataaaagtgttgcctgatttcattatttttaaaagaccccctcttttttgatatgagtatccatgagtgatcaagtaagatttttttwaaaattgtttaacatttacctctgtcaaaatagattttaattaaatttaaattctgatttttttaaataatgagccaaataaatattgactcagaacagaagatatggttgttttaaagggcttgacctaaattaacatcaagctttttgaatttcttggtaattttactcaatatctaagtcaacgt

SEQ ID NO: 449812 - DNA, 603 bp, Homo sapiens
tagttctctaaggtgggagttttggtctgtgatgacaaaacactgcattaaagtttctcgtgggtttattcaggacaaagacagtgttgataaggcccttatgtggctgcagagtagcttttaccaaaatgattctactattgtctctcaattgaaatgagtaagggaagaataataagaaaaacacatacaactgaattatttatttttggtaatgtgtgttttataccttctaggagtttttttcaagggtatggctaatcattgcaaaaggaatactttcctctgtcaatcaaccattcaagacgtacagacataaatgaaattataaaagtgttgcctgatttcattatttttaaaagaccccctcttttttgatatgagtatccatgagtgatcaagtaagattttttttaaaattgtttaacatttacctctgtcaaaatagattttaattaaatttaaattctgattttttwaaataatgagccaaataaatattgactcagaacagaagatatggttgttttaaagggcttgacctaaattaacatcaagctttttgaatttcttggtaattttactcaatatctaagtcaacgt

SEQ ID NO: 449813 - DNA, 592 bp, Homo sapiens
gaataacaaagtagaaatgaaataaaatgacaacctaggcaaaactgaccagatgctgaaagcagatggagaacttaaaggaaagtattaaaagagcaggtttataatgctacagctggtgattaaaatatctcactatctaatcaggcaatagcatctggcctgctgcaattcagaggttttcaaacagtagggaccacaatttaatttaattatcaaaattgaatttgtaaagctagccaatgagtagaaattcagaagaccctgccacagtatcccccaacttttcacgataagaaattaaacataataaaacatgccttttgataattagactccatatattgcaaaactaaagtttgataaaagtttaatcaaactcagtgggtgtcattaaaaaggcaataatcaaatgattacataaataataacaaacttctgcatttccctcaaattgtctaaggaaaaaacagataagttgtmatttgaggaacaacaggcagaaatatgcagcattaaaattatctagatcaaaattttaaaagctatgatgcccatgattatttctatctccattttaattcacaatttc

SEQ ID NO: 449814 - DNA, 610 bp, Homo sapiens
ccaacaagttattttgtggatattgataaacattccaaaatttatagagagaaacaaaagatccagaatagccaacactagattgaaggagaaaaacaaagtcagaggactgactctgcctgatttcaagacctaggataaagttgcagtatgaaagacagtgtagtacyggcaaaaagatagacaatagatctatggaacagagtagaggatacagaaattgacccacagatatgtattgcctcttgattttctacaaatctgcaaagcaatttcatgaagaaaatagagaaaagcttctaaacaaatgatgctgaaacattggatagccaatatatgaataaacttcatattttacagataaaaaactaaaaatgaaagataaaactaaatatacatgtatacttacaaagattacataaaaacatgatatttataatttgaagtaaagatgtattagataaagcaccaaaagagaacatacaaaataaaaataaagatgtattagatttccaaaattaggaatctttgttctttataagatactacaaaaagcataaaaggacaagccccagattgggacaaaatacttgcaaatcacatattagga

SEQ ID NO: 449815 - DNA, 610 bp, Homo sapiens
ccaacaagttattttgtggatattgataaacattccaaaatttatagagagaaacaaaagatccagaatagccaacactagattgaaggagaaaaacaaagtcagaggactgactctgcctgatttcaagacctaggataaagttgcagtatgaaagacagtgtagtaccggcaaaaagatagacaatagatctatggaacagagtagaggatacagaaattgacccacagatatgtattgcctcttgattttctacaaatctgcaaagcaatttcatgargaaaatagagaaaagcttctaaacaaatgatgctgaaacattggatagccaatatatgaataaacttcatattttacagataaaaaactaaaaatgaaagataaaactaaatatacatgtatacttacaaagattacataaaaacatgatatttataatttgaagtaaagatgtattagataaagcaccaaaagagaacatacaaaataaaaataaagatgtattagatttccaaaattaggaatctttgttctttataagatactacaaaaagcataaaaggacaagccccagattgggacaaaatacttgcaaatcacatattagga

SEQ ID NO: 449816 - DNA, 425 bp, Homo sapiens
agaggaaacaagatacaatgcatgcctttcaaatgactataaagaggttgcatgtggagagggcatacacagaatcatacagaggaattctgtttctgaaatagctgttttacatcaaaatttgggracaaagttttcttttttccctgttaaataaagcctttcggggaaaatcattatttctgagtgtgctgctttgatctctgcctccagaaattgggatttatttcccactgccattaggatgcaaggtcctgattaagaaaacttactaagtttaagaattttaatttaagaactggtcttacattcttaatcaggatatttaaagttgtcttttgccttgaaatctaaacacacattccactcttttcactgcttcactccagaacttgttatcggttaaattttgattgattttacta

SEQ ID NO: 449817 - DNA, 570 bp, Homo sapiens
gtgtacttttcagtaacagtatatatatgaatcttccaatagtatatactttacttctttttcatagccttttcaggctgtgattgtcatgtattttcaatatatgttataaaccccacaatacatttgatgttatttttgtayaaagtcaatatcctttttagagacttacataaagaaaaatatcttgtatacatatccaagtagtcaacatttcctgttcttcatccccctgagtagatccagatttccatcagacatcagaacatgtcttgtgatgcaggtctgctggagaggaaatctttcagctttgtttaactggaatgtccttatttcttcactgtttcttatagctatttttaccaagtatataactctacattgagatttttgcttttaaaaccaaaaataatgttctactattttctctgttgcctcatttaaggagaaatctgttatcatccttgcctttgttcctccataaaacatgtcctttatctctggctgctttgaggacttcattttaacactgatttagagcattctggttatgattcatgtggcttggtg

SEQ ID NO: 449818 - DNA, 612 bp, Homo sapiens
tgggcaaatatggagtgcctaactctgggtatgggagtctgagaaagtttcccaaaggagaaggcagactcatagtatcagtgaaaaatgctttattaaaagtggctgccaaacggagagagagatctgccctctcagggagttggggtgatggtgggagtggtggtggattctgaaaagcttcacagaaaaattgatacgaaaggctttgcaggattatgaggggtgtgtaatcttgaaatgcagagggaaccagactggcaaatgtttggtagcacagaagtatacagcgcctttggtaaatgatgtgtagtacagtggctagaatgtaggtgtaggatggaagtccaatgtagtgcccgagtgtagagggctttgaattttatatgaaggagtctgactattacagcaggtacttgaataatgtcatttcgttcmgtatcatttcattgtaatgttgataagaaaaaacaatcaactcccagctggccacttcctgtgtgtcctttacacattctccccaggtccacatgggttttcactgggtactcccagtttcctcccacatctcaaagatgtgcccattatgtgaactatcatttctaaatagtc

SEQ ID NO: 449819 - DNA, 561 bp, Homo sapiens
gctaacctctgtaatgttgctatatgccagtattcagttactgtgtttgatgaatcataaaatggtgtgaagctttaattagtgttctttttaaataaaatgctatttatgaatgcatccatcaaaatgcttttgatttgggtattcacaaaatattagttttctgtggatctaacaataatgcaaaaatccaaaatgaatataaaatattagctaatatatatttcaaagtattctacaagtataaaaactrttgtatgacattactttcatatatgtaaaaaataatttttagtcaacataaacatactccttatatctaaacttgtattaattcatttaagagttaatatagtattgtaaagtcatcaaatatttaaaaacaaaatgtattttgacttagaatatacataaaattaactattttcagctgagtccagtggctcatgcctgtaattccagcactttgggaggccgaggcaggtcgactgcatgaggtcaggagtttgagaccagtctggccaacatggtgaaaccccatctctactaaaaatacaaaag

SEQ ID NO: 449820 - DNA, 561 bp, Homo sapiens
gctaacctctgtaatgttgctatatgccagtattcagttactgtgtttgatgaatcataaaatggtgtgaagctttaattagtgttctttttaaataaaatgctatttatgaatgcatccatcaaaatgcttttgatttgggtattcacaaaatattagttttctgtggatctaacaataatgcaaaaatccaaaatgaatataaaatattagctaatatatatttcaaagtattctacaagtataaaaactgttgtatgacattactttcatatatgtaaaaaataatttttagtcaacataaacatactccttatatctaaacttgtattaattcatttaagagttaatatagtattgtaaagtcatcaaatatttaaaaacaaaatgtattttgacttagaatatacataaaattaactattttcagctgagtccagtggctcatgcctgtaattccagcactttgggaggccgaggcaggtcgactgcatgaggtcaggagtttgagaccagtctggccaacayggtgaaaccccatctctactaaaaatacaaaag

SEQ ID NO: 449821 - DNA, 551 bp, Homo sapiens
ggtggagcgtgcctgttatcccaactactccrgaggctaaggcaggagaatcacttgaaccccagaggcagaggttgcagtgagccgagatcgtgccactgcactccagcgtgggtgacagtgagattccatataaaagtagtaataataataataataacaattttctgtgagtcccaagataaaatagcattacagaacactgaataatcctgagtttggttttcttggttgcattctgctttatatttagttttgttcaccttgaccagtgggcttgtggttcttaggtgcaacagggttttcatttttaggttcaagattttaaagctttaatgtggtaatttctctaatttttttgacagttatttctcaggttacaagttaaaataaaatttccatttcactgaagtctttggttcattaatgatttcatgacttaatatacaatgagtaataaggggtgctacaaattttcagaaatcaacactaaataacttactcatggaagcaaacactacctgtttcccaaacacctattaaaatacaaa

SEQ ID NO: 449822 - DNA, 551 bp, Homo sapiens
ggtggagcgtgcctgttatcccaactactccggaggctaaggcaggagaatcacttgaaccccagaggcagaggttgcagtgagccgagatcgtgccactgcactccagcgtgggtgacagtgagattccatataaaagtagtaataataataataataacaattttctgtgagtcccaagataaaatagcattacagaacactgaataatcctgagtttggttttcttggttgcattctgctttatatttagttttgttcaccttgaccagtgggcttgtggttcttaggtgcaacagggttttcatttttaggttcaagattttaaagctttaatgtggtaatttctctaatttttttgacagttatttctcaggttacaagttaaaataaaatttccatttcactgaagtctttggttyattaatgatttcatgacttaatatacaatgagtaataaggggtgctacaaattttcagaaatcaacactaaataacttactcatggaagcaaacactacctgtttcccaaacacctattaaaatacaaa

SEQ ID NO: 449823 - DNA, 618 bp, Homo sapiens
accagttctgtctcaaagcaatcaaacttcttgcatagcagctgtattcaccgagggcaagaatctcaagagaagcaggctaaagctgcatgacctttgatatcaaaagtgtaacttttaactttattcctctattcgaagttctcacaagctcaatcattgtcaaggatgagtatagacctcactttttgattaatygttctttgccaaaagggaggaaagaccatatcaacagagtttcatatgatctccactttttattgttcaagtctgctaatggatggcggaaagtttattttttaaatgtatagtaaaaatatctaagctgtaacttggcacatatttcagtagaaacgtaaatgttataacctttataaaagttatggcttgatttatgcaaacagatttgggcttgttatttttaagacttttgtgtaaatttatacttaatatacacaattggctcttggtatgttctgtaaatgtgagtagacacctagattcatcctgaggcaggtcctcagtatgtaggcattagagagcaagtatatatcaaacagtcactcaaaacaaatacaccttaaccagctttgaagagaatactattgtttaagagct

SEQ ID NO: 449824 - DNA, 605 bp, Homo sapiens
taagagctgatagggttataacaaaaaacatttttttctcttgagtagcttatatcttagttttgtggaagaaaatgtaaaaattcaaagatatataaagcaaatgacaggcaatcatttctgtagtggatcagtgtagagaaaaaggtccttttggtaaaaaatgtaataggttatttaaattcctaatgttagatgctgtaaatgtgaagcaaatttcytaaagaactgcatggaacatgtttctttacttttatgttgagagtccctcatcagcttgtgacccagaacagcttttaaaataatctctatgagaaagccaaggtttacgtgcttctcatctgagaggtaagtaatgcattatccatcacaaccctatatagtgcttggtggtcattggagatatagtgaaggcaaaggtccatttgcctagctgaattttagaatgttccacatgccttgtgacacaagttttcttgaaactcagcacaaagaataaacacagtattgcaattcctttggtttccaatgtcattatcattgtaataacctaaggtttataatgagcaagtgtgacaatcagcaaatcatttaaatgtgctatc

SEQ ID NO: 449825 - DNA, 521 bp, Homo sapiens
tggaaaataggtattttaatatgtaaaagaagagacattgttaaaataaattcttaaaataattcttactctcacataattagtctttgaataagaattctgaacttcgtagtttaataattaagcatatgactggcatctttaaattttttcttagcaaaaaaacgcatatttgcggtattttattccattttttcagtttgtagattaccatgaagcttgcaaatactattttataactcgttattttaacctgataacaacttaacactttttgcataaacaaataagcaaaaagaaaatgaataaaaactctatgtcctaactctgtccccccactttttaaattttgttgtttctatttatatcttattgtactgacagtgtcttgaaaagttattgtagttattatttttgattgattcattgtttagtcwttatacttagaataaaagtagtttacacaaatcagagcagcaataaatgagactgaaatggaaaaaaatcaataaaacaaaatg

SEQ ID NO: 449826 - DNA, 620 bp, Homo sapiens
gaacataacttcctatgaaatccttcctggctaattcaggaagtcatgggargtgccatctctttcatctgctcccctctgtcttctagttttacttactttaatactcacaattccctgcaagcatgctcttctgtgctatttatttttcctatttccaataatggatgcatcgctcaagttggttctctgacatttcgcttaatcttaagtaggttataatattgaagacccaaatagtcttcaagaccttatattgaccatataaatatactctgcataaaaaaggctacatatattcttatatccaaaatttcccagatttctgcatcctaaattctctgtttccatctcctcacatgggcatttagtaatacaggaacgaaactctccttccacttttgaaattattgttattagggctctacagatttctaaaggaaagtaagaatatttaaaaggtcatttatgaaaagctcacagctatcatcacaatcaatggggaaaaagtgaaagcttttcctctaatacctggtatgaggcagggatgcccactatcaccatatccactcatcatagtactggaagaactagccagagtaatcaaacaagaaaaagaa

SEQ ID NO: 449827 - DNA, 630 bp, Homo sapiens
ggttctgtttggacattattggtatatagaaatgctagttatttttgtacattgattttktatcctgaaactttgctgaaatttttttaccaagtgtatgaggctttggcagagactatgagtttttctatggagagaatgatattgccttgaagagacaagagtttgacttgctctttttccatttggatgccttttacttctttctcttgcctgattgatctggctaggacttcctgtaataagctgaatagatgtggtaatagtaggtgttcttgtcttgttccggatctcaaggaaaatgcttccagctttttcccattcaatatgatgttggctgtgggttgctcatagctattattattttattataaaatagctattattattttaaatatatttctttgatatctaggtcgttgagactttttaacatggagggatgcttacttttattaaaagccttttctgcatctattgagatgatcatgtgatttttggttttagttctctttatttgctgaatcacattgcttgatttgcacatatttaaccaagcttgcataccaggcataaagcctacttgatcatggtggattagctttttaaagtgctgccggatttggcttg

SEQ ID NO: 449828 - DNA, 630 bp, Homo sapiens
ggttctgtttggacattattggtatatagaaatgctagttatttttgtacattgattttttatcctgaaactttgctgaaatttttttaccaagtgtatgaggctttggcagagactatgagtttttctatggagagaatgatattgccttgaagagacaagagtttgacttgctctttttccatttggatgccttttacttctttctcttgcctgattgatctggctaggacttcctgtaataagctgaatagatgtggtaatagtaggtgttcttgtcttgttccggatctcaaggaaaatgcttccagctttttcccattcaatatgatgttggctgtgggttgctcatagctattattattttaktataaaatagctattattattttaaatatatttctttgatatctaggtcgttgagactttttaacatggagggatgcttacttttattaaaagccttttctgcatctattgagatgatcatgtgatttttggttttagttctctttatttgctgaatcacattgcttgatttgcacatatttaaccaagcttgcataccaggcataaagcctacttgatcatggtggattagctttttaaagtgctgccggatttggcttg

SEQ ID NO: 449829 - DNA, 540 bp, Homo sapiens
ctaagacagttgttagtttcaaactatgttctgatcatagtttcctggtgacatgctaggagtatttaatactaaaagaatgactatgcacgttgactcatccactttgagaagataaaacaactgaaacattaattttatgctaataataaatgacacctaatatgtcatggaatgaaatgcaatctgcctgcattttctaaaataagacatagtggtcaaaaatactctttaccaatagtagaaacttcaaactacacctttaaatggtcagaacatgcattcacttagcttttagaggcacttcaataaaaacattttaaaagcacaaaattaatgggttatatttcaatttgttattcattttataaccactttaaacattattgaggtggcatatggcaacatattgtrcaatatgactctaaatgtagatttagaaattttaaaaatggagattaagttaaaaataaataaggcaaaagcccagattaatatgtttattaaaagttgaaattataattgactctgagtttcata

SEQ ID NO: 449830 - DNA, 618 bp, Homo sapiens
actttgagaagataaaacaactgaaacattaattttatgctaataataaatgacacctaatatgtcatggaatgaaatgcaatctgcctgcattttctaaaataagacatagtggtcaaaaatactctttaccaatagtagaaacttcaaactacacctttaaatggtcagaacatgcattcacttagcttttagaggcacttcaataaaaacattttaaaagcacaaaattaatgggttatatttcaatttgttattcattttataaccactttaaacattattgaggtggcatatggcaacatattgtgcaatatgactctaaatgtagatttagaaattttaaaaatggagattaagttaaaaataaataaggcraaagcccagattaatatgtttattaaaagttgaaattataattgactctgagtttcataggttccaagaaaaaggaagataagaagagagattctaaactggcatgacttctaaatataaacatgacttatctggtggaaaacatgttactaggtcttaatttgaaaatgaattttcaagtaccaagcatcaattttaggtgatacccaataaaatccaagggaatcatattaaaatatt

SEQ ID NO: 449831 - DNA, 552 bp, Homo sapiens
tttctttaattatggagtggaataatcactaggtattccagaaaaggaggagattttagaraccccaagttactgatccctttctctcttacttgagtttgcctggaagagacagagacatgtcactgtgaccaggggttgggccatcttatctgtcttattttggattttctcatcttgtagtttctttgcttagtttttgttttagctgtttaggtttttctacccgcctgcaaccaaccacccagtactactcttgtctcaatgtgactggctgtataaaaagaggacatttgaacccatagagcctccagtatatatactaatagaaaaaaaaccaagagaagacacagcaaacaggcagctatcagcaagccaaggagcgaggcttcagaagaaaccaaactttctgatactttgattttgaacttctcacctccctaagtgtgagaaaataaatttctcttatttaagtcacacattctctagtatttggttatggctgttcaagtgagataaagcacttggtaaatgaagctgatagtatctgtg

SEQ ID NO: 449832 - DNA, 552 bp, Homo sapiens
tttctttaattatggagtggaataatcactaggtattccagaaaaggaggagattttagaaaccccaagttactgatccctttctctcttacttgagtttgcctggaagagacagagacatgtcactgtgaccaggggttgggccatcttatctgtcttattttggattttctcatcttgtagtttctttgcttagtttttgttttagctgtttaggtttttctacccgcctkcaaccaaccacccagtactactcttgtctcaatgtgactggctgtataaaaagaggacatttgaacccatagagcctccagtatatatactaatagaaaaaaaaccaagagaagacacagcaaacaggcagctatcagcaagccaaggagcgaggcttcagaagaaaccaaactttctgatactttgattttgaacttctcacctccctaagtgtgagaaaataaatttctcttatttaagtcacacattctctagtatttggttatggctgttcaagtgagataaagcacttggtaaatgaagctgatagtatctgtg

SEQ ID NO: 449833 - DNA, 552 bp, Homo sapiens
tttctttaattatggagtggaataatcactaggtattccagaaaaggaggagattttagaaaccccaagttactgatccctttctctcttacttgagtttgcctggaagagacagagacatgtcactgtgaccaggggttgggccatcttatctgtcttattttggattttctcatcttgtagtttctttgcttagtttttgttttagctgtttaggtttttctacccgcctgcaaccaaccacccagtactactcttgtctcaatgtgactggctgtataaaaagaggacatttgaacccatagagcctccagtatayatactaatagaaaaaaaaccaagagaagacacagcaaacaggcagctatcagcaagccaaggagcgaggcttcagaagaaaccaaactttctgatactttgattttgaacttctcacctccctaagtgtgagaaaataaatttctcttatttaagtcacacattctctagtatttggttatggctgttcaagtgagataaagcacttggtaaatgaagctgatagtatctgtg

SEQ ID NO: 449834 - DNA, 601 bp, Homo sapiens
aattcataatcaaaataatgaaggtgaaaccttctattagaaaatgatacrttctttagattgagacactgaactgtaaccaactacgaaaacagaatgtcctaatgaagctaaagttgtaagattaattgctcccttatattcactgttaatgaagaataacaattgacttgacaagctaattattataatatcctaggcctacagtatgtaataagagttataatgtaccagtcaatcaaaatcattcacttctgttattgggcttgaaatcctcaactttgtttgtcttgttaactaaatgacatatgaaagttactaaaggtgttattcttaagaaaatagaagcatgaaatattctgcacatggttctattgcaattgacgttgtaaaatggttttgggtacattgaacatgcattctttccaactttataattatattagcatgaggcatattgaaatggaaattttgataagatacaataaatcttagtgcattcttaatgttagatggtatgggcttttatatagactcaagggagattagataaaatttaaaatataaacctctaataaaatgtatgttggaggatattatg

SEQ ID NO: 449835 - DNA, 601 bp, Homo sapiens
aattcataatcaaaataatgaaggtgaaaccttctattagaaaatgatacattctttagattgagacactgaactgtaaccaactacgaaaacagaatgtcctaatgaagctaaagttgtaagattaattgctcccttatattcactgttaatgaagaataacaattgacttgacaagctaattattataatatccyaggcctacagtatgtaataagagttataatgtaccagtcaatcaaaatcattcacttctgttattgggcttgaaatcctcaactttgtttgtcttgttaactaaatgacatatgaaagttactaaaggtgttattcttaagaaaatagaagcatgaaatattctgcacatggttctattgcaattgacgttgtaaaatggttttgggtacattgaacatgcattctttccaactttataattatattagcatgaggcatattgaaatggaaattttgataagatacaataaatcttagtgcattcttaatgttagatggtatgggcttttatatagactcaagggagattagataaaatttaaaatataaacctctaataaaatgtatgttggaggatattatg

SEQ ID NO: 449836 - DNA, 601 bp, Homo sapiens
aattcataatcaaaataatgaaggtgaaaccttctattagaaaatgatacattctttagattgagacactgaactgtaaccaactacgaaaacagaatgtcctaatgaagctaaagttgtaagattaattgctcccttatattcactgttaatgaagaataacaattgacttgacaagctaattattataatatcctaggcctacagtatgtaataagagttataatgtaccagtcaatcaaaatcattcacttctgttattgggcttgaaatcctcaactttgtttgtcttgttaactaaatgacatatgaaagttactaaaggtgttattcttaagaaaatagaagcatgaaataktctgcacatggttctattgcaattgacgttgtaaaatggttttgggtacattgaacatgcattctttccaactttataattatattagcatgaggcatattgaaatggaaattttgataagatacaataaatcttagtgcattcttaatgttagatggtatgggcttttatatagactcaagggagattagataaaatttaaaatataaacctctaataaaatgtatgttggaggatattatg

SEQ ID NO: 449837 - DNA, 560 bp, Homo sapiens
gtggcgcacacctataaccccagcactttagggggcagaggaaggtgtatcacctgaggtcaggagtttgagaccagcctgactaacatgatgaaaccccatctctactaaatacaaacaattagccaggggtggtggcgggtgcctgtaatctcagctacttgagtggctgaggcaggagaatcgctttaacccaggaggcagaggttgcagtgagccaagatcgagccattgcactccagcttgggcaccaagartgaaacttcgtctcagaaaaaaaaaaaaaaaaagaaaagtaaaagaaagccattatttggagggtaaatgtagctaaaactagataagattgtctagaaatacctttaatttgagatttataagttgtgatatcccaataacactaaaaaacttattagtgagtatgagcctctgaaactcttgagtggtagatctttcttctttaatcagaattcctctcatcaagtgacatatttgacacaggatcatctgacataataactatgggggttttcagtgtgaagtcttctattaattataca

SEQ ID NO: 449838 - DNA, 410 bp, Homo sapiens
ggtaaatgtagctaaaactagataagattgtctagaaatacctttaatttragatttataagttgtgatatcccaataacactaaaaaacttattagtgagtatgagcctctgaaactcttgagtggtagatctttcttctttaatcagaattcctctcatcaagtgacatatttgacacaggatcatctgacataataactatgggggttttcagtgtgaagtcttctattaattatacacgaactttaacttttaaaaatacatatatagggagagatattgatattgtatattctgtcctcatttcagtggacgttctcatagtctctagaatgcactgactccacgtggagagcactgctctaatgtaagcttcttggccttgtcacaaggtcagtgatgtgaatg

SEQ ID NO: 449839 - DNA, 594 bp, Homo sapiens
atctcttgttgtgtttttacagttctgatcacaaatgctyatttataataaagagtattaatttaaagcaaatgattagattatactcacataaaataaggcctatattttattactgaaaagcattctattattgaaaaggctttttatggtagagaaatagagatttaggatggcagaccatcttcttcaacctaaattgacgattataaaacatatattaagtgcaaaaaatggagctgtaatttcaaatataagtgattcaaaacaaagtgaatttgacggactttgtgctttgttcatttttatttttactcctcctttaagcagcattctcaactctcacattgcatgtccaagtacttccatttttaaatgctgcattattatatatgttgatgttggaaatctattttatttgagtgcctgaaagtaatttaagagccagaaattaatgatagaggccaaattcttcaaaatagattattataaaaagaagagattcctactacaaaaaagtcactattttctattacaactaggactaaaggaaacattttttcatcaaagcagaatcacatatgtatttaaagc

SEQ ID NO: 449840 - DNA, 514 bp, Homo sapiens
catttgtggtagtgctgtgattatctactacacagccattcccaaataatttttttccatgtatgtctcccacaayagagattaaaagtgtcagctttcccaacctctttcttaactaagaacatggcctagacgtggccagtgaaccacaaaggaaatcttctggagctgcagggcaaagatctttacctgcagtttccaagcccatttttttcctgctttgctacattgccccgtgaacatgtggtgcttagagagacattgcatcaaacagaataagattaaacaaaagaatcagaaaacattgggtccctgctgtcattctctagttactgaaggaacttttggattacctgccttctaatgtcctgagtcataatagtgcttatggtttaatcaattttcagttgggttttctattactagccaaaaaagcatcccaagtgactcaaatgttagatgaattactaaaggtagctacttctttatatatcatctgattgtttctagtctt

SEQ ID NO: 449841 - DNA, 538 bp, Homo sapiens
tcccaacctctttcttaactaagaacatggcctagacgtggccagtgaaccacaaaggaaatcttctggagctgcagggcaaagatctttacctgcagtttccaagcccatttttttcctgctttgctacattgccccgtgaacatgtggtgcttagagagacattgcatcaaacagaataagattaaacaaaagaatcagaaaacattgggtccctgctgtcattctctagttactgaagraacttttggattacctgccttctaatgtcctgagtcataatagtgcttatggtttaatcaattttcagttgggttttctattactagccaaaaaagcatcccaagtgactcaaatgttagatgaattactaaaggtagctacttctttatatatcatctgattgtttctagtcttgtatttggtagtttcaaaacaagttagaatttaagtttaatcttttaaacttgttggtgaattataacccacttatcttcaaatgctggacattttttcatttaattctttttttttcagg

SEQ ID NO: 449842 - DNA, 615 bp, Homo sapiens
gagatttttcttttaaattattcagtccttatgtaattttattaattatakttagactaaaggataacatgtgttagaatgatggtatagaacacacatctggttatatatccagctagctacatatacacatgtaaacataaatggatagatcatctgcatgttttgagcatatttaacataatatctatgttaagtatattagtttatttaaccctcaaaattgttatatgcagtatcataattggcaccttacaaattaaaactgaaatttaaaggtgtattgtctcctaaaatcataaagccagcaaacgatggagtcagggtttgatcccattcagcctgacttggcctacatacttaatcattgcattgtacacaccaaataatcggagaaagtttactttctgatattactttctagccccttctcactaaggaggtatcaatctttaaccagtggataggagattagtcttggtttggccatatttgaaagtaattatttaatgtaaacttaaaaatgagtttcaaagatttatacaagttttgagaagtgaagaagcccgatagtagttctaatctttagtttccagattatttcttctttttttt

SEQ ID NO: 449843 - DNA, 615 bp, Homo sapiens
gagatttttcttttaaattattcagtccttatgtaattttattaattatatttagactaaaggataacatgygttagaatgatggtatagaacacacatctggttatatatccagctagctacatatacacatgtaaacataaatggatagatcatctgcatgttttgagcatatttaacataatatctatgttaagtatattagtttatttaaccctcaaaattgttatatgcagtatcataattggcaccttacaaattaaaactgaaatttaaaggtgtattgtctcctaaaatcataaagccagcaaacgatggagtcagggtttgatcccattcagcctgacttggcctacatacttaatcattgcattgtacacaccaaataatcggagaaagtttactttctgatattactttctagccccttctcactaaggaggtatcaatctttaaccagtggataggagattagtcttggtttggccatatttgaaagtaattatttaatgtaaacttaaaaatgagtttcaaagatttatacaagttttgagaagtgaagaagcccgatagtagttctaatctttagtttccagattatttcttctttttttt

SEQ ID NO: 449844 - DNA, 514 bp, Homo sapiens
cagggtctttctgtgactgtgttgaaagaacctcttctgtcttatagttttagggctaagatcactgaaaaaaacaacttcagagattaattttgtactgtgctgaattaagtcagtcaaatttacaacctttttagctctctcatgtaaagttcaggcacagctctagaactaatatagccccaacaattggaagcattagagtgcaatatatgggaaaataagatcagttggagaactctgatccctcaaatccttgtgatatatccccttatagaaagaatccatcttctcttgcaagagacatcaaataatctttgtatggagaacsttgtagccaaaatcaggaatatatacagatactgaaatacagaattcaaatagtgaagctaatagtcccagaaggatttatgggaatttgttaatttctatacttaaagcccggaaattatttgtaagattggattttgagaatgcttagtcaaggaggggtctggggattatgattttggat

SEQ ID NO: 449845 - DNA, 514 bp, Homo sapiens
cagggtctttctgtgactgtgttgaaagaacctcttctgtcttatagttttagggctaagatcactgaaaaaaacaacttcagagattaattttgtactgtgctgaattaagtcagtcaaatttacaacctttttagctctctcatgtaaagttcaggcacagctctagaactaatatagccccaacaattggaagcattagagtgcaatatatgggaaaataagatcagttggagaactctgatccctcaaatccttgtgatatatccccttatagaaagaatccatcttctcttgcaagagacatcaaataatctttgtatggagaacgttgtagccaaaatcaggaatatatacagatactgaaatacagaattcaaakagtgaagctaatagtcccagaaggatttatgggaatttgttaatttctatacttaaagcccggaaattatttgtaagattggattttgagaatgcttagtcaaggaggggtctggggattatgattttggat

SEQ ID NO: 449846 - DNA, 441 bp, Homo sapiens
atttttgttttcacaaactaccataaatcaaattaattagacgacatgtttccagtaaccagcatacctgaatttgaataatagtttagtttttaagacatgaaatatctatttataaaaaaagtcagttcagagagacgtggagtaaaatggcagagtgagactctccaaaatcatccactgacagaatcatcaatttgaacaactatccatgcatgagaaaacctycataagagctaaggaaacaagatgtgagttcacagtacctggtttaagcataataatgagtaaagattcattgaagaagttttacattagctatgtcacccctgccccaaccccaggcagcacagcacagatagacaccagctgcctgtggagaaggaaataaaaataaaccaggacttcgccttggaatcagtagaggccccactgctgtaa

SEQ ID NO: 449847 - DNA, 622 bp, Homo sapiens
gtgatgtaggcaccacctgaaaaaaaattcaaaataactgttttatggaaactatgcaaatatgaataaaataaaaagaatttataaatttatcaaataaattttacagagattaaaataatttttttaaaaaataacaaattttaaagctaaagaatacatgaacaaaataaagaaattgaatgcagagcatcaacagcacaattgatcaagcagagaaaataatttgtgaactccaagacaggttaattgaaaacaaacattcatagaagaaaaattaaaaaggaataaagaaagcttatggcatttatgtaataacaataacaagggcaaatgtatgggttattggtgatcaagaggaagaagagaccaaagcataggaagcttmtttaaagaaaaaacaaaaacctttcaaacccagccaaagatgtaaattccaggtacaagaaggtcaaaggttttcaagcagattcaatccaaataaaattttacccataatgtataataatcaaaatgtcaaagatcaaagacaaagaaagaatcctgaaaacattaagagaaagaaagcaaatatgcctaacagcagaagcagatttctcagtagaaaccttattggccagga

SEQ ID NO: 449848 - DNA, 560 bp, Homo sapiens
tttccaatattttcttctaaagtttttattactttagctttcacatttagacccatgattcatctaaacaaatgcttttgtacagtataagatagaggcttgatttcattctttttcactcaaagatctagatgttcttcactctttctttttttactcactgtagcctcaacctcctgggctcaggtgatcctcagacctcagcctcctgggtaactggtactacaggtgtgtgccaccacacctggctaattttttggcagttttaaaagattttgtagaaatgaagttttgccatgttgcccaggttaytctccaactcctggggtcaagctatttgctggccttgggctcccaaagcccttatactttcttatcttgccttatactggttggatctgaaaatacaatgccaaacgaaagtggtaaaagcaaatatcctttcttgtgtctgtatctctttgttaagccattactttagactcttgttttttatgtgaattaaagaaagaatgcttccttatcaattccacttcatctttacccttatacattatttc

SEQ ID NO: 449849 - DNA, 560 bp, Homo sapiens
tttccaatattttcttctaaagtttttattactttagctttcacatttagacccatgattcatctaaacaaatgcttttgtacagtataagatagaggcttgatttcattctttttcactcaaagatctagatgttcttcactctttctttttttactcactgtagcctcaacctcctgggctcaggtgatcctcagacctcagcctcctgggtaactggtactacaggtgtgtgccaccacacctggctaattttttggcagttttaaaagattttgtagaaatgaagttttgccatgttgcccaggttactctccaactcctggggtcaagctattygctggccttgggctcccaaagcccttatactttcttatcttgccttatactggttggatctgaaaatacaatgccaaacgaaagtggtaaaagcaaatatcctttcttgtgtctgtatctctttgttaagccattactttagactcttgttttttatgtgaattaaagaaagaatgcttccttatcaattccacttcatctttacccttatacattatttc

SEQ ID NO: 449850 - DNA, 609 bp, Homo sapiens
acctaatgtaaatgaagagttaatgggtgcagcataccaacatggcacatgtatacatatgtaacaaacctgcacattctgcacatgtaccctagaacttaaagtataataaaaaaaattgcytgtcttatatctcatcatattttttttctctttttccttaccactaccttctctaacttcccggtattcagtgtaaggtaattactctactgttttctcagtgtaatactactattccatcttttctgaatcagcaggtcacatgcctaaaatgtcatttatttatttattcatcaaagaacactgcatcaatcgtttagtcaactactaggtattgaaagtctcactaaatcccacattgagctaggaaaaaatggggccaaaaaagaaagaaaggaaatacaaagagaaaatctccctattaaagtatttcgacttacaaaacatgaaatctatgcctgtcagaatatatgactttaaaatttcatgtgaatttttgaaagcttttgccttatcaacttttgctcattataaaaattgtgggttttaaaaaatatttgttcttgacaatattgcttctaaatggtcctgtcttcctacaatgaa

SEQ ID NO: 449851 - DNA, 609 bp, Homo sapiens
acctaatgtaaatgaagagttaatgggtgcagcataccaacatggcacatgtatacatatgtaacaaacctgcacattctgcacatgtaccctagaacttaaagtataataaaaaaaattgcttgtcttatatctcatcatattytttttctctttttccttaccactaccttctctaacttcccggtattcagtgtaaggtaattactctactgttttctcagtgtaatactactattccatcttttctgaatcagcaggtcacatgcctaaaatgtcatttatttatttattcatcaaagaacactgcatcaatcgtttagtcaactactaggtattgaaagtctcactaaatcccacattgagctaggaaaaaatggggccaaaaaagaaagaaaggaaatacaaagagaaaatctccctattaaagtatttcgacttacaaaacatgaaatctatgcctgtcagaatatatgactttaaaatttcatgtgaatttttgaaagcttttgccttatcaacttttgctcattataaaaattgtgggttttaaaaaatatttgttcttgacaatattgcttctaaatggtcctgtcttcctacaatgaa

SEQ ID NO: 449852 - DNA, 681 bp, Homo sapiens
accaacatggcacatgtatacatatgtaacaaacctgcacattctgcacatgtaccctagaacttaaagtataataaaaaaaattgcttgtcttatatctcatcatattttttttctctttttccttaccactaccttctctaacttcccrgtattcagtgtaaggtaattactctactgttttctcagtgtaatactactattccatcttttctgaatcagcaggtcacatgcctaaaatgtcatttatttatttattcatcaaagaacactgcatcaatcgtttagtcaactactaggtattgaaagtctcactaaatcccacattgagctaggaaaaaatggggccaaaaaagaaagaaaggaaatacaaagagaaaatctccctattaaagtatttcgacttacaaaacatgaaatctatgcctgtcagaatatatgactttaaaatttcatgtgaatttttgaaagcttttgccttatcaacttttgctcattataaaaattgtgggttttaaaaaatatttgttcttgacaatattgcttctaaatggtcctgtcttcctacaatgaatatttgcccatcttacgtaataaaaaggaaaataagcttaaaaagctaaaagaaaggtaaaccagaaagacagtaatatttgattttttttaaaataaggaaaaatt

SEQ ID NO: 449853 - DNA, 629 bp, Homo sapiens
aatctttttgtgttgagccaagatttcttaggacaacacaacccccaacccccaccaacccataaaagaaaaaattataaatggacttcataaaaattataaaattcccgttctttgaaagatattattaaataaatgaaaagataaaaaaacttggaaaaaatacttgcaaaatgcctatgtgataaagctttgtatccaaaatatataaagagcatttgcaactcagtaaaaagaaaacaatccaacagaaaatgatcaaaagatctgaagaggyacttcagcttttattaatgatgactgaaattaaagatgaactattttttttctgggcatttatttagtaaatactggtgattgaagttccatccagatgtggttatttttgctataataaatgtccttttatggttattctctggaatgtgtaataaaaagtgatttgcttgagaatggctcatttttcactacaagtaaataattaacaaaatttatagattttgttaaatacttatactttaaagtataactaattggaaacaccctatacagagcgtggactagctttgttattccttccttgacaaggaattttagcaaacattctatggaaaggataattagcaaga

SEQ ID NO: 449854 - DNA, 564 bp, Homo sapiens
tgagtttttgtttttaaatcaaattagaattggcattgtcagctctaggctctcatctacatttagtaaataatagattaggatcactttttttcacttcacaattatatrattatattccattatgatttgactgtagttatccatggtttaaatcaatcatgaaaaacattattttatctaaatatcataatgtataggaatatgcatttgttctatgtacacacaggaaagtacatcaggggatactctaagaaatttaagcctcaggccaaacctgggaaattcaagcctcaacctcaacctaagaccaattaagtaaattatttatatcattggctaaagtataagggagctaacctagtttaaggccatccagtgaaagatcaaatgctaaatgagattatttactgattaccaaaaaactatcatgttaattcagtaaagatctcataatcaaatacattatcaatggtacttctggaaaactgcctttggtgatcacagatattaacctgaacccaaatataccctaagtaacgtactaacaacctacttcatacc

SEQ ID NO: 449855 - DNA, 564 bp, Homo sapiens
tgagtttttgtttttaaatcaaattagaattggcattgtcagctctaggctctcatctacatttagtaaataatagattaggatcactttttttcacttcacaattatataattatattccattatgatttgactgtagttatccatggtttaaatcaatcatgaaaaacattattttatctaaatatcataatgtataggaatatgcatttgttctatgtacacacaggaaagtacatcaggggatactctaagaaatttaagcctcaggccaaacctgggaaattcaagcctcaacctcaacctaagaccaattaagtaaattatttatatcattggctaaagtataagggagctaacctagtttaaggccatccagtgaaagatcaaatgctaaatgagattatttactgattaccaaaaaactatcatgttaattcagtaaagatctcataatcaaatacattatcaatggtacttctggaaaactgcctttggtgatcacagatattaacctgaamccaaatataccctaagtaacgtactaacaacctacttcatacc

SEQ ID NO: 449856 - DNA, 590 bp, Homo sapiens
tgtgttttctgactgcaaagatgcttgttcagtctgaagatttttaatatgctctgtaagctcttcctttatcaacttcagataactgactataaatttggtttctttctscttgtaaggtttttaaagaagcatttaacttagcagcataaatcagtttcttcagagctcctttcggaggattatctaagtaagcaccattttccgattcactgttcatttctaattccaagttaccatcatccgttatgtcttctccaagcatagcagcctgatctttcatttttagcaagcgttcagagtcttgatgtgattttctttatcatttagaacttgttctgcatgtactttggagtcttcaaatgttattttctgtttattaagttcactcacttgttctttccatacctcagcttcttgcaaaagctgtctctcgttttcctggagttgagaattttcattcaaagcatcttttattgctatcttcagtcgttcttcattcatttgaaatatcgtcaagttcattttggcttcagctacttgtcatttgagggattttgactcatcttctagagactgtatccttttgc

SEQ ID NO: 449857 - DNA, 590 bp, Homo sapiens
tgtgttttctgactgcaaagatgcttgttcagtctgaagatttttaatatgctctgtaagctcttcctttatcaacttcagataactgactataaatttggtttctttctccttgtaaggtttttaaagaagcatttaacttagcagcataaatcagtwtcttcagagctcctttcggaggattatctaagtaagcaccattttccgattcactgttcatttctaattccaagttaccatcatccgttatgtcttctccaagcatagcagcctgatctttcatttttagcaagcgttcagagtcttgatgtgattttctttatcatttagaacttgttctgcatgtactttggagtcttcaaatgttattttctgtttattaagttcactcacttgttctttccatacctcagcttcttgcaaaagctgtctctcgttttcctggagttgagaattttcattcaaagcatcttttattgctatcttcagtcgttcttcattcatttgaaatatcgtcaagttcattttggcttcagctacttgtcatttgagggattttgactcatcttctagagactgtatccttttgc

SEQ ID NO: 449858 - DNA, 413 bp, Homo sapiens
tatttaataagagaaggctgtttttaaaagaagatacattwaaaaaggaaaaattattatacatctgaaatgggatcaatactactttatttgtttaaacatttctactctagagtattttgaaagaaaatgtggattctccctaaggctcagttccaatcagttgatatgaataacacacagtatgtgggaatatactattcttgcagccatgtttatacatgtatatatacttataattacacacacacacacacacacattctataaagtgcaaagcctctctgagggccatggctttttacatacctcatataacttctctacctaaaacttcttgaactgttccaattagaactgcttgttccccattttgcttttacgatgccttggcctccttaaccatgggtttt

SEQ ID NO: 449859 - DNA, 463 bp, Homo sapiens
  misc_feature (1)...(463): n = A,T,C or G
atgcatattactaaaagaagccaatcygacaagatgatatactatatgattccaactacatgacattctggaaaatgcaaaactatgaagatagtaaaaagatgaagagttatcagagatgcagttgtagaggagggatcaataggtggagcataaaggattttcatggtagtgaaactgcttctctgtatgatactaaaatgtccaaactcataggatgtacaacaccaagaatggacctncatataaacaatagtctccaggcgataattgatgggtcagtgtaggttcatcagttgttaacaaatgtaccactctggtggggaatattgataatggaggaggctatgcatgtgtggngggcaggatatatataagaaaatataccttcttctcaattttactgtgaacctgagatgtgcctgcaaaattaattctttaaaatctatgaagatggaaatga

SEQ ID NO: 449860 - DNA, 587 bp, Homo sapiens
ttgtcttttacacattagggggattagaacagatcatgccgagaggcatttcagctctaactgttaacgcttaaggttcttgcctagccacgccaaagaactggtgtggcggctgaccgtggygagtgatagagacaggggaccgagggcaagaaaaagctgtaggctttattgagccaagtgaaagtacaaagcttccacagtgtggaaggggtctcgaatgggtagccagagttagattatacaattgccttttaaactccttaaggccagaaatatgtgtggcgggaagatgttactagagcgagaaacaaaggcagtaaattattttgtgacatgtcttagattttgaggaaaaccggaattgcaacttaggttttatctactttataaccctgcagtggcatggcaaaggagacaggatcttacaggactttataaagtatgtttacaaggaattggaattgggagcatagataagttctgctggtcacagaaaaatgggcagttaacattccttttagttttgggggaaggtaagggagagaggacacagggaagcttacagcaaaattttctctgtttat

SEQ ID NO: 449861 - DNA, 587 bp, Homo sapiens
ttgtcttttacacattagggggattagaacagatcatgccgagaggcatttcagctctaactgttaacgcttaaggttcttgcctagccacgccaaagaactggtgtggcggctgaccgtggtgagtgatagagacaggggaccgagggcaagaaaaagctgtaggctttattgagccaagtgaaagtacaaagcttccacagtgtggaaggggtctcgaatgggtagccagagttagattatacaattgccttttaaactccttaaggccagaaatatgtgtggcgggaagatgttactagagcgagaaacaaaggcagtaaattattttgtgacatgtcttagattttgaggaaaaccggaattgcaacttaggttttatctactttataaccctgcagtggcatggcaaaggagacaggatcttacaggactttataaagtatgtttacaaggaattggaattgggagcatagataagktctgctggtcacagaaaaatgggcagttaacattccttttagttttgggggaaggtaagggagagaggacacagggaagcttacagcaaaattttctctgtttat

SEQ ID NO: 449862 - DNA, 574 bp, Homo sapiens
tgcctcattgaccgctgggactacatgacagcagttggtatgtggtcacttgtttcgtatgatggtcttaccatttttcagtagcattacaactgacttctttaaaagtcttgccagactctttagtaaagcctaaactaatctcacctaatgtgattctggtaagataacatggaaatggcagtaatggcatgtgagatgcaaactttttctggaagtttctattgtttttcaaaggtatatagctttgttgataaaatgtaatcaaataaatcagaaaggagaaacgaacaatggcaacttctgtgtataaagagcttacttttytcattcttatcaattgctccccatttgattaatattggctattctcttgatttatttccttacttgggagaaaaaaggaagcacgctggttttttaaataaaatgttggccctataatgtatcagacttgatatgtagggcagtctttgtaaaaatattgtctctgcaaaatttctgattaatctatctttcctttgctgacctcaaaagacaacttatttataattctctggaggtttagaattac

SEQ ID NO: 449863 - DNA, 574 bp, Homo sapiens
tgcctcattgaccgctgggactacatgacagcagttggtatgtggtcacttgtttcgtatgatggtcttaccatttttcagtagcattacaactgacttctttaaaagtcttgccagactctttagtaaagcctaaactaatctcacctaatgtgattctggtaagataacatggaaatggcagtaatggcatgtgagatgcaaactttttctggaagtttctattgtttttcaaaggtatatagctttgttgataaaatgtaatcaaataaatcagaaaggagaaacgaacaatggcaacttctgtgtataaagagcttacttttctcattcttatcaattgctccccatttgattaatattggctattctcttgatttatttccttacttgggagaaaaaaggaagcacrctggttttttaaataaaatgttggccctataatgtatcagacttgatatgtagggcagtctttgtaaaaatattgtctctgcaaaatttctgattaatctatctttcctttgctgacctcaaaagacaacttatttataattctctggaggtttagaattac

SEQ ID NO: 449864 - DNA, 461 bp, Homo sapiens
gctaaacattcagtggcatattttataaataaaaccttgttttgtcacacatgacagaaatcatgtcttctgtgggttgagtgtggaaaggtttaggaaaattcacaatcaccttgtttgatcactgaagccagaagagacgagcacagtgtagcagctaagaacgaggacttcagcaccgtgttagatataattctgattctgactctggctctatccctaaataactttgcataatcttaggcaatttacttaacctctctggtcaatttcttcatttggaaaatgaggataataaaagtatgtatttcatgtgattatgtgctaattaaataaaataatgcatagaaagcacttaacatagtttctgacacatagtaattgttaaataaatggtttttattattaaacatttcatttgacttwtttccccaaactaaatattgctattttatctcatt

SEQ ID NO: 449865 - DNA, 561 bp, Homo sapiens
ttgcctaagccgctatcagtttactccttatttgctgaaattatttttcaagggctcatctaaacctgacttggaaactggtctaattgtcccacagaactgatatttgtggtttctttgaataaaaatagaaattgatcctcccagtcttaaaatctgaaaaggttacatttgtcatatctgagttcctttttcaggaaaccaaccatcagtcctccagatagaatcaaggagctgaaacttaccagatcactgcatctggacaatgagacaccagatccctcacccatcatgattgcctaaccaaccacctgcttcctgttgaccaacttctctttgttacccctccctaattcctgttttccacatatggtyacatttcttccctgctatataaacctctaattttagtcggtcagcaagacggaattgagactgatctcccagctccttggctatagtacctgattaaagccttcttccctggcaatattgttgtctcagggattggccttctgtacagtgatcagtaggacctagaccgaaaccctggcatttcag

SEQ ID NO: 449866 - DNA, 482 bp, Homo sapiens
tttttttttaagtaaattacccagtctcaggtatgtctttatcagcagtgtgaaaatgaactaatacactgtcatttgcatgggtattgtttggggagggaactggatatgggatcgcttgctactattatcaaagtgtctgatttttgatcttttatgaaagcctggtagctktgactagtgatctgccttccctcgggctgcatcactagaaattcacacatgctatttgaagtgctagctggcaggctaccacgaagactgctgtgggaggttatttatttattatttacattctgcctttgtggaaactgttttacttctttgaggcacagttatttgaataatgctaaagggcaaagagaaagtaaagcacttttcagaagaggtggtatacaaataagaactcccagttccatcattctgaagacactcaagcaagtgctttcagaagtatgtgtagtttttagtgatgtagccct

SEQ ID NO: 449867 - DNA, 482 bp, Homo sapiens
tttttttttaagtaaattacccagtctcaggtatgtctttatcagcagtgtgaaaatgaactaatacactgtcatttgcatgggtattgtttggggagggaactggatatgggatcgcttgctactattatcaaagtgtctgatttttgatcttttatgaaagcctggtagctttgactagtgatctgccttccctcgggctgcatcactagaaattcacacatgctatttgaagtgctagctggcaggctaccacgaagactgctgtgggaggttatttatttattatttacattctgcctttgtggaaactgttttacttctttgaggcacagttatttgaataatgctaaagggcaaagagaaagtaaagcacttttcagaagaggtggtatayaaataagaactcccagttccatcattctgaagacactcaagcaagtgctttcagaagtatgtgtagtttttagtgatgtagccct

SEQ ID NO: 449868 - DNA, 559 bp, Homo sapiens
ttcaacaaatattaagcatttaccctgagccaggcactgtgctaggtgctgctgatacaagatacaaaggccaggaagagggggaaaagagacatggaaataggaaattgcattcaagtaacataggtactgtgataaatatttctacaatttcagtgggaccacaaagaaacgagcggccaattccaggggagagtgaacagataacgtgcaagacactccactactcttcatatgctactgtgcagttttgagtgagtccttgtagaataagaattggtttgaccctgcctaagaaccttgcagtgctaaaggattaatactagtgaagagcacagactctcaatctttgctggagcagctggcctgaactgtttctgctaaaagcaaggtcgtaacagaaaatatgcccactgccaaaaccctgagtatgattttgtttttccctgccagagttgtgcatattgctgggggccatggrgtaggtactgacattttcttgctgatattttacaaatatagcccctctctctagcagtgccaagaatgaattacctaa

SEQ ID NO: 449869 - DNA, 540 bp, Homo sapiens
cttcacacttggagctagctgatctctacaacatcactacttccactaatctgatccctgcggtccttgcatttgctgaatcttctgactagatattccttgcacaacccccggctcacttgtacctggctttctcctgttcaccccttcaagcctcagcccaaatatcccttcctckagaaagaacatgcctcccctgtggcttagcacactggccctacttgttaatcatgtcttccctccagtaggctgcaggctccgtgacaaccatgggttttctcattcacttctgtgacattggcactagcagcgtcctggcacacagaaagtgctcagtaaatatttcttggatgaaaggaaaaataaagctatagggcaaaggcaaagaaggatgtaactaatatggtgagagggagaattcattcattcatggagatacaggaaagaagatgccaaatgaagaaaactgggcaacctgttatttgttgaggcaaaagggaatatagtgtcaaacataatgtaatattttaagcctgggtg

SEQ ID NO: 449870 - DNA, 540 bp, Homo sapiens
cttcacacttggagctagctgatctctacaacatcactacttccactaatctgatccctgcggtccttgcatttgctgaatcttctgactagatattccttgcacaacccccggctcacttgtacctggctttctcctgttcaccccttcaagcctcagcccaaatatcccttcctctagaaagaacatgcctcccctgtggcttagcacactggccctacttgttaatcatgtcttccctccagtaggctgcaggctccgtgacaaccaygggttttctcattcacttctgtgacattggcactagcagcgtcctggcacacagaaagtgctcagtaaatatttcttggatgaaaggaaaaataaagctatagggcaaaggcaaagaaggatgtaactaatatggtgagagggagaattcattcattcatggagatacaggaaagaagatgccaaatgaagaaaactgggcaacctgttatttgttgaggcaaaagggaatatagtgtcaaacataatgtaatattttaagcctgggtg

SEQ ID NO: 449871 - DNA, 594 bp, Homo sapiens
aacccctggccgtgggatttgacttgggaaaatactaaagcaccttgtatccgtctttttatgaactacatctctgctggacttgtttcatgcttgctggattgtaaattcctcaagggaagtgaatacattttcttttagtgagtatgacactttttatagtgatcrtaatgtaaatttggtggttagagtcccattttcttcaccagggagacaacgggcgggtcttaaagcacagcaaactgtgctgggtatctgattatatgcacagttattgtgccattgcatcatgactttcacgagtttgttgaggtttctgatttcctttttgtctctatactttaggaccccagagtaccccgtgtatcgaggccacttggtgccgcagtcagcggaatgcactttgctgaccctatttcttctaatctcagctatgatttgtgcaagccatagtttcagttgttcctattaactgttttttcttcctcactgcctcttattttttcctttcattgcttctttaatgatacttctcagtttgttgctactggaactagacttatcaacatcatctggtcacctcaggccttttct

SEQ ID NO: 449872 - DNA, 594 bp, Homo sapiens
aacccctggccgtgggatttgacttgggaaaatactaaagcaccttgtatccgtctttttatgaactacatctctgctggacttgtttcatgcttgctggattgtaaattcctcaagggaagtgaatacattttcttttagtgagtatgacactttttatagtgatcataatgtaaatttggtggttagagtcccattttcttcaccagggagacaaygggcgggtcttaaagcacagcaaactgtgctgggtatctgattatatgcacagttattgtgccattgcatcatgactttcacgagtttgttgaggtttctgatttcctttttgtctctatactttaggaccccagagtaccccgtgtatcgaggccacttggtgccgcagtcagcggaatgcactttgctgaccctatttcttctaatctcagctatgatttgtgcaagccatagtttcagttgttcctattaactgttttttcttcctcactgcctcttattttttcctttcattgcttctttaatgatacttctcagtttgttgctactggaactagacttatcaacatcatctggtcacctcaggccttttct

SEQ ID NO: 449873 - DNA, 594 bp, Homo sapiens
aacccctggccgtgggatttgacttgggaaaatactaaagcaccttgtatccgtctttttatgaactacatctctgctggacttgtttcatgcttgctggattgtaaattcctcaagggaagtgaatacattttcttttagtgagtatgacactttttatagtgatcataatgtaaatttggtggttagagtcccattttcttcaccagggagacaacgggcgggtcttaaagcacagcaaactgtgctgggtatctgattatatgcacagttattgtgccattgcatcatgactttcacgagtttgttgaggtttctgatttcctttttgtctctatactttaggaccccagagtaccccgtgtatcgaggccacttggtgccgcagtcagcggaatgcactttgctgaccctatttcttctaatctcagctatgatttgygcaagccatagtttcagttgttcctattaactgttttttcttcctcactgcctcttattttttcctttcattgcttctttaatgatacttctcagtttgttgctactggaactagacttatcaacatcatctggtcacctcaggccttttct

SEQ ID NO: 449874 - DNA, 633 bp, Homo sapiens
tgtgcagtgagcaagaaaaactcattgggcaattatagtagtatttaacctagtcaaattcagccaatgacttactaactcataattgcaacattmtgtttacacagtttttgtctaaagtcacaagtttatcagggagtttattgcaagcaactgttttactaaatattttgccagtaaatatgccaaactctagatatatttttcttgacacccactgaggcaaggtattgagagccaagttccaaaagaaaggatttgtggctgaaggcccagtaaatactgtatatatgtacatgcagtagttatgattaaattctatttcaggagacaaagtaaagggaatggcttaaaaaaataaaagtttattttttctctcatggattcaaaatctccaggatagttcaggggtggcacaataataaagtatcaaggattcttctattttgtttcctgtcatattcaatatgcagattttgcctcaggttccaagatggctattagacatccagttgtgaggaacaaaaaaaggcagaataagaggcatgtttcctcacatttctggatacctcttggaagtcacatgtctcatttctacttacatcttattgaccagtcatttactggccaaaa

SEQ ID NO: 449875 - DNA, 633 bp, Homo sapiens
tgtgcagtgagcaagaaaaactcattgggcaattatagtagtatttaacctagtcaaattcagccaatgacttactaactcataattgcaacattatgtttacacagtttttgtctaaagtcacaagtttatcagggagtttattgcaagcaactgttttactaaatattttgccagtaaatatgccaamctctagatatatttttcttgacacccactgaggcaaggtattgagagccaagttccaaaagaaaggatttgtggctgaaggcccagtaaatactgtatatatgtacatgcagtagttatgattaaattctatttcaggagacaaagtaaagggaatggcttaaaaaaataaaagtttattttttctctcatggattcaaaatctccaggatagttcaggggtggcacaataataaagtatcaaggattcttctattttgtttcctgtcatattcaatatgcagattttgcctcaggttccaagatggctattagacatccagttgtgaggaacaaaaaaaggcagaataagaggcatgtttcctcacatttctggatacctcttggaagtcacatgtctcatttctacttacatcttattgaccagtcatttactggccaaaa

SEQ ID NO: 449876 - DNA, 633 bp, Homo sapiens
tgtgcagtgagcaagaaaaactcattgggcaattatagtagtatttaacctagtcaaattcagccaatgacttactaactcataattgcaacattatgtttacacagtttttgtctaaagtcacaagtttatcagggagtttattgcaagcaactgttttactaaatattttgccagtaaatatgccaaactctagatatatttttcttgacacccactgaggcaaggtattgagagccaagttccaaaagaaaggatttgtggctgaaggcccagtaaatactgtatatatgtacatgcagtagttatgattaaattctatttcaggagacaaagtaaagggaatggcttaaaaaaataaaagtttattttttctctcatggattcaaaatctccaggatagttcaggggtggcacaataataaagtrtcaaggattcttctattttgtttcctgtcatattcaatatgcagattttgcctcaggttccaagatggctattagacatccagttgtgaggaacaaaaaaaggcagaataagaggcatgtttcctcacatttctggatacctcttggaagtcacatgtctcatttctacttacatcttattgaccagtcatttactggccaaaa

SEQ ID NO: 449877 - DNA, 633 bp, Homo sapiens
tgtgcagtgagcaagaaaaactcattgggcaattatagtagtatttaacctagtcaaattcagccaatgacttactaactcataattgcaacattatgtttacacagtttttgtctaaagtcacaagtttatcagggagtttattgcaagcaactgttttactaaatattttgccagtaaatatgccaaactctagatatatttttcttgacacccactgaggcaaggtattgagagccaagttccaaaagaaaggatttgtggctgaaggcccagtaaatactgtatatatgtacatgcagtagttatgattaaattctatttcaggagacaaagtaaagggaatggcttaaaaaaataaaagtttattttttctctcatggattcaaaatctccaggatagttcaggggtggcacaataataaagtatcaaggattcttctattttgtttcctgtcatattcaatatgcagattttgcctcaggttccaagatggctattagacatccagttgtgaggaacaaaaaaaggcagaataagaggcatgtttcctcacatttctggayacctcttggaagtcacatgtctcatttctacttacatcttattgaccagtcatttactggccaaaa

SEQ ID NO: 449878 - DNA, 575 bp, Homo sapiens
ggtgagcacttacaatacctggttttaaattcacatcactgaaaaaagcactgaagagtgtaggaacgacagatttgtcttgaattgaattgctgatgtcattcctcccccatcccctcacagtagccatgtggtgaatagaaatctgtgtttgggagagggagtgcaacagttgtgacactttgtattgacctcagtgctgccttaacacagcagaaagcaaaaccaggctgaactcagctgacacccgcccataaagggagcattcaaaccagccctagccggagagaagtcgcctatccccgtggtcagaacttgagttctggcaagccttgccatcacaggctgatgtgctctggagctctaaataaacttgaaaggcagcctaggccataaggaccacaagtccaaatactgagctgggcttggagatwgtggaatttgggtgtacacagactactgagacaccaggtggggcatgcttataccacccctcccccaaccccaggcaacacatcttgtgcctccaaagaagaccctttccttcctcctgaggagagggaagagtaaagaag

SEQ ID NO: 449879 - DNA, 528 bp, Homo sapiens
atatttctggacacactctgggccagaacggagcccgctgcctttaagacaaggacayagtactggcaggatccatcatctgccaactgaagagtccttgagccctgaatagcaagcagtaatactcaggtagtataccatgggccttggggtgagactctgagatgtgcaggcttcaaatgagacctagcaaattctcagttggggtgactacaatgagagactccatctgcttgagaaaagcagagggagaagtaaagactttgtcttgcaccttaggtgccacttcgggcacagtgggtagagtgctaaacaggctcttgaggtccctgattccagaccttggctcacggacagcatttctggacctgtgttaagacagaggagagcccattgccttgaaagatgaatcccagacctagcagtattcaccagaagctgactgaagagccctaagaccttaagggaacattggcaggagcctgatagtattccccagtgggcctgtagtggtggtgaccatgaggt

SEQ ID NO: 449880 - DNA, 572 bp, Homo sapiens
agctgactgaagagccctaagaccttaagggaacattggcaggagcctgatagtattccccagtgggcctgtagtggtggtgaccatgaggtgaggctcctctgcctatggaaaggggagagtgagaagaaccatgtcttgtcatttgagggcaagcttagagagagactgagacttcatttgtttgagagaaagtaagggaagagaacaagcctcataagggcagatcttaagacttattggccttaaagaggaggtagagaaagaaataggggcagaaagtttattcaaaggaataacaaaagagaacttcctgaaccctggtaatccagataattcttttggatcttatcccagactacragggtggtaccactatgagtctgcaagaagcacagcattactaggcttggggtggcccctaatggagatatgacttagatgacgacacccaagtcctttcaaatacctagaaagccttcccaagagggatgggtacaaacaagcccagactggttagactactataaattcccaactcttcaatgcctagacactgaagaacatcaaca

SEQ ID NO: 449881 - DNA, 531 bp, Homo sapiens
acaaacgaaattaaaatgaataaaaaaatacaaaagatcaaaacaaaaagttggttttttgaaaagatagacataattgacatgcttttagccaagctaagaaaaagagagaagatccaaataaaattggagatgataaaggagacattactactgatactgcagaaattcaaagaatcattaatggctactatgaacaactatatgccaataaattgggacattcagaagaaatgaatgagttcctaaacacatacaacctgccaaaattgaactaggaagaaatcgaaaacctgaatagaccaataagaagtaatgagatcaaagccataataaaaagtcctccagcaaagaaaagcccagaacccaatggctgcactgctgaattctaccaaatatctaaagaayaactcataccaattctactcatactattctgagaaatagaggatgaaggaatacttccaaactcattctacaaggtcagtattactgtgataccaaaaccaaagacacatcaaaaaataaaaa

SEQ ID NO: 449882 - DNA, 572 bp, Homo sapiens
caatggaatgagggacaaaaaccrtatatgatcatttcaattgatgctgaaaaagcatttgataaaattctttcatgataaaaaccttaacaatcctggatatagaaggaatataccccaagataatcaaagccatatatgacagacctatagctagtattatactaaatggagaaaaactgaaatctgaaatcctttcccctaatatctggaacatgacaaggatgcccactttcatcactgttattcaacgtaacactggaagtcctagctagagcaatcagacaagaggaaaaaagggcacttaaattggaaataaataaattattcttgtttatggataatatatttggaaaaacctaaagactaccaaaaaagtgttagaactgataaacaaattgcataaagtttcaagatacaaaatcaacataaaaaaatcagtagtttttctatatgccaacagtgaataatctgaaaaagaaatgaagaaagtggtcccatttagaatagctacaaataaaatacatggaattaaattaaccaaagaagtgaaagacctctacaaggaaaac

SEQ ID NO: 449883 - DNA, 572 bp, Homo sapiens
caatggaatgagggacaaaaaccatatatgatcatttcaattgatgctgaaaaagcatttgataaaattctttcatgataaaaaccttaacaatcctggatatagaaggaatataccccaagataatcaaagccatatatgacagacctatagctagtattatactaaatrgagaaaaactgaaatctgaaatcctttcccctaatatctggaacatgacaaggatgcccactttcatcactgttattcaacgtaacactggaagtcctagctagagcaatcagacaagaggaaaaaagggcacttaaattggaaataaataaattattcttgtttatggataatatatttggaaaaacctaaagactaccaaaaaagtgttagaactgataaacaaattgcataaagtttcaagatacaaaatcaacataaaaaaatcagtagtttttctatatgccaacagtgaataatctgaaaaagaaatgaagaaagtggtcccatttagaatagctacaaataaaatacatggaattaaattaaccaaagaagtgaaagacctctacaaggaaaac

SEQ ID NO: 449884 - DNA, 572 bp, Homo sapiens
caatggaatgagggacaaaaaccatatatgatcatttcaattgatgctgaaaaagcatttgataaaattctttcatgataaaaaccttaacaatcctggatatagaaggaatataccccaagataatcaaagccatatatgacagacctatagctagtattatactaaatggagaaaaactgaaatctgaaatcctttcccctaatatctggaacatgacaaggatgcccactttcatcactgttattcarcgtaacactggaagtcctagctagagcaatcagacaagaggaaaaaagggcacttaaattggaaataaataaattattcttgtttatggataatatatttggaaaaacctaaagactaccaaaaaagtgttagaactgataaacaaattgcataaagtttcaagatacaaaatcaacataaaaaaatcagtagtttttctatatgccaacagtgaataatctgaaaaagaaatgaagaaagtggtcccatttagaatagctacaaataaaatacatggaattaaattaaccaaagaagtgaaagacctctacaaggaaaac

SEQ ID NO: 449885 - DNA, 572 bp, Homo sapiens
caatggaatgagggacaaaaaccatatatgatcatttcaattgatgctgaaaaagcatttgataaaattctttcatgataaaaaccttaacaatcctggatatagaaggaatataccccaagataatcaaagccatatatgacagacctatagctagtattatactaaatggagaaaaactgaaatctgaaatcctttcccctaatatctggaacatgacaaggatgcccactttcatcactgttattcaaygtaacactggaagtcctagctagagcaatcagacaagaggaaaaaagggcacttaaattggaaataaataaattattcttgtttatggataatatatttggaaaaacctaaagactaccaaaaaagtgttagaactgataaacaaattgcataaagtttcaagatacaaaatcaacataaaaaaatcagtagtttttctatatgccaacagtgaataatctgaaaaagaaatgaagaaagtggtcccatttagaatagctacaaataaaatacatggaattaaattaaccaaagaagtgaaagacctctacaaggaaaac

SEQ ID NO: 449886 - DNA, 605 bp, Homo sapiens
atggagaaactgaacttcatcaaaattttaaattcagttacatgaaagagaccaaagaatatattgtccaagcaccatggttcatgcctgtaactctaacacttcaggaggctgaggtgggaggaacccttgagctccggagtttgaggctgcagtgagccatgattgcaccactgtactctagcctgggtgagagagcaagaccctgactcaaaaaaaaaaaaaaaagaaakaatatataatatataatatataaagaactctcacaactcaataataagaccaattgaaactacctttgtaaaaattataacagtgagaaaattatgacgctgagagaaatctaacctgattccatctagcttctaaactccaagctgcccttgttcattcctggtcataggctgaactaactttggaaggaacttagtttatagtttaactttgaaacaaagataacagccctttcccaaaatcaactcccatcttgcctggggaccagactgcctttataggagtaatatattagccacaagattagaaattatgttctggagtcatacagccagaggccacaagatgctgaacctccccaattgctccta

SEQ ID NO: 449887 - DNA, 605 bp, Homo sapiens
atggagaaactgaacttcatcaaaattttaaattcagttacatgaaagagaccaaagaatatattgtccaagcaccatggttcatgcctgtaactctaacacttcaggaggctgaggtgggaggaacccttgagctccggagtttgaggctgcagtgagccatgattgcaccactgtactctagcctgggtgagagagcaagaccctgactcaaaaaaaaaaaaaaaagaaataatatataatatataatatataaagaactctcacaactcaataataagaccaattgaaactacctttgtaaaaattataacagtgagaaaattatgacgctgagagaaatctaacctgatkccatctagcttctaaactccaagctgcccttgttcattcctggtcataggctgaactaactttggaaggaacttagtttatagtttaactttgaaacaaagataacagccctttcccaaaatcaactcccatcttgcctggggaccagactgcctttataggagtaatatattagccacaagattagaaattatgttctggagtcatacagccagaggccacaagatgctgaacctccccaattgctccta

SEQ ID NO: 449888 - DNA, 488 bp, Homo sapiens
cagggcctgtcaggggttggggggtagcagagggatagcattaggagaaatacmtaatgtagatgatgagttgatgggtgcagcaaaccaccatggcacgtgtatacctatgtaacaaacctgcacgttcttcacatgtatcccaaaacttaaagtataacaaaaaatattatatataaacatatattttaacaaattataaaacattccttttgaaatctcagtgacaaatttcataacagactaacagtgaagaaattgagaaaatcaagccactaagctgaagaatttatgaattatgataatagtgatatactgatagctatcatttttatgtaccaataacaataatagctacacatgcctcccaacacatacgcactgataaccatgctagacatattacctatatttagggtccaaaatatactttattatctctattttaaagaaaaacagactgagttgtaatgggattaactaatttg

SEQ ID NO: 449889 - DNA, 587 bp, Homo sapiens
gtaattaaagttacagccattcagtggaaaaccatgcattaagggaattaagcggatctgattctgttgctatgaaaacacctttaagataaattgttaaataaaaagaaagctgcagaacagtaatagcatatgcttctgtttgtatctacatcaaaaggaatatgtagatgcacattcaatagaccatgaagactatctctgaataggttggctgggaatgagaacgcaaggggcaaaaggagattttactctttaagttatatgctttggtatttttttttttttacaacaaatgtgtcacttttgtaataaaggaaygaaacaatgcataaaaggatttctggttaggtcattgcataaatgcctggctcttaaaatggggaatggagggtgttttctacacactggggatcagagagcaaagtggagaaagtatcatatgtaatatctatatggtgactttatgtggaggtggaaagatacagaaaacgacccaaggagaagcaagagaatcttaagaactccagacctcaacaaagaaacaaaaatgcagaagaattcacaggaaaagagttgaggtatgg

SEQ ID NO: 449890 - DNA, 587 bp, Homo sapiens
gtaattaaagttacagccattcagtggaaaaccatgcattaagggaattaagcggatctgattctgttgctatgaaaacacctttaagataaattgttaaataaaaagaaagctgcagaacagtaatagcatatgcttctgtttgtatctacatcaaaaggaatatgtagatgcacattcaatagaccatgaagactatctctgaataggttggctgggaatgagaacgcaaggggcaaaaggagattttactctttaagttatatgctttggtatttttttttttttacaacaaatgtgtcacttttgtaataaaggaacgaaacaatgcataaaaggatttctggttaggtcattgcataaatgcctggctcttaaaatggggaatggagggtgttwtctacacactggggatcagagagcaaagtggagaaagtatcatatgtaatatctatatggtgactttatgtggaggtggaaagatacagaaaacgacccaaggagaagcaagagaatcttaagaactccagacctcaacaaagaaacaaaaatgcagaagaattcacaggaaaagagttgaggtatgg

SEQ ID NO: 449891 - DNA, 530 bp, Homo sapiens
tgtacttgtatctgagagtaaaataatgaagcacaagtaaaggcaatatctgagtaacgggggcaacctccaatccaacttgccactccccgatccctgcaatgagaggcttccaaaagatgctttttgataagaagtctttctatgaattccaaattattcactttatcttttatgtccattgatttgtatatactctcaaattgattttttttttgaggagtctcgctctgtcaccgaggctggagtgcaatggtgcaatctcggcttactgctacctccgcctcccgagttcaagtgattctcctgcctcagcctcctgagtagctgggattacaggtgcccgccaccacgcccggctaattttttgtatttttagtacagacagsgtttcaccgtgttagcaggacggtctggatctcctgacctcgtgatccgcctgcctcagcctcctaaagtgctgggattacacgcgtgagccaccatgcctggccgtatgctctcaaattgttgcctaacctggttgttac

SEQ ID NO: 449892 - DNA, 572 bp, Homo sapiens
acctcatgagggagatccctttgtctttgttttacatggcaagattactgaggccctgtgggaaccagtgacttgccctgggtcacttggctagggagggacatgtcaagcccagctttggaaacaaacctcagctcagacactctgctctagctttctgcttgaacgtactttcttcatgccaggcctgaaatkgtagggattatcactgccttacaaccagggcctctggagcccagagaggtgaagggccaacttagaaccacacgacacaactcccgtgtgtccctgctggaggcggagccgtctggctgaccccagtgcctgggctcagccatgacctccacctgcctctccttgtaatgctcggttatttggaaagtaaaaaagaaaaacttcactgaatgtttagcagagatgaaactgattgaagacatggccttggcattagattatggatccagcagggctggcggtcccctcctccccctgccacactctggcctccttgcctgcctctgagccagcctctgacagtttgtcaggaaagtcttttctgcactgggggcgac

SEQ ID NO: 449893 - DNA, 559 bp, Homo sapiens
gcccagtctgtggatttatcgtgtggatcaactaagaggttggatgtgaaggggtggtrcagtagcccatacatattgtccttatacccaacagtgaaggacaggtaaatgaataattaattccatccataaacctctactttgagggtcaggcctctaaaagtaacaaaacagggaccactcagattcattcttagccttaaggaactcatcatctactgcagcagataggcaagtgaacacatgcttgtcatctagcaccatatgtgctctgattacaggatcccagaggaggtgcctttgacccacacttggaatgaaggagggcttcttggaggaggtgagttttaaaggacatgtaggagttaaccagccagaagaaggtatcaattaaaggcaacatatttgattatacactccattatgcacttggccatgaggaatgcaagaaaaggaaaagacatttccattactgtgtcagtctgaaatcctgtcaggaaaatggacttgacaggggtgcgacaggaataaagggtttaatatggggattagcacttac

SEQ ID NO: 449894 - DNA, 580 bp, Homo sapiens
cctgattaacactatattagctccaaatatataatttattattgttcctctttttatttgcctgatgcttgttccaaagcttgtctagcttaggtttgtggagcactccctgaatggggaaaggatggctcccttccaaacctgagtgtctcctccagatgggcaaccctcgtgctgtgtcattgtcctcccagggaagccaccacctgcccagtctgtggatttatcgtgtggatcaactaagaggttggatgtgaaggggtggtacagtagcccatacatattgtccttatacccracagtgaaggacaggtaaatgaataattaattccatccataaacctctactttgagggtcaggcctctaaaagtaacaaaacagggaccactcagattcattcttagccttaaggaactcatcatctactgcagcagataggcaagtgaacacatgcttgtcatctagcaccatatgtgctctgattacaggatcccagaggaggtgcctttgacccacacttggaatgaaggagggcttcttggaggaggtgagttttaaaggacatgtaggagttaacca

SEQ ID NO: 449895 - DNA, 569 bp, Homo sapiens
gctcttctgacaagtggccactgctgagattgccgaaggagacagaattgctttccccagcagcaactgccttcctgctgcctcccttccttccttccttccctcccttctttccttcaggggccaccacaccacccactacaaggccagcctcagrgcagtgcccgacagacctagggcagcatctctgaggatccatgtggccaggctgctgagctctgttaagaaatatctggaggccgggctcagtggctcatgcctgctatcccagcactttgggaggttgaggtgggcagatcacttgagcttatgagttcgagaccagcctgaccaggatggtgaaaccctgtctctacttaaaatacaaaaattagccagacacggttggcgtgtacctgtagtcccagctactcgggaggctgaggcattagaatcacttgaaaccaggaggcggaagttgtagtgagccgagatcgtgccactgtactccagcctgggcaacagagcgagaccctgtctcaaaaaaataaataaataaaaataaaaaagaaatatctggaaagaaggcc

SEQ ID NO: 449896 - DNA, 569 bp, Homo sapiens
gctcttctgacaagtggccactgctgagattgccgaaggagacagaattgctttccccagcagcaactgccttcctgctgcctcccttccttccttccttccctcccttctttccttcaggggccaccacaccacccactacaaggccagcctcagggcagtgcccgacagacctagggcagcatctctgaggatccatgtggccaggctgctgagctctgttaagaaatatctggaggccgggctcagtggctcatgcctgctatcccagcactttgggaggttgaggtgggcrgatcacttgagcttatgagttcgagaccagcctgaccaggatggtgaaaccctgtctctacttaaaatacaaaaattagccagacacggttggcgtgtacctgtagtcccagctactcgggaggctgaggcattagaatcacttgaaaccaggaggcggaagttgtagtgagccgagatcgtgccactgtactccagcctgggcaacagagcgagaccctgtctcaaaaaaataaataaataaaaataaaaaagaaatatctggaaagaaggcc

SEQ ID NO: 449897 - DNA, 607 bp, Homo sapiens
caaaccagcagcactccccacctttcagttcttgattgcactcactttccttcctgggaatgaaccccctacccctgcccccccaactctctccatgcccccacattgatgtccccacagagacatctccctagagacatcactccatctagaattgcccagcasagtcactccctgtcacatttccctagtttatctactattttatccggggaatcagtccccaatatttcagtgtaggttctttctattttccctaagtgttggccggtcagagaaataaagagtacaaagagaggaatattacagctgggctcctgggggtgacatcacatatcggtaggttcgtgatgcccctgagctgcaaaaccagcaagtttttattagagatttcaaaagagaagggggtgtatgaacagggaggtcacaaagatcacatgcttctaaggccaataaagatcacaaggcaaagggcaaaattagaattactgatgagggtctatgttccactgtgaacgtattgtcttgataaacatcttaaacaacagaaaacagagttcgagagcagagaactggtctgacctcatatttaccagggtgggatctt

SEQ ID NO: 449898 - DNA, 607 bp, Homo sapiens
caaaccagcagcactccccacctttcagttcttgattgcactcactttccttcctgggaatgaaccccctacccctgcccccccaactctctccatgcccccacattgatgtccccacagagacatctccctagagacatcactccatctagaattgcccagcagagtcactccctgtcacatttccctagtttatctactattttatccggggaatcagtccccaatatttcagtgtaggttctttctattttccctaagtgttggccggtcagagaaataaagagtacaaagagaggaatattacagctgggctcctgggggtgacatcacatatcggtaggttcgtgatgcccctgagctgcaaaaccagcaagtttttattagagatttcaaaagagaagggggtgtatgaacagggaggtcacaaagatcacatgcttctaaggccaataaagatcacaaggcaaagggcaaaattagaattactgatgagggtctatgttccrctgtgaacgtattgtcttgataaacatcttaaacaacagaaaacagagttcgagagcagagaactggtctgacctcatatttaccagggtgggatctt

SEQ ID NO: 449899 - DNA, 580 bp, Homo sapiens
gacctcatatttaccagggtgggatcttttccccaccctaataagcctgagggtactgcaggagaccagggcgtatttcagtgcttatctcaaccgcataagacagacaytcccagagtggccatttatagacctccccccaggaatgcaattctgttcctagggtcttaatatttaatattccttgctaggagaagaatttagtgatatctctcctacttgcatgtccgtttataggctctctgcaagaactaaaatatggctctattctgcccaaccctgcaggcagtcagaccttttgttgtcttcccttgttccctgaaattgctgttattctgttcgttttcaaggtgcactgatttcatattgttcaaacacccatgttttacaatcagatttcatattgctcaaacacacatgttctaaaaccaatttgtacaatagtggtcctaaggtgacatacagtctcagcttatgaagataacaggattaagagattaaagtaaagacaggcataagaaattataggagtattatttgggaactgataaatgtccatgaaatcttcacaatttatgtt

SEQ ID NO: 449900 - DNA, 580 bp, Homo sapiens
gacctcatatttaccagggtgggatcttttccccaccctaataagcctgagggtactgcaggagaccagggcgtatttcagtgcttatctcaaccgcataagacagacattcccagagtggccatttatagacctccccccaggaatgcaattctgttcctagggtcttaatatttaatattccttgctaggagaagaatttagygatatctctcctacttgcatgtccgtttataggctctctgcaagaactaaaatatggctctattctgcccaaccctgcaggcagtcagaccttttgttgtcttcccttgttccctgaaattgctgttattctgttcgttttcaaggtgcactgatttcatattgttcaaacacccatgttttacaatcagatttcatattgctcaaacacacatgttctaaaaccaatttgtacaatagtggtcctaaggtgacatacagtctcagcttatgaagataacaggattaagagattaaagtaaagacaggcataagaaattataggagtattatttgggaactgataaatgtccatgaaatcttcacaatttatgtt

SEQ ID NO: 449901 - DNA, 607 bp, Homo sapiens
ccaaatccagacaaggtggctrtagctgagaaggggcctgcctgaggatggagaaaagggaaggaaaattagtctgacctctgtctccctccaccctttgatctcctgctgttgctttccattggctgaatccaataggaatttaaaatgcaaggaaaatgcattgatgtgctctataagggttggcctcccaggacacagagcagtagggaggaagatggagagaggatctagaggaacaaaaagagctcacccaacacacctgcccactacagagaactggacatgaccttggaaagttatgaccttcacctcttccactcatgaaattccctcctattagcttgggttgttatttccaggaatgcatcacagtgggggagttcaagtcacaaagtgcagttattgaaacaccctgagtgtctccaaggctctatcgaaattctctccctctccccaactctcctggtagcattgcaggattactgcagctcatattcatctgtctccaaaagattaaaccatcccctggaaaaggccactgtttcccgaaggaggagagcccatttatgctcattcctgcaagataatgacttttcagaaaaaa

SEQ ID NO: 449902 - DNA, 607 bp, Homo sapiens
ccaaatccagacaaggtggctatagctgagaaggggcctgcctgaggatggagaaaagggaaggaaaattagtctgacctctgtctccctccaccctttgatctcctgctgttgctttccattggctgaatccaataggaatttaaaatgcaaggaaaatgcattgatgtgctctataagggttggcctcccaggacacagagcagtagggaggaagatggagagaggatctagaggarcaaaaagagctcacccaacacacctgcccactacagagaactggacatgaccttggaaagttatgaccttcacctcttccactcatgaaattccctcctattagcttgggttgttatttccaggaatgcatcacagtgggggagttcaagtcacaaagtgcagttattgaaacaccctgagtgtctccaaggctctatcgaaattctctccctctccccaactctcctggtagcattgcaggattactgcagctcatattcatctgtctccaaaagattaaaccatcccctggaaaaggccactgtttcccgaaggaggagagcccatttatgctcattcctgcaagataatgacttttcagaaaaaa

SEQ ID NO: 449903 - DNA, 607 bp, Homo sapiens
ccaaatccagacaaggtggctatagctgagaaggggcctgcctgaggatggagaaaagggaaggaaaattagtctgacctctgtctccctccaccctttgatctcctgctgttgctttccattggctgaatccaataggaatttaaaatgcaaggaaaatgcattgatgtgctctataagggttggcctcccaggacacagagcagtagggaggaagatggagagaggatctagaggaacaaaaagagctcacccaacacacctgcccactacagagaactggacatgaccttggaaagttatgaccttcacctcttccactcatgaaattccctcctattagcytgggttgttatttccaggaatgcatcacagtgggggagttcaagtcacaaagtgcagttattgaaacaccctgagtgtctccaaggctctatcgaaattctctccctctccccaactctcctggtagcattgcaggattactgcagctcatattcatctgtctccaaaagattaaaccatcccctggaaaaggccactgtttcccgaaggaggagagcccatttatgctcattcctgcaagataatgacttttcagaaaaaa

SEQ ID NO: 449904 - DNA, 655 bp, Homo sapiens
ggctctcattttggacttcttgtctccttccaggtacacaacttcaggcaaaacacttatctctgcacttacttagttgttgtttttccaagtaaaaaccaggcatggaaattgtaactatctcataggattaccaaaaacattaaatgagttgatgtatgtgaaaggcttagaacagcacctggcacatgtgggtgtccaataaatattagctattataatttctgtagaaaaacttgatcrtgtttctccttcaaagctcccctctgggaaccagactctggaagggtaagctttggtgattgctgaaatattcaaaagatagggaaccccatgatactcttggaggacaactgtttatccaaggatcaaagattaaagacattattgatgcaatgagtacctcgggggaaaggggccggacagatgactacttcatgcgtttgctcatcacgggggctgaatctaagaacccagggacatagaagattcctataactaggtcctccccaatcaagggagaacttgtggtccaaaaggtaaaattaaataaggaaagcattctgtgtcctgccagtacaatagacctagtcctgcaagtaaagcagagacaaactgatacatgattaaaacctgtctccaatactaacttaca

SEQ ID NO: 449905 - DNA, 338 bp, Homo sapiens
attgagctatgggagagtttgctagtcgggctccagggaaaaagaaataagccctgggtgggaaggttgggagggggagactaggggatgggtcttccctggagactcattcagaaacaaaatattcaggaaggttccaatggaccagcaaaggggaaagggagggtaaacatatttggtrgaatgtattcaagaagtagttaatgaaccagcagcatcagtatcacatgggggactgttcagactgcaggctcccaggcctcaccccagacttgctgaaccagaatctgctttttgaccaaatctccaggcaattcctatgtaccttaaaatttgag

SEQ ID NO: 449906 - DNA, 578 bp, Homo sapiens
gcttatgtgctttatggacaggactcagttccatccatgctgttggccagaggctgccctccattcttgctgtgcgggccacttcatcaaagcacataagccaaggagacactaaagaaaatctgctagcaagacagaagtcataatctcttgtgacctaatcacaaaactgacagcccatcacttttgctgtattctatcagttcaaagcaagtcacaggctctgccccactcaaagggaggggattacccaagggtatgaattcaggaggccgggattattgaggaccatcttagaagactgcctaccayaggatgtttgcaaatgtagcaagcagtgtcttgagaagcacgtgtacaattgggctttcttgccttgagtaacccactagttcaagaaggagcataagggatgcatggcaagaattaaacccccaggaaaacccaacctagagcagagtccccagtaaaagtgtgggcacatgggtgagcccaaatgagatcagcacaactgcccagtagaatccaatgcacatcagttggctctggcagaagtcactgaagttttgaagttgttt

SEQ ID NO: 449907 - DNA, 578 bp, Homo sapiens
gcttatgtgctttatggacaggactcagttccatccatgctgttggccagaggctgccctccattcttgctgtgcgggccacttcatcaaagcacataagccaaggagacactaaagaaaatctgctagcaagacagaagtcataatctcttgtgacctaatcacaaaactgacagcccatcacttttgctgtattctatcagttcaaagcaagtcacaggctctgccccactcaaagggaggggattacccaagggtatgaattcaggaggccgggattattgaggaccatcttagaagactgcctaccataggatgtttgcaaatgtagcaagcagtgtcttgagaagcacgtgtacaattgggctttcttgccttgagtaacccactagttcaagaaggagcataagggatgcatggcaagaattaaacccccaggaaaacccaacctagagcagagtccccagtaaaagtgtgggcacatgrgtgagcccaaatgagatcagcacaactgcccagtagaatccaatgcacatcagttggctctggcagaagtcactgaagttttgaagttgttt

SEQ ID NO: 449908 - DNA, 576 bp, Homo sapiens
aatatcacatgtcctcatttagaagtgagagctaaacattgggtactcatggacagaaagatggcaacaatagacactggggactattagacggggacaagtattaaaaagctaactgagtggcactatgctcacttactgaggggcaggatcatttgtatccaaaacctcagcatctatgcaatatattaatatcatgtaacaaacttgcacatgtacatcctgaatctaagatataaggtgaaattagaaaagtaaaataaaataaaatggggcttwgaaagtttgaaaaatttgcacaaatcacacagctagtatatggggaagccaaggttcaaattagtaatcagttaagtaaagaccaagatcagaaagataagagaacagagtcagcaataaaaaggttgaaagagtaatgagaggtacaagcaagtgactgggttgattcagaactaagtctgtaacagctgggctggtgccaggacagtcctttagtttgtgtccttatatgcctcatgggggctaaaagaatgacccaaggatgacagaacagagatgtttaacaagaaaagagaa

SEQ ID NO: 449909 - DNA, 620 bp, Homo sapiens
tgctcactactctttgcacccaccatgatcttttatctaactccaggtgaagaaatcactttcctctcctcctgactgcaaatgtttattgatactactgtgaaaattaaatgctttgctgaagattactctttaaccctggaattcaagttggtatgtgtctgcttgttcattagttaattagttaatcagtttgtttatttagtaacagccagattctatgaaacaacaatgagaaggaaaatcctttacattcacacttctcaagcattaatgtgcccacacatcatctgtggatcttgttaaaacagagattctgatccaaagtatggaaaaagggcctgagttctacatatctaatacactcccaggtgatactaatcttgctgacccatggaccacatctagaggatctagagtcagacacactaggttcaaatcccaactctgtagctgtgtgactttaagcaacttaaataacctctctgagccttcatgtcatcttttattaartgggactatatataacttcttactggaaagtttgtataggtgaagattaaagataattcaacagagcccttgcatgtcttggccattctgcaagtagcagtgtaaat

SEQ ID NO: 449910 - DNA, 498 bp, Homo sapiens
cactgcctatatggaagggcagcatcttgtctctactatcagagtgtggtcatcatttcagaccagctatgaggcatcctgctcktgagatgggctgagaatcaggatgtcccagcagccggcagcatggatagatgatgacatacctggtactaaatgcccacctagtccccaaatgtctcgatgtcctgtaagacccctggaactggctgagcatagtgattcacacctggatcccagcactttcggagaccaaggtgggaggatcacctgagctcaggagttcgagggcaacctgggcaacacagtgagatcccatctctacaaaaataaaaattagctaggacataatggtgcatgcctgtagatcctgcccattgccgaggctgcagcctctttccactcccctcttcagggatattgatccccagccagctgtagatgcatctttattatttgtgtgccataatcagcacagatattagggcaattccctgg

SEQ ID NO: 449911 - DNA, 658 bp, Homo sapiens
gaaaggctgagtccattgagcaggttgaatatgtcacataagtaagcaagttttgcgacccattctatgtcactgaaatgtgctgccattggtgactgtgtttctaaaagtaatctctgcagtggctttcataactcagatactctgctcagttatccacctttagaaagccatctcacttctgtgtataagagaaaacatgtgtgctctgtgtccatctcctcacagagctgtggcaacagatgtgagttaagggcatgtattttaacctggttggtaattttaatcacattctggaaaatgattttagttcaggtaacattttccagctagccagcatttatctatggatgacacggtgtgtagacttacattcagaagtgacctatttgacccgaatagtgaaaccagaaagctgtcaagtcatggcagcaactccrtccatgcatataccaacacaaaataaccaattcagttttcccgaattcagaggcttgaatagtcctgcagctgtggtgttggttggcaacgaaagtgcacataacatatcctcacgaacatcctcctgaaaaatatatcccacataaacaagcattgttgccttgtcaacatcagtagattcatcaacctagattgtgtaccacagtgattcgttaat

SEQ ID NO: 449912 - DNA, 570 bp, Homo sapiens
ccttggtacattcaagcttgctagcttgtcttcactcatttctttcttatttatctattctctctatctgttatatgataaatgttaaaataacgttaaatatctgttaatgatatttactgttattttacttacatttatttaatgttaattaatttacattacatttatttaattatatttattatattaaatttatttaatgttaatttatttgtgactgycatattattcgtttcctctcctctctttcctcttatttctactcagatgtatagtgatactaaaccaacttttgaaagacatctgtataatgaagattaataatgaattttattcagtcaccttggaaacattttaaatatatggattgccaaataatcactcaccaaatatactgaattattcagtctatatttacctataaatcaatgagcataactgctttttcaaaatttactaggtgataaaattttgggtttagatattacaggataatgaaaataaaacagaagagaaaggcagaagatccgaattctgtttttaattcagtcacttaactaattatac

SEQ ID NO: 449913 - DNA, 241 bp, Homo sapiens
tctcttttttctgattctactccaccaaacatttggccaactccaagatatataaataagacaggttaaagacttccattttccaaatattcaatatakaaaacataatatcaataaagtaaatttgctgagtctcaggaaaataatttctcatgtttaataacccaattatgtcattatatgttttcctgtgtttttccccataatactgttctatatcgatcaactattaaaacacact

SEQ ID NO: 449914 - DNA, 572 bp, Homo sapiens
tgcatatgttctgtgtatatatgatgccttattcggtgaagataattaacttctcattgaactcaaaatacataaaccatttggattatctctgggtccatttagttttaataattcttargtccctattcatttggggtattatggaatgtagacatctttaggagaacaactatttgtttgttgtttgagacaaaattattctgagactaaatctgtaatgtgataattttcagggaagaagaataataggagaacgtggattgctcatatgtgttgcctgcattatgccactttcactcataaactcagtatggtgctagctgatctacagagagaggaaggaatatacatatctctgctaagggaggagctcatacaccctacaatctaaattgattaagagcctggtaatttatatattgcaacattgaaaaagtcagttgcttctgcctccaaccaaagcagtagagaaatagctacaaagcatcaaccttgacatcaaagaagactaacacacttgctgtgggaagtctgtgaaatttgagggcacagacaagactaagggtatt

SEQ ID NO: 449915 - DNA, 604 bp, Homo sapiens
cattcaggctgatgaagaagaatgtgaatcactcagagattctagccctcagttatctagaatcttgatgaagaaaccatggttttctatctttgataggaatgagtgtgttctatatggacaaggaagggcaggcctagatatttgcatcacaaaggggtagactgtagtaaagactactggttttcttttcatatctatcatatccttttcctataatragataaccacaattttaggcaaagaatactagcgaagaacaaaatttctgacttcccatgcagctaagtgtggccatgtaggtaaaggccagtgggccataagtgtaagtgatgtctacagatttggagaagtatttataaaaggaggagatgagaccttttccttccctcttttcttcttcctacagtctgaagtatagatttgatgctttgaactgaagtggccaccttggaccaaaaaataaccctgggaatgaatgttacaaactggaacaaaaatcatagaaggggctatgtccttgatacagtgatgctattccaagtgctgaactgtctattgtgggcttccatatgagagaaaaataaagttgtttaagtcattg

SEQ ID NO: 449916 - DNA, 591 bp, Homo sapiens
taaattgccctgacgtgatgaagcttatattctagatggggtaacaaatggggagacagactataaacagcaaatatcacaaataagtagtttaaataaaatgttagaaggtgataaacaatacagtaaaacaaaaacaaaacccttatagttgcaaggtaagaggaatcagagaatggaatggaatactattttcgatagggtaatctgagtaggcctcattgagatggcaaaacttgcacaaagactagatgtaaatgagtgagttagctatgtggatatttagagacagaaccttgaaggaagagggaacagcttgcagtaagacactgaggctgaagctagccaagtttgtttaataaatagcaagattggtgtggccgacrcaaagagaaagaaggagagtaggaggagataggaacaattttcagtggattccaagtttacaccaaagagaaacaaaggatggaagactgggtaggacctctcaggtcatttcaaggaattgacttttattctaagacaaatggtgagcccctgcagagtacagataaaatctgattgtttttttgaaaagatgactctggctgc

SEQ ID NO: 449917 - DNA, 591 bp, Homo sapiens
taaattgccctgacgtgatgaagcttatattctagatggggtaacaaatggggagacagactataaacagcaaatatcacaaataagtagtttaaataaaatgttagaaggtgataaacaatacagtaaaacaaaaacaaaacccttatagttgcaaggtaagaggaatcagagaatggaatggaatactattttcgatagggtaatctgagtaggcctcattgagatggcaaaacttgcacaaagactagatgtaaatgagtgagttagctatgtggatatttagagacagaaccttgaaggaagagggaacagcttgcagtaagacactgaggctgaagctagccaagtttgtttaataaatagcaagattggtgtggccgacacaaagagaaagaaggagagtaggaggagataggamcaattttcagtggattccaagtttacaccaaagagaaacaaaggatggaagactgggtaggacctctcaggtcatttcaaggaattgacttttattctaagacaaatggtgagcccctgcagagtacagataaaatctgattgtttttttgaaaagatgactctggctgc

SEQ ID NO: 449918 - DNA, 512 bp, Homo sapiens
ctgccctcgagatctgtgtaactttgaacttgagagagatgatttaaggtatctagcagaagaagwttctagcagcaaagtgttcaaggagtgacttgggtgctcttaaaagcattcagttttatgcattcacaaagagatggtttggaattggaacttatgtttaaaagggaagcggagcataaaagtttgggaaatttgaagccttataatatggtagaaaagaaaaactcatttctgagtataaattcaagaccactgcagaagtttgcataaataatgaggagcctaatgttaattgccaagacaatgaggaaaacgtctccagggcatgtcagatgtcttcatggcaggtcctcccatcacaggcccagaggcctaagagaaaagaaggatttcctgggttgggcacagggccttgctgtcatgtgcagtctcaggacttggtgccctgcatcccagccacgactgaaagggatcaatgtatagctctggctggggccttagagggt

SEQ ID NO: 449919 - DNA, 513 bp, Homo sapiens
cctctatttggatttctctgatattttctcatgattagactcaacttatgtatttgagagaggaataccacagagctgatgtgcccttctttatcatattaaggatacattacattaatgtgtcttamttctggtgatgctaaccttaataatttggttaagctgttttttgtcatatttctccactgtaaagtgactatttttctttttccatactctactcagtatcagtatctactcagaacatccccacactcaaagggataggaattaagctccacctttataaaaatattatcaaagaacctgtgaacatattaaaattgccatagcaattaaaacatattcatgagggagatatattgaggatatactgatatcctatttctctttaaaatattgcctaattatttgaggtatcattatacgtcagcaaatgtcacctgctgcaattattataatggcgttctgatggtgtttctctgttccctcattcctttatttttaattgga

SEQ ID NO: 449920 - DNA, 557 bp, Homo sapiens
cacagggcttctatttctaaagtgagcacaaactcttaacacatacttattttcagtattctgaacagaaaataatatgctcaacaacagtaccctgcacattaactcttctcactattgagaaaagcaaagcatctcgtgttgccaattgctaggcattttatatcactgcaaagtcctgcttaagcattgatttccagcataggggtcagccatgtacgcgtgaggtctggaggctttaaatagcagacttgtgggtatatattcatttaaattcatctctatgtgttcaagtttattttgcaaatgcgtaagtgtactaacctactcgacgttggagttattactatggaaacaacactagttaataaatgcctgatttcacatatcattgtgctagacactaataactgaataaacatagcacctyggcttctgctttgttacctccttaaagggaccctagaagagtaatcaatgaatagtcgataaagggtgacccatttagattggcttcctaatatcatcttgaaagcaattttcagttactgtgaaga

SEQ ID NO: 449921 - DNA, 567 bp, Homo sapiens
tatctattattagaaatccattcacctaaatatctatattagtttgctagggctgtcataaaaaattactacaaactgggtggttcaaaacaacagaaatacattgtcttatagttctggagccagaagaaatccaaaaccaaggttttggcagggttgtttccttcgggaggctctcagggggaatccattctgtgcccatttcccagcctgtggtagatgtcagcaattgttggtgtcccttggctcgtggcaacataactccaatctccrtctctgtcttcacatggccttctctgtgtgtcagacattgttttaaattagggcatatattttcaatatttgacttacatgtggacatagatcagcaagaagagactagcaaattattcaaaataaaaaaagaaatttagaaaaacttatagaattgtataaatctattaaaggctcctattgaaattgttcctaagaacattatcctctccaacctagtctggttccactgatgccctcaatattattctctgcttttcaatatcttatctccattgcatctatcatatttat

SEQ ID NO: 449922 - DNA, 619 bp, Homo sapiens
gtttgacatttttataacaaaattattattgacctttcatgatacttgttatggaatttatatctcagcttgtgtaattgatgtattagtgcttatttacaatttctaggtaatgattttatagaaaatttatactcttgtgatagtctcctttggagccctgtggaaatttgaaacactgaatgaaactcattacasaatgatattcataaatataattaatatttaacaagactatgtcattcatatataaaactaggaaactcaatgaaactaaatttttgatcttgtgagtctgaccccaaggctaaatctctggtatatttataatgtaaatttttaaaaattccacttgctgccttcatgaggctcacgtagtaatcttcaggggacattgtacttacatctgctgctatttataggttgccagtaattgaggttgtcgtaactgggtgtttagttcatttattctcatcttcctcccaaatttttcagggaaaaattttgtgttgaattggcaaatactaacttgagaggcatagagcatacaaataattggtatgtcattgtttattggctgaaacaaagataaactaataattaacagataaaccattgt

SEQ ID NO: 449923 - DNA, 619 bp, Homo sapiens
gtttgacatttttataacaaaattattattgacctttcatgatacttgttatggaatttatatctcagcttgtgtaattgatgtattagtgcttatttacaatttctaggtaatgattttatagaaaatttatactcttgtgatagtctcctttggagccctgtggaaatttgaaacactgaatgaaactcattacacaatgatattcataaatataattaatatttaacaagactatgtcattcatatataaaactaggaaactcaatgaaactaaatttttgatcttgtgagtctgaccccaaggctaaatctctggtatatttataatgtaaatttttaaaaattccacttgctgccttcatgaggctcaygtagtaatcttcaggggacattgtacttacatctgctgctatttataggttgccagtaattgaggttgtcgtaactgggtgtttagttcatttattctcatcttcctcccaaatttttcagggaaaaattttgtgttgaattggcaaatactaacttgagaggcatagagcatacaaataattggtatgtcattgtttattggctgaaacaaagataaactaataattaacagataaaccattgt

SEQ ID NO: 449924 - DNA, 569 bp, Homo sapiens
gaccaaatctggcaagaaaaggaagggagttgcaaggatctagataactgctaatgtttagtttgcatgaaattagccagaataagtacataagagaagaattaaggtttttagattttaaaaggaggtagaaattaaaagaaaaaattaggtcatttctagatatttttagtttgaggcaatgtctaataggtagctgggtataaagtccagaatggagacatagatttaaagttatcagaatggaggtggtagtttcagccatgagagtaaatgagacttctcatagaagccatgtagagtgataagattaccaagaacagaaatccaagtaaaattagcatcgagtgagcctaggaagagaagcatcctgcagaagcaagcaaattcagtgtggatggagatgcctgaggagggtcagcactgtggagtgctgtgaaagctgtgagagcagcccattttargaagaatgaagagtcagcactgtcctgtgctacgtctactcagggaacatctgaaaatcaaccactgtctctgacatttgggcagttagttactggtgacctttg

SEQ ID NO: 449925 - DNA, 578 bp, Homo sapiens
tcaatcaagttgacactcagtattaaccaccacacatgaggtccctgagacacttatacatagacaaaaatggctggcaaagaactgttgaatgcaagctgaaattttgtaccttggtgagctagactggacaacatggagaattttgtgtttaggctgcaggtagcctagagcaagacacaaaaggctgatgagcatccttctgggtcctcaggaaaagggaaacatgaggtgcagggatagcaaaagaggaagacatggcaaagaaatgagctacctcaggaggaagggctatcctatacatcatgaatacaaattttaggcaacttttaaaacagtttttgtctacttcctctccggcccctcttttcttccacttrgcactccttttcttgagccttcatggtgcccatctgctgtttctaatctttactatacacctgatccaaactttaattctcacacttcctctcttctgaggctttatcttccaaactaccccactaattagtactgaaggctttagtttagcctgctggaggaaagactcagaaaagctgtgtagcatggcgattgaa

SEQ ID NO: 449926 - DNA, 564 bp, Homo sapiens
tggcaatgattctttaaatacaacataaaagacatatccatgaaagaaataattgataagctgacctcattagaatttaagatttctgccttatgaaagataataccaagaaaatgagaagagaagacatagactgagagaaatacttgcaaaagacacatctgataaaggaccattacataaaatatacaaaggcctcttatgactcaaaaataaagaaatgaacaacctgatttaaaaaatgygcaaaatacctaaaaagacatctcaccaaagaagatattcagatagcaggtaagcacattaaaagatgttcaatatcatacatcattagggaactgcaaattaaaacaatgagataccactacacacctatgagaatgatcaaaatctaaaacactgacaacacaaaatgctggcaaggaatttggcagagagaaacaataactctcattcattgttggtggaaatgcaaaatagtatgcccactttggaaatcagttttgcagtttcttgcaaagctaaatatactcttgcataggtccaggaattgcactccttgct

SEQ ID NO: 449927 - DNA, 461 bp, Homo sapiens
aaatataattttggaagagagccagaaaggataggagagaagagtcaggacatattgcagcaattgaggttgaggcatagtagtatagagtactatagagttatagtagtagagatgcaagatgagaaggggtttgagagaagtatttgaggcaaaatggagagagttgaggatagattggatctgagggaaataaaagatggagatgttaaaaattgttcttgggtttgtggctagcacaactggctggacgatcatgccagtccacactgtaaatggttaataatagcagctgtctggtaaacctaacttcagtttgaaaacatgtggagtttgataagctcttcagaagagtcaatatcaaatgaagagataygtagaatgatctggggcttaaaggagaaagctagcctggggttatgaatgcttgagtcacccatgcaaaagtgttaattgatgtc

SEQ ID NO: 449928 - DNA, 625 bp, Homo sapiens
acatggccacccagataaagactatgattcccagctagaggttgcctacatggttaaatgcaatatgaatagaaatgatgtattcaccatctacgccacttcctcaaacagatgaaatgtgcatgtgattgtgaaccagctttgactataaggtcaaccacatgtcctaggaaatgacaaaacaataaacaaggaattcaagaggatctgaaggataaggtctaagtacaggtgctgtgggaaaatagaaggagaccatggcccagttttgytggggtatggattgcttctacattcatccatcaagttgttcataatattttcttattatccttttaatgtctgcaggaactgagtgaagttccttctttaatttctgatattggttatttttgtcttctatcttctctattgatcagtctggctacaagcttatcaatttcattttttaaaaatgagattttggtatgatttattaattttctctattgtttttctgtttacagtcattgatttccatttatctttattttcttccttctgctcactttgggcttaatttactcttctttctctattatcttaaggggtaaaattagataactgatttgaaaacttttttact

SEQ ID NO: 449929 - DNA, 625 bp, Homo sapiens
acatggccacccagataaagactatgattcccagctagaggttgcctacatggttaaatgcaatatgaatagaaatgatgtattcaccatctacgccacttcctcaaacagatgaaatgtgcatgtgattgtgaaccagctttgactataaggtcaaccacatgtcctaggaaatgacaaaacaataaacaaggaattcaagaggatctgaaggataaggtctaagtacaggtgctgtgggaaaatagaaggagaccatggcccagttttgttggggtatggattgcttctacattcatccatcaagttgttcataatattttcttattatccttttaatgtctgcaggaactgagtgaagttccttctttaatttctgatattggttatttttgtcttctatcttctctattgatcagtctggctacaagcttatcaatttcattttttaaaaatgagattttggtatgatttattaattttctctattgtttttctgtttacagtcattgatttccatttatctttattttcttccttctgctcactttgggcttaatttactcttcttyctctattatcttaaggggtaaaattagataactgatttgaaaacttttttact

SEQ ID NO: 449930 - DNA, 573 bp, Homo sapiens
tggtttccaggggttggggtgggggtgggaagcaggaaagaaaggagagtaactgctaatatgtatgaaatttctttctgaggtgatgaaacattctaaaataagatagtggtaatgtttttaaaatcttgtaaatatactaaaaccaactaagttttacactttaaaaaataaattttatgctaagttaattatatttcaattttaaaataaaagtctttgggatttcacagagggaaagtttttgtttgtttattaataatgcatacaaagcactattcagacaggtaaagaacagtgaaatggactaaataaaggtaagaacgcctgttcatcaaacactaagtacackttcagtgtggttagcctatttatttgaattacaaattaacttaatatgttccaattttcttttattttaatattcggttaagctataaactcattgaggttgtttatttaattttgctttagttttgcttcctcaagtctctgtaagaaataataattgaaagctaaaatttgtgaaataataatcatttcattaacagtagcttatgtttttgagcaatt

SEQ ID NO: 449931 - DNA, 597 bp, Homo sapiens
ggatttaggcagcaacaatatggataaatttttagtgtgttttgctaagtgaaagaaggtagactgaaatggctgcatagtatctaattccatatacaaggaactttcaaaaaggcagaactataagaaaataattgttaaagtgtttaagtgttagttatatggtatctatctatgtatctatgtatctgtctacctattttagcaatgtagagtgaaatataaagtgtgatatcagtaacaaaaaggttaagaggggcaatattagaagtatattattgtaagattcttatactcagtaatatactacatgacagaaaactgacaaagwtgtgtactataaaccctaaagcaatcactaaaataacaaagcactaaaatacagctaaaagccaactaaagaaaataatacataacatttgtttaattcaaaagaaagaaaagggtttatagaacacaagtggcagatagaaaacaggaaaataacagatctcaaggtaatcaggtaattgccagaaagcctgtatgaggatctccatagaaaacaactattgaactagttaaaatcactggacaaagttttaaattatctggaac

SEQ ID NO: 449932 - DNA, 570 bp, Homo sapiens
tttacatgacatatctgttgcaatccttttctcctttattctattttatctttatatctgtttttttttcccctaggagatgtataatttggtcttgctttattatcctggtggataatttctgtcttttacttggratgttagacaatttctattcaaatcaattatcaaaatgatttggcttatgtctaccatcttgctaattatattccattcatcccatctgttctttatttttttcaccttttcctgccttcttagggattaattatgttattccattttacaaccactattggcttattagctatacatctaggtttattattttatgggatgctctcagatacacaatatgcattttttacatattacagcctgccttcaattgatattataatttttcacatgtaatataaatatctacaactcttttcttcattttcttcctccaatcctctatgctattttggtcatttattttatttgtatgtctattttaagttcattatttacttttggtgttttgcattagaatgcttattaatttttaaagaaaaatttaaatcg

SEQ ID NO: 449933 - DNA, 547 bp, Homo sapiens
tgagcttatattttttatcaaatttgatacatttgtagtcattaatttttcaaatttatttttctcctcttgcacatcatttttctcttttcttgtacttcagttacacatgtatacaacaasttgatactcattttactgaggttctctctctctcttttttttttcaggttttcccccgccatgcttcattgtcaatagtttctgttggtgttcttcaggttcactaatcttccttctaaattatctcgtcttatattagccttatccagtgacctttccagtttagacattgtgttttctatctcgaaaagttttaaattttttcatatcatgcgtttctttcttctcatttcctccaaataactgaacataatataattactgttttaacattctttcatgcaaattctaccacttctgtttcaagggactgcgtttccatttagtgatttttctcatgattctagatcatattttttctcaccttttatcatgtctagtaatttttttattggatgctgtacattgtaattttatgctgtgg

SEQ ID NO: 449934 - DNA, 534 bp, Homo sapiens
aagaaacatctatgattaaagtttataacggtactttagttcattatctttaaggcatttaccataagtgtctgatggcacagataaaggtgtctacttagagttatttctgttttatgtattaggaatgtaaatctgcagaagcygaatgagtttcaaagtattataacaaactgttgcatttaaagagacatttatgttctggagtggaaaatgattgcactgatgtttttatcaaacaccctgatagttttataaggtagtctgaccaacctataaagtactgccttcaatccatacaactgatattagagggagaatagcctcttctatatacttagcaataaaaggaaatgttcaagttgtctctttgtgaattcttcaataacttcaaacaattcatgtggttttatacaatcttcccaaccttcctatttttattctacaaaactatgttgttgaaaatgcttcaggcagaatatagcctagaatataacccttagataaaatgtatacatatacctatggtcacgt

SEQ ID NO: 449935 - DNA, 534 bp, Homo sapiens
aagaaacatctatgattaaagtttataacggtactttagttcattatctttaaggcatttaccataagtgtctgatggcacagataaaggtgtctacttagagttatttctgttttatgtattaggaatgtaaatctgcagaagccgaatgagtttcaaagtwttataacaaactgttgcatttaaagagacatttatgttctggagtggaaaatgattgcactgatgtttttatcaaacaccctgatagttttataaggtagtctgaccaacctataaagtactgccttcaatccatacaactgatattagagggagaatagcctcttctatatacttagcaataaaaggaaatgttcaagttgtctctttgtgaattcttcaataacttcaaacaattcatgtggttttatacaatcttcccaaccttcctatttttattctacaaaactatgttgttgaaaatgcttcaggcagaatatagcctagaatataacccttagataaaatgtatacatatacctatggtcacgt

SEQ ID NO: 449936 - DNA, 534 bp, Homo sapiens
aagttcaatgtgctaattaattttattatatgaatttaagaaagctttgtctaagccaggcccatatagatttacacaaagatgttcctagaagtttttgtagttttaagatttccatttaacactataacagttcttgaattaatctttggataaggtaaaaatatgaataaatattctatttttgcatatgtatttctaattgttctagcaccattttttgtaagactatttttcttcactgaatttctttgacattttagtcaaaagccaattggtcatacatatgggtctaattttagaatttccactctgattcaytgatttatatctctactgcttagtcaataccacatgtatcataaattttaggcagtattaattatatcaccactattataaatgtaaaaccattggctatatctcaatatcaaacatgattactgattacttcagtctagaaatcagtgtgagtgttgaattttgttctttttcaaaattgcgtttgtctatcctattagctttatataattt

SEQ ID NO: 449937 - DNA, 534 bp, Homo sapiens
aagttcaatgtgctaattaattttattatatgaatttaagaaagctttgtctaagccaggcccatatagatttacacaaagatgttcctagaagtttttgtagttttaagatttccatttaacactataacagttcttgaattaatctttggataaggtaaaaatatgaataaatattctatttttgcatatgtatttctaattgttctagcaccattttttgtaagactatttttcttcactgaatttctttgacattttagtcaaaagccaattggtcatacatatgggtctaattttagaatttccactctgattcattgatttatatctctactgcttagtcaataccacatgtatcataaattttaggcagtattaattatatcaccactattataaatgtaaaaccattggctatatctcaatatcaaacatgattactgattacttcagtctagaaatcagtgtgagtgytgaattttgttctttttcaaaattgcgtttgtctatcctattagctttatataattt

SEQ ID NO: 449938 - DNA, 458 bp, Homo sapiens
agtgtgagtgttgaattttgttctttttcaaaattgcgtttgtctatcctattagctttatataatttacagtctatttctactaaagattttatctctacaaaattcattgtctatttctgccaaaagttctgctgtggttttgaagagaattttgttgaacctatttcaaagctcmgttgaagtttaaggaaacttagtatctgaaaattattgagtcttatatgaaaatatgtgtgtgtgtgtgtgtgtgtgtctgcatgcacaagcatgtgtgtatgtataaactacccacatatgtgtcatatttattcattggttttatagttataaagagatcaattggttttatagttataaagagatcaattggttttatacttataaagagatcaattaatcagtcttgtacagggttgcttagattaatttctaaatattttatattttatattatt

SEQ ID NO: 449939 - DNA, 601 bp, Homo sapiens
taaatcattgaagccatttaggcctagatcctctttattagatttcgttttgttgcttgtttgtcttttagaagtttgattgtgatctatttagacagatttctttgggtttaccctgtttggatttattttagcttcttgaaagcgtctataagtttrtatctcaagaccactttgagaaattttcagccattatttcttcatatgtattttagttccatactctttttttctctcctttctaaggtaagtcctttaacatgattaagataatttgttatttgtataaaacgatgatatcatagcaatctgcatttttattacaattttcacatgttctgatcatacattagacatatttgttcttactacattctgtgctttttttcccctcacagctttattgagatataatttatgtaccataaacatcacccacttaaagagtacaacttaatggttttcagtatattcacagatacacacaaccatcaccatggtcagttgtacagcactttcatcaccctgaaaagaaactctgtaccttgcagcaagcatgtcctaccacctagttttcccaccctctgccctaagcaactac

SEQ ID NO: 449940 - DNA, 503 bp, Homo sapiens
acacttcgtaaggatatgcaagttacctaggtaaacagttactgtgcctgggtagcaagggctacagaatccttgtggctgtaccagctgtcaaagttctcctgagtctggtaggttctgggagtcagaagagatgaggaagttacacaaagttctcctgagtctggtaggttctgggagtcagaagagatgaggaagttacacaaagttctcctgagtctggtaggttctgggagtcagaagagatgaggaagttacacaaagttctcctgagtctggtaggttctgggagtcggaagagatgaggaagttacacaaagcaggtgcaactatgagtggagagtcccttgctgtagcaacaaattcctgaccccygtcttctccaaaggacgtgtctgctaatagttttctaaaaatccagttcattcagaattaagcagtgaaacaagaaaaaaataagcacagtacaataaaattgtaaaagaaaagttaaattgagctca

SEQ ID NO: 449941 - DNA, 604 bp, Homo sapiens
ccctggcttacaatggcttggcttaagattttccaactttataactgtgtgaagtagaaacacacattcagtgaaaatcatacttctctaatggtgcttggcagtggcagtgagccacaggtcccagtcagccactcctttcgacttaggatattttcaatttatgatgggtttatcaggacataaccccttcatgcaccatagagcatctgtactccccaaactgccagcattacatctctcctactgtcttggacatccttccttatctaccaacttatatatcacctgtcagtcattactactctctttgcataatttgcattatgcaaatgcacatggtttctakgctttcttcatctctcccatgtcttaactgtccggtctgagttccctctctctttatctagtatccagcactggtctcatcagggtagatttctcaaagtccagagtgtctcatcctcaaagctaccagggttaaaatatgcaagccttcagacaggccctcaaaaccacatatctaacatggaatgccaaagaattatgaagggaatggaggaaaaacaaaagaaagctttcataaggctataacctaaattac

SEQ ID NO: 449942 - DNA, 546 bp, Homo sapiens
acaagggaggagattgaaaagatttcacattttacactactgtagtgcttaattttttaggtgtgtatgcagtaatcttaccctataaaaataattatagtgatgtaaaaatacgcactaaaaaaggcaagaaaatgtaacaatatgaaagacaattttgaacagctgcatcatcaatagaagggcagatcagaaaacaaaactattctttatgaagaaaaattggcttaattgggtagaataaataataagagacaatatttaattwaaaaaaaattaaaagttgcatagctatgcagattcaaagggcttcctatgtccagaaaattccagtcaggagaaacacactcaaattgtttttaattacagagagaaagtaaaaatcctactggcatccagtagatataaaacaaacaaataaaaataatgaaaatctaaagcaataaagatcctatgaaggaatgcaaactagcctacttcacatttctcctttgcacctttttatgtagattataccaacttttgcataattctttaggaataaca

SEQ ID NO: 449943 - DNA, 559 bp, Homo sapiens
tctcattttctatcctgcctgctgccatgtaagatgtccccgtcaccttccaccatgattgtgaggcctccccagccacgtggaactgtgagtccattaaacctttttttctttataaattacccagcctcaggtatgtctttatcagcagcatgagaacagactaacacagtgttctctgagcttcctggatctgtggtttgatgtctgtcattagttttagtacattctttgctattattactttaaatatttcatcttctcctttccctaggtcttctctttctattattagcgttatgtttatttacatcatttgcaattgttctayagctcttggatatttatttttttcattattttttctatttgtgttttagtcttaaaagtttctattagaatatcttcaagctcaattattttctctttggccttgtgcagttcacagctgagcccatggaaggtattccttttttctttatttaccatagtctgatgtgtgcaatttttttcctaattctttcttagagtttccattcctcttctgacattacccacc

SEQ ID NO: 449944 - DNA, 546 bp, Homo sapiens
cagcttggtcggggagaccctaacccagtggcactagaggaattaaagacacacacacagaaatatagaggtgtgaagtgggaaatcaggggtctcacagccttcagagctgagagcctcaaacagagatttacccacatatttattaacagcaagccagtcattagcattgtttctatagatattagattaactaaaagtatcccttatgggaaacgaagggacgggccgaaataaagggatgggttgggctagttatctgcagcaggagcatgtccttaaggcacagatcactcatgctattgtttgtggtttaagaaagcctttaagtggttttccaccctgggtgggccaggtgttccttgccctcattccagtaaacccacaaccttccagtgtgggcgttatggccgtcatgaacctgtcacagwgctgcagagattttgtttatggccagttttggggccagtttttggacaaattttggggggcctgttcccaacagatatgaatcagttttttcctgcagctgtttagtaaacaatt

SEQ ID NO: 449945 - DNA, 553 bp, Homo sapiens
aacccttatatgcaacaaagaggtgaataggtatattcctaaaatatacttagtaaaaccatgcttatgatatctggaatatagaaaacttgaaaagtccacctaattatctcaataaaacatgtaaaatatttaaatacctaaataaatgttttccacaattatgagagactaatttcaattcataattttattattaaatgtctttacagagtgtgctagacatyggtgaatttcaaagaacaaaaataacaaaaatccaacaatataatcaggaacatttcatagattttacccaataaaatgtttaaaagttaaaatgtttttataacattttaatgtttgagatagagtttctatgtggacagaaatgagcatcctgaaagaaaacagaaatgtagtacagttgtttttaaaaatggcatcattagagggcactattgaatgccttgtaggaattgcaaacttgaacatatagccaagaccaaaaattttatggcataaaactgtatctttagctattcttgatgacataatataaatagatttagaa

SEQ ID NO: 449946 - DNA, 656 bp, Homo sapiens
agattttacccaataaaatgtttaaaagttaaaatgtttttataacattttaatgtttgagatagagtttctatgtggacagaaatgagcatcctgaaagaaaacagaaatgtagtacagttgtttttaaaaatggcatcattagagggcactattgaatgccttgtaggaattgcaaacttgaacatatagccaagaccaaaaattttatggcataaaactgtatctttagctattcttgatgacataatataaatagatttagaaattataaacttttgtcatcaaactagaaaaggaaagaaggaagagagggaaggagggaaggaggaaagtgtatgggatgaatcacattaackttaaagttgagaagcaggaaagggaacaatagaggccttaatttgaaagcataaaatttaggattatcaaaatgctgaaggaactgaactaaagctagaaggagaaaaagccaaaggcactttatctttaattttagattatcagtattgtttaagttagatttggaatgtttaaaccttgatgaaacaacatcaaacgatcacatgaatgcccagatgcagcatagtcttgtaaagaaaacaccataatattctttaaaaagttttgatttacttattcagtcaggcagcatttat

SEQ ID NO: 449947 - DNA, 591 bp, Homo sapiens
ggtatgatttatatatagtatgtgtatataaagaaagaatgcaaagatgagcagtaatgtaaatactatgtttctgtttgttaaaaatgaatactaccatcttggttcattaaaaaaatagggttgtattacatacacttttaacatcttgagtttttcaataatacatttgggatattctccaagtaarttgttgtagctataactgatattttacttgcttgaaagaattctgcagtttggacatattctgtagtgtagtgcaatgttcatcccctctaatactgaatggaatttgccttttttccagtttttgacacttgcaacaatgttaaaataagcgtccttatatgagtgggtgtgtctgtgagtgtgtgtatgtaattacatatacttcctgtgtatataacatacacacacatatatatctatatatttagagagagagagataattagttttctattgtcactgtaacaatttagcacaaatttagtggcttaaaaacttattctcttataattctggagatcagaagtcctaaaatgggttggcagttccttctggaagctgtagaagagaaattattcc

SEQ ID NO: 449948 - DNA, 591 bp, Homo sapiens
ggtatgatttatatatagtatgtgtatataaagaaagaatgcaaagatgagcagtaatgtaaatactatgtttctgtttgttaaaaatgaatactaccatcttggttcattaaaaaaatagggttgtattacatacacttttaacatcttgagtttttcaataatacatttgggatattctccaagtaaattgttgtagctataactgatattttacttgcttgaaagwattctgcagtttggacatattctgtagtgtagtgcaatgttcatcccctctaatactgaatggaatttgccttttttccagtttttgacacttgcaacaatgttaaaataagcgtccttatatgagtgggtgtgtctgtgagtgtgtgtatgtaattacatatacttcctgtgtatataacatacacacacatatatatctatatatttagagagagagagataattagttttctattgtcactgtaacaatttagcacaaatttagtggcttaaaaacttattctcttataattctggagatcagaagtcctaaaatgggttggcagttccttctggaagctgtagaagagaaattattcc

SEQ ID NO: 449949 - DNA, 591 bp, Homo sapiens
ggtatgatttatatatagtatgtgtatataaagaaagaatgcaaagatgagcagtaatgtaaatactatgtttctgtttgttaaaaatgaatactaccatcttggttcattaaaaaaatagggttgtattacatacacttttaacatcttgagtttttcaataatacatttgggatattctccaagtaaattgttgtagctataactgatattttacttgcttgaaagaattctgcagtttggacatattctgtagtgtagtgcaatgttcatcccctctaatactgaatggaatttgccttttttccagtttttgacacttgcaacaatgttaaaataagcrtccttatatgagtgggtgtgtctgtgagtgtgtgtatgtaattacatatacttcctgtgtatataacatacacacacatatatatctatatatttagagagagagagataattagttttctattgtcactgtaacaatttagcacaaatttagtggcttaaaaacttattctcttataattctggagatcagaagtcctaaaatgggttggcagttccttctggaagctgtagaagagaaattattcc

SEQ ID NO: 449950 - DNA, 518 bp, Homo sapiens
ttgagacttctactaatggtgtactaaagatcttgtatttttatcaaagtcacttatagctgcattcttgatttttattaccttatgtattttactttgtgatttttttctgtgttctctattactctcacatattagttactggaaaagtgatgttttataatattaaataatcttatccaagggtatatattgcaataagattgtatatgattatacatatttttttctttaataatgttttagttgtttaggctgacttcttttcacctccaactctgttttgttttctgtgcttcctctctatctagttgcagacttttgttttcygtgcttcctctctatctagttgcagaccctactgggtgtcttgttatgttcttttgactgctccctggagctcccgtgaaaccttaagtaggggaggctaatgagatgggaagtgcgtaaatatttggcctgtagaacaatgcatagttgcagctgatagtccatgccctgatagaaagcagggccca

SEQ ID NO: 449951 - DNA, 602 bp, Homo sapiens
ttacttaaaaagagactgaatctgcccacttcctaccacctcttcttctactgccccctttgtagccatcagcatctctcctgtgaattattccattatcttctgcccttgcctcaactagatttatttttagcatagcagccagaatgtaattcctttgttcaatagcttcccattcctctcaaagtaaaccagagcatttaagatagtttgcaaggctctccacaacctggatccctgccttacctatttaacctcacttccaamaactgctgccctccctgctcatttcactccagccactctggcctctgtttttctccttaatgttccgaccacttgctcccatgcaaggaccttcacattcatttttaatttcctttacaatgttcttctctgacatatctgcatgactcactctcttgcctcataaaggtctttgtcaaatttcaccttctcaggaagacctctgaccactctgttaaaaactgtaaacacttatccccacccaggtcacttctcatcctctgtccctgcttgacttgtctctattgtgtggattatcctctaatctagtaggttatttactgtctatatctcct

SEQ ID NO: 449952 - DNA, 602 bp, Homo sapiens
ttacttaaaaagagactgaatctgcccacttcctaccacctcttcttctactgccccctttgtagccatcagcatctctcctgtgaattattccattatcttctgcccttgcctcaactagatttatttttagcatagcagccagaatgtaattcctttgttcaatagcttcccattcctctcaaagtaaaccagagcatttaagatagtttgcaaggctctccacaacctggatccctgccttacctatttaacctcacttccaacaactgctgccctccctgctcatttcactccagccactctggcctctgtttttctccttaatgttccgaccacttgctcccatgcaaggaccttcacattcatttttaatttcctttacaatgttcttctctgacatatctgcatgactcactctcttgcctcataaaggtctttgtcaaatttcaccttctcaggaagacctctgaccactctgttaaaaactgtaaacacttatccccacccaggtcacttctcatcctctgtccctgcttgacttgtctctatygtgtggattatcctctaatctagtaggttatttactgtctatatctcct

SEQ ID NO: 449953 - DNA, 553 bp, Homo sapiens
cgtgttttaaagtccaaggaaccaccttacactccaattttcctgtgacccagcttgctatatggaaacaccactaagatttcagatcaatcatagttactcttaaactccatcctctgcctcaagagtctaccttagattcagtctttgtttttaatacttaarcccaaataaacctttgccaacaattctgaattgttttggcatgcgaaatgttttacctggcacctgtaggtataccaactcattgagtaactcattgactcttcctagaaatgtttcatcataaacattgttatgaccattttacaagaatcagaatctccaagaaggtaagtcatttaccagagtcccacatggtgttgcagcaggcctgagattacagtgcaaactttctgacctcaagatcgtggtcttggctgtttttctacactgcagtgcctcttcagggttttatgggtagcctttttcttcaaaggtgcaaccacgtaattgtctatatgcatccttcttatgattctgaaactctttcaattcttgtgtcctcacctag

SEQ ID NO: 449954 - DNA, 588 bp, Homo sapiens
tggctgatattttctgaaccttctcttccttccatgagtatctagacctgtcagtgggctggtggatagcattgctctctctgaaaatggcatagacccatcaaagccaaaggggaggtgattagtttataatgctaatcagacagaggcatttaccaaagtggttataaacatgaactctgggctcatattacctgtgttcaaaaccaggtactaccatttaccacctgaatataggaggcaggctatcttatttctgtgagccctagaacctatacctgcaaagtccagattataatgtctcctggarttgctagtggaatcttgtaaaatgcttcatatattgtttggcttatgcaggcccttcagcatcattactgtacatgttatagaagcaaatgtgaaaagccaggtcccaggaccagggattagagggctgaagatctgggtgctgggagcgtggaagcatgtaagtgagacaagggagaacttgtttagaccccatgatttcacagtggtattctctgtgaaattcccacaagatgtgtgaaagagttgacttcatttaaagggccagaggcagtatgg

SEQ ID NO: 449955 - DNA, 576 bp, Homo sapiens
actgcccaacttaaggtctaaacagcaatggcagtttctrtttgaaatacctgagtatgtcccattctgatcttttcttcctccctcctccttaaaaataaattctgtcctgaaatttttgcttgattttcttgcacttataaaatgtagtttatcacaatatacatgcctctaagcatattatttagctttgctaatttgttagctttttaaaaatgctattgcattgtaagtagtcttaacagttggttttattttgattcaacatgttatgtttaaaatgcatctatatcatttatacctacaatatattcattttcactgctatagaaccttccactgtgtggagtcatttaaaagaatattcatgatcacaagatttttaagagcacagattcaatttattaatctcacccaaatttttacaatgacttacatgttgttcttcatttcttccagattctttcacctctaaaccaactttcataataggggccagagttctctttctgaatatgagaattctattaacatttcccccacttaaaagtctcagtggtttctaactgcccccaa

SEQ ID NO: 449956 - DNA, 548 bp, Homo sapiens
ttgttttcttcatagctatctaaaatggtctatttattattttgttgatgtgcttattgtctgtcttctctaactagaatgtgagctccatagaaactgcaaagaatgcaggcaggcagataaaccagcaggcaaatgaaatttaagtttcaagaccccaggagrttatgatagcaatgtaatcatgtggttatgggtttgggggctattttccagaatttttaaaaagtatgtgtttcattatattaaaaagaccactgtttatttttaccctgacactccattcattatattttgctttgtgtccagtggtgtgggcattttgggatctagctaaaggaaattttaagtgggtatataatttgcagggtttgatggggtacatttttgtgtagtttgtcatcacttctgtgtcttaagctattgttagattccacagattattaaggggtagagcagagactcaaagggatatttgtctgcctctaatgctaatgatcttagtattaaaccatgactttttgtaagtttagtgataacaggtgtcc

SEQ ID NO: 449957 - DNA, 548 bp, Homo sapiens
ttgttttcttcatagctatctaaaatggtctatttattattttgttgatgtgcttattgtctgtcttctctaactagaatgtgagctccatagaaactgcaaagaatgcaggcaggcagataaaccagcaggcaaatgaaatttaagtttcaagaccccaggaggttatgatagcaatgtaatcatgtggttatgggtttgggggctattttccagaatttttaaaaagtatgtgtttcattatattaaaaagaccactgtttatttttaccctgacactccattcattatattttgctttgtgtccagtggtgtgggcattttgggatcyagctaaaggaaattttaagtgggtatataatttgcagggtttgatggggtacatttttgtgtagtttgtcatcacttctgtgtcttaagctattgttagattccacagattattaaggggtagagcagagactcaaagggatatttgtctgcctctaatgctaatgatcttagtattaaaccatgactttttgtaagtttagtgataacaggtgtcc

SEQ ID NO: 449958 - DNA, 533 bp, Homo sapiens
aagcctatgatactctgcaaatgtatgcaataaatataattccccatttcttctgcaaaggaacatataatcagtgttgtgctggagccagcttgtaccagcattaagagcaaattgtgcccatctcctcctaactttatgtctaatgacatgatgttggtagatttaattagaactttataaaagttccacaggggtggaactttttataccatgggaattagcaaatgctataaatcaaagttttattttttttgtcaaaaatctgattgttaaacmtttaacaggccatcactacctgttacactagagtacactagagtaactgtattttggagtgaatgaaaatattcagatatttctagatatttagaatctgtgttacgaattgatagtgataccaagggattcaaaatgtcctcttttaaaatcatggtatatggtaggtatagggtaggtaataagtggagtcatggtcccaggctatatcacaatgactccattgggtatacaaactcaccttatggtaattt

SEQ ID NO: 449959 - DNA, 615 bp, Homo sapiens
actttctgactttttgtagagtaaaaatattctttgagaatattctgaagaaggtgctttaaattttacaaacttatccaaagcttttgttttccatagattctcacatcaatgtagttttacaaaatactttaggaaataatgcactcccacttcctgaaagaactatataaccatctgtgttattcatatttaattcattaatatattcactcattcattcatgcatatatttatatagtcattcaaaattttgactagcattcattgtgatctgagcactacagatacaaagatgaatgaayagaatcctagtccctaaggaatatgctgtctgattagaaaatgggcatttggatgaataaattataaaataatgtaataagggcaataatatgaaaacaagagattctgagagcacacaacagggcgaatcaattttcccctttagtttaaaatgtattagtctctctttcataaaacgggaatgataatactttctccataggattgttggaagacagaatagacttcgctgaaaagaggcgtgagtagcctaatttggtggtctgtgttttgtgaatttggtagcaagagaccattaaaagaaatgct

SEQ ID NO: 449960 - DNA, 615 bp, Homo sapiens
actttctgactttttgtagagtaaaaatattctttgagaatattctgaagaaggtgctttaaattttacaaacttatccaaagcttttgttttccatagattctcacatcaatgtagttttacaaaatactttaggaaataatgcactcccacttcctgaaagaactatataaccatctgtgttattcatatttaattcattaatatattcactcattcattcatgcatatatttatatagtcattcaaaattttgactagcattcattgtgatctgagcactacagatacaaagatgaatgaacagaatcctagtccctaaggaatatgctgtctgattagaaaatgggcatttggatgaataaattataaaataatgtrataagggcaataatatgaaaacaagagattctgagagcacacaacagggcgaatcaattttcccctttagtttaaaatgtattagtctctctttcataaaacgggaatgataatactttctccataggattgttggaagacagaatagacttcgctgaaaagaggcgtgagtagcctaatttggtggtctgtgttttgtgaatttggtagcaagagaccattaaaagaaatgct

SEQ ID NO: 449961 - DNA, 633 bp, Homo sapiens
tatttatatagtcattcaaaattttgactagcattcattgtgatctgagcactacagatacaaagatgaatgaacagaatcctagtccctaaggaatatgctgtctgattagaaaatgggcatttggatgaataaattataaaataatgtaataagggcaataatatgaaaacaagagattctgagagcacacaacagggcgaatcaattttcccctttagtttaaaatgtattagtctctctttcataaaacgggaatgataatactttctccataggattgttggaagacagaatagacttcgctgaaaagaggcgtgagtagcctaatttggtggtctgtgttttgtgaatttggtagcaagagamcattaaaagaaatgctgaagttaggaataagagaatcaactgtagaacttgtgaggggtacccagtgagaggaacaagatagcaaatgtatgtaagaaatggtcttggctatatgtttgggagcaaggaaagagctcagcaagtgcttatggcaaattaactgcattacacattttagttctgccatggagagaaacagaatcacttcacaatactactagatctgaagagttgatgaattctcacctatccatgttgcttaga

SEQ ID NO: 449962 - DNA, 570 bp, Homo sapiens
acagagaggcacatctcaaggttagttcattaagaaaataaaaattaataattaacaatttcaagtagtcatagctacccctaaacaggataggaagccttagaagatattaagtttttactacagaaattgcttatgattacactgcacaacaatgtgtaggagttaaactacatattcgaaagttcctcccaacactctgtatctatagttctgaacatcccattaatagtcatacgttaatgtccctttgttcctaagtgctctgactcagttgatcttaacayggaaagagagacaggtgaataggaaagaccagggaaattgattttctttccttaaagcaaatttccatttcaccacctattgctcataaacacctgcatacatttctgaacatcccaacacatgcctgggatgctcttactcattagcgggttgggatactgacacggattcattgccacattagtactgcatgttgtgctaactctatagagtatcttccattctggaagtctgtgcaaataacatcaaaatgccacacttctaaggtgacagggggcaacg

SEQ ID NO: 449963 - DNA, 570 bp, Homo sapiens
acagagaggcacatctcaaggttagttcattaagaaaataaaaattaataattaacaatttcaagtagtcatagctacccctaaacaggataggaagccttagaagatattaagtttttactacagaaattgcttatgattacactgcacaacaatgtgtaggagttaaactacatattcgaaagttcctcccaacactctgtatctatagttctgaacatcccattaatagtcatacgttaatgtccctttgttcctaagtgctctgactcagttgatcttaacatggaaagagagacaggtgaataggaaagaccagggaaattgattttctttccttaaagcaaatttccatttcaccacctattgctcataaacacctgcatacatttctgaacatcccaacacatgcctgggatgctcttacycattagcgggttgggatactgacacggattcattgccacattagtactgcatgttgtgctaactctatagagtatcttccattctggaagtctgtgcaaataacatcaaaatgccacacttctaaggtgacagggggcaacg

SEQ ID NO: 449964 - DNA, 570 bp, Homo sapiens
acagagaggcacatctcaaggttagttcattaagaaaataaaaattaataattaacaatttcaagtagtcatagctacccctaaacaggataggaagccttagaagatattaagtttttactacagaaattgcttatgattacactgcacaacaatgtgtaggagttaaactacatattcgaaagttcctcccaacactctgtatctatagttctgaacatcccattaatagtcatacgttaatgtccctttgttcctaagtgctctgactcagttgatcttaacatggaaagagagacaggtgaataggaaagaccagggaaattgattttctttccttaaagcaaatttccatttcaccacctattgctcataaacacctgcatacatttctgaacatcccaacacatgcctgggatgctcttactcattagygggttgggatactgacacggattcattgccacattagtactgcatgttgtgctaactctatagagtatcttccattctggaagtctgtgcaaataacatcaaaatgccacacttctaaggtgacagggggcaacg

SEQ ID NO: 449965 - DNA, 583 bp, Homo sapiens
atctgtacagaaattatccctatctctttaggtatatcacggataataacagtgaagctatttgcaatgcttcaagtaccttattttaaatactagcagtgattctttgtgagaggtattccactttctttacaaatcagagatgctgwagttcatagaagttttatagatcttgcagatgttaaggtacaaggccaggagtccattccagtgtttagaacttcaaagcttatatcttttccatgaagagataggtatgagcaagtcttgcgctgaacattctgaatatatggcttgtaattctttgtaacaaaaaaactggttgtcaatcaatgcctgaagtgcccaagagaatacttacctgacacaagacaatcttaggcaacagctggatttcaggacaacaaatatgttttaaaaggtgttatcaagcttcataaacttttccctgggaaatgtctgtttcgtcacacatccctgcattgtgaaattgcaaagtctcacaaaactttatgtctcctttggctcattaacttacgcattcataatttatttacttgttgagttttatatatgcattggg

SEQ ID NO: 449966 - DNA, 464 bp, Homo sapiens
actttgtaatggatctgaatggagtttatggtatcacgttcttaacagacagttgtgcagccctaggcatgatcgacacaattggtgggtgctctctggagatcccctaaagatacaataagtgggataaatgggcaatggagaatgaagtgagttggaaaagtgcctgtttgacttaataaatactagaaaggaaagatagggcaggatttatcttcgacgaataaatctgatttacttggactgtatacacacatgcatgcatgtatttttgcacacatgcatgcacacacacgtgtgcacacacatgctgcaayttgtcttttactttaaatatatcaagccttcttgggctttattctgacagtaagttgacccaccttgacttcaactgtagttaaagaaaaccctacctcatccagagcataatttgtctctgtctgttgctgtaagaagccatatct

SEQ ID NO: 449967 - DNA, 599 bp, Homo sapiens
aatgtattaatcatgaattgtgtttaaccgctagtaataaagatgcccctctcctactaaagaaaataaatcaatgmcttaaataagagatatttatttttcttcttattaaagaagttcaagtttggtgagggtagctctacagtatctttaataacccaaggtccttatatctttctattctgccacccacaggcacatggcttctatcttcagggttgcctcatggtagtcagacagatgttgcagcatcagtcattatgtctccattccagacaggacaaagcaggaaggaataaagacaaaatagtctcttacctaagtcagctctccccttttaaggaattttcttaacatcttgctttataatgttggtccaatcttatgttacatgtctgcaagggagcctgtgaaatgtagtttcttttagctgagcacactgccattcctaacagaaatggggctttgtttctatttaacaaaaacagataaagatatttggcaggcaattagttatctctgcttcatagagtaggagttagataggtcaagggtgggtggtgtacttctcaacaattaggtttcctcgattaggcaca

SEQ ID NO: 449968 - DNA, 646 bp, Homo sapiens
gggctttgtttctatttaacaaaaacagataaagatatttggcaggcaattagttatctctgcttcatagagtaggagttagataggtcaagggtgggtggtgtacttctcaacaattaggtttcctcgattaggcacatgtgaccaattttaacagcactaaacttcttcataatcattgtcataatctcytccattatatctcacaaaaaatggccctgctttggttacagattgtcttgttcatgaggtgatgcagaataaactaagtagatgtataagagtacaattcaggaagcttgtctgatatacacatcacttgcttgttggttctactactgctgccacttagaagtagccaactacttgagctctcaggaactggaactcactttaacttttttctttctgattcattgattgcagattatttctgaagaggaaacatattgctcttgtaactgtaaccttgaactattttagtgctggattttcgtctgtgatcaggatctttgagttaatacacccaaactctgaatcacagtaaagaactgccagcattatcaaacacatccattgtgactggatatctatacaaacccagcagagcctcttagctcttctattccaccaggacttggaaagt

SEQ ID NO: 449969 - DNA, 604 bp, Homo sapiens
ctttacaaacattatcccattttatccttacagcaacttacgtagtaaataatgatatctacattttatacacaaataaattgagactcagagagcttaggggagcttgcccagggccacatgaacactaaatgacagagctaggattcaaatccatgtttgtctacttaggaattattattcttttcaattactcttaagggatcagcaaccaacatggtaagttcttcctgactagagtagtaatggtaggtgctaatgtcttaaggcatttatccatcctggaggacatgttgacattttaactgagatctttgggaaaccaatgtcatggcccaaagaagtgattgcagcagtgggattttcaggctagggtgcttttgatcagcctcctaggcatgttcctactccttctctaccaagtgcctgcctttcaagttgcattagtcatgcatggcagaactgtggctccttttagagtctgtgcactctagctagtcaacagcccttgaaatgaaggtctggtaaccctrtattcatctgtccctctgggtttcaagcaatctgtcaaggatgtattcatgtgtattacaggtcagcacag

SEQ ID NO: 449970 - DNA, 576 bp, Homo sapiens
aacagcaaccacactgagaatcaacaagaactcaacctcttttacaacagatgcaaaataataataataaggaatatacttaagcaaagaggtgaaagaacccctacaaagaaaactataaaacactgctgaaaaaaattatagatgacacaaaccaatggaaccatatcccatgctcatggaggggtagaatcaatattgtgaaaacgaccatacagccaaaagcaatctacaagttcaatgcaattcccatcaaaacaccaccattattcttcacagaactagaaaaaacaatcctaaaattcatatggaaccaaaaaagagcccacatagcaaaaacaagactaaacaaaagaacaaatctggaaacttcagattacccgactagaactatactataagggcatagtcaccaaaacagcatgatactggtataaaaataagtacgtaggccaatggaacagaatagagaacccaggaataaaggtaaatacagccaactgatyttcaacaaagcaaacaaaaacaaagtgggggaaagacactctattcaacaaatggtgctgggatcattga

SEQ ID NO: 449971 - DNA, 617 bp, Homo sapiens
ctgttacaactggaggttctctagggatggagctagcatacctgcrtttaacaagccttccaggtgtttccaatgcacattaaaatccagaaatcactggcttaaagagaaatctagtgctagtctttaatagaaaaatgctaagattttcttccatttctctcatgcattcattcaataaacatgtaccaagcatttattatatacaaggcaccatacgaagtgctggaaaaaccccaggacaatttgggtggaaaaagaaagcattgtgcatgatttagggagccaaagctcctaatcctttccacgctgagtcagtgctttgttcatttcctatttcattttctttgggccacagccttatgccctgcttgatattgttcccaaagcactgtaggagtggatatcagacagcagcccacaaaacaggcatgaggaaagagtgctgcagcagcgacaaagtaccactgctggctttccttgctctgagaagacagcaagaaacaaacagagcaggaaggaagtccattcagaagaaactctgcactgccatgatttgttaatctggggccctcacataagcctccttgggtacacctgcgggttgcaagtgacag

SEQ ID NO: 449972 - DNA, 584 bp, Homo sapiens
tcaaagggatagtgtgtgtgttttgtcatcagctgggtatcactagaaatggtcattggaaacaaatatatattaattaatatatattagctacctgggatggactattcattaccaatagaggcgtcataaaaaagtctagcattatcttgatgtttcagtgtaacttcgggaaccatctggaatactatagttgtgatgacactgcttctgggtacagcaaacagcacaatcattaaaaaaatgcatttcaaatatctttctggaagctaataaattttacagcagttttaatccttcctcattgcaacaaagaaaagcttagctccagacaaattaaaagtaaattgatagccttaggggactctattcaaatatcagttttccacgttagaaatcttttttcctaaaacattgagagagagagagagagaagagagaagagagaaagagagtgagagtaaaacattggrtgggagagcaagactgatgatggagacaaagggtgtaaaaggggctagaagccagcactgtatatgaaaagacaagcaacagaggaagagtgagaggcagcccaaatcatt

SEQ ID NO: 449973 - DNA, 529 bp, Homo sapiens
ttacatggacaatgctaaattttactcttttgctcttytctttaaaatttactttgaatgattctttttccatttgtccgcttaattatactagtcggaaaaagtaagctatattttttcagggtgttgcctcaaaaacaattacacaaattcagaagaaaggctaattgatctattgtttgaggaagtctgataatttgaaggcaccctatgcttgtcccagtgctcttattaagaagaaaagattctttacacctttcagcacatgaagattacaatataatcctctggcctccagcttgcccaactcttctttaatagagagaatggctctctattaaagagaaaggctcttccatctgaagtttcagagaagtcttggaatctatctgggccacagctgtgagaactttttctgagttaactcgagcctttgcacgtaggagtagcagaaggctctctggttgagatgacctgaattaagacactcagacacagctctgtaaaaatctctttaggagctgatgca

SEQ ID NO: 449974 - DNA, 585 bp, Homo sapiens
ttacgttaggctgtgagtttctaatgagcaaatagttgaatggtttagtgaataccctgttggttttttggtggggtaaacacaaaattcataatttgagagacatgtaagactcgaaattttcttttatagtacatgttaaccattcattctcctaatagggaaatgtgggctcttttatagggtgtgcatattatgtagttgtacagttartactcttctctgtgtttttcttgtaaggggtgctgataacataccctactaaggaaattccaggcacagctgtttctaataataggtgccccaccccacagaattgtcaggcttactctcaaggttctttggtgggaaggaggattttctggcagagtcttggccactgccattgtctcagattgcctccctgtagcttccttggaggtatgagtttctaagcagaaagatttgctgtgatgagggaaggccacaaaactgaaggaagagagatgaggtcttatagaactaagtgagaggctgttttggtcatggcagagatgagttgaacactatggaatggagacaagatgagaagaggagtgggaatca

SEQ ID NO: 449975 - DNA, 600 bp, Homo sapiens
aggatatcgttctctaaaccagtctccaggaagaagagaaagaaaccacactggctagtgaagaagcaggagcttcttgttttaattgctcaccaatggttggttcttgagtggctatatttcagagcttttcctaaatgtattgtttataggtgattatcattctgtgacagtcccttgtttcaacaggcagcaggggtgttcagttggagcaaattagctttggcttgagttgttcatggggccttgatgttggggaaacagagacaaattcagttgtgaaaagtattatgtattaagtgtttgaatttatatatttttctatgtcaaaattataatataaattaccattgtttgtggaggattacatttaaaaaagcaaaaagtgaaaaaaaaaagctctggacayctttaataagctcgccactgttttttgtagtgtagacaagttaatggtcatttattgtgtactattcattgattcagtgatgtgaaattgagcccccaaaaggttgtttctgaagctcgagtacttcccaatgccgctactttgctgtggacacccctgctttaaaaacccttttgctagctgtgctattg

SEQ ID NO: 449976 - DNA, 543 bp, Homo sapiens
ctctgacttctgtactggatgcatttctactgtccttctgtaytaggctctcagaacaagattcctcacctactgccattttctatccatcacaaaggagcacataaagaatgacaggctccaaacagactgagcttcttccagcccttttgcactgaaggaacactccacagtgacaggcttttgaaggagatgacaaagagaagccccataatgaaagctgatgacagagatttctctgcatgaagttggtcttaccttaattcctctgtgagctgagttatggagcaatcacaggtcacacaaattgataacgcatttgatagggcattaaaaatagcagataggaaaaattgtagaaaataagcttttactccaggggaattcgtagaatagaggactaacctggcagatattacctgaaatgccagctctaaaactatgagccttccagttccagttcctagtcccaaattgaccttgcccaccgcagaatgatttggcatatgcagagtaaattaaaaataaactccacaaggaagg

SEQ ID NO: 449977 - DNA, 561 bp, Homo sapiens
aaagtgccccaaatcctgctggatgcagtccatcagcctccaacatgcattgggtttaataattctggaatcaaatctagtttaaaagaaaatctaccacatttttggctcttaagtcaaaccccaagtgccaagtatatattgattctgtagggctcagtcagcctcctatggcctgaaattaaaaataacagcaagaacaaaaatacattttttattgaattctggctcttttctgataayctataacaaacatcaaaatgagcagaggcatggtggactgcctctcacgccaacaaatcccacaaagagaatgacaatcagtgaaatatattgttaagcatgaatagtagctaaaatatttatctctgttgcaaggtattaaaatgaaaaaactttcaaagtggaagcttcaagcaactgcattagaagttgcataatttggttagactgaccttagaatggaataaaaagctgcttatttccataatgttggccttcaactgtataaaaggttagataatttatcatgatatacaaaacagttttcaagaataccca

SEQ ID NO: 449978 - DNA, 561 bp, Homo sapiens
aaagtgccccaaatcctgctggatgcagtccatcagcctccaacatgcattgggtttaataattctggaatcaaatctagtttaaaagaaaatctaccacatttttggctcttaagtcaaaccccaagtgccaagtatatattgattctgtagggctcagtcagcctcctatggcctgaaattaaaaataacagcaagaacaaaaatacattttttattgaattctggctcttttctgataacctataacaaacatcaaaatgagcagaggcatggtggactgcctctcaygccaacaaatcccacaaagagaatgacaatcagtgaaatatattgttaagcatgaatagtagctaaaatatttatctctgttgcaaggtattaaaatgaaaaaactttcaaagtggaagcttcaagcaactgcattagaagttgcataatttggttagactgaccttagaatggaataaaaagctgcttatttccataatgttggccttcaactgtataaaaggttagataatttatcatgatatacaaaacagttttcaagaataccca

SEQ ID NO: 449979 - DNA, 566 bp, Homo sapiens
ctactatgaacacctttatgtgcataaactagaaaacctagaggaaatggataaattcctggaaatatacaactcccctagattaaaccaggaagatatagaaactcgtaacagaccaataatgagcagtgagattgaaatggtaataaaacaattgtcaacaagagtcagacagattcatagctgaatttcatcagatattcaaagaagaattggtaccaatcctattaacactattccacagaacagagaaagagggaatcctccctaaatcattctatgaagccagtgtcatcctaataccaaaaccagggaaggacataacaaaaaaagaaagctacagaccaatatccctgatgaacacagatacagaaatcctcaacaaaatactagccgaccraatccaacagcatatcaaaaagatcatccaccatgatcaagtgggtttcataccaggcatgcagggatggtttaacatatgcaagtcaataaatgtgacacatcacacaaaatttaaaacaaaaatcacatgatcatctcaatggattcagacaaagcatttgaca

SEQ ID NO: 449980 - DNA, 621 bp, Homo sapiens
gtgcaaacagggattacttttatctcttccccccaaagtttcctctgctgtgctttggaaaagtaaatcaataaggcatgagaagatagagaattaataaataaaggtatgaatgacctctccctaggtgwtctaaaaagaataaggtggtcaaccatattataaaatttgccttttgaaattttattttcagaagttaatatttcttctgtcatttgggcatattattattactattattattactactacaaatgccttttggaaaaaagcctgtagcaccagtaaatttaaaaatttcccactatgtgttcatcttctcaatattcctaagaggaaatcaagccacatccaaggtttttccaagatattaactccttcctaaccccactaaagcataccactacaaagctgctaagggtctcaagaagatggaagacagcataacagccatcagtccatcttttctaggaaccccacctctgtcagtggtgagcatctgttttttaatgattagaagattaaatacagagcactctacaaagggaagggaaatctccatgatcacccaagggtcagtctttggccttatacctaagaacgaattgcccttgctgagta

SEQ ID NO: 449981 - DNA, 546 bp, Homo sapiens
tggaaggaatagtattactagaaaacaaataagaatcaagaataagaataagaacccaaataagaatcttagttgggtttttttgcacaatttaataaagaggcatgaagggaaaactgggtcatttcattggaaagcaatgctctgtatgagtaattgttttcttatttgttagagtcccattcttgtttaatgtggtactttatgaaaggcatccctgcaagctgccttgattgtccttgtaacaccctgttttgatttcatagctatcacttgacaaggactgagggtgtaattccaagggctacagaaaaggatgggatattttgcttttcttagtcttccttttgacctttcctttaaggtcaaagttagctaactcaccaaatctcttaactttttagttctaaattttttattccagtaattgtaatccaagatgttcagttttatagaaaatataagaatagaaataagcattmgtttcaattgagcagttactagtgcttaatgcccattatcatattttatccaccaaaaacaatg

SEQ ID NO: 449982 - DNA, 658 bp, Homo sapiens
ttaaactagcttctccagagtcaaactcccagtaaatgtcaaaatgaagataaaaatctaggcagagttctcatcccacaatggcagcacaagccaactactgcccattcctccacaaattacaactaaaatctctagaagaaatacgaaaaagaactacttgagcatgctgaaattaatcaaaagcaggtggattgttaaagggtgtcaaaatacagagaagcaactgcacaaggataagtttcccagattaygagaaataaacacaattgctggaatctaactccggagcatggtattagaagtaaggcaaaactgcagttacttttgcaccaacctaatacttctgcctcagaggcacacccctattgtggggtggtgctgcggtgaccatggagtggccagccaaatagaagttgaggaaaacaaaaacactttgaaaaggaaaagggccctctgggggctaaagagtgaaagcaagaagagactcccagagccaagagaaagaagctctaattctgtgtatgaacctagataagtctgattcataagtgagacagactcaaaccagcatagcaaaggctttgcgaagtgtactgggattttaaccaccacccacagaagatcaagacagcttgtagtctgaacctaaccagat

SEQ ID NO: 449983 - DNA, 603 bp, Homo sapiens
aaaaacagtattaatgtaattttggtttataactccacttttgattttctacaggatttaagagacaattgcataaaataattatgaatctatgttaatgaatatataatattaaaccrtataatttgtgacatcaataacataaggggagaaaagctttaaggaagtagagtttttatatgcaattgaagttaagttggtatcaattaagatagatcatcataactctaggatgttatatgtagtgcacatagtaaacaccaagaaaatatacgcaagcagaagtgagaatcaaaatatgccattacaacaactttaaacatgaaggaaggcagtaatcaagccaatgaggaagaaaataacctgtaagggacatataaaacacccaaatggcaaaaaaaattgctttcttttcagcaatttatatgtaattggattgaaaacatatcaaaaatcataagttggcagagtgggtataaaaccaggatcaactatatactgtttaaaagagtctcactttagatctaaggatatgagtagggtgaaagtggaaggattaaaaagatattccatgccaatagtaataaaaagagagcagaaatg

SEQ ID NO: 449984 - DNA, 603 bp, Homo sapiens
aaaaacagtattaatgtaattttggtttataactccacttttgattttctacaggatttaagagacaattgcataaaataattatgaatctatgttaatgaatatataatattaaaccatataatttgtgacatcaataacataaggggagaaaagctttaaggaagtagagtttttatatgcaattgaagttaagttggtatcaattaagatagatcatcataactctaggatgttatatgtagtgcacatagtaaacaccaagaaaatatacgcaagcagaagtgagaatcaaaatatgccattacaacaactttaaacatgaaggaaggcagtaatcaagccaatgaggaagaaaataacctgtaagggacatataaaacacccaaatggcaaaaaaaattgctttcttttcagcaatttatatgtaattggattgaaaacatatcaaaaatcataagttggcagagtgggtataaaaccaggatcaactatatactgtttaaaagagtctcactttagatctaaggatatgagtaggrtgaaagtggaaggattaaaaagatattccatgccaatagtaataaaaagagagcagaaatg

SEQ ID NO: 449985 - DNA, 679 bp, Homo sapiens
agtgggtataaaaccaggatcaactatatactgtttaaaagagtctcactttagatctaaggatatgagtagggtgaaagtggaaggattaaaaagatattccatgccaatagtaataaaaagagagcagaaatggctatactaattgacaaaatagactttaagtcaaaaactgttaaaagagacaaagacagacataatataatgctaaaagtctcaatttaccaagaagatatgacaattataaacatatgcactaaatattagagctccaaaatatatgaagcaaacattgacagaattgaagaataaatggcyctacaataatagtagaaaacttcaatacctccactttcttcagtggatagagaaccaggtagaagatcataggggaatataggacttaaaaaacactatagacccactggacccaacagacacatacagtacactgcacttaacaacaacagaatatgtattttttaagtgcacatggagcattttccatatgttaagccataggacatcttaatagatttaaaaattgaaatacaaaatatcatttctcatcacaatgaaatgaaactagaagttaacagcaaaaacctggacaattcacaagtatgtagaaattaacacacttttaaataaccaatgggtcaagaaaaatcacaaaaaa

SEQ ID NO: 449986 - DNA, 679 bp, Homo sapiens
agtgggtataaaaccaggatcaactatatactgtttaaaagagtctcactttagatctaaggatatgagtagggtgaaagtggaaggattaaaaagatattccatgccaatagtaataaaaagagagcagaaatggctatactaattgacaaaatagactttaagtcaaaaactgttaaaagagacaaagacagacataatataatgctaaaagtctcaatttaccaagaagatatgacaattataaacatatgcactaaatattagagctccaaaatatatgaagcaaacattgacagaattgaagaataaatggctctacaataatagtagaaaacttcaatacctccactttcttcagtggatagagaaccaggtagaagatcataggggaatataggacttaaaaaacactatagacccactggacccarcagacacatacagtacactgcacttaacaacaacagaatatgtattttttaagtgcacatggagcattttccatatgttaagccataggacatcttaatagatttaaaaattgaaatacaaaatatcatttctcatcacaatgaaatgaaactagaagttaacagcaaaaacctggacaattcacaagtatgtagaaattaacacacttttaaataaccaatgggtcaagaaaaatcacaaaaaa

SEQ ID NO: 449987 - DNA, 555 bp, Homo sapiens
atccaatgaggcataatacttagtgaaaactacaaaacattactgaaataaattacagaagacatataaataaatgggaagacttcacatgttcacggattaaaagacttagtattattgagatattaatactacccaagrtgatttgcagatttaatgtaattctatcaaggtcccaacaatgtgtttgcagatatgtaaaatgtattttaaaatgcatatggaatcttaagggaccccaaataggcataattaccatacaatcccacaattccacttctgggtatgtcttagtccatttttgttgctatgatagaataccataaactgagtaatttataaagaaaatatatttatttggctcatggttctggagcctgggaatccaagattgaggggccacatgtggtaagggtcttcttgctgcatcatatcatggcaaaggcatagcatgtcaaggaaccacacaagtgaaacagagagaaaaaggagattgaccttctgacatactaacccactcccacagtaatggcattaatccactcatgagagcag

SEQ ID NO: 449988 - DNA, 555 bp, Homo sapiens
atccaatgaggcataatacttagtgaaaactacaaaacattactgaaataaattacagaagacatataaataaatgggaagacttcacatgttcacggattaaaagacttagtattattgagatattaatactacccaagatgatttgcagatttaatgtaattctatcaaggtcccaacaatgtgtttgcagatatgtaaaatgtattytaaaatgcatatggaatcttaagggaccccaaataggcataattaccatacaatcccacaattccacttctgggtatgtcttagtccatttttgttgctatgatagaataccataaactgagtaatttataaagaaaatatatttatttggctcatggttctggagcctgggaatccaagattgaggggccacatgtggtaagggtcttcttgctgcatcatatcatggcaaaggcatagcatgtcaaggaaccacacaagtgaaacagagagaaaaaggagattgaccttctgacatactaacccactcccacagtaatggcattaatccactcatgagagcag

SEQ ID NO: 449989 - DNA, 650 bp, Homo sapiens
ctgcacatatttatgggatacagtgggatgttttgatgcatgtttacaatgtgtcatgatcaaataaaggtaatgagcatgtcatcacctcaaacaattttcatttctttgtgttgggaacattcaagatgccctcttctagctatttgaaaataaacaaaaaattattgttggctataaccaccctacagtgttatagaacaccagaacttattcctcctgtctagctgtacttttgtatcgggtaaccaacctctggctatccaccccttcccgttacccttcccaacctctggcaaccactactcaactctctacttctgtgagatcagcgttttcagcttccacatatgaaygagagcatgcagtattcttccccacttcctctcactacctccactacccttcccagcctctagaaaccattcttctactctctacctccatgaatacaactgttttaatttttagcgcccacaaatgagtgagaaccttttgaagtttgtctttctgggccttatttcacttaatataatgtcctctaggctcatccatgcagcctcatatgacaggatttccttcttttttatgctaaaaagtattctcttgtgtatatacaccacatttttaattcattcatctgttgatgg

SEQ ID NO: 449990 - DNA, 616 bp, Homo sapiens
gtttattgtcaaaacctaaatactgtagcaatctctaaataatagagtttttaaaatcctgrttctattacctaacatttgttttccttccaagctcttcaccatttgcatattcagtaggcagaccttcgattattcctctaagttcttttttttaaaagattgaacaagacaaagataagtagcctgtcacttagaaatcatctgcagattgacatgatttcactaatcattactttggggatatgaatatgcaacttgttttaaaaccagtcaaatgcattgcccttctgcttgtacttttctatcttgttcatcagcctgttgtgaagaagaatcttgcaaattgcctcattggaatccgggcgctctacttcggttacattttctggatgagacaaactactctcacaaaaaagagcgtaatattgtgctgtcacgaacagttttcagggaacccatgctggctcttggtgattactggaaatttatttcatgcttgcaaaccaatttttcaacagtttgatctagaatctcaccaaagggccctatcacattgtttgctctgcagttagcaactatctttttacccttttcaaaataggatcaataattt

SEQ ID NO: 449991 - DNA, 573 bp, Homo sapiens
tcttgctgtgacagttaattttgtgtgttaatgtggctaggctgcattgtccaaacatttggtcaaatgctattctggatgtttctggggttttttttcaatgagattaatatttagatgagtagatgttgagtaaagcaaatgacccttcataatatgggtggacctcatccaatcagttgaaggtcttaatagaacagagccgacttcacctgagcagaaaggaattctgccagcagccggcctttgaactcaacgtgcaactcttcctgagtctccaatgtgccagcccacttccatcttgcagattttggacttgccaagcctccaagattttatgggtcagttacttaaatctgtctgtctgtcyctctgtctctctgcatctctctatcttgttggttctgtttctctagagaaccctgactaatatacttggctcatcttcagctgtgtgtccagatgttttgcccccaagacctgtagtcagcctctagggcctcaatcccagcacggtttctgcacctgccgcgccgtggtgtggaaggaaaggtgagaagaaggtgggctgca

SEQ ID NO: 449992 - DNA, 567 bp, Homo sapiens
gggcactgcctagtggggctgtgagaagacggtcaccatccttcataccccagaatggtagatccactgacagcctgcgctctgtacctggaaaagccacaggcactcaatgccagcctgtgaaagagctgcccaaggccatgggagcccaccccttgcatcagtgtgccccagatgtgagacatggagtcactggagatcattttggagctttaagatttaattattaccccgctggatttgggacttgcatggggcctgtggcacctttgttttggccaatttttacyacttggaatagatctatttgcccaatgcctggacctcattgtatctaggaagtaaccaatttgcttttgattttataggcttataggtggaatggacttgccttgtctcagatgagactttggacattgggcttttgagttaatgctgaaatgagttaagactttgggagactgttgggaaggcatgattggttttgaaatgtaaaaaggacatgagatttgggagcggccaagggtggaatgacagggttcagctttctctccccacccaaattcc

SEQ ID NO: 449993 - DNA, 636 bp, Homo sapiens
taatacacacatatgtttagagaggagtaataaagcaaatgtggcaggataaggttagtgtcaaagtagaattttctaaatgttaatgacatgaatctcacacaaatatatgacatatagaatgaacatgcttcagaaatttattttactcattaatgaaagagctaacagaatcgtaaagctgactcaaagggaattgaggagagtgagcattataaatgctayaattataaattataggcactgaaagaaataatgctgaatacgattgttaggttagatataaaactagttactggcccacagtgctataaaatcgtaatcctttggccatcttttctaaaggggagaaattattttgtatctatactgcaaaaaaaatcatttccacattataaatctgcaagataacatttaattttacagaatgtgagccctagctgatggtaaacggtaagtgaaacaaaggtacagaactcgtagacaatgctcatgtatggcaataagaagacatggtcaccttttacttcatatccaagtcttgggtgttttttcttaacacttggaatacatacaagaatgaatgaaataaactttaagcacataactgtaaggatttaaccttatcaatctatc

SEQ ID NO: 449994 - DNA, 594 bp, Homo sapiens
agacctcaagaccaaattgatataatagaagtcatgacaaataggggaatctaggggaatccatcatttaagaaatgtagatagaaatggtggcagcatattttttaacctcttctatctcctccataaaagtaataaaagaaagtaggaaggcaaagcagaaagttaaagttcaatatttacactataattaggttggcaagatgtcccacagagtccagaatccaaacaggtgcataacaaacccgggcagctacaagttctgtgtggcatcattacctggaccaagggaagttgaaggtagcaacatggcatctgatggacccaagaaatccaaaatatccatcagtggatcacttgaaaagctccgcaggcaacttagagaagagcagatgaaactggaagggattagcacagcccaacaacagataaattgaaggggccccaagraaggtctgaagtagataaaatggtcgttctcaaaacagccaatgctcccttcagtcctgtttcacactgaagagaaacaggatctacagaatttgaccataagtgatagaaaaaaaggcaaaaaacaggatccaaattgaacag

SEQ ID NO: 449995 - DNA, 690 bp, Homo sapiens
agaaaaatctcttcattgtctgtatacatttatcatttttgtctgctaaattacattgatgattaacctaaaataatatctcagttaaaaatgtatgtaagtgtaatacaaataaaataatgctagtacatgaaaataatattcaccattttatagtactagctaaacaatacaaatattagattgctaccaaagaaaatcatttcaaagtttatcattagttttgagtacaaaactgacaacattttataaagtaaattgtgtatttatttaaagtattggatatgattatacattaccttggaaatttctcagcatccatgagtttgttcagcacctatgctgcttaagcatattattgaacaccattaaaagtgtgatagacagatgtctaaatgaaatatagccagccgctgtgaggcagcctgaactagaccccaaagtggctcacccattcttatttcaagaattttacatgaaaaaggattcaaagtgaaactgatttttaatcttgataaacaatactaaaacccattttaagaactatcagagaaaaagcattatttatattttaatatctaatttatatcctagaatttatctacaaaacttactgwtccttaatgggtttataaaatgatgtacatagaaatacattatgtaatgaggagttttagctgagactgtact

SEQ ID NO: 449996 - DNA, 562 bp, Homo sapiens
cattgagttaatttctatatatagtgtaagttagaggttcgatttcattctttggcatgtggctaccttgttgttccagcatcctttgttgaaaagatcgttcttttctctttaaaaagcttggaacgcttgtcaaaaatcagtgcaccataggcagatggatttaattctagattcttgattctattccatttctctgtatgtttgtccttatgacagtgccacactgtcttgattactgttgatttgtagtaagttttgacactgagaagtttgagtcctccaactttatccttctgtttcaagacttttttaaatagcttttttgggtaccttgcaattccatataattttaaagtcarcttgtcaatttctacagaaaaagctagctgtgattgtgatagagattgcattgaacctatagatgaacttgaggaacattgccatctctataatattaaatcttctgattcatgaacatgggttatttttaatttattgaaatcatttaaaatttcttttaacaatattttgaagtcctcaaaatataaattttgcattt

SEQ ID NO: 449997 - DNA, 542 bp, Homo sapiens
ctctacagatattgaattttcacctgggtcatacctgctatgccaagatcagtgctctggttgggtaggaagaaagtcctgattcttagggtagggaaatctgggttgattcattcaaaaaaatttgaatcccaagattcctctgagccttctgggcttgaagaactgacacactcctacctgttaagccagatagctgttaaaggctaatacttcttccattgcttgaagaaaatgcagaagcttctgaccttaaagacaacaggcactttccacacaattattcacccttgctcactcaccttgaaccaatacctggtgaaaacttgagcctgcaaaaggagaaaaagagctctatgctaacacgtacaatcaagatccatgagtcccggattatgagggacctagatcaagggggtgcatagagaatataaagatgagtaaaagagggtatgtcaatatgggactactcccctatcayacagattaaacaacctagcagagtctctgagaaatggtgctaacacactactaggttggct

SEQ ID NO: 449998 - DNA, 647 bp, Homo sapiens
aacttttcaagacctagacaatataacaagatataaatagaaacaaagttaaagtgagtgtgatgagattaaagtatatagtttttgttagttttatcttagtttttgcaatcagtgttaagttgtcatcrgtttgaaataatgggttataagatgttatttgtaagcctcatggtaacctcaaatccaaaaacctacaacaaatacacgcaaaaaaaataaaaattaaaaaattaagacataccacctggaaaaattgccttcactaaaaggaagatggacggtaagaaggaaggaaggaaggaaggaccacaaaataaaaaaaaaaccagtatcaaatatcaaaatggcaggagtaagtccttacttatcaataacattgaatgtaaatgaactaaactctctaatcaaaagagtggctgaagggattaaaaaaaacaagatccaatgatctgtggcctacaagaaacacacttcacctataaagacacacatagactgcaaataaaggcatgggaaaaagatatcccacacaaatggaaacaaaaaagagcaggagtagctatacttatataggataaaatagatttcaagacataaactataaaaagacacaaagatggtcattatataataacaaaggggtc

SEQ ID NO: 449999 - DNA, 313 bp, Homo sapiens
agaaactatggaaagctagagaawtgcttcattttcctcatgttaaaaattgtaattatatatactataaaacatatataattcctttacataattataacatcattatttatataattatatataaaggaatataccaataaatatattttatatacagttatatcacacacacacacaaacacacacacatatcaatacaccaataaaagaaaaacatcctatcagaaaaaagcaaaataaaacccagcagacaccaaagaaaaatgcaatacatagacggggtcagtgttttctcttattggttaatttc

SEQ ID NO: 450000 - DNA, 615 bp, Homo sapiens
actgcattcttcttcctttatgctttcaacagccaaggttctccagaatacagtgtgcaaggaaggttagcaagacagtccatgaaaatggagaaataattattagaattgttattaacaatctcattcttctgattaactatattttataaagcaacagaatatcttatttgtaaaatatgtatttagagactacatgcacaaaacttaattaataggagtgcatgactaaaaattatatagaccactaccttacggaaaatagcataagaaatttaaaacaatcatgaaaagaatgtgctgtcggggcagttgccatgctgatggtgtggctgcagagaaaatgaaatggatgccctggcaatagaattcattctttcatcagcaattatgcaytgggtgcctaccaaatgccaaaggcctttgccactggagaagtgattgggttgttagaaatagagtaaataaaacaaatagtaaaaataggtaaatccatgaccatcccctcccacacttcaggattatcctccctttccttaatagtgctctgatccttatcttcaagtaaggatccctgaaagaacccaaccatttctgtgcaactgagaaactaca

SEQ ID NO: 450001 - DNA, 567 bp, Homo sapiens
ggttccaggtcatgtggatcagaagggacatgagcatgctgttactctatggagactgtaaggaaagtagaagccaagacagttgatcaatagttgaaagaatgttggataactggtctgggaaagagtaatcctcaaagatttaggatatctattgtraaatatctcgaaatactgaatgtcagggaataccgattcaatatttttgcatagcacctcaaagggaaaaagtagtatacaaatgtgaaaactgcagtgagctagatttaatttaaccattaggaaacacgtggtagaacattggaatgtctacgagtgggaagtgttgtcttgtagagcagtgagcttcctgtcaagagaagtgtctgtgtatgggcagaaagacatcagtgttggagaacagattgtgttagatagcatctagggttctctccatgttaaaatcctttggattttaacccagtagccctcactgtctgctgaatccattgtgaataaggagacaaatttgaacatgatcagttatgagccaattacttagtagtgaagggagaaattcagccaaac

SEQ ID NO: 450002 - DNA, 362 bp, Homo sapiens
ggtgaaataaacagccatgttgctcacacaaagcctgtttggtggtctcttcacacgggcgcgtgtgaaaaaaagaatatcttggggacttgagaatagtgttagaacatgaaaaatgctggagggccttctaagtcaaagagtaattttgaaccttatccaaaatggcaatggtaagccaytaaaaggctgaattgtgagagctgattgttaacagaatatctgtgagccagttgttaaacacagccattattaaaattaaattatataaatttgcaattaaataaattaaaatgaaaactaataaataccaaccccccaccccaccaccaccaaaaatatatatatatatatatttttac

SEQ ID NO: 450003 - DNA, 444 bp, Homo sapiens
aaaccctagataatctgagtttttttctgaataagatggcatctctgaaatcttactgtatataaattgttacaggcattgtgtcttgaataactaatgatttttgtcatgacaaagaattagacaataactggrtactttcaacaagaaagatgtaaggattcttcttgttgtttgtttttatggctatgctgaatttgggattttcttcttataaaattatttttgtaattatacagataaaagaccatatcataaaatgagaaaaagacatgaagatgctttaaaattaaaagaagtctattgttattagtactgtactttaggtttagataatataagtatcaacagaaaaataaaaacatactggaaattcaatataacgtgttattgtttttgttgttttctattgtttatctaagagaagatacatcaggcttcaca

SEQ ID NO: 450004 - DNA, 659 bp, Homo sapiens
gtccctaatttttgagaacagccataacccttgactggccttatttaaataaattataagttaatgtccttgaaatcagagtatcattcaggagaacatgctgtcaatcagagtagaaaaaagtaggaaagtgggccaggcatggtggcttacacctgtaataccagcactttgggaggccaaggcacgtggatcacctgaggtcaggagttcgagaccagcctgaccaagatggtgaaaccctgtctctactaaaaatacaaaaattagctgggcgtggtgmcaggcgcctgtaatcccagctacttgggaggctaaggcaggagaattgcttgaacccgggaggtggaggttgcagtgagctgagactgcaccattgcactgtagcctgggtgacagagtaacacttcatctaaaaaaaaaaaaagtgggaaagctcacagattctataaaacaattaggcaattcagaatccgaggcaactagctaacaacataatgacaggaaaaacaccctcaaatatcaatattaaccttgaacataaatggtctaaatgccccacttaaaagatatggactggcaaatcctatagataggattttttaaaaaagaaaatcttctgctacaagagacccatctaatggctaaagacacctaat

SEQ ID NO: 450005 - DNA, 546 bp, Homo sapiens
caaaactccagccacccctgacagggctttccagctggtagcagccctgcacttccctaggaccgagctctcacagggaaaggcaagctacaatttytgctgtctcacaatctttgtcattgttgccttcaggctctggagggtgcatgatgactaagggcaggtgtggattcccagcacaatgcagccatcccacagaaaaagtggccagaccactttctacacaggtccccaatccacttctccttactgggtggggcctcctgacctgggactccagcaaaactaccctacccccacttgaacacatcagttgaagatggctatgcagttctctgaggaggaaatcccagatacaatccacaagccctcaccattggagctgcagtggtaccactctaactgccctcaggctggggaaggaaaaagggcctagtcactgcattgtcacctccagcacactgcagccaccatatggagaggaatccagtatctcttccctgtgagtacccccatccacccttcaccaggcaggacccccagctc

SEQ ID NO: 450006 - DNA, 628 bp, Homo sapiens
ctgctgccactgggctggggaagatacaaagagcctatggacttcacatgcactcctagcatgccatagtcaccctatgagaggagctaagtctctcctccctgtgagcccttgacactttgctcctcaacaagcaaagcccccagctcaggccaccattcaggaggcattgctattgaacattcccagtagcaatggctccacatttctctgaggtggagctcccagaggtaactgaaagcccttcttccactgttgctgcagcagtactttccttgatgccttggtacygagaaggggcaaagaccctgagtgttttaaccatacctccaacaagctgcaggtgccctaaggaaaagaggccagtctctcccttatgatccacatgccccatcatttattaacaagaacccctgacccagcttgggtccacagtgcagccatcccataccaggctgattgcactgattgacagtggctccacatctctctggtgtggagccctaagagacaagtgaaaggctctctgacaccaatctctgctaagtttccttcccctctgcctcaaggttggagagagaacataaagcctgagctcatcccagagctgtggtcaggaatacagccc

SEQ ID NO: 450007 - DNA, 594 bp, Homo sapiens
cagtggctccacatctctctggtgtggagccctaagagacaagtgaaaggctctctgacaccaatctytgctaagtttccttcccctctgcctcaaggttggagagagaacataaagcctgagctcatcccagagctgtggtcaggaatacagcccaggaatgccaagctgagatctgcagccagcactcaagtgggagaagagcccacactttcagagcactaagagggagtacagctgcaatcataaagaaatgcagaggagccatgtgactgagcaaaagcctacctactggccatttcacctaagtgtcacctactggatcacagatgaaaacttcaacaccaaaaatactttgctataccccagtatgaaatcaaggacaagaattcagctacaaagaccctgcacaaagccctctgaaaatatcctgaaaagaagtctactgactgtactcaaattaccctgcagttaaaggaacaccagctcacacagatgacaaagaaccagtgcaaaaactctggcaactcaaaaagccagaatggcttattttctccaaatgaccatgctagttccctggcaagtgttcttaac

SEQ ID NO: 450008 - DNA, 603 bp, Homo sapiens
attcttctcatatctatcagtttagtttggttcctgccaatgctccatcaaaagttttgtgtagacacagacaaggttacataaaatttatgtggaaaggaacagaccctagaatagctaaagcaatctttacaaataataaaaagttgggggaaattactctatccaatattaagtcttactatatggctacagtagtcaagacagtgcaatattggtagaagggtagacatacagctcaatggaacagaatagraaacctaggaacaaagtcacacaaatatgtaccattaatttttaggacaaaaaaaaacaagaagtagaagaaagataggctttaaaaatgacaaaattttggaaataaagagcagattaatatttgccagggattaagaacgggggtgggagcaacatggagaatttttgtggcattggaacagttccgtatttttattgtgatgatgaatatatgagcctacacaggtgataaaattatatagaatttaatatatggatgcaaatgagcacaagttaactggggacatctaaataagatcagcagattatatcagtgtcaatattttgattgtgacattatactat

SEQ ID NO: 450009 - DNA, 603 bp, Homo sapiens
attcttctcatatctatcagtttagtttggttcctgccaatgctccatcaaaagttttgtgtagacacagacaaggttacataaaatttatgtggaaaggaacagaccctagaatagctaaagcaatctttacaaataataaaaagttgggggaaattactctatccaatattaagtcttactatatggctacagtagtcaagacagtgcaatattggtagaagggtagacatacagctcaatggaacagaataggaaacctaggaacaaagtcacacaaatatgtaccattaatttttaggacaaaaaaaaacaagaagtagaagaaagataggctttaaaaatgacaaaattttggaaataaagarcagattaatatttgccagggattaagaacgggggtgggagcaacatggagaatttttgtggcattggaacagttccgtatttttattgtgatgatgaatatatgagcctacacaggtgataaaattatatagaatttaatatatggatgcaaatgagcacaagttaactggggacatctaaataagatcagcagattatatcagtgtcaatattttgattgtgacattatactat

SEQ ID NO: 450010 - DNA, 603 bp, Homo sapiens
attcttctcatatctatcagtttagtttggttcctgccaatgctccatcaaaagttttgtgtagacacagacaaggttacataaaatttatgtggaaaggaacagaccctagaatagctaaagcaatctttacaaataataaaaagttgggggaaattactctatccaatattaagtcttactatatggctacagtagtcaagacagtgcaatattggtagaagggtagacatacagctcaatggaacagaataggaaacctaggaacaaagtcacacaaatatgtaccattaatttttaggacaaaaaaaaacaagaagtagaagaaagataggctttaaaaatgacaaaattttggaaataaagagcagattaatatttgccagggattaagaacgggggtgggagcaacatggagaatttttgtggcattggaacagttcygtatttttattgtgatgatgaatatatgagcctacacaggtgataaaattatatagaatttaatatatggatgcaaatgagcacaagttaactggggacatctaaataagatcagcagattatatcagtgtcaatattttgattgtgacattatactat

SEQ ID NO: 450011 - DNA, 602 bp, Homo sapiens
caaagtcatggacagttaactgaataatttataagactgaaagtggaaagtaagtaaaaacactttttaatgtgatttaaatgagttaatttaattatktgaaaactaaatttagcataaagggactatactcaatcttgaaaagacataaagaaggaaaaaagtttatttcttcaaaagccaaagagaaattccagccagaatagacaagtagaagcagaattaactatactccactgaccataccccagtgggcaggtcctagaggaaaagaggatatacatcaggggtatatgtctccattaaaagtgcacaccaaaaagccagactgactggattcaaatcctgcctctgccatttactagctaggtaatctagccaagttgtctaacctcttcatgtctcagtttcctcatctgtaaaagaagaataacgtatttactccaaaaattgtctatgaggactaaaggggaaaaatatatatatacacacacatctatacgtgtgtgtatatatacacacacacatatatacatgtgtagatatatagacacacacatatatacacgtgtagatatatagacacacatatacacgtgtag

SEQ ID NO: 450012 - DNA, 602 bp, Homo sapiens
caaagtcatggacagttaactgaataatttataagactgaaagtggaaagtaagtaaaaacactttttaatgtgatttaaatgagttaatttaattatgtgaaaactaaatttagcataaagggactatactcaatcttgaaaagacataaagaaggaaaaaagtttatttcttcaaaagccaaagagaaattccagccagaatagacaagtagaagcagaattaactatactccactgaccataccccagtgggcaggtcctagaggaaaagaggatatacatcaggggtatatgtctccattaaaagtgcacaccaaaaagccagactgactggattcaaatcctgcctctgccatttactagctaggtaatctagccaagttgtctaacctcttcatgtctcagtttcctcatctgtaaaagaagaataacgtatttactccaaaaattgtctatgaggactaaaggggaaaaatatatatatacacacacatctatacgtgtgtgtatatatacacacacacatatatacaygtgtagatatatagacacacacatatatacacgtgtagatatatagacacacatatacacgtgtag

SEQ ID NO: 450013 - DNA, 602 bp, Homo sapiens
caaagtcatggacagttaactgaataatttataagactgaaagtggaaagtaagtaaaaacactttttaatgtgatttaaatgagttaatttaattatgtgaaaactaaatttagcataaagggactatactcaatcttgaaaagacataaagaaggaaaaaagtttatttcttcaaaagccaaagagaaattccagccagaatagacaagtagaagcagaattaactatactccactgaccataccccagtgggcaggtcctagaggaaaagaggatatacatcaggggtatatgtctccattaaaagtgcacaccaaaaagccagactgactggattcaaatcctgcctctgccatttactagctaggtaatctagccaagttgtctaacctcttcatgtctcagtttcctcatctgtaaaagaagaataacgtatttactccaaaaattgtctatgaggactaaaggggaaaaatatatatatacacacacatctatacgtgtgtgtatatatacacacacacatatatacatgtgtagatatatagacacacacatatatacacgtgtagatatatakacacacatatacacgtgtag

SEQ ID NO: 450014 - DNA, 667 bp, Homo sapiens
cagtctgagtttgaggcactagttagaaatctaggtagagatgtggaataagctattggaaaactgaggctgaagttcaagggtgaggtctatgcttgagatagaaatttgagagttgtcaaartatatgttacttaaggttgtgataggcagaataatagcatccaaagatatctatttcctggttcccgaaatctgtgattatattatcttatgtggcaaaagggactttgccaatgtgattaagttaaatattatgtgatgggattattatcctgaattaatcacaagggttcttataaggggaaggcagaagggtcagtgtggggttggggccgggcaggaaagagagagagagagagagagacttgaagatgctacactgctggcagtgaggatggaggaaggaactatgagccaaggaatgcaggcagcctctagaagatagaaaaggcaagaaaacagcttctctcctagagcatccactaggaacctagcctgctaacacctggattttagcccagtaagtcttctgaccctcagaactgtaagataacaaatttatgttgatgtaaaccagtaagtttgtagtaatttgttacagcagcaataaaaattaatataaagccataagattggatgacatcagcttatggagtgaatgaca

SEQ ID NO: 450015 - DNA, 600 bp, Homo sapiens
atgcttgagatagaaatttgagagttgtcaaaatatatgttacttaaggttgtgataggcagaataatagcatccaaagatatctatttcctggttcccgaaatctgtgattatattatcttatgtggcaaaagggactttgccaatgtgattaagttaaatattatgtgatgggattattatcctgaattaatcacaagggttcttataaggggaaggcagaagggtcagtgtggggttggggccgggcaggaaagagagagagagagagagagacttgaagatgctacactgctggcagtgaggatggaggaaggaactatgagccaaggaatgcaggcagcctctagaagatagaaaaggcaagaaaacagcttctctcctagagcatccactaggaacctagcctgctaacacctggattttagcccagtaagtcttctgaccctcagaactgtaagataacaaatttatgttgatrtaaaccagtaagtttgtagtaatttgttacagcagcaataaaaattaatataaagccataagattggatgacatcagcttatggagtgaatgacaactgatatacatgtttaaaatatg

SEQ ID NO: 450016 - DNA, 600 bp, Homo sapiens
atgcttgagatagaaatttgagagttgtcaaaatatatgttacttaaggttgtgataggcagaataatagcatccaaagatatctatttcctggttcccgaaatctgtgattatattatcttatgtggcaaaagggactttgccaatgtgattaagttaaatattatgtgatgggattattatcctgaattaatcacaagggttcttataaggggaaggcagaagggtcagtgtggggttggggccgggcaggaaagagagagagagagagagagacttgaagatgctacactgctggcagtgaggatggaggaaggaactatgagccaaggaatgcaggcagcctctagaagatagaaaaggcaagaaaacagcttctctcctagagcatccactaggaacctagcctgctaacacctggattttagcccagtaagtcttctgaccctcagaactgtaagataacaaatttatgttgatgtaaaccagtaagtttgtagtaatttgttacagcagcaataaaaattaatataaagccrtaagattggatgacatcagcttatggagtgaatgacaactgatatacatgtttaaaatatg

SEQ ID NO: 450017 - DNA, 529 bp, Homo sapiens
tgaagcttctataataaaaaagtagcatcagaattgttatttttattcaacctttacataacttgagtattctcagtctccaaatctaggctgtttcttcargcagtggcaggcctccaaggagagctttcacatgtcaggagttctggtgggtctgaataatgtctcttgaggttgtttctgatttcctcaatgggcccctgttgacctcactatgaaacctggggaaaagtagggctctgtatgaggcaggtaaatgctcagagctcttgggaaggggccagcattaatgatgattatgtagcaggttgaaagtgatctttgggctcttttccatgtcaggaatgcctcaaacacagctgatgtgggaggctctgcagaccccaaaagcacactcgtgttttaaggggagtaaactccttttcacactacctctgcggtaaggacacacaaagatgaatggccagcctgaatgacagggctgcttctctctgcaagctgcatacagaacgctttgtgttcatgacga

SEQ ID NO: 450018 - DNA, 574 bp, Homo sapiens
ctgctccactcatttgttatatcttacttaactccatgtcaaagaccaggctctccactaaagatagaaacccaagaggtgcagaagctagtgagtcagcaatacagtctccctcccatctcaggagcttacttgcaagagatgaaatgtgaagcttctataataaaaaagtagcatcagaattgttatttttattcaacctttacataacttgagtattctcagtctccaaatctaggctgtttcttcaggcagtggcaggcctccaaggagagctttcacatgtcaggagttctggtgggtctgaataatgtctcttgaggttgtttctgatttcctcaatgggcccctgttgacctcactatgaaacctggggaaaagtagggctctgtwtgaggcaggtaaatgctcagagctcttgggaaggggccagcattaatgatgattatgtagcaggttgaaagtgatctttgggctcttttccatgtcaggaatgcctcaaacacagctgatgtgggaggctctgcagaccccaaaagcacactcgtgttttaaggggagtaaactccttttc

SEQ ID NO: 450019 - DNA, 543 bp, Homo sapiens
ccagcctgaatgacagggctgcttctctctgcaagctgcatacagaacgctttgtgttcatgacgattgcaatacttcccttctggcagagggaagctggcttctctagagctgcggaaagtaacgcttgtttctgaattggttagagttcaatctcaattatgtctggaaacaacacacactcctttcccccttctgtatgactgcagtgttaatttcaagtgaacttgtgcaagttactttaaagttgaaatagccacacaacactgacatttattgggcactccctttggagccttcctggcagcatggccacagaaggtgttgcctctacgccaggggyttggagcctcactctttccagtcttcatgtcccaccctacagcaaggctggaagagattatttgcacaggatcacattcaattctgcctctcctccacccacacaaagcctaatttcaacttttccccaagtggtatgaagctggaaccccagatcaagtccaagaaagaaaaaaaagatattataatttaatttgcttg

SEQ ID NO: 450020 - DNA, 517 bp, Homo sapiens
gtttaaaagtatttcattttttcaagtaagaatgttaagaaaatcaacaaaaataataactgtttcacattgttctttaataatttttattagaattaaaattcaatatatctcactttctggaaaaaatcacattatcttcatttttcttatttttctaaggactctgggaacttcatgatggaccaccactagttcatgttttagcattaggaacttctggcctagagcaagcrgaagagacttaaactcaagttcccttttgtcaccttgctggctgggagagtgggccctattttgtctagagagtctttcccatgatctcttactgaataggtgaagagaaaatcctcaggagagacttgggaagagaaagggctcaaacacaagcaaggaaaagtaggagagcctgtaagagagcccaaggtatagcttgaatatctcacatttctgaatctgttgggaaaagctggggagactcttgcagcaccagttgttgagataagactttatccca

SEQ ID NO: 450021 - DNA, 577 bp, Homo sapiens
ttatgcttcacattctcattaatattagaggttgtcaatattttaattttagccatttcagttggtgtgtaatagyagccaattgctcaatttaatatttactggctaatttaatacgcattttcctgatgacaaattatgtcgaacactttttcatgtgcttattggtcagttgtatatcttcctttgtgaagagtctgcttaagtcctttgccaatttttattatatcttttgtccagatacatgttttgtgaatattttctctcagtgtatgtttggctgtcatatacttcatggtgacttttgggaagtatttttaaattttgatgaagtttaatatacagatattttcattaatggtttttgcttccttttattctacctaaaaaaagtcagcctatgccaaggtcatgaaaacccaaaattttttttagatgttttatgttttgtatttgtctttaggtttattatccatctaaattattttggcttgtgtgttgtgaggtgatgatcaacattcgttttttttctcagctgtatgccagttgaaaagattatccttttcccagtgaatta

SEQ ID NO: 450022 - DNA, 616 bp, Homo sapiens
tgatgcatatttttggtgtggcttgatggtaccagagggagcaataaagactttgttctcaaagaattgtgattgttcattttgacagcagctctatgacggattctcttagacaactcctaaggctggagcacccttttggacagcattggtcagaagcatttaaaggtatatactatgcataaccactaggtgcaagggatagcaaatggtgcaagcaactgacagacaaaaagcttggaaaacaggaggctggagaagaagacacatggaggaatcaaaattcaaaggactcccacatacactggagaatcctggagaccacgtgcatatctagggctggaagcatacatggaaaagwctgatctttgggacctgcatgagcagaaaatgaggactaaaccagaggttcactcaacttgttctagctcagagccaatctgcaaagaccaggagaattttgttgtgttttgttttgttgtttttaatttatttttctttttagctgcaggcattgaaggaaatttctgtcaggttactggaggaccaatgagatactggaatgaaaagtctttgcaaagatggtttataaaagttacagaataacagacaactg

SEQ ID NO: 450023 - DNA, 616 bp, Homo sapiens
tgatgcatatttttggtgtggcttgatggtaccagagggagcaataaagactttgttctcaaagaattgtgattgttcattttgacagcagctctatgacggattctcttagacaactcctaaggctggagcacccttttggacagcattggtcagaagcatttaaaggtatatactatgcataaccactaggtgcaagggatagcaaatggtgcaagcaactgacagacaaaaagcttggaaaacaggaggctggagaagaagacacatggaggaatcaaaattcaaaggactcccacatacactggagaatcctggagaccacgtgcatatctagggctggaagcatacatggaaaagtctgatctttgggacctgcatragcagaaaatgaggactaaaccagaggttcactcaacttgttctagctcagagccaatctgcaaagaccaggagaattttgttgtgttttgttttgttgtttttaatttatttttctttttagctgcaggcattgaaggaaatttctgtcaggttactggaggaccaatgagatactggaatgaaaagtctttgcaaagatggtttataaaagttacagaataacagacaactg

SEQ ID NO: 450024 - DNA, 579 bp, Homo sapiens
tagtagttaaaagtatcccatctaaaacrtagtaacataaaagattgactaaaagaaattaacaaagcttaagagacctgtgggtgacaccatcaaagatatcactatatgtgtaaggtagtctcagaaggagaggagagaaagaaaatagtaaaaagaatgtctgaaaaaataatggctaaaaactttccatttggtgaaaattctgcatctacatatccaaaacaaactcaatgaactctgaatagggatacaatcaaagagatacgcaccttgatacatactttttttaaagcaaagaaatggtagagacaaaattcaaaattaccattaactctaagcagagtaagggcattgggaaaaaacttacatagtttcaatagcattgctaatattatgctttataagatgggcactgaataatatctgtatctcatatgttatttgataatcattgactcaacattacatattttgaatggtacataaataagttctatcatcttgtaacaatgttaaaaattataaaaggaaatagttaaaaaaaggaaactcacaatagagaaaacacatgaacat

SEQ ID NO: 450025 - DNA, 611 bp, Homo sapiens
aatagcaaacatacaaatgattccattgaaaaatgggcaaaagatctgagtagacatttctcagaagaaatcatacaaatgaccacctggtaaatgaaaaaatgctcagcatcactaattatcaaagaaatgcaaatcaaaaccacaatgagatatcatctcactgcagtcaaatggcttttatcaaaaaagacawggaataatgggtcatgacaaggatgtggagaaaggagaatctccatacatcgtgagtgggaatattaattagcacagtcatacaaaaatacctatagaggtttcttaaaaaagtaaaaatggaactaccatatgatccagcaattcaactgctggtatatcttcaagagaaaataaatcaatatgttaaaggtatatctgtatgcttatgttttttgcagcactatttataatagccaaaatatggaatcaacctaagtgtccattaatggcggaatggataatgaaaatgtggtatacataaaaaatgaaacattattcagccataagaaaaaaataaaatcctgtcatttgtagtaatatggttggaactagaggttattatgtaaatgaaatcagccaagcacagaaggaca

SEQ ID NO: 450026 - DNA, 569 bp, Homo sapiens
ttttccttggctcttcaacttgagaatctggtgagatatcttgtgagttaaacccacaaaatgctcttaagaatatggcaataaggaggagttctcactagtttccagcatttcatcatactaactgcttaaatctttccatcagtattagaagagttccagaaacatttattccaggtcagttatatcctctgtgattctccgttttgcctgtcttttcagactttagggttctggtttgccttgagactgcaatttagtgatgggtccaaaaaagtcattaatttttagcttatttgctgttttcttcctgtaggaatgggagtgatgacttttaagctcttcmtgtgtttaaattgtaactggaagtctaaatcaagaaaagtcatagtcaatttcctcagcttatctgaccatgaatctcttcttctaggaataaactatgagatctagtgttcaatggaacacaaccagttaacagccataggcagatttgattataagttagtattatggatggcatccatatttattagctagttctctaaatggctttcacaactcactaa

SEQ ID NO: 450027 - DNA, 490 bp, Homo sapiens
cttatttgaaaaatcatgggtttyaatcatttgaattcctcagctctaacattaactgggatctacaatacatttatttgcctacttttgtaccaccccatcaattctatttacctgaatatctattactgttgatctttctaattagctatccatatgtactgcacacacactttacatacatatgtaatatataaattcagtcttaatatcatcactctaattttagttcaaattatctgaactaaatattgtaaacataacagtaattattcagtgtaaacattattatatagtaattattacactatgagtagcaatataaaagaagatagaattattaataaaaatttaactttattttaattaatatacactgaggattagtaatactttactactattaaaatatttttacgtggtcttcagtttcctatataaattaaaaatattaagtctataacgtttctcagtatatttaggtgctttg

SEQ ID NO: 450028 - DNA, 490 bp, Homo sapiens
cttatttgaaaaatcatgggtttcaatcatttgaattcctcagctctaacattaactgggatctacaatacatttatttgcctacttttgtaccaccccatcaattctatttacctgaatatctattactgttgatctttctaattagctatccatatgtactgcacacacactttacatacatatgtaatatataaattcagtcttaatatcatcactctaattttagttcaaattatctgaactaaatattgtaaacataacagtaattattcagtgtaaacattattatatagtaattattacactatgagtagcaatataaaagaagatagaattattaataaaaatttaactttatttwaattaatatacactgaggattagtaatactttactactattaaaatatttttacgtggtcttcagtttcctatataaattaaaaatattaagtctataacgtttctcagtatatttaggtgctttg

SEQ ID NO: 450029 - DNA, 490 bp, Homo sapiens
cttatttgaaaaatcatgggtttcaatcatttgaattcctcagctctaacattaactgggatctacaatacatttatttgcctacttttgtaccaccccatcaattctatttacctgaatatctattactgttgatctttctaattagctatccatatgtactgcacacacactttacatacatatgtaatatataaattcagtcttaatatcatcactctaattttagttcaaattatctgaactaaatattgtaaacataacagtaattattcagtgtaaacattattatatagtaattattacactatgagtagcaatataaaagaagatagaattattaataaaaatttaactttattttaattaatatacactgaggattagtaatactttactactattaaaatatttttacrtggtcttcagtttcctatataaattaaaaatattaagtctataacgtttctcagtatatttaggtgctttg

SEQ ID NO: 450030 - DNA, 595 bp, Homo sapiens
ttacaactaatgttcactacaaaactaaacctgttatgaactttcttacacatatcttttgggattatgtgtgtaaacacatttttttgagtatgtaaataggaatggaattgctgcacctttggatttgcttatgttatgatttattatatatattaccagctctctaaagtgattttgaaaaattttatttgtgtataggtgcatttattttgcctttatcattaaatactaatttaaccttgagttctttgaatgtattatttctgtgccttctttttgctatggagaaatctgctgtcaatcaatctgtttctttgttggcaatcttttttttttctatttttataaatacaattgaccctgaaacaaaatgggtttgaactctgcgagtccacttatgcacttatatctgatcttttatrttcccaggatgtgaagctcacagatatagaaggccaactttttgtatgcacacgttcagcagtgttgagtactggacttgcttgtggtggattctggtatacacaagggtcctagaacagtcccccacgtgtgacgaccaagggacaacttaccatattttgttgtttta

SEQ ID NO: 450031 - DNA, 455 bp, Homo sapiens
catctatagaggtgatcatgtgatttttgcttttaattttatgtggtgtatcgcatttattggcttgygtatgttcaaccatccctacatcccttgtacgaaacccagttggtcatggtggattatctttttgatatgttgttgtcattggttagctagtattttgttaaggattttagcatctatgttaatcaaagatacaagtctttagttttattttttggttgggtcctttcctggttttggtattagggtgatgctggcttcatagaatgaattagcaagggtttcttctttctctatctgtggaatagtgtcaaaaggatgagtaccaattcttccctgaatgtctggtagaattctgctgtgaatctgcttggtcctggactttttttcattggtaatttttaagtacaatttcaatcttgctgcttgttattggtttgttcagggta

SEQ ID NO: 450032 - DNA, 610 bp, Homo sapiens
atgctattgcacacttaatagactacagtacagtgtaaacctaacttttatatgtttcaaaaaaccaaaacatttgtgtgactcactttactgctatattttctttattgtggtggtctgggaccaacccatgatatctcaaaactgtgcctgtatcttattttgagctgwtgttaattaccatacaaagaatatccatttgaaggaatgtggaggagtcattttacctatttcttttcttggaagttcatattgtttccattctttatgtcagaggtaatattattcacaggcagatattagtaaaagaaacccttcaatttctgagattaacttacatattatatgtatatttgtaataaaattacatttgtggaactcacaacactgaattcaaagttaataaacctataatgcttcctttcattacaaacagctgtagactctgtaagtggcagttaggataaaaaagcactgtgtttatgtgttaagaataaggaaattattgctgatcaaatatttagttttcttttgcatcaaactacaccattaacagttcacttttgggaccatgtttttttaaaaagaatttgtccccactattgaaaag

SEQ ID NO: 450033 - DNA, 613 bp, Homo sapiens
acttttctctgtaatcacactgtaaaatgcacatttaaaaattaaagactacttttcaatcgtattttttagccaatatacttaacaataggagattttttaaaagatatagacactttattttcaaagaactaaaaagatctaataattaagagatacaaacatttattctgtgtattagggatctgcaaaccatgacatgtaggccaaatccagcctgccatatgtttttgcaaacaggctttattggaacacagtcacactaatttgttcatatgttgcctgtggctgcttcaagctctaatggcagagttgaatatttactgtctggtcctttatggaaaaagattgctggcatttaccatacaaacacagaataaaaaggccatgaaatttaggttaacattagaaaataatgtaagaaactatctgagttttaacattcattggaaagtctaaaacttgtacwtaaagaaattagtagtagtagcacagtgaaaaatgagtttttagggacttgttttgaagttctccttctatagcaataacatccccttggaatgagtactatttactgtttactatttactatttaaatgtataatgttttcct

SEQ ID NO: 450034 - DNA, 569 bp, Homo sapiens
taaagttctgtgggtttagaaaatgcttaattacttgttttcaccattatattattatacaaaatagtttcactaatcttaaaatacctgtgcttgacccattcaacccttcccccataccctgttgttacgttttaaggaataatgcaatatcatcaagtaggttttttgttgtcattttcccctttaaaatgcaagwtcttccatcagtaaacaatctatcaccttaatagagtttgatatataaagagaagaaagaaaatcatgctcatattatcactactgccctaaaaacatttgggaaatatactaagaattcctgttccagcattaagaaggatagacacagagagaaaattctcatatagcatagagattaatgatcagtaatgaactatagtgagaaggaaaatacagaaggatatcaaaaaaattatgagaactttattgaaagtcttggctattttactcatctgtaggaacagaggttagcttgcagatttttacccagtagagaagcaagtaatttctgtcctgtgaaagagataaccacagtggttatgttagag

SEQ ID NO: 450035 - DNA, 569 bp, Homo sapiens
taaagttctgtgggtttagaaaatgcttaattacttgttttcaccattatattattatacaaaatagtttcactaatcttaaaatacctgtgcttgacccattcaacccttcccccataccctgttgttacgttttaaggaataatgcaatatcatcaagtaggttttttgttgtcattttcccctttaaaatgcaagttcttccatcagtaaacaatctatcaccttaatagagtttgatatataaagagaagaaagaaaaycatgctcatattatcactactgccctaaaaacatttgggaaatatactaagaattcctgttccagcattaagaaggatagacacagagagaaaattctcatatagcatagagattaatgatcagtaatgaactatagtgagaaggaaaatacagaaggatatcaaaaaaattatgagaactttattgaaagtcttggctattttactcatctgtaggaacagaggttagcttgcagatttttacccagtagagaagcaagtaatttctgtcctgtgaaagagataaccacagtggttatgttagag

SEQ ID NO: 450036 - DNA, 599 bp, Homo sapiens
aaataaacaaataaaaagaaacacaacaatgaaaactaaatttaaaataaaactaaaagtggtttttaatacctgccagttttcgttaataaaatagaaagtaaaattttgcacatttgaatatgtaatatgggtcaaagaataataataaaacatagcaacaaaatagtcacaaaatctataattctctgaaattaattttaaccaaaatgggtaactaaactgtctaaaaactatgtatagaaggtgtagttctttatagaagtaaaaaaaatgagtaataawatcttgatcttaaatgaaatatttaggttgaccatttaaaaaaataaaaatttgaattaatacctttataatcagaatgccattttttaaaactagaaacttgaattactttaaaaaatggtacagagaagacatatgttgaaaatctccttcaattcaactgcgtgaaagcttatcaaacatagggaaaaaaacaaaaattaaatctaaacaaatgtaaaccaactaacaaacagacatagcaaaacacccacggatagcaaaatgtatctgtaggtaagtgatggaacagaaacataaaacactgaccagga

SEQ ID NO: 450037 - DNA, 623 bp, Homo sapiens
tcttttttcccctctgactgtatattttcaagcagcctgtcttcaagctcactcattttttcttctacttgatcarttctgctattaggagactctaatgcattcttccatatgccaattgaattcttcagctccagtttctgcatctttaaaaattattttgatctctctgttaaatttatctgataggattccaaattctttctctgtgtcatcttgaatttctttgagcttcctcaaaacagctattttgatttctgtctgaaagatctcacatctctgtttctttaggattgatcgttagtaccttttttagttcatttggtgaggtcctgttttcctggatggtctgatgtttgtgaatgtttaaaccactgatgtttatttagggcccaggggcactcagtcagttggtgatgaatcctaccagaactggatctgtcccttcaagacagcaggttcctttctagcccagcgtgtgtctagaaacattatccaggagctagggcctggaatgaaggccttaggactctgtctggtgcccttattctactgtggctgagttggtatccaagttgcaggacaaagtcctgtgtattttaccccttctctctcccagagct

SEQ ID NO: 450038 - DNA, 565 bp, Homo sapiens
agaagttgaatggaaatatgctatgtattagaacaacattgatctctaagactcaggttgcttggagatcacaaatttagaaacatttcacaaattaagaaggagaatggaggtttctcaagtaccaattaagacaaattgtaattttcttataacatgttttgtagctgatatggtttggctatgttcccacccaaatctcattttgaactgtagttcccataatccccacctgtcatgtaagggacccagtgggagataattgaatcatgggggtggttacctccatgctgttcttgtgttcatgagttccttctcatgagatctgatggttttataaggtgctttccccagccttcattttgcacttctctttgctgccgccatgtgaagaaaaacgtgcctgcttccmcttctgccattattgtaagtttcctggggcttctccagccctgcagagctgtgagtcaattaaacctctttcctttataaattacccagttttgggtatgtctttactagcagcatgagaacagtggttatgcttttatttaggaagaagtct

SEQ ID NO: 450039 - DNA, 594 bp, Homo sapiens
aagtccaagcaattttcaagttcatgcgacttaagtaaatctttaataaacaagttgactttaaaagtactggtaaaataaaaatttaaatgtcattggaattgtcagtatatatttttawcttggttttatatttgtgtctgctagatattttgaggtgtcagagtttggcacagatgattataaatctataaacccagccaatacaaaaataatctttgtttctgtgattttttttataaatagactaatttaatgttgttggtttaatgaatacagcttcatcttctgagttattagtgaaaatacccatgtatttaactttaaaattcttactaagatggacacttacaattcacaggttacaaaatagttaacaaggaaatgactagtttggtctaatatcttagttctcataaataatctagataacctgtttaaaaaatgaaagaattgagtacatgtaaatgaaacaacttataggtttactttttgtataattttaaatttaaaattatttttgatgttcattaggtgtctgggtcatttctaattaataaaaggtcatgatattgggaaatatgcttctaaaaa

SEQ ID NO: 450040 - DNA, 605 bp, Homo sapiens
attattttggtatattggtcatctaaaggtggagagatgaggttataatatttataaaagcaaagaatgaaatttaaaatgtttgtcagtgtcctattttttaagctgtgtgtggggcgcggacacaggtatttatttttatacaaacatgtatatttcaaaatatgttcatatattcataagtatatatgatatttttcacaattaagattgacatatttagcaacaaaggataattttttatataattatgtcccatgcaatatgtaggttacatttatagcagtaatttattcattggttatgctaaattcaaatgtaatggagcattttgcattttatggtaactctactcccagtaaatattatacaaaaatcaattaactttagtttattgatcttgtacgtggtaacctgatgaactcttgacttatttctatttcccattcacttgattcacttttgtttttcaagatttctaccatgaatgttcatctcttcttttccaaattttattcttcttatgttatctttaaagcattgattatttctgaaagtacaaactaaatagtaatgccagwtttgatgacattgtcttgttcttc

SEQ ID NO: 450041 - DNA, 558 bp, Homo sapiens
caaaagaggaaaaaaaagaatatggaagttgtggttttgaataactgtcaattcaaacaagcatatgtggttcttttgacctgtcatttttcttagtaactctgtaaagaaactttaaatagacaaaacacttttactagatccccatttgttttgttctctacctgtgtgttttattgccaagactagcacatatattgggagataggggatttcattccctggatggcttgtcatgtgaattgagaatgttgtgattccaccaggcagggactacaactgaactactctctctgttacttttggccactaaaaagtaaygtgcaatagcactagcaatgaataggaaggcactgcatttgtatatcacacattattctttgatatgcagctgacttatgcttccttcatctaggatttatttatattgagtttataaatgagatttcttttcattttctgtccttgtttggttttagtatgagagttttaaaaatattttaaaatttatattgttctcccacaagatactatgctctgccacagtgcaatagttgg

SEQ ID NO: 450042 - DNA, 515 bp, Homo sapiens
gcctgaaatactatagacagcaccaaacagaatactattggagtaataaagccagtaaattcctccaactgaatatgtgcatgcatagttcaagagaagatgcatccaccgaaaagggttgagaagcacccagaatctctagatgggctagccaataaagttctttccttgtataaagccagttcataactattaagggaggtttatttgtttgtttgttttcaaaggcacagcttccaacaaaaagtcacaagtcacatgaagaaagaggaaaacctcgccctatcaaagaaatttccagaaatcaaccctaaagaaaagctgtatataaatcacttgaaaaaacactcaatataactgtcatcaagatgctcaatgacctcatgaaaaaaaawgcatggaaaaaattagaatatcaacggagaggtagaaaaaatattttttaaaaacagaaattttagtgctgaaaaatataataactggattgaaaaaaatactagagttaaacagcaaac

SEQ ID NO: 450043 - DNA, 625 bp, Homo sapiens
ggctcacgcctgtaatcctagcactttgggtggctgaggtaggtggatacctgaggtcaggagttcgagaccagcttggccaacatggtgaaaccctgtctctactaaaaatacaaaaattagctgggcatggtggcacgtgcctgtagtcccagctactcaggaggctgaggcaggagaatcacttgaacccaggaggcggaggtttgaatgagctgagatcacgccactgcactccagcttgggtgacacagcaacattctgtctcaaaaagaaaaaaaaaaaaaaagagtttcaaaactcaatcggctgctttgtgggatttagagaggtcttcctggatctaataaactacttgagctaaatatgctcatcttggggcaggaygttctccttctgtaagtctctagaggcagtatatagaatccttcaatatttctgaaagtaacagatgagaggtcaaatacacagcaacttcctttgcactgaagttgccacggtaactttctaccatgggaaatttgagaaagattattttatttgatgtcttactgtacataataagcaaataccaaaacaatggtatttaaatatcttttctttggagggataacataaagaataa

SEQ ID NO: 450044 - DNA, 560 bp, Homo sapiens
tctaattttatgtctctctcatgaatatggaagaaccgtgaaggatcaccagccattggaggcaaacttccagcaagaaacacagagatccaaataaagaagcagaaaatagcagaactcagagtaaagggaatgaatgtagatgacagaataacacttcaaaactstaatccccgcagaatcagaatactttgataaaggaaggcagagaacaaacaaaaggtcttggaagttaaaaatacgttagtgggaatttaaagaaacaaataaagatttggaaggtagagttggggccatatcccaaaatcgaagaaaacattaaagatgtagcaaggagatgttaaaactattttaaagaactgaaaagatctatttaattagtctggaaaatataactaataatattggagaaagaaataataaagagaggaaagggaatcaccaatgatatcagatgaaaaataattaaaaagatggagtcgatggattttcagatttaatgtattaaggcaaatgcatttaaagactacttacacgaagggcattatcattatacccaa

SEQ ID NO: 450045 - DNA, 560 bp, Homo sapiens
tctaattttatgtctctctcatgaatatggaagaaccgtgaaggatcaccagccattggaggcaaacttccagcaagaaacacagagatccaaataaagaagcagaaaatagcagaactcagagtaaagggaatgaatgtagatgacagaataacacttcaaaactctaatccccgcagaatcagaatactttgataaaggaaggcagagaacaaacaaaaggtcttggaagttaaaaatacgttagtgggaatttaaagaarcaaataaagatttggaaggtagagttggggccatatcccaaaatcgaagaaaacattaaagatgtagcaaggagatgttaaaactattttaaagaactgaaaagatctatttaattagtctggaaaatataactaataatattggagaaagaaataataaagagaggaaagggaatcaccaatgatatcagatgaaaaataattaaaaagatggagtcgatggattttcagatttaatgtattaaggcaaatgcatttaaagactacttacacgaagggcattatcattatacccaa

SEQ ID NO: 450046 - DNA, 612 bp, Homo sapiens
tgacagaataacacttcaaaactctaatccccgcagaatcagaatactttgataaaggaaggcagagaacaaacaaaaggtcttggaagttaaaaatacgttagtgggaatttaaagaaacaaataaagatttggaaggtagagttggggccatatcccaaaatcgaagaaaacattaaagatgtagcaaggagatgttaaaactattttaaagaactgaaaagatctatttaattagtctggaaaatataactaataatattggagaaagaaataataaagagaggaaagggaatcaccaatgatatcagatgaaaaataattaaaaagatggagtcgatggattttcagatttaatgtattaaggcaaatgcatttaaagactacttacacsaagggcattatcattatacccaaatactagggattaagctgatagagagtgaaaagaaaaacaaaaacaagacttaataggcaaaaaaatttggaataagaatgacatccaatttcttaacaatactgtaatctagaaagaaaatgcagaatggggttcacaattctcagggcagcttattctcaagttaaaattttatgtcggcaaactagtaagaa

SEQ ID NO: 450047 - DNA, 603 bp, Homo sapiens
gcatgggtgcttctgacagcaatcccctttgcaggcaagtgaagaatcctgcacctgcatgaaccctatctgcctgcctctgctccgaagcacccgcttccccccatctgcctggactctgctccgaagtgcccacttcttcccatccacctggcctctgctccaaagtgcccgagtcttgtgaatttatatttaacatccttaggaaggattttctcacatcttgatgcataatcctgatcacaggtcattcacttttaaattttattgtgccaggaacttttctgagcattttactcatttatcttaacaacaatttatcttcacaatgataccctaaggcaaacattatactatcrtaaagaagagaaaattaagacaaaacacagattaagtaataaacccaaggcaagctagctagtaactgggggaggtaagattcaaatgcaagtatcatagctccagaccctgtgtttctggattgtatgccttagaaataaagaatagttaaaatgagagattggacagcctgtaaatataaagttaaaaacatgcatttattatgctggaatttgtgtgggtcagaaatccaggcacagctga

SEQ ID NO: 450048 - DNA, 581 bp, Homo sapiens
atttattatgctggaatttgtgtgggtcagaaatccaggcacagctgagatggacccagggttcttcacagctgtggtaagatgtagaccagggctgaggtctcatctgaaggtttgcctggggatggacctgtggataagcagattggttgttggcaggatgcagctgctgcaggctgggaactgagggccttaattcctagcggctcttggctggaggccatccccaaagaggatgtaaggtgagaaggcagtaaagagggttgctarcagcatggaaactgcaattttatgtgttgcaatcttaaataaactatcacctttgccatacttgtcaggagcaggcacagatccgacttgaagggaggggttgcagaagggcatgaattccagagtgaggcatcatcaaggccatgcagaggccttgctgccccgcccaagcacctcattttgaggataatatgctgaggactaataagtgaagcctaaaaagatgcagttagctaatctcaaatagccaaatgtctatgtctcctatttatttcagagttgattttttttctaatagtttaatgggttcc

SEQ ID NO: 450049 - DNA, 580 bp, Homo sapiens
gaattgtcaatcatcgatccagtaaatagtcatcaacttcaaaatttcaaatcataaatcccaacacatacccattttttacacacagctttaattaattcagcattattgtgtgaatgatgatttcagattttctacttgaaattcagagacattgtttagaatcgggagaaaatagaagaagaataagagctacccagggaccatacttaagggtcaatgctatcctctatcaactaggaaagatttctctaggaaaatctcrtcttgctgtcttgccatctctagcccatgcagctaacagaggcatggtttcctttgagcagagcctggagagataatggggaactatttccaccaaaatcaacttttatcagccttctcctatgccagaatatctgaaaaagcaagcattccacctgtgtatgaaagtcagttaaaataggagtttgatagagaattccatgcagaacagaagtccccccaactgcatgttagttttccacaggttcagttaccagtggtcaactgtggttctaaaataggtgagtacagtacaggaagatattttgagaaagag

SEQ ID NO: 450050 - DNA, 561 bp, Homo sapiens
aatcaccttttaggttatacaacactccttaaaatttcaaatcaataaaaattayaaaatgtattctctcaaaaaccaaactattaaatgagaaatctatcatagaaagctggaaaatcccctaacacttggagattaaaaaacaaagttctaggccagcacagtggctcaggctcataatcccaacaatttgggaggccaaggcgggcagatcacttgaggtcaggagttcaatatcagcctggccaacatggtgaaaccccatctctactaaaaatacaaaaattagcctgatgtggtggtgcatgcttgtaatctcagctacttgggaggctgaggcaggagaattgtttgaacccaggaggtggaggttgcagtgagctgagatcacaccactgcactccagcccaggcaacagagtgagagtcttccttaaaaaaagagaaaggaaagaattaaagaaaaaccccaaaaacaaaaaccaaagaagtggtaaataacacacagattaaacaggaagtctcaaaagaaactaaaaatatttggactaaatgaaaatga

SEQ ID NO: 450051 - DNA, 539 bp, Homo sapiens
atctagctacaatctgttgtttcaataataacaaaatgcattaagcaaatggactaaaatggaattatagctgcagatgctcaattctcatttctttttattttgcatcttattacaatatcaggcttcagtgttggcctctgatcaggttgatcaactagtaattataagtctgtatttaaatgttcatatctttctgcaaagcagtaaatgtctaagtttctctatttgactctttgaaacattcagtaagtaaactaattcattaccttatcagcaaaattccctactgaatgatactgtgtttggacttttacaaaattattcaagtgcaaattcacttaaaagagatctctcatctaatttattcagctaaaaatgtrggccatttgtgctttattcacagtgatacccagacatatgatgatgtatttgtctttggtaaattgttccaaataaagttaatatatgttatctgacatccatcagctcaaaagatacacaatggctcatactctgacttgggagtatacgtcata

SEQ ID NO: 450052 - DNA, 539 bp, Homo sapiens
atctagctacaatctgttgtttcaataataacaaaatgcattaagcaaatggactaaaatggaattatagctgcagatgctcaattctcatttctttttattttgcatcttattacaatatcaggcttcagtgttggcctctgatcaggttgatcaactagtaattataagtctgtatttaaatgttcatatctttctgcaaagcagtaaatgtctaagtttctctatttgactctttgaaacattcagtaagtaaactaattcattaccttatcagcaaaattccctactgaatgatactgtgtttggacttttacaaaattattcaagtgcaaattcacttaaaagagatctctcatctaatttattcagctaaaaatgtgrgccatttgtgctttattcacagtgatacccagacatatgatgatgtatttgtctttggtaaattgttccaaataaagttaatatatgttatctgacatccatcagctcaaaagatacacaatggctcatactctgacttgggagtatacgtcata

SEQ ID NO: 450053 - DNA, 605 bp, Homo sapiens
tactcttcagccaaaccaggggtaaaaataggattcatcaggatccaagtcactgcttaaatcattgtttctacaggatactgtattgatagcaaaagtactcctgctrgcatgaaacactgatgattccctgagggtctatggacaagtcccatagtttgtaaaagtctatatgtctgcatctcagaagactatagacattgaacttaatgatacaaaagatgtttaccaattccctcctgaggcttagttatattttcccttcactcattattgcaaaaagtctacacccaatcatcccattaactactcaattaacaacatagtttcactcagcaggccttttctcaaaagcccaagtaaatgtcctgccacattaaaagaaactgctattaaaaataaacataaacacactttaactgaatgtatgtccatgttgggtttattattccacaattaattgcccatcaattaaaaaaatggcagagaaaaaaaacaaatatattagtgatatttaaagaatccaaaggttccaggggagaaatgaagtaataaatagtaaggagctaagcggaaaggcagaatctaattgtaaaatttccatg

SEQ ID NO: 450054 - DNA, 622 bp, Homo sapiens
tgctattaaaaataaacataaacacactttaactgaatgtatgtccatgttgggtttattattccacaattaattgcccatcaattaaaaaaatggcagagaaaaaaaacaaatatattagtgatatttaaagaatccaaaggttccaggggagaaatgaagtaataaatagtaaggagctaagcrgaaaggcagaatctaattgtaaaatttccatgtgaattgttttgtagttgctttagggaaagaagagctaatgacttgtcaacctgaaaccatagcggctcttctgcaaatatcactactcaagtatcagttaatgctcaaaggctaaacaagacagtatctacagcattacaagttttctgtcaaaaacattatatttatagatgaaattggccttgctacaaagagaaaattgaatttaaaaagttaatgagaaactttttattgaattgaacaacatgcactgtattacaatagcataatacttccatgaccgtttctgtggcatttacacagttcattatctaaaattaattagtttaacaacaaattaaaacattaaatatcataaccatatattttataattatctcaattttatattactaatatactt

SEQ ID NO: 450055 - DNA, 622 bp, Homo sapiens
tgctattaaaaataaacataaacacactttaactgaatgtatgtccatgttgggtttattattccacaattaattgcccatcaattaaaaaaatggcagagaaaaaaaacaaatatattagtgatatttaaagaatccaaaggttccaggggagaaatgaagtaataaatagtaaggagctaagcggaaaggcagaatctaattgtaaaatttccatgtgaattgttttgtagttgctttagggaaagaagagctaatgacttgtcaacctgaaaccatagcrgctcttctgcaaatatcactactcaagtatcagttaatgctcaaaggctaaacaagacagtatctacagcattacaagttttctgtcaaaaacattatatttatagatgaaattggccttgctacaaagagaaaattgaatttaaaaagttaatgagaaactttttattgaattgaacaacatgcactgtattacaatagcataatacttccatgaccgtttctgtggcatttacacagttcattatctaaaattaattagtttaacaacaaattaaaacattaaatatcataaccatatattttataattatctcaattttatattactaatatactt

SEQ ID NO: 450056 - DNA, 605 bp, Homo sapiens
tttattgctgttgtctgtggttggtttgtaattatttggggaaaggtacagtgcagacaacttgtctttttagctctaaggtggatcaagatgccacattataatctgatggagatgactgggaaacacttagaaatactggactttgagcataaatagtaaccaggtggggttttgagttatctcgatgtgtgtgggaaaagagtgaaacagatagttggtcaccaaagsagagaggctgttgcggttgcagagactggctcattgttcaccaaattagtgttattctccaccagggcacacagctagacatttcctcctttgcaattagaaacagccatgtgactgagttctggccaatgggagggcaccttccatttctggaccttggcaatgtaaagtccttatgaccaactacctctctcttccccatcaactagttggaagtagaaacatttttaaagatgacataaagtcagcctaattcccaaaatggctgtcttccccactggtggctatctagactctatgtgagttactgacgtaaactgagatttaggagttcatttgtcaacactcagaatgatcttagctaataaacccct

SEQ ID NO: 450057 - DNA, 597 bp, Homo sapiens
gttttttaaatttatgtgtgatttcttccttgacccatgaattatttagaggtatattgtttaatttccagatatttgaattttctagatatcttattacaccttattcctaatttaattatgttgtgagaaaaaaactgtgtagtttctgttttttgaattyattgaaacttgtttaatggcaacatgtggtatatttttaaatctgttttcatgtgtacttcaaaggaatgcacattacactgttgttaggcaaaatgttctatgtatttttcagatcaagttgattaagaatattgttctggtcttctatatctttaataaattattgtctacctgttctgctaattactgacagaaacatgttgaaattaccaaatacaattgtggatttaacaatttattcagttctgtcaatattactttcatgcacttttaagctctgttattaattgcatcatatttatatttactaagtctaattaatgaattgaatatcatttatctctgttccttgtgaggccaactttttaggattattgcttacatggcatatcttgtttcattcatctaatttgaatctatctgtatctttgt

SEQ ID NO: 450058 - DNA, 597 bp, Homo sapiens
gttttttaaatttatgtgtgatttcttccttgacccatgaattatttagaggtatattgtttaatttccagatatttgaattttctagatatcttattacaccttattcctaatttaattatgttgtgagaaaaaaactgtgtagtttctgttttttgaattcattgaaacttgtttaatggcaacatgtggtatatttttaaatctgttttcatgtgtacttcaaaggaatgcacattacactgttgttaggcaaaatgttctatgtatttttcagatcaagttgattaagaatattgttctggtcttctatatctttaataaattattgtctacctgttctgctaattactgacagaaacatgttgaaattaccaaatacaattgtggatttaacaatttattcagttctgtcaatattactttcatgcacttttaarctctgttattaattgcatcatatttatatttactaagtctaattaatgaattgaatatcatttatctctgttccttgtgaggccaactttttaggattattgcttacatggcatatcttgtttcattcatctaatttgaatctatctgtatctttgt

SEQ ID NO: 450059 - DNA, 620 bp, Homo sapiens
gtgtattgttttcatggctaaattttcctctattcactgagtttgcatttagaaaacatgttttggaatccctttttaataactccagctcctggacatagcaagaacctaaagtatttacaaaacaaaaaaaaatactagataataaaaayaatgtttaatacctaatttttttcccatcatttgaccagaaaagtgtgtttgcatttttaacatgcaaagatgccgttaatatacatatatcatagtgactagtctctaacagcttaaaatattgataaaactatattgcacgtaatgaaaaggaagtacaagggttgatacaaatcattccaataaaagcctttatgtgtggaaggcacgacgttttaataaagaaaagtagttctcacaaaaccatcttcaagtagaagaaaaatctgttttgcactccctggcattctaaacaacatacatgatgccacttttccatttacttgaataatagcttttaaaaccttcgcaaatcccctagtttgtatttcctacagaaagtgtctcaataaaagtcagaagctatgttaaataacatgatggatatcagccctgccctctgtttctcacaggcccccatcccaaag

SEQ ID NO: 450060 - DNA, 601 bp, Homo sapiens
ggatatacacaaaactattacattatatataggtataattgaagggagataagaaaacagaaatttctatatgataaagacataatttactgtcccttaattcaatgctatttatcttttcattttaaaaataaattcagctattactgtatttttttacagatgacagtctgctatacactttacttccattcaataagaaaaggactaagtatcaaatacgccatactagacaatgtggagaagtaaacctcttgaagawgatccatcaatgattttagtttgagaatattacctgatgttcagggaatatgcctttgtgttataatctctctgagcttcagtttccgctctgtcatatggtggcactttccaatgcagcaaagataagataagaaacagtgatttgtgtaatatgttatgggaactgaggagaacctagttctactgagatgataaggaagacttcaaagagaagtcatacttgattggtagtctttcaaacgaacaagaagaaggacaggatgttttaggcagaagggagatatgcacagcacctcaggcatgagataactcgatataatcaagaaatctccatgcg

SEQ ID NO: 450061 - DNA, 601 bp, Homo sapiens
ggatatacacaaaactattacattatatataggtataattgaagggagataagaaaacagaaatttctatatgataaagacataatttactgtcccttaattcaatgctatttatcttttcattttaaaaataaattcagctattactgtatttttttacagatgacagtctgctatacactttacttccattcaataagaaaaggactaagtatcaaatacgccatactagacaatgtggagaagtaaacctcttgaagaagatccatcaatgattttagtttgagaatattacctgatgttcagggaatatgcctttgtgttataatctctctgagcttcagtttccgctctgtcatatggtggcactttccaatgcagcaaagataagataagaaacagtgatttgtgtaatatgttatgggaactgaggagaacctagttctactgagatgataaggaagacttcaaagagaagtcatacttgattggtagtctttcaaaygaacaagaagaaggacaggatgttttaggcagaagggagatatgcacagcacctcaggcatgagataactcgatataatcaagaaatctccatgcg

SEQ ID NO: 450062 - DNA, 609 bp, Homo sapiens
tttctgagcttcagtttctgcataaataatataaaaacgtggagtcaaacatgataatatatgtaaaacacctgctagaaataatgcctcatatgtaatcattttaataaaatgtaattgttagtttcaccaattattatcattaggatactgaagcctaggggaaactaagcatattctaatgcattacagaaataatttccgcttcatagagattrgcaatctatggcccacggacagcatgcggtccaccaccagttttcataaatatattttaattagaacatagtcacacccattcattgtgcattgtttatggctgttttcactctaaaatgatagaattgagtagcggccacaaagaccatatgaaccacaaacatgtacaatctgcccctttagagaaaaaaattgctgatccctgttctaaaggaatagcaagttgttaacaaagtaacctatcttagtttgtattcccttgagacaaagacctaggtgtgagtagtttatactggagttgatgtgaaagtaggggtgaaagggtggccaaagtgagacagggatggcgaaaaaagctaacagggagatgtattattgagtttgtgcctg

SEQ ID NO: 450063 - DNA, 609 bp, Homo sapiens
tttctgagcttcagtttctgcataaataatataaaaacgtggagtcaaacatgataatatatgtaaaacacctgctagaaataatgcctcatatgtaatcattttaataaaatgtaattgttagtttcaccaattattatcattaggatactgaagcctaggggaaactaagcatattctaatgcattacagaaataatttccgcttcatagagattggcaatctatggcccacggacagcatgcggtccaccaccagttttcataaatatattttaattagaacatagtcacacccattcattgtgcattgtttatggctgttttcactctaaaatgatagaattgagtagcggccacaaagaccatatgaaccacaaacatgtacaatctgcccctttagagaaaaaaattgctgatccctgttctaaaggaatagcaagttgttaacaaagtaacctrtcttagtttgtattcccttgagacaaagacctaggtgtgagtagtttatactggagttgatgtgaaagtaggggtgaaagggtggccaaagtgagacagggatggcgaaaaaagctaacagggagatgtattattgagtttgtgcctg

SEQ ID NO: 450064 - DNA, 615 bp, Homo sapiens
aaacaccaaaacgaaagtcttagtttattagacctactatccctgtacttacttcccaaaggcttactttgtcaatgatgttataaacagaaagaattgctttaaaagaccaaaggttctttctctctaaatgtgcttctattgagtcactatggtactaactgtagaaatatacgttgaagctgaaaaaacagaagactgcttcatcaagcttttaaacccccactaaaaatagaaacttaaggggagttactgactcagytaaactttggaagtggatttaaacaaagacagccctacctttgttcaccattttctatagcaagcagttgtttaaatgaagttttaaacaaaattgctgaaaaatgcaaaattgtagcatgactgacaataaataacctcccaccaatgtgtctgtttctgctcctcagtagctttactggccactttatttctccttattatgaaacattgtagtgcagctgccatcctgtagagatatctggtaaacatttcatgagacaggcgaagcttttagaattccttttgagctttgttaaattgaacgtgtgaaaataaagttgtccagggtgaaggagggaaagcattttttag

SEQ ID NO: 450065 - DNA, 579 bp, Homo sapiens
attagcaaaaagccccagctgggcagctgcacctttgtggtttgacaggcagccagtaataattcaaaaatcgcccacttttccaggatgrcgcagcctccacaaggaaacacggtttggagagcagagcaagggtcttgtgtcgtcacctcaattgtttgcctattttagggaataacctgtgcaatgctcaaacaacacgttttttaactttataatcaggtcctcatcttcttgttctttcatctactaattgaagatgattgaaatggcaaaaatggcttcaataagatgaccttaaaaggaggtgggggcaatctttgaaggatccctgtgttgatttctttagagaagaactttgcaaagagttaaataatgtcactgttatataagtcacattggatccttcaagccagaaaatcagttagttaattctaataacggtttaattgtttatattcaattcatggaatcagagtcaagatattggaagctcactttgccaaaggtaaaacatctaacattgtaaatgttattgtaaaattattttatatgttcaacattaagaacaaatgactt

SEQ ID NO: 450066 - DNA, 613 bp, Homo sapiens
gctataatgaacaatgggaatgcagctatctcttcaagatattgattttatttcctttggatatatatcaaggagttaacttcctgaatcataggttagttctatttttatctttaaagaacagcatagacagcacacaaataaataaatgcaaagccaacaaagttgggctgcattcttctcatgttgccatttctatggttctcattcttctgcctttctcttccacttataaaggcccttatgattacattggatccagccagatattccaggataatctccccatctcaaggtcaccagatgagcaatcctaatttcagctgcagctttagttcctctttgtcatgtaacctaatataagcccatattctggagtttagtacctggacatctttgatgggacattattctgcctaccacagctagtatcaagctttactaataatttaaaggacacaattaagagtcacatgtgaaatagagatctgggccatccatgtggttccccacatcttttccattttaaacatgsactctggcccatccaaagtaacacaggtggtctctaagtaaggtacataagctattttctcagcaagcaaggaacagt

SEQ ID NO: 450067 - DNA, 613 bp, Homo sapiens
ttaatatttataatccattttaataaaacttttggtttgggaagtcagaagcttctccaaatttttacaatttggccaagtttaaataatcagtgatattcatcaatatttcaattatttaacaacttaaaaccagatgtttaagtcccatgaaaagaaatctccccctcccattaaacactaattttcaaattgacgtttcatattttacccaaatgcaacagcacagctgyttccagaaagtttaccagactgaaaagtttgaacacttttattactactgcaagtttcttgacaaggttcttttctttgaaaatattctgcttaaaacaacatttattttagctctaaaaattctcttcatcaaaacccttttagaatttaaatgcattgccacactgaatgtgccgaaatatgaaacaattttgttaaaaaataagtcctcagtatcatctgtttttaataacatatcaatatttttatatacaaatgtgtgtatataaagctaatatatatttagaatgccaaaatgatcttgtcataatgaagtaagaaagttaaacttcagacaatttcctttctttctgacctatactcctgaaatacagaaaaa

SEQ ID NO: 450068 - DNA, 613 bp, Homo sapiens
ttaatatttataatccattttaataaaacttttggtttgggaagtcagaagcttctccaaatttttacaatttggccaagtttaaataatcagtgatattcatcaatatttcaattatttaacaacttaaaaccagatgtttaagtcccatgaaaagaaatctccccctcccattaaacactaattttcaaattgacgtttcatattttacccaaatgcaacagcacagctgcttccagaaagtttaccagactgaaaagtttgaacacttttattactactgcaagtttcttgacaaggttcttttctttgaaaatattctgcttaaaacaacatttattttagctctaaaaattctcttcatcaaaacccttttagaatttaaatgcattgccacactgaatrtgccgaaatatgaaacaattttgttaaaaaataagtcctcagtatcatctgtttttaataacatatcaatatttttatatacaaatgtgtgtatataaagctaatatatatttagaatgccaaaatgatcttgtcataatgaagtaagaaagttaaacttcagacaatttcctttctttctgacctatactcctgaaatacagaaaaa

SEQ ID NO: 450069 - DNA, 569 bp, Homo sapiens
cacagtctaacccctgtagatgaagactacatcctgggagacataaatacctaggtccctgaatggcttcttagagtatagccactgcatcagccctggacaattcacatctgaattatttgatgaaaacaggacaaaacaaagtttttatccaatttaggttactgaagttagtatcattttgttacaatggtttagcctrtaatggtgctactaaaagaaatcccggctgggtgcggtgactcacacctgtaatcccagcaacttcaggaggccgaggcaggaggatcacttgagtctaagagttggagaccagcctgggcaacatagtgagaccctgtctctacaaaaatgtttaaaaaaatagctgagcatgttggtgcacacctgtagtcccagctaatcaggaggattagctgaggcaggaggattgcttgagcctggggaggtcaaggctgcagcgagccgtgatgaccactgcactccagcctgggtaacaaagcgagaccccgtctcagaaaataatgacaatgagaataataataataatacagaaattcaatgattat

SEQ ID NO: 450070 - DNA, 491 bp, Homo sapiens
acatattttctggttcaattaggtaaaagaggctttggtttttttaaaaaaaatgagcttgcattctgaattgccaggcttgaatttgatatttcaaatgtctcttgtgtgtatatgtaagttacagcctgtttcacctggtttactgttgaacagtggctcgtctgaaaataaagaagttgttgaaaagctctcagcaaaaatgccaccaacacttgtatcacaggaaatcttcaaagagggtatactgtaacaagtacctgatagtcatttayttactcaacaactacttagcaagatcctaccatgggcccagttgggggtgggtgggcactgagaactagcaagatggacctagtgcctgactttgggaagttttcagtctagcatggaagggttaagtaaattgttacataattaatacaaaaataaaatggccctttaatagctgatactggccaggtggggtggttcacacctgtaatcccagc

SEQ ID NO: 450071 - DNA, 602 bp, Homo sapiens
ttttggtcctattcttttaatttttctttaagtctgaaattgccaaaacagaacatgtctaaaaagaaaaacaaatttttagaaatattaacaaattatatcccattgtatgaaataaaccatgcatccatgttgatctaagtaaatgaataaattgaagatttcaagaggaacagagatatttacctagtcttaaactacctccccacaatatactaactgattacaagattaaaaagcaacactgcagaaaagaaacccagcagataccaccattaatgatcaatgctaatatcactagtaataagacaaatcaaaatcaaggtcaaatgacaggatgcaatgagaagatcagaggatcgcctctgagatactcttgccaaaaataatacaatctaagcctattcataatgaaacatcagaaaaaaccagctgagagacattctttattttgaactttactcttcaaaagattcagagtcatgaaagtcaaggaaacctgaggaactgttcagacagaaggagtgtaagtgacacaacaactaaatgtaacccatgkatctaaatgggatccttgtgctataaaagacatggcagacaat

SEQ ID NO: 450072 - DNA, 565 bp, Homo sapiens
aaaaaaaatcctctttgtacttgataatttaaaaattgaagcagaaaaaggaaaatgcgctggcaattcattttcttctgccagacttgaaagggtttgtaatttagaattataatgattgaactgccctgcatcagaaagcagcacctgttgactcttctaattgggattatgcttatattctttatattttctcttttgaaacagtatctcaaaaggtatagtaaaactagcaaaatagtttatccaargtttaccaaatgatcagctgcttaattatgagttcaataaaatctgataattttaatgtttttagtaattttgaaatgagtggttaaaaaagaattctgattttttttttaggattctagatttaattttcatgacaatgaagcaatccttttttagtgagaagggagtgggtgaagagaaaaaaatcattaggatttttctaaaataacttgtctaagtttccaagaaacacaaaaataagtatctctgaaatataatttggtattatataaaaaactaaacaactatatatccagctcttctacgtatatac

SEQ ID NO: 450073 - DNA, 511 bp, Homo sapiens
ataatgaataatagttaagtcctcttgtgtctgccccaataccttcttcctcagcacctgtttggtgctggtgtccaagagggagttatcagccagggcccccagccgctgctccctaacccccccccccccgcaccccgtccccggtagcagctcacacagtggctccttctcactgggcagggagtgaactctgggctgcgctgagctgaggttatatgttcaaccaaactcctcttcacggtacccagcttgtgtctcgctccatgtgtgactggccatgaaaaagcctggattcacggggtgggggctggaaggtggaattagtaccttttcagtttgttttaraaagttattttccaataaaaagataactaagcaaaaagaaaatagtgttaagacatgagctctaaagccagactgcctgaattcacgtcccaactctactgccttatgacatttctctggcctgttttctcatttgtaaaatgggaataatgttaatgcttac

SEQ ID NO: 450074 - DNA, 594 bp, Homo sapiens
atataggccgggcgtggtggctcatgcctgtaatcccagcactttgggaggccaaggtgggcagatcaccctgaggtcaggagttcgagaccagcctggccaacatggtgaatccccgtctctattaaaaatacaaaaatcagctgggcgtggtggcgggagcctgtaatcccagctacttgggaggctgaggtaggagaatcgcttgaaaccaggaggcagaggttgcagtgagccaagattgtgccattgcactccagcctggccaacaaagagcaaaacttcatctcaattaaaaaaaaagaaatatatatatgtgtgtatctgtatacatatatatgtatctatatgtgtatacatatagatacatatatgtacatgtgtatacgtaaatatgtgtaaatgtacatacatgtatacgcacatatatgtatatgtgtatacatacatgtatacgcacacatatgtatatgtgcgcatacatacgtgtatacgcacacatatgtatatgtgcgcatacatacgtgtatacgcacacatatgtatatgtgcatacayacgtgtatacgcacacatatgtatatgtgcatacat

SEQ ID NO: 450075 - DNA, 524 bp, Homo sapiens
accacatgttctcacttgtaagtgggagccaaatgatgagaacacatggatacatagaggggaataacgcctatcagagagtggagggtaggaggagggagaggatcaggaaaaataatgaatgggcactaggcttaatatacccaggtgatgaaataatctgtaaaacaaacccccatgatacaagtttacctatgtgacaaacctgcatttgtacccaggaacttaaaataaacattaaaaaaagaggcaattaggatacagacacatagagagggaagtctgcaagccaaggggagaggaggctgcaggagaatccaaacctgwcactttgatcctggacttccgggctccaggactacgcagcaataaccttctgctgtttatgccctcagtgtgtgtaacttccttatagtaaccccagcaaacgcatacatcatccagactaggtaggccatttttctaaaatattactaaacaatgtcaaatatttaaacgctgttttgtaaaatacaagctgaagt

SEQ ID NO: 450076 - DNA, 524 bp, Homo sapiens
accacatgttctcacttgtaagtgggagccaaatgatgagaacacatggatacatagaggggaataacgcctatcagagagtggagggtaggaggagggagaggatcaggaaaaataatgaatgggcactaggcttaatatacccaggtgatgaaataatctgtaaaacaaacccccatgatacaagtttacctatgtgacaaacctgcatttgtacccaggaacttaaaataaacattaaaaaaagaggcaattaggatacagacacatagagagggaagtctgcaagccaaggggagaggaggctgcaggagaatccaaacctgtcactttgatcctggacttccrggctccaggactacgcagcaataaccttctgctgtttatgccctcagtgtgtgtaacttccttatagtaaccccagcaaacgcatacatcatccagactaggtaggccatttttctaaaatattactaaacaatgtcaaatatttaaacgctgttttgtaaaatacaagctgaagt

SEQ ID NO: 450077 - DNA, 575 bp, Homo sapiens
tccttcttagctcagaaagcctattgttggtaaggggtgtgggtgtaggtgtcctttgatcagttgcttttatcctttttctgcaatttatacttttaattcttcctctcagttgtagaaaattatgttcaagtcaagggtggggaggtgagctgggcagagaaaggtttagagactagcgttatcgcgagcaggcatcagtgctgtctggcctgggcagttttttaaggtggattctcttttggagttctctgtgcataggtggagactccgctttgcctttgtcttatttctgggggttttctgtattagtttgttctcacactgctawaaagaactacttgagatggggttatgtataaagtagagaggtttaattgactcacagttcttcatgactggggaggctcaggaaacttacaatcatggcagaaggtgaaagggaaaaaaagacacatcttacatggtggcaggagagagatagagaggcggtggggggaaccaccacttttaaactatcagatctcgtgagaacccactcgctgtcatgagaacaacatgggggaaaccacctt

SEQ ID NO: 450078 - DNA, 454 bp, Homo sapiens
agagggaagagaagagaagagaagggggacaggaagggaagagaagggaagggggaagggaaggacaaagggaatgaaaggggagggaaagaggaagggaaggggagagaagggggaagggaagggaagggcaagacaataaaagaggaaagaaaggaaattattataatgattaagtggaatcataaatttaaagcatggttcctagcacacagcataactttgttaaatattagtgcccttgcctacattcactcattgtcmgcataagggtctttcagaatccccttgttacttagctcaaaatcggtgctacatgcatataaattcaccctactgcttgtccccagatgaataagatttaattaacacttaacattttggtacttgctcactttggtgggagtatggaggagtttctcttcctgttgaacacaccatgctcacctggaaa

SEQ ID NO: 450079 - DNA, 556 bp, Homo sapiens
gaatgagccacacatagaaagaggtctgagagaaaaaggaggaaggaatattcagtttggtatgcatggtaaaaatctatttattatacataaagttaacccctgcatcaacatgtatgttttacatcctgttggatctctgctaatacctctgtctgttcctacccctatcccaagattcaataatacaaggcaagaagactcctgtayggccctgtggatgtgcaagatgctaagaatgagtggatattacagatagatgtaaaagtaggaaccttgccagcctctattacctttcctcagtagatctgtcttcctgggccagggtgaggtagaaacaatagctagatgagtaatcagtggcttgtatggcttggcatttttcctgagctccctttggagagggaactaagaccatactcagtattttcaggttttcagtctcttcataattgacggcccattccctcctcttatcaaattgcacagagatcaaatgtgaaggagcctgaaagaaaggacagcgtgtattgctcaattaagaatttgctccctt

SEQ ID NO: 450080 - DNA, 457 bp, Homo sapiens
atttgtcatggcaataagacagggttcttcctagggaagtgaatgtgcaaaggcttggagacttctaaattatttctttaaagattttacttgagagttttgagttgctataatccctgggaattccccacttgctaaccaggaccctgtgtgtcagcggggaaagcgattttcccaaagtcacacagcgagttgatgcagcatcaagacttagacactcaaccaatgctctccactctgctgtgctgaccaggcatgacttcttggttgatggcgcagctaaattgccatagtccatccatcagagaagctctcatatgtcttgccacacactccatatggtctttgaacttgattttgtcctttgttgtcgaaggaaaagcaagaagagttggaaaagaccactcaacaatgatctgcaagcaagttgggaaamcttgactctaacaaaatgcat

SEQ ID NO: 450081 - DNA, 541 bp, Homo sapiens
ggcttaaaacaagagaaatttattatctcaggtcctggaggccagaagtgtgaaattactgttccttgtctctcccagcttccagtggttcccaggtgttccttggctttggccagatcattccaatctatacctctatggtcatccttcctcctttttttctctgtgtgccttttataaagacacttgtcactgtattaagygtccagtcagataatctagaatgatctcttaatcttgacagcttcaatttaattacatctgcaaagaaccttccccaaataaggtaacaatcacagattttgagtattaggacatagatatatgcttctggacaccaccatttaatccactacacacaggaactgtatgtacagtgtctcatcagctcctcacaagtctgtgagttgtggatatatataagcattggcttttgttgttaaattcattttaggatgaaaacatgcagaaaagaagggtttttttttttttttttttttttttgagacagagttttcctctgtcacccaggctggagtgt

SEQ ID NO: 450082 - DNA, 571 bp, Homo sapiens
gcaccatggttatgttggctggatgtgtgggtctgagcccaggactgggagcctgctatctccagttactttctgagtgactttgagaaaatgccttcccatttctggacttcagttgccagcagctataaagtcagctagaccactccaaagctccttccaactttaaaatatacctgacatatggccataaagaataagtaattggctattatggtggttttaaggggcmcatgtttagacaccatatcctcttctcacccacaaagtcagaaccaacttcctactttgaaattagagtcatatttaaacaagggaattaaaatgtcatcttcattagataagggtttggttggagaacatggtttaggtatctgaaatcatgggctttccaacagtgcacctgaaattagcatacaggaacacctattcaaggacagcactgcatagctgcatgtccttccccaactccaacaggcagaccctttttttaaccacaaggcagaaaacagacacagcctctctgtgagcaggcaggtccacagaggatgaaggaaccagctaactagtg

SEQ ID NO: 450083 - DNA, 531 bp, Homo sapiens
ccaaaaacccaacccacaagaagccaaaaatttaagggacagagaaggaatagacagagtggttcaagcagaggaacagtgcaaatagatgtcaaaggagacttgcgctccagccaggactaattaacattatctagttcagtgaagaggtctggtaaaagaagaaacagaaagatggccactgggttcagtaatatgaacactgggttgacctcagtgggaacagactcaggaaaggagggtggagggagaaggctaatgaaaatgaattgacaagtgactatgagaggaggacaggcagtgagtatagactctgcacagatgagcttaacagaggctgacacacagtatgtgatcaaaaacatgggaataaagaagaaagaaagggataaaagaaaarcagagaaatgtatactccagcgtaagaagaaaatgccatgaggggcatggcagaaggatgaagaggctaaggtttctatgggactcttttaggtaaattgatagttatgtattattcaaagacatgtatcc

SEQ ID NO: 450084 - DNA, 433 bp, Homo sapiens
gactctccaaactgctcctaagttcctgaagctcatgaaccaggactgatttatctttgcatctccagtgtctcccacagcagtattgttcactgaaatgaaggtgaaaggctttatagaccaaatgataataatcaatgaaaaaaggagctgtgggacaaaaaaggactcgagacttagcaatggcttaccttgaagaaagagagatggttctgccatacattacattatttttaaccaactagcaaaatacattaaatatccatgtgaagtgacgggccttgtcagaataagcaycctgaactgagagtcaggcaccatctattctggccctagcctttgtgtgagtctgagcaaggcccttcccttctctgagcccattctcatctgtaccatgagaagattagaccatgggatgcctaaaggtccttcc

SEQ ID NO: 450085 - DNA, 521 bp, Homo sapiens
aatggggaaattccaagtttgtagatccagtaaccatggaggggaactaagaagttcttagatatgtttctaaaagatttggaaatgtatagagtgcaaagatgcttgccttcttataaacattcttattcrtcaatggccccgcgatgcaggaatgttgtttcttttttctatgcttccaaagtgctggaggcccttaaaggaattgtgataaggacattatagaatatacaactcctactggaaagggcggcagcagctccctctccccagctatgggggagcacaaaccaggggccttcaggtaaacacctctcactatttccctcaagaggaaaatgggtgtctcctttgacctcagagtgagtgcacaggaatatgctccttctcataatctcatattgctgaattatgaatacatttgctacatcactttatctttcatgtcatatagctcatgcttgacacataatgttgcagaagtgatggcttttagtttgaactaaagactattggccaac

SEQ ID NO: 450086 - DNA, 521 bp, Homo sapiens
aatggggaaattccaagtttgtagatccagtaaccatggaggggaactaagaagttcttagatatgtttctaaaagatttggaaatgtatagagtgcaaagatgcttgccttcttataaacattcttattcatcaatggccccrcgatgcaggaatgttgtttcttttttctatgcttccaaagtgctggaggcccttaaaggaattgtgataaggacattatagaatatacaactcctactggaaagggcggcagcagctccctctccccagctatgggggagcacaaaccaggggccttcaggtaaacacctctcactatttccctcaagaggaaaatgggtgtctcctttgacctcagagtgagtgcacaggaatatgctccttctcataatctcatattgctgaattatgaatacatttgctacatcactttatctttcatgtcatatagctcatgcttgacacataatgttgcagaagtgatggcttttagtttgaactaaagactattggccaac

SEQ ID NO: 450087 - DNA, 551 bp, Homo sapiens
tctccttgtagttttgatttgcatttatctgatgatggatgatgtgtagcatcttttcatatgcctgcttgccacttgtatgtcttcttttgagaaatgtctttcaaatctaaaaatgcacatagcttaactaaaaaaatgctttcttgtttaaaaatgctaatggtcatctaagccttcagcaagtcctaatctttttgccagtggagattctgccccagtattgatggctgctgactgrtgagggtggtggttgctgaaggtttggtggctatggaaattacttaagataacaatgaagtttgctatgttgattgactcttcctttcacaaaatatttctctttggcatgtgatgctgtttgatagcatattgctcacagtataacttccttcaaaattggagacaattctttcaaacctgatgctgtttgatgaactaaatttatgcaatattttaaatcatttgttgccatttcagcaatgttcacagcatcctcacaaagagtagattccctctcaagcaaccactctttgctcatccataaaagc

SEQ ID NO: 450088 - DNA, 603 bp, Homo sapiens
acaatgaaacaaggtagacctgtacttaggggtatgaactgtggggtcatctagcccagattttaaatcataaacctaatcattgtacattcttggaaaatttgtggacactctcttggcatcagactgttcttcaacatggtgataataataccaactgcagagagttgctggcatgatttaataaaataataccttgaaagacccaatacagtaacttgaaaataacgtttaatacatgtgccttatattccccattatttctgttactataatcataatcatcatcaccaatatcacaagtttgttagattgaatagaataattcacgtacaggccatagtgctgggattagcattaaaagatcaatgaattatggtaattgcaaccaccattataataattctcattactactaaacttaataaacttaataaacgccacttmctaatcaacattcttcttcttttagtaaaggtagatataaatctgtaagactatgatacgcatcataagccctgtttgcagacgacatgattgtatatctagaaaaccccattgtctcagcccaaaatctccttaagctgataagtaacttcagca

SEQ ID NO: 450089 - DNA, 473 bp, Homo sapiens
gtcaggcctcattaagctgtgatttcaattaaatatcataaggaaaaaagagagttgacaacaaatagcttacagaaacaggaaacatgcagcaccaggcacgcagctcggccttcatgctctgtcttatgcttggccagtgaaacaaaccacaacttgttgacaaagttgaggcatgttgcctgtcagagaggcccaggataaggaagcatctaaggcagttcaggagagtgccgatcttctcccagcttaaaacaccacccaggcccccrgggtatcagagaatcaagcatcaacttcctagcttggaggaacaatagtccaatgaaggacaatttattttctttcatttaaaaaacgctttttaaaccctccttttttctaatgtaaaagtaaagaaggatcagtaagaattataggactaactagaaaacgaggaaactaaacacagacaagaggaaaaagaagaaaga

SEQ ID NO: 450090 - DNA, 613 bp, Homo sapiens
ttaccacctatgcacacttgagcaagtaacttaaaccccattaatccaaattttattatctctaaactgagactagcactgcttataccatatgatttttgcaaatacataacatcatgtatataaataaagtacttagcccagtgcccaacacacagttagctaccaatctgattaattataattaataaattattgttgtggaaggtgagatatttccttgattcatctgggaatttccctattagccattgctaagattagtaagttaaatgtgggaaacctagatatttttttccttaaaratcccatttacttctctgagagaacaattggcaccagccaatatatatcaaaaagaaaaacaatttgttttacaatgggaaaaatgcacacaggtgatataattagagcatagtctaagatgaaaaattttcttaagctctagcatgtacaataaaaatagtaggtggaataatctagtagataatagtagtcatctaatagactatagattgaaattattatagactaatagattattagattgaaattggtaaaaactgcaattacttttgcaccaacctaatagaatggtcagaagagatattaa

SEQ ID NO: 450091 - DNA, 574 bp, Homo sapiens
cagcaactcaagtatttggcactaaaggcctcttccaaagaatcattttcaaagatgggtctgcacccctgcagaagttctcatgtttctataaatgctatgcttgtctttctttcttttttctttatctttctttctttttctcttttaaaaaattttctggtctttcagtgtaaagaattagaagggccaggtctcaggcatcaggtaaagactggaaaaaaatatataaggatgtraagcaagcacccctttggagaaacagcaggtctgtctggaaggtgtccttctgccctcagggaccttctctttatgccagcaatgccaggcccactgagttcttcccacttaccttggtgttgacccgatgcctgaattccccatcactttttccaaatggctttccatctcttctcttctcttgactataccctgggggaaaagatgctctttgggcttctctttctactttataaagtaattccctgctgacaacagagtataaccatacattcttgcctgactttccttcaaagtcatgtctaccttcctctcatgctcttgactttttatt

SEQ ID NO: 450092 - DNA, 594 bp, Homo sapiens
tccttttcatccttttttctctattttggcaggcaaccaagaattatgtcatagccttgtggtgtgggtctccttgactgaggcttgctggagatgaagcttaggatgaggaaatttggatggtttccagctgaattctatggttttcttcctgtggtagccatttgcttctagaaaattctagggaaatccagtgtgggctgtggctgacaggaagttaagggttccaattctgttsccagtagagagtaggtcttgttgcttagccacagttagtgcgtagaaagaaacaggtcctgttgctttcttcaaagacccaaatatattaccagctgtcagtacacatgggaggcctaagaccaagaattagaaatagattgcaagaaacagcctctaactgaaatgagttttcctctagtggactttgaattttccaaaatgacattcttaatacttctctgtcgtaattaaagctgtcatttggcctcaatatcaggctaaagttaagagtcaagagacttgaatttttacctagttctgctatgaactagttctgggatcttgagcaaatagaccactctctgagtctgttcc

SEQ ID NO: 450093 - DNA, 594 bp, Homo sapiens
tccttttcatccttttttctctattttggcaggcaaccaagaattatgtcatagccttgtggtgtgggtctccttgactgaggcttgctggagatgaagcttaggatgaggaaatttggatggtttccagctgaattctatggttttcttcctgtggtagccatttgcttctagaaaattctagggaaatccagtgtgggctgtggctgacaggaagttaagggttccaattctgttgccagtagagagtaggtcttgttgcttagccacagttagtgcgtagaaagaaacaggtcctgttgctttcttcaaagacccaaatatattaccagctgtcagtacacatgggaggcctaagaccaagaattagaaatagattgcaagaaacagcctctaactgaaatgrgttttcctctagtggactttgaattttccaaaatgacattcttaatacttctctgtcgtaattaaagctgtcatttggcctcaatatcaggctaaagttaagagtcaagagacttgaatttttacctagttctgctatgaactagttctgggatcttgagcaaatagaccactctctgagtctgttcc

SEQ ID NO: 450094 - DNA, 517 bp, Homo sapiens
tacactaaattagaaaattgaaataagaataggaagattacaagaactctgtcatccctccactaaaataacagctgtatttaatttcattccaggataaatctggtattgtgaaaattttagatcctaatgtccaaaatttaattcactttagatatttttagtaacctatgaatcatagttgaaaagatggaataataaaatttaaatttaacaaacaaaaatgacactcaagtgattcctttactgggctacacttcctgtacatatttgaaaagagacaaatgtaattattttccctcttttaggtatcatgcaaatatatgtatgtatgtatgtatctatctatccatccatccatccatctacctccctgctatgtatctatataaatgcatatgaaaaaatatacacatatatttatatgcatgtattcatacacacacacacacacacacacacacacacacayatatatatgctaaagtacatactgctaaaaggatcagagtcagat

SEQ ID NO: 450095 - DNA, 634 bp, Homo sapiens
tcatctgttagtgtttctacacaagatatgagtagtttacacaacacaattacagtgttacacattttgtgtttttctgtgtatctattattaccagcaagtactgtaccttcagatgattttttgctgttcattaatagctttttctaggccaggcatggtggctcacacctgtaatcccagcactttgggaaattgaggcaggcggatcacgaggtcaggagttcaagatcagcctggccaacatggtgaaagcccatctctactaaaaatacaaaaattagctgggcatggtggcatgttcctgtaatcccagctactcgggaggctgaggcaggagaattgcttgaactgggacccaggaggctgaggttgcagtgagctgagatcacactactgcacaccagcctgggctacagagcaagactctgtctcaaagaaaaaaaaaaaaaggaagctttttcttttcgyctggagaattccctttagtatttcttgtaggtcaggtctggtgttgataaaatccctcagcttttgtttgtctcagaaagcctttatttttccttcatgtttgaagctattttcactggatgatattctggaatacaagtgtggtgctttttttccccacctt

SEQ ID NO: 450096 - DNA, 605 bp, Homo sapiens
  misc_feature (1)...(605): n = A,T,C or G
nnnnnnnntcttttctcttgctggcttatagaatcttttctttatctttgatctttgggagtgtgattattaaatgtcttgaggtagtcttatttgggttaaatttgcttggtgttctatagccctcttgtatttgaatattgataattgttctctaggtctggggagctttctgttattactcctttgaataaactttctacccctatctctctctctgtactgcctcgttaaggccaataactcttagatttgtcctttcaaggttattttctaaatatgtaggcatgcttcattctttttwtttcttgtttcttttgtcttctctgactttatattttcaagtagcctgtcattaagctcacagattctctcttctgcttgatccattctgctgtaaaagactctgatgcattctctaatatgtgaatttcattttccaactgcagaatttctgtttgattcttttcagttatttcaatctctttgctaaatttgcctgatagtattctgaatactttttctgtattatcttgaatttcattgagtttcctcaacaaactattttgaattctctgtctgaaaggttaattatctctatctct

SEQ ID NO: 450097 - DNA, 605 bp, Homo sapiens
  misc_feature (1)...(605): n = A,T,C or G
nnnnnnnntcttttctcttgctggcttatagaatcttttctttatctttgatctttgggagtgtgattattaaatgtcttgaggtagtcttatttgggttaaatttgcttggtgttctatagccctcttgtatttgaatattgataattgttctctaggtctggggagctttctgttattactcctttgaataaactttctacccctatctctctctctgtactgcctcgttaaggccaataactcttagatttgtcctttcaaggttattttctaaatatgtaggcatgcttcattctttttatttcttgtttcttttgtcttctctgactttatattttcaagtagcctgtcattaagctcacagattctctcttctgcttgatccattctgctgtaaaagactctgatgcattctctartatgtgaatttcattttccaactgcagaatttctgtttgattcttttcagttatttcaatctctttgctaaatttgcctgatagtattctgaatactttttctgtattatcttgaatttcattgagtttcctcaacaaactattttgaattctctgtctgaaaggttaattatctctatctct

SEQ ID NO: 450098 - DNA, 582 bp, Homo sapiens
tgaatttcattttccaactgcagaatttctgtttgattcttttcagttatttcaatctctttgctaaatttgcctgatagtattctgaatactttttctgtattatcttgaatttcattgagtttcctcaacraactattttgaattctctgtctgaaaggttaattatctctatctcttcatgattggtccctggtgttgtatttaatttgtttggtgaggtcatgtttttctggatagtcttcatgcttgtgggtattagtaggtgtctgagcattaaagagttaggtatttatcgtagtctttacagtctaggtttgcttgtacttgttctctctgggaaggttttccaggtattctaagggatttgggtattgtaatctaagcttttggtcactgcagctatgtctgtgttaggggggcaccccaagcccagtaactctgtggctcttacaaacttatagagataccgccttggtggtcttggtaaaggtccagaggaattccctggattaccaggtggaaactcttgttctcttcttgtactttctctcaaacaaatggagtctgtgtctctgtgct

SEQ ID NO: 450099 - DNA, 554 bp, Homo sapiens
ctggttaaaaatgcaagatcaaggaggtttgaatttaggctctgtcasttaaaagttgtgtgatttgggccagataacttaacccctctgtgttcgtgtttttccattagtgaaatgaaaataaacaaaagcaacaacaacaataatatttatatcagaagaatgttgtgaggattaaacatatatgtgtgtatatatacacatacatatattaatatatgtatgtatgtatgcatatatatttgtgtacttagaacagtgcctagtacaaatttaatgctcaataagtatttaataatgataaaaagtgatatttactgaatactttttataaagattccttatatgtttgaggaaatttcttcatattcctacttttcctaaagttgtctttatagttgagagttaaattgtatcaaatgcttcttcttcacctaataagataaatgatatgcttttttgttagtgttctaaaatggtggttaattttaacagattttctgccactgaactatatttgcattcttgggctatcattcattgttactgttgat

SEQ ID NO: 450100 - DNA, 554 bp, Homo sapiens
ctggttaaaaatgcaagatcaaggaggtttgaatttaggctctgtcagttaaaagttgtgtgatttgggccagataacttaacccctctgtgttcrtgtttttccattagtgaaatgaaaataaacaaaagcaacaacaacaataatatttatatcagaagaatgttgtgaggattaaacatatatgtgtgtatatatacacatacatatattaatatatgtatgtatgtatgcatatatatttgtgtacttagaacagtgcctagtacaaatttaatgctcaataagtatttaataatgataaaaagtgatatttactgaatactttttataaagattccttatatgtttgaggaaatttcttcatattcctacttttcctaaagttgtctttatagttgagagttaaattgtatcaaatgcttcttcttcacctaataagataaatgatatgcttttttgttagtgttctaaaatggtggttaattttaacagattttctgccactgaactatatttgcattcttgggctatcattcattgttactgttgat

SEQ ID NO: 450101 - DNA, 554 bp, Homo sapiens
ctggttaaaaatgcaagatcaaggaggtttgaatttaggctctgtcagttaaaagttgtgtgatttgggccagataacttaacccctctgtgttcgtgtttttccattagtgaaatgaaaataaacaaaagcaacaacaacaataatatttatatcagaagaatgttgtgaggattaaacatatatgtgtgtatatatacacatacatatattaatatatgtatgtatgtatgcatatatatttktgtacttagaacagtgcctagtacaaatttaatgctcaataagtatttaataatgataaaaagtgatatttactgaatactttttataaagattccttatatgtttgaggaaatttcttcatattcctacttttcctaaagttgtctttatagttgagagttaaattgtatcaaatgcttcttcttcacctaataagataaatgatatgcttttttgttagtgttctaaaatggtggttaattttaacagattttctgccactgaactatatttgcattcttgggctatcattcattgttactgttgat

SEQ ID NO: 450102 - DNA, 554 bp, Homo sapiens
ctggttaaaaatgcaagatcaaggaggtttgaatttaggctctgtcagttaaaagttgtgtgatttgggccagataacttaacccctctgtgttcgtgtttttccattagtgaaatgaaaataaacaaaagcaacaacaacaataatatttatatcagaagaatgttgtgaggattaaacatatatgtgtgtatatatacacatacatatattaatatatgtatgtatgtatgcatatatatttgtgtacttagaacagtgcctagtacaaatttaatgctcaataagtatttaataatgataaaaagtgatatttactgaatactttttataaagattccttataygtttgaggaaatttcttcatattcctacttttcctaaagttgtctttatagttgagagttaaattgtatcaaatgcttcttcttcacctaataagataaatgatatgcttttttgttagtgttctaaaatggtggttaattttaacagattttctgccactgaactatatttgcattcttgggctatcattcattgttactgttgat

SEQ ID NO: 450103 - DNA, 541 bp, Homo sapiens
atttttccctccccgccacgacctacagtcaaaagcattaggaatctacctggactctattgtggaagagtggcacccagcccacaagacaaagtctttcccactcttccctcccctttctacaagcagaggagttgctcccagtggcaaccgccatcccaggcccgtggcaagtactgcctggccactgctgatgttcactcaagttccaggggctcttcagccagcttgtggtgaatgctggcatgcatgggactctgccttcagggaagtgggctgtcctctgacccagagcacatccagaaaggccatccacgagccaagtcctggaatcaggaaccccaagagccattttagtgctctacccctccgtggccaatttggtaccaaagtgtgggactaagttatcytttttttttttttttttttttcctaaagcagaaggaggctttccttgtagtcaccacagctaggaaatacgctgggtcacacctgaagccagcacatctctgagtcttacttgaggcccacagtgagtact

SEQ ID NO: 450104 - DNA, 621 bp, Homo sapiens
gcctctatcaaaatatcaatgacagaaatagaaaaaacaatcttaaatctcatttggagccagaagaccctggatagtcaatacaatcctgaatgacaagaacaaagctggaggcatcactgtacctgacttcaaaatatactgcaaaactatagtaatcaaaacagcatggtactggcataaaaacagataccaatggaacaaaatatagagatccctggaataaacccatgcatttacaggcaattcatttttgacaaaggagccacaaacatacactgggggaaaggacaacctcttcaataaagggtgataggaaaactgaatatccatatgcagacgaatgaaactagaattattgaaactctctcaccatataaaaatcaactcaaaaagaatgaaagacttaaatgtaagacctgaaactataaaatgactmgaagaaaacactggagaaatactcgggacatttgtctgggcatagaattttttgagtaagacctcaaaagcacaggcaattattttactcattttggttcacaatttcctgttttttatgatctctgaaaattgcagccctacctactaaaaatcttttattagattagaaatttgtttttg

SEQ ID NO: 450105 - DNA, 580 bp, Homo sapiens
tctaatttcacatataattagcaactcattaagaaaaaaactaaaaatgtcctgyttagggcaaaggagacatatctgtgggctcatcactgcctgtggacaatctgtttgcaaccttgggaatagatgacctctgacaccagattaatcatctgccttcaaaattgactaacttcactggacccagtcccaggtggagagtctgaaagcctagaaattgctgcagcagcatcaacttcctgttggaagctggggaggcaaagtcttaccctgagaaagggctggatttctcttaaaattttgaaaggccaaaggtggtgtcagcatttttgtgatatggcaggaataatactgtgcagtggatagggagctctgaattcttaccttgggtgtgctaaaaacctagcctggacttggttacatcccctcctttctccggtgttctcttggtgggtttataattttagattaaatcagtatttctcaaacttcaatgattggtgtattacagtgtggtagccagtctctgagatgattcttattccttgtttttgcttccttgtgaagttccctcccatat

SEQ ID NO: 450106 - DNA, 580 bp, Homo sapiens
tctaatttcacatataattagcaactcattaagaaaaaaactaaaaatgtcctgcttagggcaaaggagacatatctgtgggctcatcactgcctgtggacaatctgtttgcaaccttgggaatagatgacctctgacaccagattaatcatctgccttcaaaattgactaacttcactggacccagtcccaggtggagagtctgaaagcctagaaattgctgcagcagcatcaacttcctgttggaagctggggaggcaaagtcttaccctgagaaagggctggatttctcttaaaattttgaaaggccaaaggtggtgtcagcatttttgtgatatggcaggaataatactgtgcagtggatagggagctctgaattcttaccttgggtgtgctaaaaacctagcctggacttggttacatcccctcctttctccrgtgttctcttggtgggtttataattttagattaaatcagtatttctcaaacttcaatgattggtgtattacagtgtggtagccagtctctgagatgattcttattccttgtttttgcttccttgtgaagttccctcccatat

SEQ ID NO: 450107 - DNA, 621 bp, Homo sapiens
acttgctctggaagtacactagctgctatgtcatgaggacacttaagcaacactgtggagaggtccacatggtaaggaacagccagcaccaactcacaggtgaatgaaccaccttggaagcagatcctccagccccagtcaagccttcagatgactgctgttgyagctcacattttgactgcaacctcatgagggactttgagccagaatcatccccaattcctaacctacaaaaactgagagataaaaacatttatcactgcttaggcaaccaagttttgcattattttattatgcagcaatagataactaatacaaaatcatgattattgctatattggcctaccattgataatgttacacattaatgcatgtcaatgcatttaaatggtttattctttcaatttaaatagatttattttaagaggaaaagttttatgttgtaaataaaaaataagcatcactagccacaaaataaaaataactcagaatttaatttccttttcctgtgactcattttttatttttatgttttaaaataaattttattgcatgtatttaaggtatacaacatggtgttatggaatacatatagatagcaaaaaggttactacagtaagg

SEQ ID NO: 450108 - DNA, 399 bp, Homo sapiens
cattttaccagaagagagactgaggcacaagaggagaccaagcatggctccagggacgctagtgagtcacctgcagatgagattattcaactgtataaatgaaatcatgtttcacctgcaacraaagaaagcacaaatcaccagtttttacttctttctcttcttttactagttttaaatggctaaatggatcacctcccttccattcccccactccatctcccttaaatttggaaaccaattacattccagggaggtagagatctggtgataaaggactcgtttcaggtttcacacttgaatacatttttacagcttgcttataaaattctgaaagctggtctcctagtagaagggaagatgctgtcaaatgctaaatggtgcagttagagggacatt

SEQ ID NO: 450109 - DNA, 399 bp, Homo sapiens
cattttaccagaagagagactgaggcacaagaggagaccaagcatggctccagggacgctagtgagtcacctgcagatgagattattcaactgtataaatgaaatcatgtttcacctgcaacgaaagaaagcacaaatcaccagtttttacttctttctcttcttttactagttttaaatggctaaatggatcacctcccttccattcccccactccatctcccttaaatttggaaaccaattacattccagggaggtagagatctggtgataaaggactcgtttcaggtttcacacttgaatacatttttacagcttgcttataaaattctgaaagctggtctcctagtagaagggmagatgctgtcaaatgctaaatggtgcagttagagggacatt

SEQ ID NO: 450110 - DNA, 539 bp, Homo sapiens
ctgtgtctgttttattatccccctttacagttgggaacactgaggttaactgtgtttactcaacaatctcagggtcacacagatgcagagtagaaaagcaggatgtgatcctaggactaaaggcagacaaagtctatgccttttctctcctattgcagtttccacatatcagcaggtacttcctgtgaaagaggaagcacatttgttctcctggctccagagaagagaaagcagactggcagctctcccatgagggaaagaggagaactttgacaggaatttacgaccaccagggagaacagaactaacttttctgtaaggctgtggccacctacccctgaagatgagatgctgatgtagaaaatggacagccatctcttagaggatctgcaaaataatttctattctgrttagaaaaattaaatacattcactttatctttatgatcttgagatattccttggatagtaacaacagctcctgacatctggagactatttcattttagacaaaacatttgcatggagaatctaatatga

SEQ ID NO: 450111 - DNA, 423 bp, Homo sapiens
aaggctgtggccacctacccctgaagatgagatgctgatgtagaaaatggacagccatctcttagaggatctgcaaaataatttctattctggttagaaaaattaaatacattcactttatctttatgatcttgagatattccttggatagtaacaacagctcctgacatctggagactatttcattttagacaaaacatttgcatggagaatctaatatgatcccatgtgacattctttttgggacaaggtagctgttgctcagagaagcagcaggaattgtccaaggacacacagggtgaatgaaagacttggcagtgggacctgggtycaataatttcaagaccagtgctccttcacctatgcatgttgtctactggagtgaagcaaaaatatgggtctatagggcagtattatgcagaa

SEQ ID NO: 450112 - DNA, 562 bp, Homo sapiens
tagggcagtattatgcagaatgagtagtttctttccattattagcataagccatactctgaagctatttctgagacagtcatccttttctatgtgggtcaatgttcctgcagcatggacttccttctgggaacaaagcatcctttaggatcttccttaatcatcctcatcagtgtaatatgttgcttcctgtccaactgtgccccatttccataggcaatttatctgtatccatagagacaccagagatctgcttcttacttcaaatgtttcatatctaggttattcttcctgacrtgtgagtccagggcacaagtctaaagctcccacttacacagcccagagggactgagccctgctttccacagtcaggtcaggagcacactgactcctgactgtggaaaatttgtctgtgtgctaagtgtaaacagatgtccccagctgccggatcctttggccatatgaaaccaatcaccaactctacacaaacatgcatcatcaggctaaaatctgaaggtgcaatgaactcaccctgcttcccataggacagtgggtgagtagag

SEQ ID NO: 450113 - DNA, 489 bp, Homo sapiens
gcattcattcctgttgactgtgctaggagaaccctgggtcaggagatgctggactcctgggrtagaaaacctagttcttttcaaagatttaaagtaaagttttgaggtggaaagccctactgttttctggactatattagaatcattcctctcctcatggctgtggatcatattgcttataaaataccagcctcgtgacccatttgagaacatcactgaaggtccacaagataggaacaaatgggttttaaaaaacaccccagggtctctccctactgaatccctacccagtctaacagaattagactcaaagcagcatttgcagaagatagccctctttgcatgagctttccaatgatacatctggttttccttttgaaaaaggccctcaaacctcataaaactgaagtcctttgattcaaaccacaaattccttatagctaacctcagcaaaactccttacacactctgagtacttagtccctgtaa

SEQ ID NO: 450114 - DNA, 646 bp, Homo sapiens
acacttagtgaccaagaataaattcttctatcgtcaagtccattctcctgcctccactttttagggatactcaataagactgatgtgactttccccatgttacttgaaaatgaacagtttaaggaagagggaaaagtaaaccaagagccagaggatcaagtgaccacgaggggcttagggaaggcattcattcctgttgactgtgctaggagaaccctgggtcaggagatgctggactcctggggtagaaaacctagttcttttcaaagatttaaagyaaagttttgaggtggaaagccctactgttttctggactatattagaatcattcctctcctcatggctgtggatcatattgcttataaaataccagcctcgtgacccatttgagaacatcactgaaggtccacaagataggaacaaatgggttttaaaaaacaccccagggtctctccctactgaatccctacccagtctaacagaattagactcaaagcagcatttgcagaagatagccctctttgcatgagctttccaatgatacatctggttttccttttgaaaaaggccctcaaacctcataaaactgaagtcctttgattcaaaccacaaattccttatagctaacctcagcaaaactccttac

SEQ ID NO: 450115 - DNA, 489 bp, Homo sapiens
gcattcattcctgttgactgtgctaggagaaccctgggtcaggagatgctggactcctggggtagaaaacctagttcttttcaaagatttaaagtaaagktttgaggtggaaagccctactgttttctggactatattagaatcattcctctcctcatggctgtggatcatattgcttataaaataccagcctcgtgacccatttgagaacatcactgaaggtccacaagataggaacaaatgggttttaaaaaacaccccagggtctctccctactgaatccctacccagtctaacagaattagactcaaagcagcatttgcagaagatagccctctttgcatgagctttccaatgatacatctggttttccttttgaaaaaggccctcaaacctcataaaactgaagtcctttgattcaaaccacaaattccttatagctaacctcagcaaaactccttacacactctgagtacttagtccctgtaa

SEQ ID NO: 450116 - DNA, 489 bp, Homo sapiens
gcattcattcctgttgactgtgctaggagaaccctgggtcaggagatgctggactcctggggtagaaaacctagttcttttcaaagatttaaagtaaagttttgaggtggaaagccctactgttttctggactatattagaatcattcctctcctcatggctgtggatcatattgcttataaaataccagcctcgtgacccatttgagaacatcactgaaggtccacaagataggamcaaatgggttttaaaaaacaccccagggtctctccctactgaatccctacccagtctaacagaattagactcaaagcagcatttgcagaagatagccctctttgcatgagctttccaatgatacatctggttttccttttgaaaaaggccctcaaacctcataaaactgaagtcctttgattcaaaccacaaattccttatagctaacctcagcaaaactccttacacactctgagtacttagtccctgtaa

SEQ ID NO: 450117 - DNA, 489 bp, Homo sapiens
gcattcattcctgttgactgtgctaggagaaccctgggtcaggagatgctggactcctggggtagaaaacctagttcttttcaaagatttaaagtaaagttttgaggtggaaagccctactgttttctggactatattagaatcattcctctcctcatggctgtggatcatattgcttataaaataccagcctcgtgacccatttgagaacatcactgaaggtccacaagataggaacaaatgggttttaaaaaacaccccagggtctctccctactgaatccctacccagtctaacagaattagactcaaagcagcatttgcagaagatagccctstttgcatgagctttccaatgatacatctggttttccttttgaaaaaggccctcaaacctcataaaactgaagtcctttgattcaaaccacaaattccttatagctaacctcagcaaaactccttacacactctgagtacttagtccctgtaa

SEQ ID NO: 450118 - DNA, 406 bp, Homo sapiens
tatggccttgggtctgactcagagcttgttatcacagcaccatgctgcctaactatctgactgcaaagttcctctttgctctgggcaggtacctatgtgagtgaacttgaaactctatcactcattccaattcttttattcactggtgatctcactatgttgaaaggacaggatttgatgcatgccgtgtcagtggtgatcactgttattgagatagatttgcacygatgtctgggagtttggactgaatgttaataacatacaaaggtgacctgcaataaatacacagctctgtcagaaagctagaggtctgcttggcagagagagtcatcatggattgtggcagattctccttctgtcaaggcttatctgaaggctaaataaatcatgctggaatcttctggga

SEQ ID NO: 450119 - DNA, 434 bp, Homo sapiens
gtgatctcactatgttgaaaggacaggatttgatgcatgccgtgtcagtggtgatcactgttattgagatagatttgcaccgatgtctgggagtttggactgaatgttaataacatacaaaggtgacctgcaataaatacacagctctgtcagaaagctagaggtctgcttggcagagagagtcatcatggattgtggcagattctccttctgtcaaggcttatctgaaggctaaataaatcatgctggaatcttctgggatgttggaagagaggaaaaagtrtgtattggatgggggtagggatgtggaggaggttcagatggaaatggaatattgattagaacaaaggtgaacttgatgtcagccagtgttctttttagaaatgaagggccaggaatggaagttaaaaaagagaaatattttctttaattgc

SEQ ID NO: 450120 - DNA, 612 bp, Homo sapiens
atacaggaggtgaagagagacacatgcacacagccacacacagaagcagagctgcctgattgaacacagctaacctcatgttcatgagggaacccagcagaaaccgaaagagccacctagctaagcctgctttaagttgctgacccaccgaattgtgagctaaataaatggttgtggcttcagccactaggttttgggctggtttgttctgcagcaccagawaactgatatctattcactaaaatgcacttgggtgccaacattgtggcatgctgtggggacatagaggtgattaagttatgttccctgttctgaaagagccggcactccaaataggaagtcagacatgtaaacaaatgacaacatagcaagttatgggattaatcaaagtaactggtgaactccttttagtaggaatagttctatttcctctgtaaagaaaccactatgatagggagcacagtaccagttggttccaataattcttgtgatagtgtcatccaaacctcagactgcatcagtggtcactcagcaaggagccttgaagattacccaatgctatttatatctattatatgatcctcattaagtaacctcaaaggggaggcagga

SEQ ID NO: 450121 - DNA, 554 bp, Homo sapiens
gtgagaggagaaaacactgcttgtgtagttagcctatttcacaactgaccagagtagggcctgctccctacccttctgtgcctccccgttgcatcccaataacatgatcccaaagtagtgtttctgattcttaagttcaaacaacttcagtggtcaggaactttgttcccagaaactgtttccccacgtcccttcttatattacttcctgtatgtgttaacactctccccacccaaccctcggtcattatatagttgaacaaagccaagagtatgccacagtggcaggttcgcacatagtcagccccagcttcagtgtggggacatgattgaattctcggsggctttgaagcctggaaagcagggttgtaattgacaatgcaccaggacaagcatttgttctcatggggggtctcccatccgtgagatcaagaatcctaaagccacatttttggcatcagcctccctggaccattcagtatgaccactaagtgttagattgactctgggctgattgcttctgctatttagtgagttgagatgatgagcctgagc

SEQ ID NO: 450122 - DNA, 402 bp, Homo sapiens
aagaaactgtggtttcagccaacaggcatgtgaatgagcttggaaatgaattctccagccacagatgacttcatccctaatgggctgatatggtttggctctgtgttctcacccaaatttcaycttgtagcttccataattcccacatgttgtagaagggacctgatgggagatgactgaatcatgagggtgggtcttttccatgctgttcttgtgatagtgaatgggtctcatgacatatgatggttttaaaaacaggagtttctctacacaagaactctttttgcctgctgccatccacataagatgtgactttctcctccttgcttcccaccataattgtgaggccttcccacccatgtggaactacaagtccaataaacctctttcttcagtaaattg

SEQ ID NO: 450123 - DNA, 515 bp, Homo sapiens
tcgctgggcatttaagatatgtattactaaccaagagtaaagtttccaccgcttgagaattctgtgtatcaaagttccagttctttargatgaaaattatacttattctcttggatagtataaagttagttacaaaatgttatgaatctctgaggaaaagttgaggtaatacatattttagaattttaatgtttgttctatgtttttctaatttcaataaaatcactaaatcacaagattcctaagttgaggctatatctttattgttgtgactttagtgacaagcagagtggttagcacttagtaggtacccttttaatgttttacagatgactaaagagacagtatttgatataaaaaggtgtgaacccaatgctccacagattttgttcaaagaaataccagcagcagtgaattgaggcagagccattgaaggaaattacatctctgggacaagagctttttcccagctggacttctttttgaaaaaggggtatgacctcacacacacaggc

SEQ ID NO: 450124 - DNA, 619 bp, Homo sapiens
tgccttggctctgttgtctggttgtttggttagacaacagtctagatgttgttgtgaagttattttgtagataaaattaacatttaaatcagtaggctttaagtaactcagatgaccttccataatgtaggtgggcatcatccaatcagttgaaggtcttcagagaaagactggggtccccaaagaggaaggaattctgccttgaggcagccttcattcttgagctgtaacattgacttttccctttgtctctaccctgttggagagctaatccccataatcacatgatccaatcccttaaaataaatcctataaatcttatctctctctctctctctcaaatctatctatctatctatctatctatctatctatctatctatctaatmtatctatctatcatctatctatctatctatctaatctatctaaatgctaatttcatctattagctatctatctatcatctatctaatatagctatcatctatctatctatctatctatctatctatctatcatctatctatcatctctctctctctctctctctctctctctctctctctctctctctctctatcatggggaggtggggagagagagacaatgagagaga

SEQ ID NO: 450125 - DNA, 619 bp, Homo sapiens
tgccttggctctgttgtctggttgtttggttagacaacagtctagatgttgttgtgaagttattttgtagataaaattaacatttaaatcagtaggctttaagtaactcagatgaccttccataatgtaggtgggcatcatccaatcagttgaaggtcttcagagaaagactggggtccccaaagaggaaggaattctgccttgaggcagccttcattcttgagctgtaacattgacttttccctttgtctctaccctgttggagagctaatccccataatcacatgatccaatcccttaaaataaatcctataaatcttatctctctctctctctctcaaatctatctatctatctatctatctatctatctatctatctatctaatctatctatctatcatctatctatctatctatctaatctatctaaatgctaatttcatctattakctatctatctatcatctatctaatatagctatcatctatctatctatctatctatctatctatctatcatctatctatcatctctctctctctctctctctctctctctctctctctctctctctctctatcatggggaggtggggagagagagacaatgagagaga

SEQ ID NO: 450126 - DNA, 619 bp, Homo sapiens
tgccttggctctgttgtctggttgtttggttagacaacagtctagatgttgttgtgaagttattttgtagataaaattaacatttaaatcagtaggctttaagtaactcagatgaccttccataatgtaggtgggcatcatccaatcagttgaaggtcttcagagaaagactggggtccccaaagaggaaggaattctgccttgaggcagccttcattcttgagctgtaacattgacttttccctttgtctctaccctgttggagagctaatccccataatcacatgatccaatcccttaaaataaatcctataaatcttatctctctctctctctctcaaatctatctatctatctatctatctatctatctatctatctatctaatctatctatctatcatctatctatctatctatctaatctatctaaatgctaatttcatctattagctatctatctatcatctatctaatatarctatcatctatctatctatctatctatctatctatctatcatctatctatcatctctctctctctctctctctctctctctctctctctctctctctctctatcatggggaggtggggagagagagacaatgagagaga

SEQ ID NO: 450127 - DNA, 599 bp, Homo sapiens
tggaactaaatagaccacaaaaaggacactcattgacagtatgaaagttgaaacaaagagacagaatgcttttttgttcagccacagctgggaatccacacacgaggtgactccacattttcacccctctgggagtgaccatgaaatcacctcgagttgatgctggggttacaaatagattttagtgagtaggcaagtttgcaaatacagaatccatgaataatgaggattgactgtgtgtttttaygcatcaagagaggcatcaaaaagaaaaatacacactccattggactccctggcactcacttcacggtttaatagtattcttatttatagtcccatgtggtaagatggaatcccttttaaaggtcaaaatcaaggggaaagcacatcttctattttagcaataagtgctgtgcatcttttggggaggctcctaggctccctgtttaagtgtgtttcagcctgtaaaatggggaaaggttactgatcaccctggcttatttaccagtgacagagtttttagaagcagtgaattaaaacatagtcattgtaaagtaaaggtcgccgtctaccattccgttgttagtgttgtaatc

SEQ ID NO: 450128 - DNA, 609 bp, Homo sapiens
gctcaactcttccgcatgggaatttggtaacaaaattatrtatgcagttacctcggagccagaaatccctcctctagacattcaccctgaaattaccctccaacaatgcaaaaataaacatgcacaagatgctttattatcagatagcttgtgacagtgaaatatcaggaacaacctcaatgttcatacctaggatgggtttaatcaactatggcatatccacaggatggagcaatatacagctgtcaaaaggataatgatgcttgtgggcgaatatggagcgatttccgggatacattgctcagtgtaaaagaaacaagcttcaaaggagcatctataatatgctaccattcgtgtcaaactaaagatgtgaatggtcctatttctgggaaggctgtgctcttgctgggctgtcaggtggctgtcctcctggcttggtgcatgtcaccttgaaccaccttggcacagccggttcactggggctgtgaacctgagaacgtgagccagggcaggtgtcttccctccctagagtcactgtagcccccacttccctgtcactccccagacatcctgcttgcctttaactgtggaatgagcatgaaagctgag

SEQ ID NO: 450129 - DNA, 609 bp, Homo sapiens
gctcaactcttccgcatgggaatttggtaacaaaattatatatgcagttacctcggagccagaaatccctcctctagacattcaccctgaaattaccctccaacaatgcaaaaataaacatgcacaagatgctttattatcagatagcttgtgacagtgaaatatcaggaacaacctcaatgttcatacctaggatgggtttaatcaactatggcatatccacaggatggagcaatatacagctgtcaaaaggataatgatgcttgtgggcgaatatggagcgatttccgggatacattgctcagtgtaaaagaaacaagcttcaaaggagcatctataatatgctaccattcgtgtcaaactaaagatgtgaatggtcctrtttctgggaaggctgtgctcttgctgggctgtcaggtggctgtcctcctggcttggtgcatgtcaccttgaaccaccttggcacagccggttcactggggctgtgaacctgagaacgtgagccagggcaggtgtcttccctccctagagtcactgtagcccccacttccctgtcactccccagacatcctgcttgcctttaactgtggaatgagcatgaaagctgag

SEQ ID NO: 450130 - DNA, 566 bp, Homo sapiens
gtgtctgtgttctgacctcttcttattaggaaaccaatcctactggatgagggtccaccataattattcatctctttaaaaatcctayctccaaatgcagtcatattcccagatactgagcgttaggacttcaacatgtgaattttggggtgacataactcagcccataacagctagggtacccatggaagaatgacccccccaaactttctaatcatctactgggccaactcatcccatgctgtgatgtggggcaccaggtcagagctgtgtcaggtggttaaataaaacaatgttatcgatataccttttatttgtttgtttgtggcacttatcagctttttaaaatttgtaatttttcaaatgtattttcccactctaaacaaatacgaatgtcccagcataatttttcttaaagagagcattcaaaattgaacaagtttcaggcttcagcaaacctgcctctgcccccactgctatcactgcctgcccaggaaagatgttttcagggtgaaggtgcttatgtggaaaaatggcacacataatattcacatggaagcaattag

SEQ ID NO: 450131 - DNA, 566 bp, Homo sapiens
gtgtctgtgttctgacctcttcttattaggaaaccaatcctactggatgagggtccaccataattattcatctctttaaaaatcctacctccaaatgcagtcatattcccagatactgagygttaggacttcaacatgtgaattttggggtgacataactcagcccataacagctagggtacccatggaagaatgacccccccaaactttctaatcatctactgggccaactcatcccatgctgtgatgtggggcaccaggtcagagctgtgtcaggtggttaaataaaacaatgttatcgatataccttttatttgtttgtttgtggcacttatcagctttttaaaatttgtaatttttcaaatgtattttcccactctaaacaaatacgaatgtcccagcataatttttcttaaagagagcattcaaaattgaacaagtttcaggcttcagcaaacctgcctctgcccccactgctatcactgcctgcccaggaaagatgttttcagggtgaaggtgcttatgtggaaaaatggcacacataatattcacatggaagcaattag

SEQ ID NO: 450132 - DNA, 566 bp, Homo sapiens
gtgtctgtgttctgacctcttcttattaggaaaccaatcctactggatgagggtccaccataattattcatctctttaaaaatcctacctccaaatgcagtcatattcccagatactgagcgttaggacttcaacatgtgaattttggggtgacataactcagcccataacagctagggtacccatggaagaatgacccccccaaactttctaatcatctactgggccaactcatcccatgctgtgatgtggggcaccaggtcagagctgtgtcaggtggttaaataaaacaatgttatcgatatacyttttatttgtttgtttgtggcacttatcagctttttaaaatttgtaatttttcaaatgtattttcccactctaaacaaatacgaatgtcccagcataatttttcttaaagagagcattcaaaattgaacaagtttcaggcttcagcaaacctgcctctgcccccactgctatcactgcctgcccaggaaagatgttttcagggtgaaggtgcttatgtggaaaaatggcacacataatattcacatggaagcaattag

SEQ ID NO: 450133 - DNA, 505 bp, Homo sapiens
cagtgctgttgcttttcaggtgacagttctggcaggtagatacctggaggtgtcagatctctgtgctccaagaggtacctggaaacccatgctccttccagcttgctgccaggcactcttgatgtgcggtgtggacctggtgggcctgctggaagctggccaagtctgcagtctagctggccggaaggggaaggaggaagccaagggccagcagtttccttgggaggaaggaggggaacctgctcacataccttctcctcatgtcccgccagctacgacccagctgccctctgctgtagaggaggcagggactgtggccacatgcccggctaggacgaggggartcctaagggaaagggggggcaggagaagccagtggctgcacagtcactgaaggtgtgaggcaggggaaaaatagaggggagtggggtgggggcagagaagtaacccctggatcattggaaatggtcacactgatggccctttggagagaagggtttggggg

SEQ ID NO: 450134 - DNA, 458 bp, Homo sapiens
tcctccccaacctactcacagagcattcttttatttaaagtgtccaacacaaaggttattttgtgacattttgaataatgcaaccccttaagggtatttttttaaagttcttttgcaacaaagtttctcctccccaacctcagaagacggaaacaaaagagacatttatttcsttcgatttaaagtgatttggaattgctgctggggttagattatgggaaattgcccaccagggaaacaaacttggtcaccacccctgaactgcagtgatgacgtcccatggggacacacaagacaaacaaaatactgagaaaaccgaggttctcactctgcccacagagggagctccgagttgcagctgcctctttctgctccttttcagttcagataaattgcacttggtcaacggaaatgtcctaagggcactgcagctgcagctggagaatgaagaagacata

SEQ ID NO: 450135 - DNA, 458 bp, Homo sapiens
tcctccccaacctactcacagagcattcttttatttaaagtgtccaacacaaaggttattttgtgacattttgaataatgcaaccccttaagggtatttttttaaagttcttttgcaacaaagtttctcctccccaacctcagaagacggaaacaaaagagacatttatttcgttcgatttaaagtgatttggaattgctgctggggttagattatgggaaattgcccaccagggaaacaaacttggtcaccacccctgaactgcagtgatgacgtcccatggggacacacaagacaaacaaaatactgagaaaaccgaggttctcrctctgcccacagagggagctccgagttgcagctgcctctttctgctccttttcagttcagataaattgcacttggtcaacggaaatgtcctaagggcactgcagctgcagctggagaatgaagaagacata

SEQ ID NO: 450136 - DNA, 506 bp, Homo sapiens
gaacaggatgataatttagataaagcccttagccctgtgctgggcttttatgggtgctctagtggacactggccattgtagtgtgctcatctaattaaggcagatccagatgaattttcagctcaatatttagaaactttttcagcacttcttaaaataatcagaaacacagcataagggggtcataaaactaagattgggataactcctgttgaattagcaaaagaagagtattctgggccatrtttcttacactttaactttgcctcaaacattggaatcacctgaggagttttttcaaattactgatgcctgggctccaccttcgaagattctaattaaattggtgtgggctgctgtctggatggcagactattttaagttcctcaggtgattctaatgtgcagccaaggttgaggaccactggcatagacgcttcattaaatcatctgttcttaattaagtcttagctattcttatgctggtagaggtttaaagggcttatc

SEQ ID NO: 450137 - DNA, 585 bp, Homo sapiens
tttccatagctcccttctttcctttagtgataaacatcctgaaaagaaatatatatgtatgtatatactcccattttctgtacttttatttcctcaccaattcattaccatgtggctttcacccaaacgtctcgctgaaaacaatgaccttctaattattaaatccaaaagcctattttcagtcctcatactatttaaatatttaatatatccaacacacttaactgtacttctaattagtttttctttagcttcctgataactattccctcctgattttccctctatcttcaaccattcattctgtttcttttgtaaggggctttattctcctcagccaactttaaagagtcttatctaaaactaaatccagagctacgggtactgtctctgacccatggactggactgaagctggacggtgtgtaactggtttggtttaagtttcatttgcaagggcattaaagcaattaaccccatgtaatattgttagagttactggtagaagaattcttttgtcctttttaaaaattagcatgatgtactgycttatttaatttcacatatttttagaagaaaagctaga

SEQ ID NO: 450138 - DNA, 577 bp, Homo sapiens
tgtttagctttataagaaactgtcaaacaataaatcccatgtggctatatcagtctgactcccaccaacaatgaatgagagttcttgttccacatcctcagaagaatctgttgttgtcagcgttctgratttgggccatcgtaacaggtatgtagtggtaactagttgttttaaccatcatttcaaaatgatgcagagtatcttttcatttgcttacttgccatctgtatatcttcggtggtgaggtgtctcttaaggtttttgtcctgtttaatagggttgtagtttgagaattctttgtatattttggatagcagtcctttatcagacgtcttttgcaaagattttctcccaggctgtgactttttattttcttggcagtatctttcacagagcagaaatttttaattgtaatgaaatctagcttatcacctctttttttctaaaaagtcatcaccacatccaaggtcatctagcttttctcttatgttatcttttaggagttttatagttttgccttttacatttagatctgtaatccattttgagttaatttgtataaagggtgtacaagtct

SEQ ID NO: 450139 - DNA, 539 bp, Homo sapiens
gatgcaaaacaacctcaccacattgttaggaatttatttagagactgggtgaaataaaaaattaatttcttagaagcgtccttcaacatgccaagcttcaggcctatatgaggtacattcctataacatctacattggggtgggcaaactagagcaagcaggccaaatccagcacactgtttttgcaaatagtcttctggaacacagcccatttgttcattttcatatttggtatggatactgctgcactacaatggcagatctgagtagctgtgacagagaccacatggcctataaagcctaaaatactatctagccctttacagaaagggtttactaatctactaacccctggtctacatcaccaccaccaccaccccaagtaacataggcttcagggtcatcttcacgagcatgtgatcactctagtcacatgrgaccaccactcaggaggaatccatgattggggtttaataccctgtgatcactgtcttaaaattcttaataattttatctctaaatatcagttttataagtaa

SEQ ID NO: 450140 - DNA, 590 bp, Homo sapiens
cacctgcaaattgaggataatgacattatctacttcatagaagtggaaggattaagcgtgctaatatgtacaaagcatttagcagcattttattaatacaatgtaagtactgttctattattgctatttcataattgatagaatttattatttattccatcaacttgctttattttcttcaaagaatttattactatctgacattaggcttacttatctatctgcacttctccaccaaagcatgagccatgagacaaaaacttaactgtcttattaaccaacacctaaaacagaagcagacagaagtactataatatatagctattatatatcagatgaatgagttataggatatttgtttcatwatcaataatgatatctaaaaactgctcccttacctttagcataaatctgacaaagggcactcaaaaacataagctataaatgataatatgggattttcatgatacaattccatacatttatttgccactacacatatagtactccagtattagatcatgtactgctcaaatgtgcctaagcaaaggctaccatttgattcaccactgttcaggtgtgtactcatt

SEQ ID NO: 450141 - DNA, 486 bp, Homo sapiens
aaaattgaaaacatacacctaccctattactcagtaattccacccatggaaaataaaaacatatgtccacaaaaagatttgtacaagaatattcattcctatcagctttacagaaakatttgtacaagaatataacagctttactcataacagcaaaagaaaactaaaaacccaaatatcaacagcaatggataaactgcagtgtattcattcgatttatacgatgaaaactatatgataaaaagggatgagctactgatatacacaaaaacatggatcaatctaaaaaacttcatgctgaatgaaagaagctttgtagactacatgctgtatgattctagaataggcaaaactaggtaatttgaagtgaaaaaatcagaacagtcacctggggggtatgaattgatctagtaaggataataagggaactttctagggtgatggtaatattctgtatcaggtcattaaatttatctgtaaagggca

SEQ ID NO: 450142 - DNA, 486 bp, Homo sapiens
aaaattgaaaacatacacctaccctattactcagtaattccacccatggaaaataaaaacatatgtccacaaaaagatttgtacaagaatattcattcctatcagctttacagaaagatttgtacaagaatataacagctttactcataacagcaaaagaaaactaaaaacccaaatatcaacagcaatggataaactgcagtgtattcattcgatttatacgatgaaaackatatgataaaaagggatgagctactgatatacacaaaaacatggatcaatctaaaaaacttcatgctgaatgaaagaagctttgtagactacatgctgtatgattctagaataggcaaaactaggtaatttgaagtgaaaaaatcagaacagtcacctggggggtatgaattgatctagtaaggataataagggaactttctagggtgatggtaatattctgtatcaggtcattaaatttatctgtaaagggca

SEQ ID NO: 450143 - DNA, 584 bp, Homo sapiens
aaaatagagaactttggccgggctctgtggctcacacctgtaatcccagcactttgagaggccaaggcgggcagattatttgaggtcaggagttcgagaccagcctggccaacatgctgaaaccccatctctactaaaatacaaaaattagccaggtgtggtgcaccacacttgtagtcccagtgactcaggaggctgaggcaggaaaatcacttgaacccaggaggcggatgttgcagtgagccgagatcacgccactgcactccagcctgagtgacagacactccatctcaaaaaataaaaataaataaataaataaataataaaataacgaacatcaaagttagaatgtggtctagcagctgcaagccaagtcaacttcgtcatagttagcaacactgctcatttactaacaaacaaaactgaatttcccataaaattacgtgtcatacctggctttttctgaaattagaagggtaacaatcaagaatttttgtagctctaaactgttatccactgctttactcaataaattttggatgcttttaacaatgaaaggaaaraagagatcacagaaaaagcag

SEQ ID NO: 450144 - DNA, 564 bp, Homo sapiens
tgtaccccatagggtggtgccatacttatcagagacccagcctcttcttacattcctactgtgcaatttgtagcatgcttctatctttaaggtgttcttatggtccaaggtggttgctggagctccagccaccatgtctgagttccaggtaagaagcaagggaaagggacaaaagtaaaaaagagttcatgcaatctggctatgcttctcttaagaagcctttctaggagtttcgtgttcagctgccatggaggctgtgaaaagtagtttagctgatcatatcttctacctggtaagaagaagagaatcaatattggtttgacagcttgtctctttcataactgtaaattaggactctaacattgccatcacagtgatggtttaattgatcaaagcatggctccaaaattaagttatcttcaatttttcccctgtgaaagatatgccaaagccagtagaatgcaggtttccttaaagtttgtttgyatgagagtaattaacttcaaggtatgaaactaagatttttgagttctgaaagtaaaacaggttgccagtcatttatgt

SEQ ID NO: 450145 - DNA, 569 bp, Homo sapiens
agttttctgaaaagcatttacagttctaaaacaaccaccaaaatatcaagaagaggatttgcataagcacactatttttagggatatttatttgtggcaacttctttaatacctaaatcatggagattcaaagagatgcacaatcataagttaatcctgtcaacactctgtaatataagctctggggaaaagattatgaggagaatagggcataaagcaatgacatggttttttccaaggtcgtgaattgaatcagtggccaaccaaagctgctgactcccaaaatacatgactcattcttttccacattttccatatcttattttagtttatcacaaygactggtctttcttagcattttttttgtaggtgattggcagaaaataaaaatggccatatgtttgaaactcagcatcatctgccctagggaagtaataaacaaaacaagagagcacaaagactcaaataaagaagcaaatggggcacatcaaaaaaagtctattgagaaaatttaccccagtagctaaagataactgatagtagagtataaattgaggtataagaactct

SEQ ID NO: 450146 - DNA, 537 bp, Homo sapiens
attagttatgtgaccatcttgggctaatagagaaaattgtcactgaaatcattttttgatgttgtgtggctcagatgagcagagaatgtggcttcttgagtcccccagaggacatgtgcttggttggtgctatggtctgaagttttgtgtcccctaaaattaatatgttrgacactaatcaccagggtgatggttgtgagaaggtaagggctttaggaagttattaatgcctttataaaagagacctcagagagctgtcttgccccatccctcatgcaaggagacagggagaagatgccatctgtgacccagaaagtgagctggcacctgagtcttggtcttcccagcctccaaaactgtgagaaataaattgctgttgtttttgagccactcagtctaaggtatcttgttatagcagctcaaatggactaagacagttggtggcaatagttttgtaatcgtccatgggaaggttgtgtcacatcaaagaacgtgccctattggagcagaggaatatttaagcttaagctttagaat

SEQ ID NO: 450147 - DNA, 537 bp, Homo sapiens
attagttatgtgaccatcttgggctaatagagaaaattgtcactgaaatcattttttgatgttgtgtggctcagatgagcagagaatgtggcttcttgagtcccccagaggacatgtgcttggttggtgctatggtctgaagttttgtgtcccctaaaattaatatgttagacactaatcaccagggtgatggttgtgagaaggtaagggctttaggaagttattaatgcctttataaaagagacctcagagagctgtcttgccccatccctcatgcaaggagacagggagaagatgccatctgtgacccagaaagtgagctggcacctgagtcttggtcttcccagcctccaaaactgtgagaaataaattgctgttgtttttgagccactcagtctaaggtatcttgttatagcagcycaaatggactaagacagttggtggcaatagttttgtaatcgtccatgggaaggttgtgtcacatcaaagaacgtgccctattggagcagaggaatatttaagcttaagctttagaat

SEQ ID NO: 450148 - DNA, 579 bp, Homo sapiens
tttgtgggcaacatctggccccattacctcaatcttgtgacggatctaagaactgttagttttgatagctttcagtttgwttagctttgtcttattgtgaggacaaccatggtgacttccaagctttttatatctcagacaaaaaccaggcatctcacagttcattctgcaagcttttaaattttataaataaaactttataattaaaatatttgtgttcccttctacctaaatagtacacttacagtatccatggaaaaggaaagagagacaaaatcaaaagtaataggactgactgggatgaggggtttcctgatgggcaaggcattgaccactggtctggatgggtcactccaggggacagagctgagaaccaaaaaaaaaaaaaaagcagctgtgcaggaggatgtgctgtcccataagtgctctctaaaacacctttattatttttcttctgtaatagtaaaaaatgtacaatttacagaattggcaggaataagccataaaagagcacctggaatcttaattttactttcaagtcacccgaacattttctaaacacatctgcagatatgaatg

SEQ ID NO: 450149 - DNA, 579 bp, Homo sapiens
tttgtgggcaacatctggccccattacctcaatcttgtgacggatctaagaactgttagttttgatagctttcagtttgtttagctttgtcttattgtgaggacaaccatggtgacttccaagctttttatatctcagacaaaaaccaggcatctcacagttcattctgcaagcttttaaattttataaataaaactttataattaaaatatttgtgttcccttctacctaaatagtacacttacagtatccatggaaaaggaaagagagacaaaatcaaaagtaataggactgactgggatgaggggtttcctgatgggcaaggcattgaccactggtctggatgggtcactccaggggacagagctgagaaccaaaaaaaaaaaaaaagcagctgtgcaggaggatgtgctgtcccataagtgctctctaaaacacctttattatttttcttctgtaatmgtaaaaaatgtacaatttacagaattggcaggaataagccataaaagagcacctggaatcttaattttactttcaagtcacccgaacattttctaaacacatctgcagatatgaatg

SEQ ID NO: 450150 - DNA, 579 bp, Homo sapiens
tttgtgggcaacatctggccccattacctcaatcttgtgacggatctaagaactgttagttttgatagctttcagtttgtttagctttgtcttattgtgaggacaaccatggtgacttccaagctttttatatctcagacaaaaaccaggcatctcacagttcattctgcaagcttttaaattttataaataaaactttataattaaaatatttgtgttcccttctacctaaatagtacacttacagtatccatggaaaaggaaagagagacaaaatcaaaagtaataggactgactgggatgaggggtttcctgatgggcaaggcattgaccactggtctggatgggtcactccaggggacagagctgagaaccaaaaaaaaaaaaaaagcagctgtgcaggaggatgtgctgtcccataagtgctctctaaaacacctttattatttttcttctgtaatartaaaaaatgtacaatttacagaattggcaggaataagccataaaagagcacctggaatcttaattttactttcaagtcacccgaacattttctaaacacatctgcagatatgaatg

SEQ ID NO: 450151 - DNA, 554 bp, Homo sapiens
tagtaagcatatcaaataaagattatctaagtctgttttttatagccttttaagtattttctcaggaagtatttccaattaataaataaaccatttatagtaatttcagtatttatagtaatttcatattttaaattttatagtaattttttaaaatttatagtaatttcagagatttaaaatttcaaagtactactaaamacataaatcccatgtacacctacatctttaaaatatatgtacaatgaaggagggacttgaaattgaaaagatacagcttatacaggatggtactatactattttttagtcaagtgattaacagttagaaatacaacattttcatataggtcttaaaggctgtaagaacaaaaaagaataaagaacaaaggcaatacattttttaaatttctgcgtgttacccagtaacaggtaacctgaacatcaagaacagtcattcttcaccaaaaatgtttaccataaaactagttcttatttactccctagtgaaaaatataattaccttcaccctgatgtcaaagagaaggatttgct

SEQ ID NO: 450152 - DNA, 573 bp, Homo sapiens
gttccaacttctgcctgttacccagttccaaagtcacttccacatttttgggtctcttttcagcagcaccccactatactggtaccaatttactgtattattctgttttcatgctgctgataaagaaatacctgagacttggaaatttacaaaagaaagaggtttaatggacttacagttccacatggctagggakacctcacaatcatggtggaaggcaaggaggaacaagtcacatgttacatggatggcagcaggccaaaggagagattgtgcagggacattcccccttataaaaccatcaaatctcatgagacttcttcactatattcatgagaacagtatgggaaagacctgctctcatgattcaattacctcccactgggtccctcctataacacattggcattcattaatgagatttgggtggggacgcagccaaaccatattaacaatatttggttttctgtcaaatattttcagtttaggttagttatcctattttatgcaggttaattttaagtctaactagttttgtgatggttatgcaaagaaaatataacaccatcataa

SEQ ID NO: 450153 - DNA, 483 bp, Homo sapiens
cattcccccttataaaaccatcaaatctcatgagacttcttcactatattcatgagaacagtatgggaaagacctgctctcatgattcarttacctcccactgggtccctcctataacacattggcattcattaatgagatttgggtggggacgcagccaaaccatattaacaatatttggttttctgtcaaatattttcagtttaggttagttatcctattttatgcaggttaattttaagtctaactagttttgtgatggttatgcaaagaaaatataacaccatcataatcaccgcattttgcttacaggttaaacaacatgtctagaatcttctaaacatctaaaagcctggattatgcctgtaaactgtagttttatttactattctcaagagactgtatagtaagtattaagaatgtttgggtggaagcaactcaattaatcatttaggaccatgtctggccctaggatagagtgaa

SEQ ID NO: 450154 - DNA, 573 bp, Homo sapiens
gttccaacttctgcctgttacccagttccaaagtcacttccacatttttgggtctcttttcagcagcaccccactatactggtaccaatttactgtattattctgttttcatgctgctgataaagaaatacctgagacttggaaatttacaaaagaaagaggtttaatggacttacagttccacatggctagggagacctcacaatcatggtggaaggcaaggaggaacaagtcacatgttacatggatggcagcaggccaaaggagagattgtgcagggacattcccccttataaaaccatcaaatctcatgagacttcttcactatattcatgagaacagtatgggaaagacctgctctcatgattcaattacctcccactgggtccctcctataacacattggcattcattaatgagatttgggtggggacgcagccaaaccatattaacaatatttggttttctgtcaaatattttcagtttaggttagttatcctattttatgcaggttaattttaagtctaactagtttygtgatggttatgcaaagaaaatataacaccatcataa

SEQ ID NO: 450155 - DNA, 496 bp, Homo sapiens
gctgccctggagggtcatctagactttgcttgaatgataaattttcactgtgttaagcaatgaagtgcttctgtactttgttgccacagcattacctacactattcttattgatgtagatgattcctagagcatctttccctcctatgaatttgtgaaccatgataaaatatgcttgtctgaaacttcaacaaaatcagtaaggaagactattgacttaaaacgcttatactgtatgtcaaacacatgttattagagatagagtttggaattcttcagaaatagctcacatatactataaattttctaatggtrtgcatatgcagtatctttaaggtgtaccagtaggctttatatcttgaaattattttacaatctgatgtatattttttttctctagcaaatagttacttgacttagaacaaacttaaaatgggtaagcagtgttcaacaaatttagtatggtctttgggattaagtcatgcttgaataattct

SEQ ID NO: 450156 - DNA, 502 bp, Homo sapiens
aaaccaaacactacatgttctcactygtaagtgggagttgaacaattagaacacatggacacagggaggggaacgtcacacagcggggcctgtaggaaggtagggggctaggggagggatagcattaggagaaatacctaatgtagatgacaagttgatgggtgcagcaaactaccatggcatgtgtatgcctttgtaacaaccctgcacgttctgcacctgtatcccagaactttaagtataataataataataataacaataataataaaaaggacctagaactatatttgtggtagaccttagttgtcttctaataacaaggcctgatttaagctgcagtcttctcaaaacactagattcccttagaaataagatgctttaagtatcaataggattgcagaggttaaatatattaacatgtcctaatctgtttgatgcatttactgtgatcccaattaagatacaactagttttattgctgttgttattgttgtttgtt

SEQ ID NO: 450157 - DNA, 560 bp, Homo sapiens
tcagtcaatttatgaagtttattttgccaaagttaaggatgcacacccgggacactgcctcaggaggtcctgacatgtgcccaaggtggtctgagcacagcttggttttaaaccttttaaggagacatgagacatcaatcaawacatgtaagatgaacattggttcagtccggaaatgtgggacaacttgaagtggtgagggggctttcaagtcataggtagacaagggacaaacggttgcattcttctgagtttccgatttgcctttccaaagtacgcattcagataagcatttatctcagtgagcacagggatgacttggaatagaattaaagggaggtttaccctatgcagttcccagcttgaacttgacttgtccctttagtttagtgattttggggccccacgatttattttcttttcacaacactgacttgattattgcagatttttagtaagtcttaaaatgggcagtatgattccttcaactttattcttatctttctgaattcatttagctattctagttcttttgcctttccttataaatttagaatcag

SEQ ID NO: 450158 - DNA, 597 bp, Homo sapiens
taagccttgaaaccagtattttggagcagagatgtgcaaaatcattttgaagagacagaatgcctgcaaagtaattagtattggttgtaaaatgattgattaatatgaatcaataagaatgtttgaaaagaatagggccagaaagaaacacgaggatgaggatcaaaagtggacgttagaaaaaaaaaaaaaagagcttaaggccagggtcccaccaggagcttcgcagggtaaaggatacgtttaaataggaaaaaaaaaatccagatactggaagacaaatctgttattagggatgttattgctaacaagactgatgccattaaacatcagattcctattgtaacttttcctgcttcattctgtagtyatgaagcaaattctacctatggttctgtttagctttagagtttttctaaagagataagtcactggttatgtcaaacattataggtttcattgaaaatttaaaaattgctgataccagttctgagcaatgattagatcaaccttctgaacctatacaaatgttaaggctatgttcttggtgatagccaaggtaatctcttgttgaccctggtgaagctgggcacagcg

SEQ ID NO: 450159 - DNA, 630 bp, Homo sapiens
caactcagtgcttatgcttcttaatccgtatttaattcagtatatgttcctattacaactgacaggctattaagacattttttgttagtctttcctatcaacatttataaaagaaaatggaaagtaattcatactaggttaaaatcttcttaaaaatgtttctataatttgtaagctcatactgaatgttgaggtgtagcaaaagacattttgttacgtgcgataataatgcatctgatttctgagtaaaacacattcaaatatatttattatatcagcaatgatgcagaagattcatttgactctcaggttaagggacaatataacgtgcactaaccttgatttattgctcttggttggcttctaaaagtcaatactacattgagttgcaaggaagtctcatttgaatgaaaayggataaaaagtttattgtgaaaatatatagttgtagtgccttataatcttccaaataataaacaagaatatttagtgagaaggcatgtattaaaaatctaggagagaatttttttttaaagtaagccatctctttatgttctctgtttttatacctttaatttgtttgcataggaagaaaaggctgaagatgattctttatcaggtggaacagaa

SEQ ID NO: 450160 - DNA, 540 bp, Homo sapiens
ttctgtgtattaacattaatctgtataatgagataatggaaataatcgggaatctctcctatactctaactgctgccttctcttttctaatttctctactccaaacagctgattctatttctctgttaatttctcatatccgaagtgagaaagacccagaaatacatagaaagtttgtgatttgtcttgttactttaatagttttcaacttttctttyttttttttttttttttttgaaacagtgtcactctgtcacctggtctggagtgtggtggtgtgattatagctgactataacctccaactccagggctcaagcaatcctgctgcctcagcctcccaaagtgctgggattaccggcatgagccactgtgtctgcctcttttctctttttttgtctgtttctctttttcacttcctgagtactctaactcaatttcttccctccccacaagggcagcacttcagactctaattaatcccattctcatttacacctctgaaagccctcataaactaatagctttctacatatttttg

SEQ ID NO: 450161 - DNA, 476 bp, Homo sapiens
tagttacataaaggaatggaatataatcaaaactacagaaatgaatctagatatctatgaccaattgattatcattaaggacactgggttagtctatttggtcttgctacaaagaaatacctgagactggataactataatccccatgtgttgagggagggtctgggtgggaggcaattggatcatggggaaggattccccctggctcttcrgatagtgagggagttcttcagagagctcattgtttaaaagtgacaattttccccatcttctctgtttcttctcctgccataagatatgtcttgcttcccctttgccttccaccatgattgtaagtttcctgaggcctcctcagccatgtggaactatgagtcaattaaacttttttcctttataaattacccagtctcaagtagtatctttatagcagtgtgaaaatggactaatacagagaattagtaccagcagagtggggt

SEQ ID NO: 450162 - DNA, 476 bp, Homo sapiens
tagttacataaaggaatggaatataatcaaaactacagaaatgaatctagatatctatgaccaattgattatcattaaggacactgggttagtctatttggtcttgctacaaagaaatacctgagactggataactataatccccatgtgttgagggagggtctgggtgggaggcaattggatcatggggaaggattccccctggctcttcggatagtgagggagttcttcagagagctcattgtttaaaagtgacaattttccccatcttctctgtttcttctcctrccataagatatgtcttgcttcccctttgccttccaccatgattgtaagtttcctgaggcctcctcagccatgtggaactatgagtcaattaaacttttttcctttataaattacccagtctcaagtagtatctttatagcagtgtgaaaatggactaatacagagaattagtaccagcagagtggggt

SEQ ID NO: 450163 - DNA, 476 bp, Homo sapiens
tagttacataaaggaatggaatataatcaaaactacagaaatgaatctagatatctatgaccaattgattatcattaaggacactgggttagtctatttggtcttgctacaaagaaatacctgagactggataactataatccccatgtgttgagggagggtctgggtgggaggcaattggatcatggggaaggattccccctggctcttcggatagtgagggagttcttcagagagctcattgtttaaaagtgacaattttccccatcttctctgtttcttctcctgccataagatatgycttgcttcccctttgccttccaccatgattgtaagtttcctgaggcctcctcagccatgtggaactatgagtcaattaaacttttttcctttataaattacccagtctcaagtagtatctttatagcagtgtgaaaatggactaatacagagaattagtaccagcagagtggggt

SEQ ID NO: 450164 - DNA, 681 bp, Homo sapiens
aataagagaaacacatcactataagatagtcatagtgacagcttctcactgaagtggccacctctgctattctagacagaactggcaaagyatgtaaataatggattgccagagtctgggaagtgttcaagtttgtaaaaaaccaagttttgtgaaggaaaatactagcttcactcaattaatggcatttttaaggtgatacaccatgtgttctttgtgtttctaaagcaaacaagtagaaggagaactgttacagattcagatattcagtttacatttggaagaagagtaaattcaagggcactgagcgtcaatacagcaataattgctccttcaatttagaataaaatattttcaaagcttctcaaaaacacaaatcactacatttttattgatattgcggtgaaaaaatctgagccagtatataaatcacttggaagatagagtaataatttatttttgaaataaatattattgtagcctccacagtatttcttaacttccaagaaactaaagctaagttgaaaataattagaaaatctacttggtattttggagtgacaccacatgtgagtgaaatttcaaaattattagttaaaagcaaaattggcattttaacctttataaaatgtcagaagataacatactagaaacacaactgtcctaaaattataccaaata

SEQ ID NO: 450165 - DNA, 577 bp, Homo sapiens
tgaggtgggagggctggcctccaaacacacaaccccaccgggaaatatgaaaatccagaccacgggagaaggccttatccctacccagagctggaatgaacatagggagtgctgtgaaatgtagaagtagaagcagcaatgggatgtgcctcgcagacattsccagtctctctcatgaactatgagaagcccttcccaactgtatctcacagaggtccttgggggaagtcagccaacagactcagggaggagtcgcaaggttaaaggagttcccaattaaatgctgtgatataatttcaagtgggaacaaattcccttggacagaacactggggtgagtgggaagtgtgccacagacaagagggtagaaactgggtgcctggccttgcaggcggactgggaggggcatagcctgaaagccaggcttgctatctctgtggtgatgcttatggcctgggacaggtctgagttttgtgcacaggctgcctgaatctaaacgcagtgctgttagtgggaaaatgcaggaacaagactggccttgtcaactgcatgggagttgggtgaggcttactgctgcc

SEQ ID NO: 450166 - DNA, 576 bp, Homo sapiens
gtgggaacaaattcccttggacagaacactggggtgagtgggaagtgtgccacagacaagagggtagaaactgggtgcctggccttgcaggcggactgggaggggcatagcctgaaagccaggcttgctatctctgtggtgatgcttatggcctgggacaggtctgagttttgtgcacaggctgcctgaatctaaacgcagtgctgttagtgggaaaatgcaggaacaagactggccttgtcaactgcatgggagttgggtgaggcttactgctgcccactcctccccattccttttgggaactcatctacacaacagagrcagtcatactcccctctggaacattactccagtggctacctctactgggttccccacagtggccagggccggccccacccaaggagagactgagctcagatcctcctaaccctgcccctacctggtggcatttcttcacccacacaggtagcttaacacaaaagacataaacttttgagaactttatggccctgcccattcatgtgaggaaccagaatactttccctggacaacttagggcaagctcaaatccca

SEQ ID NO: 450167 - DNA, 591 bp, Homo sapiens
gaactcagaatgttgattattaatctactgaaggagataccagaggaaggtgaaagccattaaaaaaattcaggatatgaataaaaattttccagagaatagacatcataaaggaaaaaaagtatgagaacatctggatatgaaagacacactcagggaaatatgaaatgcagtgaaaagtttcaatagactagaataagtagaagacagaacttcagagcccaaagaccagacttctaaattaacctaatcagacataaacaaaaaagaattttaaataatgaacaaagtctccaagaaatatggtattatgtaaaatggccaaacataagaataattggtgttcctragggagaagagaagtctaaaagtagtttggaaaatttatttgtgagaataatcaaggaaaatttccctggacttgctagatatctatacatccaaatacaagaaactcaaagaaaacctgggaaattaactgcaaaaagatcatcacgaagacacatattcatcaggttattatctaaagtcaagatgaaggaaagaatcttaagtgctgtgagacagaagcatcaggtaacctgtaaagga

SEQ ID NO: 450168 - DNA, 591 bp, Homo sapiens
gaactcagaatgttgattattaatctactgaaggagataccagaggaaggtgaaagccattaaaaaaattcaggatatgaataaaaattttccagagaatagacatcataaaggaaaaaaagtatgagaacatctggatatgaaagacacactcagggaaatatgaaatgcagtgaaaagtttcaatagactagaataagtagaagacagaacttcagagcccaaagaccagacttctaaattaacctaatcagacataaacaaaaaagaattttaaataatgaacaaagtctccaagaaatatggtattatgtaaaatggccaaacataagaataattggtgttcctaagggagaagagaagtctaaaagtagtttggaaaatttatttgwgagaataatcaaggaaaatttccctggacttgctagatatctatacatccaaatacaagaaactcaaagaaaacctgggaaattaactgcaaaaagatcatcacgaagacacatattcatcaggttattatctaaagtcaagatgaaggaaagaatcttaagtgctgtgagacagaagcatcaggtaacctgtaaagga

SEQ ID NO: 450169 - DNA, 583 bp, Homo sapiens
tggaataaatatataattttttattgtccaaccatcaacatatgtccacaaacatcaagaaaattcagggaaatatgaactcatcaaatctgcgtaagtactgcataaggcagtacttagaatgaaatttacagttttaaatggttgtattagaaaagattaaatatttaagataatttgtctaagtaccaaccttgagaaactagataaagaagagaaaattcaactaaaaataattagaatgtagaaaacaagatttagcagaaattaatgcaataaaatggatatttacaaatacataacaaaattaatgaaaattaaacaataaaatttagagcttgcttctttaattcaataaaattgatraacctcaaactagagtaatcaaaaaaaaaagagggagagaagacagaaattaccaacattagtgaataaagcatataccacatgacagatcctacagatgaaggaatcacaaactatggcccgtgggcaaaatcttgtcctatctaccacttcacagatacagtttcattaagacttcttccatgctacagtagcagatttaagaagctgtaagaga

SEQ ID NO: 450170 - DNA, 476 bp, Homo sapiens
atgaccatggactctgcttcgcatgaagccctaaacaattctgacaggctgcagctcattaagggacagtcattttgttgaaatgtctatcagctcgcagggatgcaccaagatgaatagacccaaaacaataggcccatttgttagagcagtagcttctctaatacatgatgagacaatcaagccaagctgccttcagcacaaagacataattaatcaaatggacaaatggttcaaaaattgctctagtatattctgtagtggacagaggtttccatggaaacattggcgtttgcatcacagttaatgaccattctgtacaatgaagtctcccccttcatacacacttctttactctctccactacgcctgttctctccrctcctccaactattaaaaaacacaacctggagaaaaacaaacaaaacagggagaacgaggaaacataaagaaggaccttgagaatctgtatttcc

SEQ ID NO: 450171 - DNA, 587 bp, Homo sapiens
cttccctcacaagatatcataactaattattgtagtggaaatctttgtatacgctgcttcattcaagggagtacaattgatatyaacagcaatgggataaacagaccccatgatgtgatgcactgaggacacaaaatcccttctgtgatgctcctgccaaactccataagtgtaatgatgaggaaacaacaggcaaaccctaaccaagcgacattctacaaaataacatatcagtaccttcaaaaatgtcatcaaggacaaggaaaaactgaggaataggaattgttccagattaaaagtgactaaagtgacatgacaaataaatgcaacttgtaataaaggtttgaatccctggacaagaaaagaagttttgtttttccgtagaaggatgtcaaaggaaaaattgacaaaattcaaaattcaaataaagtctctatgtaaggacaaaaactgggaataataatagtatctatatcagtaccattgtaaagattatatgataaaacatattatcaataagtgtttgtgttaacaggtcatatacatgataccctcagggtaatatgtcccatggaattaaaaatttg

SEQ ID NO: 450172 - DNA, 548 bp, Homo sapiens
tatacttattggaaccaggtgacatcccatttctattcctgtgtatgctcctttttaccagtgcctacttattccttcccatttaccttaggtcctgcttcacatcactttatgtctatgtttgtgcaaactctaggtatccctctgaactctactgagttacattaagttcttatagcaattgaacatatcatactttaaagaaattaaagcaatggtttccatgactaaytaaaagttaagaatgcaaaagtcttacagaaatatctatattgggaagatttcatgctctgatatcaaaggagaaagagaactcagataaggcttgcccaagtattgggcagtttaacccagtctgcatagcctccgtccatttattttcacaactctaaatcatcttattgttgggctgaaataattaccaactaagtgacagtagaatctaatagaagtttgaaactctcacaatcaatactggttggcataaagtcccactggggaacaatgaaaaatgtacttgctaaatttctaacaataggtcaggttac

SEQ ID NO: 450173 - DNA, 576 bp, Homo sapiens
gctaaatttctaacaataggtcaggttactgctatggcatttctaactaatgcaggtgcttctgaattgtacattgaaatatatgctgtcctttctgtagggcagttgtttttgtttctctgttttctcaacataatttggaaaggagaataggaattaaaatttacagcttacagaccttgttttgatttccttcttttaggtaagcttctttattaacaatactgaaaatgaatgtgtttccttcttattgaactgtagtcttctgtctrgtccagctatacagaaatataatacaagaaatcaaggaaagaaagacttggggtaattaaatatatttctaaatttagtcaaagctacctagaagttatggttaaacattagcgttaagaatgtaagaatgtttgttaggatgtctgtaccatgtattgtattaaatacaaagatttcagagttaactcttgtctttttgagtaacattcacaagtcaaaagaaaatggatcagtgaggcaataaatggcttaaggacatttgggcaatggctttaggccatgtggagtcactgacaggtttta

SEQ ID NO: 450174 - DNA, 588 bp, Homo sapiens
attaaccattttgtaattcctaatgagacaactgatttatgtgaaaataatcaatgtatcgtaaagtggcattagttcaaagtttaatgtaaatgttttaatgaaacactcaagctaatacttggactcagaaagctacgggatttctgaagattatttgaaaatattgaagactaatatactaaaattctatttggaaaaatggattaaaaaattacagatatatattgcaaaaattcaagagagtggtacattccacaaactgaaaaccattcaattataggcttaattcatacaatartggtctagtaaaagatatgcttccataacactcttgaagagctgtacaattttttttaaaaaaaccactccttattatggtataaagacttctttttactaaaaaatatgctaactaaatattctataaggagtgcaattttgatattattgtatcaaacagacatactcatcaatttattcagcataatcatgtgataaaactataataagtaagtagcataaatactagagcaaaaaagacaaaaacatcactttttgcagagaatacaatttttacataaaatt

SEQ ID NO: 450175 - DNA, 635 bp, Homo sapiens
atgctaactaaatattctataaggagtgcaattttgatattattgtatcaaacagacatactcatcaatttattcagcataatcatgtgataaaactataataagtaagtagcataaatactagagcaaaaaagacaaaaacatcactttttgcagagaatacaatttttacataaaattaaaagtcactgaaaatatttttaatatatataaaaatggtaacaaaataattaaaaatacaagtaagccaaaagggtgaatatgatatacaaacacttcttaatgaaagaartataatttgattacaagtatttttaaatatttaattttattcataatatagagaacaaaatttaaaacaatagataattgtccactcaatagattttcaaaactaaaaactatttataccttattaaatattgctaaaaggctgaaaattgatgctattatacactgagttagagtataaactggggacctatttttggaaggagttttaactatttttaaaattgttaaatggtcagatcctataatcttgctgtttctcttgggggaaaattatgtacatttttgctcataagcacatgaagattatcaatgtagtatgttttggtagcaaaaaataatga

SEQ ID NO: 450176 - DNA, 602 bp, Homo sapiens
aataaagttatcacactttaacttccctctattggggatcatactctaaaaataaaactagtgacttcagattgatgctattggataacagtagggctgtgagggtgggtgcatagtggcgggtatatgagagcccagtaagggaagtgattggagtgtgaatttaattagctgtgcaagaaggggagctgattaacctctaaccaataatattacagtattactaggtaatagaacaaaacttaaattatgttctcttctgtttttaatgtggatataaaacttaccaaaaatttggaatcttactaatctctttttctatctttttacacagcttctgtcaggacctggggcatgtatttgtctattaatttctctaccaaatttagctgtatttaggggtagaaracaaagaaaattttaatcacaatactatgagtgaggacatgcaaaactagtaacatttgaggatgagttcgccagataaaacctctagttagtgaatatgggaattataatcatccaacattgttattgattacattttctttttagggaattttgtgactgagaatctcttgtctgaaattaagttttcatgt

SEQ ID NO: 450177 - DNA, 355 bp, Homo sapiens
cagggaaaaagagaggaaagttaaatctaatgtattgtaaagacctaacacagtgttttcagagcagaaccttcatctgtatagatttttatatcaagtaaarcttgacattgcaaacttgtgcctactatgaattctatagatgaatttccattgtatttttcttatttgagccctggaagacacatattttatttaaactttctcttttgcatctttgaaaaaaaattcatcaatattttttagctttatttctgtaggagacataatgatgaatgataaaattaagttataaaaatttttcttttctttctgcaattttactttaaataaatcatgatatatagctgaagaa

SEQ ID NO: 450178 - DNA, 570 bp, Homo sapiens
ggtctttaaaacacaggttggtgggccttaccctgttacatttaggcagcctgcagtgggcctgagaatttgcatttctaaaagcctcccttgtcctgatgatgccactggatgctagattacacctggtgaattattaccttcaagtgtactgtcaaattatgatctctagattggttagcctaatttgtttttagtttgcgaactcttgtggggttttttgttgttgttgcagtttttttgttgttgtttgtttgtttctttgttttgacggagtctcgctctgttgccaggctggagtgcagtggagcgatctcggctcactgtgttgtcgcagttttaatgatatttatgttttctattgtttcaattagaaatctttcatgtaaaattttgtgaccatgttattccagctaatttttatgygtcctattattcttctaaagtaatctacattgttaaaaactgagaagaaagttaaaatgtatcctttttttttttacctgacatataggctttagaaatttataaataatttgctaattttataaataattgttcaaacagatg

SEQ ID NO: 450179 - DNA, 599 bp, Homo sapiens
aatctataaagttatattccagatgatgacaagttcctcataggaaagaaaggacacagaaataggttttgcttttggaagagtataggaggaaaaggtggtagccatagggtgggtaagaagaaaattagaataagtaaataaataacaaaagcctgatggtcagggacttgtgtggtggtttagaattcwaggtagccacaaagaccaagagtgccttcaacctcttgtcagctcttccctgggcttccaccagatgctcatgaaaaagtttgggctcatgttaggggacctgagagaactctcaatggggcaagtgcataaatgatggttagtttctgcttcagcataggtgccaactactgaggtcttctgccatacagagaaaaaaacatctgccaccaaggtaagagcagaaattctttcactgtcaatcaccaccacccaccatctgttcctggcaaatttagccagtgtgctaggggtaaaaataaaagttatctgcatctgggtgatgggcaaggaatagccacagcagaagtcccaggcaaaagctagggtcaactaagtgaagggaagaaaacctatgcacagctttc

SEQ ID NO: 450180 - DNA, 632 bp, Homo sapiens
aactattctcaagataatatatctaggcaacaaattagataatctctttacccagattaaaatcctttaatgacacactattagtattaatgtaattctctctctctctctctctctctctctctctctctctctctctmtatatatatatatatatatatatatatatggaggatcttagtttatctttcaataacataaagctcaagaatcaacattcacaaaaattattcctgagtcatctctaaaaccaatcaataccccatcagagactgagcatatgttactataattgttctaaatatgtatttctccaatgcatttttcctctgatctgtagagcactgttacatatctcccctatcagaatacgaagatgagtctaatacatgtgactgtgaaatcaggtgccagtaaccaagcatcatttatgtatcgagctacaatataggctcaaatctattaatcaacaatttaaaccaaagtgtgagcatcagagagcttctttggaaatatcaaggagaatcaatttctatgattggaaatcagcagtgaagacaatacactggacttaattgtaagaatgtcagacaccagagaaaggtcactttaggcccagatgccaaagtcag

SEQ ID NO: 450181 - DNA, 529 bp, Homo sapiens
actgttacatatctcccctatcagaatacgaagatgagtctaatacatgtgactgtgaaatcaggtgccagtaaccaagcatcatttatgtatcragctacaatataggctcaaatctattaatcaacaatttaaaccaaagtgtgagcatcagagagcttctttggaaatatcaaggagaatcaatttctatgattggaaatcagcagtgaagacaatacactggacttaattgtaagaatgtcagacaccagagaaaggtcactttaggcccagatgccaaagtcaggtcctttagggagagtggaactttgagatttaggatggggatgtctgtgcatatgcacttcagaaccttgaattctcagattattatctcctcttaacctctgttttttttggaattggctcattatgcttggttgaaaaaatagagattttctttgtttgatgactgtggtgataacacaaataaaacagctgctttacaagacaaggctttccctctttaggatctgtcccaaacttc

SEQ ID NO: 450182 - DNA, 529 bp, Homo sapiens
actgttacatatctcccctatcagaatacgaagatgagtctaatacatgtgactgtgaaatcaggtgccagtaaccaagcatcatttatgtatcgagctacaatataggctcaaatctattaatcaacaatttaaaccaaagtgtgagcatcagagagcttctttggaaatatcaaggagaatcaatttctatgattggaaatcagcagtgaagacaatacactggacttaattgtaagaatgtcagacaccagagaaaggtcactttaggcccagatgccaaagtcaggtcctttagggagagtggaactttgagatttaggatrgggatgtctgtgcatatgcacttcagaaccttgaattctcagattattatctcctcttaacctctgttttttttggaattggctcattatgcttggttgaaaaaatagagattttctttgtttgatgactgtggtgataacacaaataaaacagctgctttacaagacaaggctttccctctttaggatctgtcccaaacttc

SEQ ID NO: 450183 - DNA, 517 bp, Homo sapiens
ggacctaaaatatattggcttttggaagtcaaattaacacaaagtcaaataacactatctatgtaataattatgtgattcaaaggtgggatggaagcacatttaaagaatataataaaagttgagtaaattaataaatcaatgcttaactaaatgaaagaaattcctattttttacttcaggctcataggatatcataaaaatttaatgcacaacatctgaaaacatttttacttgatttcctcgtctcttaaaatgtgtcacatcccaggtttttttaagccttccatttttccgccttcttccaccagaaatactctactatgatatcccagctcaagtcactactacgccctcttctccttcctccactttgccactttggctctttctgttagatattttcttatatctatattccactttgactcatttgctgatttgmataaggaatgcaaatgattttcttcataaggtgaatacaaagtagaatttgaaaattggtcaggatttgcacc

SEQ ID NO: 450184 - DNA, 576 bp, Homo sapiens
ttttattttattaattgtttggaaattccttatcccctgcttgctatcccttgcttgccctttataggtacacaaatcacagagcatcatattgaagaatgtgtcctatagttagtcaatttctaattcacttgagaatatggatcatatgtaagagcaggtatgccattatgtgaaaagtaatctgaaaaaaggtaaattagaatayaaattttgggaaatttacatatttatccaaaatctagatggcaaatacaatttctaccttgaatcaatttgtctgccctgacagacaaaatggtgctagtgacctgaaactgaacctctaagttctgggacctgatggaattacacttggtcttttgatgtgtatgtgtctctaacctatttaaggagagatttgtactattgttttgcaaataaagcaaactaaagtctgatgggatttcactgtgagagaacttgaggggaatagtcattgaggaactttcactgtgacactaggaaagtttattaaaatataaaaagagtcagatctgttctttcatatgttatctattatcctagaaatatctt

SEQ ID NO: 450185 - DNA, 576 bp, Homo sapiens
ttttattttattaattgtttggaaattccttatcccctgcttgctatcccttgcttgccctttataggtacacaaatcacagagcatcatattgaagaatgtgtcctatagttagtcaatttctaattcacttgagaatatggatcatatgtaagagcaggtatgccattatgtgaaaagtaatctgaaaaaaggtaaattagaatacaaattttgggaaatttacatatttatccaaaatctagatggcaaatacaatttctaccttgaatcaatttgtctgccctgacagacaaaatggtgctagtgacctgaaactgaacctctaagttctgggacctgatggaattacacttggtcttttgatgtgtatgtgtctctaacctatttaaggagagatttgtacyattgttttgcaaataaagcaaactaaagtctgatgggatttcactgtgagagaacttgaggggaatagtcattgaggaactttcactgtgacactaggaaagtttattaaaatataaaaagagtcagatctgttctttcatatgttatctattatcctagaaatatctt

SEQ ID NO: 450186 - DNA, 576 bp, Homo sapiens
ttttattttattaattgtttggaaattccttatcccctgcttgctatcccttgcttgccctttataggtacacaaatcacagagcatcatattgaagaatgtgtcctatagttagtcaatttctaattcacttgagaatatggatcatatgtaagagcaggtatgccattatgtgaaaagtaatctgaaaaaaggtaaattagaatacaaattttgggaaatttacatatttatccaaaatctagatggcaaatacaatttctaccttgaatcaatttgtctgccctgacagacaaaatggtgctagtgacctgaaactgaacctctaagttctgggacctgatggaattacacttggtcttttgatgtgtatgtgtctctaacctatttaaggagagatttgtactattgttttgcaaataaagcaaactaaagtctgatgggatttcactgtgagagaacttgaggggaatagtcattgaggaactttcaytgtgacactaggaaagtttattaaaatataaaaagagtcagatctgttctttcatatgttatctattatcctagaaatatctt

SEQ ID NO: 450187 - DNA, 546 bp, Homo sapiens
tgctgcaggaggggcacttccttgtgtatctaagactgggatacttttgagactatctggttatgtttgtcaggtaagagctgaccatgggggaagcacgaatggtgccaaaaataaacaaaactggacactagttaaaatgttaaggacacattttaatcagtaataactattgcartagaaacaatagtcaagcacaaactgatctcaacttcaatttgtacagtgactgggtgttttcacctaagaataaaggagtagggagggagggaatggaagctctgttgaggcagaaaattgaaacattgcaaactgtggaaatagaaggtaggtctgtgtgaaacctgtctgggtttgctgatgtttatggaagtcaggcacctacccttacacaaagactaggagacaggggtactaatttcaagtgttgcctgcaataaatagtaaattcttttgacagccttgtgttttctcaggcaggcactttaagagggactagggtcatcctagggaggcagctttgagctgctaataactcagttactg

SEQ ID NO: 450188 - DNA, 528 bp, Homo sapiens
tgtcttaactattatcatttggctgcctagagagataaatttagggagaaattttctcattggagaacagattagtgatgaatagccataatatkctgtacaggtggaaaacaacgacaaagagaaaattaatctcctcaataaccatcagtttttctgtatatatgtaaaagatcgtttatagatgagatcacgaagtaaccttttgcctttagtgatgctgatagttattaatagagcgctaaatttacttgagtaatatgtcaagcagtatattcagcaattcacatatattttttcatttaatcatgacaatagccttgtgaagttcttattgttcctttcaaagaagtgaaatgaaagcacacagaaatcatcaattgcctaaagtcaagtagtggagctggaactagaacctgtatctctttgatttcattaaaaagaatccacttcccagcctcatccggatgaacacaaattttctcagtgatataatgggcctactaaaaaaatcactaacccgtttac

SEQ ID NO: 450189 - DNA, 534 bp, Homo sapiens
ttcagtgctgtttttaatgagcccttgaattattaagtgtgggttgtacaaaccttaataagcaataataatgttctcygcagttgacattgatctgacctaaggcatgcgatggtccctcatgactgaacatgaccccaccaaagctgaacaaattttacgtagcatataaattacattgaataaaagaagactttgatacctgctttatgctcacttaagccaagcaaaaattcattagacaagcatttatgtcattgaagtatggattaactttccgtgattttcctgtgcttctcagctattacctcacattagaatttataattgcaaagggagctaagttccaattgagaactccacagtgtgaccaatgtcaggcagatggtgccagctcagatgttacacattctgctaatctttatgtagtttgtaaatgcattaaggttaagaggaaaacatctaaaggtaacaatctttagcaacatacacattgccttgagtcagagtccctcacttggtctcaaatgggat

SEQ ID NO: 450190 - DNA, 546 bp, Homo sapiens
aaggagttccttcttttttatgggaagaccaacatttttgttcttgtcaaggtttcagctgattggacaagggctactcatgctggaaagtcaatgttctactctgtctkcagatttaaatgttaatatcatccaaaaacttcctcacagacacacctaaagtaatgtttgaccatatccagataccctgtggtccagtcaagttgacaagtaaaatttaccatcaccactactgataaatccttttatctttctgttatctctcaattagaaacaatatttgcagaggaaatacaagtcaaacccaactctggttcttcattttactgacactacaaatacatcctgaaaatgtaacctaaatatcttctttatcttgtgtaattgaagtctgcctaccagtgctaatattgccctctcaaagtccttgacttctagatataatgatatttaacaaataggtaattattcttggcatgcattattacagtactgtatagttacaaaaaagaaaaacaggttagaagaatgtatattgttcacaaa

SEQ ID NO: 450191 - DNA, 606 bp, Homo sapiens
ccatattttgttgaaaaaaatccatgtamaagtgaatctatgcagttcaaacccatgttcttcaagggtcaatggtaatccagttagaaaatgaaccaaagacatgagcagacatttcatagaaaaggatatatggatggcaaataagtatgtggaaaggtgttcaacatcaatgggcattagggaaatgcaaattaagatcactttgaagtatcactacatatttattatgatagttaaaataaaatagttggccaggtggagggactggatcactcatattttgctggtgggcatgtgaaatgatacactctggaacagttgggcagtttattgaaaagctaaatgtgcaattatcatataacccagcaattgtactcttggatgaaaacttatggttaccataaaacttgtacatggatattcatagtggctttattcataattaccaaaaattagagtgagtctagatgtcctttaatagacattgtttgagattgccattgcatggtggtaataaagagtagaccaactttagttggttttatttttatattttaattttctacacacagcatacccccttattgtcttcaccccagggta

SEQ ID NO: 450192 - DNA, 555 bp, Homo sapiens
ttccaatgcattgctaattctgatacgtgtacatacaagcatactatacacacaactctcttcaccctctggctttttgccccctyatgtccctcattcctcagccccaatatcaggttttatcatctgtgcattgggaaattcttgtgataaataagaattcctattctggcagcttgtctctccacaactttctttagtactttgtcactctgccatttcctagaggactactgcatgtcaagtgcatatcactccctgcattgctaagttttggagagtcaaagacatatgagacacattttcctgtatccatacatactcttccctctcatctctggaccagccaaagccaatccctccatctttttgtggacccaccttttactgctcatgcaagccctactaattccatgacatatccatcctctttcccccaatcccaacctttaccctggattatgaacaagctcaattagtgctcatcttttagaaaaaaaaggaaagaaataaataacggaaggaaagaaaaagagacacccctcataagacttt

SEQ ID NO: 450193 - DNA, 562 bp, Homo sapiens
gaataattgatgttcctgaagaagaagagaaatctaaaagttttgaaaacttatttgagggaataattgaggaaacttatttggccttgctagagacctagacatcaaatacaagaaactgaaataactcctgggaaattcattgcagaaagatcatcacctaggtgcatagccatcagattatctgaagtcaagacaaaggtaagaatcttaagagctgtcagacaaaagcatcagataacctataaagcaaaacctatcagtttaacagcaggtttcttggcagaaaccttataarccagaagagattggggtcccatttttagcctcctgaaacaaaataattgccagtcaaaaattttgtattcagcaaaattaagcttcatacatgaagaagagataaagtatttttcagaccaagaaatgctgagagagtcaccattactaagccaatactacaagaaatgctagaaggagtcctaaatgtggaaacaaaatcttgatatacaccaaaatagaacctccttaaagcataaatctcacaggacctacaaaacaatat

SEQ ID NO: 450194 - DNA, 627 bp, Homo sapiens
ttcttttgaaggataacagtcgagacgactaagttaactctttccggcacartggtagttctatatattcatagagttaggattacataagtgtatcgctcttttagagatacacttaagttctgtatatttaattgtatgtaaattttacctcaaaagaaaaaatctgtaagcaatattaatgctatacattaatatacatatcaattttactaataagcatatttaaagatggagtgaactgatgatgtgtgcaactattttgaaatgcatcaaaatttaggtggattgatggatgaatagaaggatagatatgtggtaaaaataagtccagcaaaatgctaattgtaggatctaggtgggaatatatggctgctaactataaaattttctgtatttcattgtaatttaataatatttcatagtaccttcaagatgaaatatcggggaaagataatatctatctggcaatgttacttcgttgccccaaaaccttggtttactttccagcgttcaatacactttataatttgacttcatataatcagcatagcgctcacttacttccaaggaatttgaagagcaccagggagagcatgtgagtaatggagagaggcatagaaagtg

SEQ ID NO: 450195 - DNA, 596 bp, Homo sapiens
tagatgcaaatcctgaagaccatagtaaaggcaatctacctcaaatgcaacaaattatttatttatttatttattattaagccattaagctccttctcatttctcctggctgccttaatcagcaaactttaaaaaaatccattccctctacgtaagccttttgacaagtcatttatttttctgggaaaacatgagcatgcttagaagttatgtttagtgggagttgtaggtttagatttaattctgggtgcagtaagaggtcattacaggataatttgagttatattttatataccataggaaacatccatttcaagtgtacaattcagcatgttttaataaatttaaagagttgtacaatcatcaccataatattttagaaaatttccatcattccaaaattarctctttgttcagtttcagttgatctttgttcttatccacagccccaggaaacctgtaatatattttctgtctaaatagagtggctttttcttgatgctgcatataaatagttatacaaatgtggccttttgggtctgccttcagtcacttagcttattgtttttgagattcattcacattgtaacatgtaa

SEQ ID NO: 450196 - DNA, 575 bp, Homo sapiens
tgcataatttcgtgtgtgaaataaaatagcaagtaaatgtttgaactgttgtgcagctttggtcctaggaggataaacaaaataattgatgagtgtcagggagatggtgttagaaaaggaggggtagaactcatgggtcttccctcacaarggggatggttatggctgaccatcatcttgactattaagcccaaagaggtgagagaaaaaatgcagaataatctaaggggagaggagtcccgatggctcttttcacatcagaaataactctagcagatggtttccacatgttttcctactattttcttccctctttctaaacggaagggaacatcaaaccaacagatcagaatgtgagacatgcctggatcacatttacttgtaggccaaagaatgggaacactagactacagaccaggcagctgggcaaagccttggtctcagctgctcctccttccattttgctgggatcatcaaagttctttctttttagctatatgcagctgatagaaaggtaatatttttattcatccttagttagggaaatactagactctcttagaactctagccaag

SEQ ID NO: 450197 - DNA, 575 bp, Homo sapiens
tgcataatttcgtgtgtgaaataaaatagcaagtaaatgtttgaactgttgtgcagctttggtcctaggaggataaacaaaataattgatgagtgtcagggagatggtgttagaaaaggaggggtagaactcatgggtcttccctcacaagggggatggttatggctgaccatcatcttgactattaagcccaaagaggtgagagaaaaaatgcagaataatctaargggagaggagtcccgatggctcttttcacatcagaaataactctagcagatggtttccacatgttttcctactattttcttccctctttctaaacggaagggaacatcaaaccaacagatcagaatgtgagacatgcctggatcacatttacttgtaggccaaagaatgggaacactagactacagaccaggcagctgggcaaagccttggtctcagctgctcctccttccattttgctgggatcatcaaagttctttctttttagctatatgcagctgatagaaaggtaatatttttattcatccttagttagggaaatactagactctcttagaactctagccaag

SEQ ID NO: 450198 - DNA, 561 bp, Homo sapiens
cccctctcctgggtgtgaattatgtcctccaagggcctcagccactgcagcttgaaagttacttttatgctatttccttaaarccaacaagaacacttgacatttctaggaggctttgagtagagaacactggtggttctcgttggttgtgtaactctgccaggaatttagaatattgttagaatctttattacatttcagcctgataaggagatgaaatagctaatgaatccactaaaaaaactgccaagtagcaaagctggaaactttggcctttggttgtcgtataataacacaccccaggcacagaaggtttagcacatttttccttactaaaacacaaaacaacaacaccaataacccaatgaggagtcttcaactcctcccaccccatagccctgggctgttcatctgcaagtcattgtgttaatagtttttgtttgtttgttttttagcatttggtcttctagatttgcttagaaatccatggattggggcaagccacggggagcagtgccgtgcctttgcctttgttgtgtggagtgacagtccccgtggctg

SEQ ID NO: 450199 - DNA, 535 bp, Homo sapiens
ttcctgcagaaaagaatgttccaagtattttatttatttttatttttaacataggctccctggtgagaccttctggttytagctgttgttttctttgcttctgtcaatacggtctggagttgaaatcgcagattgaactgttgtgctctgcgggtggcgatatggaagcacgaggctgtctctgacaaccacgtcacgcaggccgctgtccctcctacccggatgggctctgtgctgggccgggaattctgcccccagggctgatgtgaggacgaagttcttcacttatctgttatgagttttcaccgtcaactacccctgctcttcttttggggtgagagatgggacttgtcttggaaagaaggctttgctttgcccttgggaaggtggagagttgcgaaaaagaatgtgaatggctgggcttaatggtgcgagttggttttgtgtgctctagggttagaagtctgtttttcccatgggagaagggttttgtctttctggtccaagaactcgaggaccttgctagaagagcgtt

SEQ ID NO: 450200 - DNA, 535 bp, Homo sapiens
ttcctgcagaaaagaatgttccaagtattttatttatttttatttttaacataggctccctggtgagaccttctggttctagctgttgttttctttgcttctgtcaatacggtctggagttgaaatcgcagaytgaactgttgtgctctgcgggtggcgatatggaagcacgaggctgtctctgacaaccacgtcacgcaggccgctgtccctcctacccggatgggctctgtgctgggccgggaattctgcccccagggctgatgtgaggacgaagttcttcacttatctgttatgagttttcaccgtcaactacccctgctcttcttttggggtgagagatgggacttgtcttggaaagaaggctttgctttgcccttgggaaggtggagagttgcgaaaaagaatgtgaatggctgggcttaatggtgcgagttggttttgtgtgctctagggttagaagtctgtttttcccatgggagaagggttttgtctttctggtccaagaactcgaggaccttgctagaagagcgtt

SEQ ID NO: 450201 - DNA, 598 bp, Homo sapiens
gtatgaataattttaaattattaaattaaagagtcataagaaagataaatcatgggccttcctcaactttcccctactcttgaaaaatgaaaaaacaaaggagccacagacaagcaatacagtctcattgtaaagatccaagccacagaccaggaaacagaataaaaattcactttttggaaatggttctggctatgaagccttcaagtattttcttctgccttaataaacctgtacatgtgcatatacttggatcattttttacatgtattagatcacatagtacataatgttttatacttatctttttaaaaatatagcttggagattgttttccatgttagtctgtagcctcttccttattattttaaagagctgaataatattggatcatatgagtatatcatattttacgtaaccattttcttcttgatgaacatttgagttattttcaagttttcaataccacaatgtttgtgtttcagtatttttgtagatatacaaagctagaagtatcagtgggtcactgatatgcatattgacagtgcaggctttacttwtctatactcctgcagacaaaatatatgacagtgcttca

SEQ ID NO: 450202 - DNA, 581 bp, Homo sapiens
tgttgtctgctttttaattttggctctgttttgttttccttaggatagatttgaatcgttaggtgggcaaatcttcccatggagaaagtagaaatagggtgtgctgggttccctggggcagcagttcacaacaaaatttgttctgttgttttaactagggatttgcttataattcaaccccttttgacattttgctgtttattcaacaaagcaagctcgtaagtcatgtggctcgtaagtcaaagcaagctctgagtgagtggcttccttcccttggagctgcctgtctggtgaccacctctgccaggtttccacttccatgaactctgtgtgwctccttcctgattttccatatgcaaatgcaagaaacgtagtaccatttcctttattttcccttttgtacacaaagggtgacattccctgcctctgtttctaaggatgtattgaaccataaacttcaggctattattaaaatgaaaccactctgaatggtaatgtgattgtgatggttaatgtgtgtgtcaccttggctaggctatggtatgctcagctgtttgatcagcaccagcctacatgttgca

SEQ ID NO: 450203 - DNA, 589 bp, Homo sapiens
ctttttttttttttcttcttcaaggcagtgggctcccttctggcccagggtgtgtctagaaatgtcgtctgggagctagggcctggaacaggggcctcacaactctgactggtgccctatcttgatgtggctgggatggtatccaagatgcaaggcaaagtcccccctactttccctctcctctcctcaagtggaaggaaggggtctcttttggagccatgagctgtgtatcccggggctaagggttgggtgatgctagtactcccttggctgccccagctggtatctcagtatgtatcgtccccaacatccctgtccactgtccctgggtctagttcaacactaggacccacctaagagttgcagtccttatgtcctagacttcctttcaaatttacttggagacacagagcactgtagcccttggtggcagtggcsaggtttgcaggcacttaagttggtaccattcccctctggctagggctggtttaaacactccctcaatgggtgggcatcagctgagtttgattgggttttcctttctcctctaacaggattgcactgcgttcaatgtctcacaattgctgtg

SEQ ID NO: 450204 - DNA, 558 bp, Homo sapiens
aaaggagagagaattacactttacagcagtagttcatgcatggtttctgtagctgggggctgtgcaggccgtttgctcccaagctgtagtattctggggaaaggtgtcaaagtgaggctcgtgggcttgtgctgtcaaggggctaaattgatcaaatccctccaaatactgatacattgaagaggagaaatcttgcctctctgcaaagctggccccaaatgtcactgtccattgctgtgacaggggacctggtagatgcagggcatccacttagaggaaggtggcacccctgaggtccttcagggggacatttgaatagggtggtcctgaactttggcaaaaggacttaggtgtgagctgaagtgtgctgctgggaggactgtccttgcatctgcaaaggcctgtctactctcagtcgctgcctagccctgtctgcctcctgcaacagcaggaagatgccatgaaagaggcatrgtgccttcattcacccacctgagtgagctgggtctcccaagagtctcctctgtaggcacatgactactttgagagggcaaaggg

SEQ ID NO: 450205 - DNA, 622 bp, Homo sapiens
ccttaattaattacatctataaataccttatttccaaagaagattatattctggggttctgggtagacatcaattatgtcaggacactattaaaccccgtacactgaggaaggatatctaggtccattatttagtwgcaagagtcactgaagcaacccatagtaagtgaaccaaagagattgagccaggaaagaaaaggtctaagagagaatgaaaataagacctcttttctcattcctcagtggctattctggggcagagggagcggacagtgcatgcatcatggaaaggtagcatcatcagcaatgacgaaagattccacagagaaggctgtggactgaaaacaatacaaaatatacaataaatcctttctgacacagtaaactccactcgccttttaagacagagcttgtgtatcttcttgaccctcccagatagagttgatcatccccaaacttgcctggtcataaataacacctggggatgctcattaaaaatacatatttctggcctttaaataagcctgcaggagaccttatcatcaggtagggttggtctgggagcagaagagtatttaaatcctatctacagcactctctgagtttctgatcacagcaggtca

SEQ ID NO: 450206 - DNA, 622 bp, Homo sapiens
ccttaattaattacatctataaataccttatttccaaagaagattatattctggggttctgggtagacatcaattatgtcaggacactattaaaccccgtacactgaggaaggatatctaggtccattatttagttgcaagagtcactgaagcaacccatagtaagtgaaccaaagagattgagccaggaaagaaaaggtctaagagagaatgaaaataagacctcttttctcattcytcagtggctattctggggcagagggagcggacagtgcatgcatcatggaaaggtagcatcatcagcaatgacgaaagattccacagagaaggctgtggactgaaaacaatacaaaatatacaataaatcctttctgacacagtaaactccactcgccttttaagacagagcttgtgtatcttcttgaccctcccagatagagttgatcatccccaaacttgcctggtcataaataacacctggggatgctcattaaaaatacatatttctggcctttaaataagcctgcaggagaccttatcatcaggtagggttggtctgggagcagaagagtatttaaatcctatctacagcactctctgagtttctgatcacagcaggtca

SEQ ID NO: 450207 - DNA, 606 bp, Homo sapiens
taatcctgttaatgagattttgggcaagtcgctcaatacccccttagcctgattttcctcatcagtcaagtggcaacaatcatttaccttccctgactcccagggtggttgggagaatcaatgaaatgatgcacatgaaaaagctttgcaaattactaagggctatctatgtataagcatatgtgtgtgtgtgcatccaaacatacacaacctaaacataccccaaaatgaacatcaaattacagagaaagactgaagtctgttaagcaaatttctgctcatcttttatgatccagttgaaatgtccctgcttctatttatttgactcagtgcctaaaataattagcttgaatttttttttwaaaaaaagaatatagtcaaacaaaggaattgcacttatggcagagtggtgatcactgaacagtgagcaatgagactgaccaaggaagaaagcagttttgtgttttctatcccatcttcactgtggattatcaatgctcattgagtgtaacagtggtcataataacctaaccgcctaaatttctgtttctgtgtctcttgtctctcataaaaaatatataggttaattcatgcaaataaaatgca

SEQ ID NO: 450208 - DNA, 606 bp, Homo sapiens
taatcctgttaatgagattttgggcaagtcgctcaatacccccttagcctgattttcctcatcagtcaagtggcaacaatcatttaccttccctgactcccagggtggttgggagaatcaatgaaatgatgcacatgaaaaagctttgcaaattactaagggctatctatgtataagcatatgtgtgtgtgtgcatccaaacatacacaacctaaacataccccaaaatgaacatcaaattacagagaaagactgaagtctgttaagcaaatttctgctcatcttttatgatccagttgaaatgtccctgcttctatttatttgactcagtgcctaaaataattagcttgaatttttttttawaaaaaagaatatagtcaaacaaaggaattgcacttatggcagagtggtgatcactgaacagtgagcaatgagactgaccaaggaagaaagcagttttgtgttttctatcccatcttcactgtggattatcaatgctcattgagtgtaacagtggtcataataacctaaccgcctaaatttctgtttctgtgtctcttgtctctcataaaaaatatataggttaattcatgcaaataaaatgca

SEQ ID NO: 450209 - DNA, 535 bp, Homo sapiens
gcgccagctaatccctcctgaaccggccatgtgtctcctaccgtgctgaacagatgctcaacagcagctagaaggaaacccagtggaggcaaacacactcatctttctaaactaaaatcccactttccaaatatcagaacggacaggaactcagagatcttaaggttagctgacattgttaggattatcactgcttttgwacactttcctttgaaaaattttaattggaaattcatttctgaataaagccataaaagaggcgctgctccagtctaaatggaggttgggggtctgaaatctctagagctccgtggagcagagctagaaaaaaggactctttcattctgcacaagggaatgtcaaggctgagagaggatgagagccttttctaggtcaggcacgattagtggcagagccaggactagaacctggccccttggtggccatttcaaggtgtgtttccattgtcagactcaagacagaaagctgtttaaaggtgatccatatatcagcgatttcaagggttttaggtaag

SEQ ID NO: 450210 - DNA, 583 bp, Homo sapiens
caagtccttgcccatttcaaagctttggttttcctatctacaaaggagaggattgtaccagatgatctccaagggtcctcccagtgctgaacctgttatgaatgtgtatactgataaatccaaggccaacagctctggctctggcccaggctatgggtgaatctcctccacaaagctcttctcagttggccctcctttcattgagcaccttcagtgatgagaaactgattattccttgatgatggagcaacctggggagaattttggatgtcactgactttcactgactagttgcktgacttcagagagtggactcttctctgattctcagtttaatcatcagagaaacatgaatgttggtgcctagctccagtgaccgctataaagattaagttggctagtaagtgtgtgtgaagtttctggcacccaataacaccccaacagtaattttctccaagttgcaaggtatcaccctgccaagtagaaataaacaagcaaaaatgggtggagggaaataatgctctgtttacatgcagatattaaaatatttccagtctttctcagctataagatattccaccac

SEQ ID NO: 450211 - DNA, 441 bp, Homo sapiens
gagttctgctgccataagccaaggcactaccagaacctagaaggaaagcctggagcagatctttccctggtgccttcagaaggtgcatggtctcrcagatatcttgattttaaacttccggcctccaggattgtgagataataaatgtctgtcttttaagccactcagtttgtggtactttgttattgcaaactaggaagctaatgcacttataagtagcagagtaatgacatttatagaaccagggctgtgtgtcaggctccagcatatgtgctttatatctatcatctctgatgattctcacaacagcccctctttagacaggtaattccatcagagaaagtacatgctcaaatcccactactaccaagtcagttatggagccagaatgtgaacctcagaacacacagagtcacaggtcttacaagttagttatacttc

SEQ ID NO: 450212 - DNA, 557 bp, Homo sapiens
ttattctgtgctgagtcagcagagcccgacaatgcctgggaaggaagtagcagctgcttggtgcagatttgttgaatgaatacactaatgaatgtaagttcttgactccattttgcaggtaggataactggttccaagatagctaagtctcctgcccatagttagttaatggcagaactagggttttaactcacatctccagatacccggctcattccccaatccctatgatatcaagagtgtcaagcccaggsctctttttaaagatgctttaagtgcccctgggagtctgtagattctcctgggaggaaccacacttccatccatcaccagccattgacatcaaagaagagactggctcatgagaaccccaggaaaaactgatgagaggatgccccagagagcccagccctctacacagtgcactcacaggtcagtgcactggcaggtccctgactcccttagtgccagctcttatctgtccactccagagaggggctgtgacccaggacagagagctggcaggactgagatgcctaaggtggtcacacacctgg

SEQ ID NO: 450213 - DNA, 596 bp, Homo sapiens
aattcacttttcctgtaaagacaaacatagaatgaaagtgaaggaacggaaaaatatactaaatgcaaatgtaagccaaaagtgagaacaagtagctggaattatatcagactaaacaggcttcaattcaatgctgtaaaaatagacaatgaaggatattatrtgataataaagagatcaatacagcaagagaatataacaattgtaaatatatttacactaaacaccagaacatcctgatacataaagtaaatattactagatctaaagggagagacagactccagtaaaataataattggggacctcaacattttattctcagtattggacagatcatctagacagaaagtcaacaaagaaagatcatatttaaacttcactatagaccaaatggatgtgatagacaattacataatatttcacccagcagctgcaaagggcaagattcttttcatcagcacatgggacattctccaggattagccatacgttagagcacaaaacaaatctcagaaaattttaaaacactgaaattgtatcaaatatcttatctgaccacagtggaataaaactagatatcaatgacaacagga

SEQ ID NO: 450214 - DNA, 474 bp, Homo sapiens
gcctgctgtgtaatccctagagtcaggaggaatcacccttgttgtatacagggtagagagaggcttcaaaaaatcaagagacccagaaactcagagagcaagtggcagagtaatatctgagccttactttttgtgtgtttattttgyttgtttttgctttttaactctagagcctatattctttcaatccacctgtgtggttgatggcttctccttggctatgatctcattgaaggcaaggacaaattctgacaactatctgtacagcatctaacaaagatgacagatgttagctgtgaatacattatcttaggggcaaaggtggctgctgttaaacacacctgtttagaccaagaagaacactgtttgctgaaatgggtcagccatcctgctgactgtatttgatattagaaaactggcatgttctatttgcaagaccctcagctcactatgctgaaattcagcacctccaca

SEQ ID NO: 450215 - DNA, 553 bp, Homo sapiens
gtctctcaactgggggcctagatgttttcttagcatagctactgtgaatacattacaccccatgccacactccgtggtctagcgtcttttgctgaaatgtaagcaccttggattcttaatttggcctccataatgaaacacatggctgggagaagtacttaagtyagtcccctcactggcgagaatacctgatgggaaaagactagaagaaaaacaaacatttattgagccattgtcatgcactaggcattgtgctgattgcttgtcttatgctctgctacttaattcaccacagccatgcgaagtaggtattcgtattgctattttacgggtaaggaagctgaaaggtcacaatttagttattcaactaatatttcttgaacaacccgctcagcatgtgtcaagttttttgttagacccctggaattgtgatttggtcaacagagtttattagcagtattaactagagtgacagacttgagactggggccccagagacattacagcttgtctaatgtcacattgtaggaactggcagagttagatttcaaac

SEQ ID NO: 450216 - DNA, 557 bp, Homo sapiens
cattcttttgtttcagacttcagtgttcaagcaggaggcttggctgggcatttattgaagaaacatttgctgatagagataacacctggtgaattcaagcatagccatgaaagtggaatcagacrttccaagtgctttgaagctgtgtaaacttatttaaatccaggtcagattgaacagatctgctgcctatgcaacacctaaagcatttactaggcatggtgctgtcaggtcctgaatcagcacatggtcatcctacttcttggcccaatttctgctgaattacacaccctcaacttgcctagtctctatttgtaaacaaaggtttcccactaattatgctgccaaaactgagtgaaaatgcccagggatcttctgttgtctttcatcccctcaaatgtgactttcttattactaccatgtgatcttcatgaaagcagggaattcattgtgctcactgctctgtctttagtgttattctaataacatctcattcatgcaagactattgattaatttatatcagatacatgtactgagcataatgtcttcacttta

SEQ ID NO: 450217 - DNA, 429 bp, Homo sapiens
tgcctatttagaaagacctctccagattgacctaaaatctgtgttcacagtttctactctttggtcatagttgtgtcatctctagcgctggatcatgaatctacttttccttccatgttggagttctttggatcctttaagctagctttcatgcagcccygaagtcagtgtgtccctgttccccaaactctagtccttttagacccattagtaagatagtaaatccatttaatgaatcaggaccagcattttcttcatcaaaatcaaatggaaatagaatagaacaaaatagagaaagtaaggacaagtttgtttctgaaacgtttgatgcttgtgtatctttgtgtgtatgtgcactgagtcccatagaaaaatgtggaggtttttttctataagttgtgctacaaaaatatttcaaagaatgctttc

SEQ ID NO: 450218 - DNA, 507 bp, Homo sapiens
ttcctacccacagcagaaaccataaacgatccccatttgtgtctcaccattgtctaaccctgggtctcacccttcagaggtgctcaggagctgttggtcaaatcaaattgccaaggaaaccctgggttgggttgtagtagtctttacagaagtgtggtagatgaaacgtatgttgaatttaagaaaatgtatcaataataatgataaatgctacttaaggatattaatcactacacaaacatttagaactgggtctggcaggtagtaaatcctcaataaatgatagcctttatcattttgactctatgaccatcatttagtgaatgctcaccatgtgcttcaatacatcttatcatttatttctcataccatcattctatggtacctattattggccccatttgacagatggaaaaatctgaggctcgcatagttggagtcatttgcccaaggaagtaaatctcagtaaaagcaaagctggcrttggaaccttcaccttcacctccc

SEQ ID NO: 450219 - DNA, 531 bp, Homo sapiens
ttatcgtaggcccatcctccccacaattctgccccagctcctgtttcatggatgctttgacaccatcagatattgcctggtcagagggacagcgactgccggcaactgctgtaattctctggcttccatttccttgttcttaaatggagcaggtaatccctgcttgttttagagatgtgatgagaataagaatggtggggacaggcaaagaaggaggcaaaggcccggcacagaargtcctcactaaatggatgtccctcccttgcttttgtcacaatgtccagctccactagagttgctggattcctgccataccagctcgttttttatcttggggaagctttccagtaggaggaagacagccttggtggtggccaaggaaatgtctctgggattggtccctagcctggagctctgtttgcctcagggcattccagagggcattgctattcttggcctcatgacccagcacctcctttgctcctctgctttactccccatgctgaagagaaacaagagatataagaacag

SEQ ID NO: 450220 - DNA, 539 bp, Homo sapiens
ttcactttcgggggcatcctactgtcccttggtgctcaggctctatcttctcagagaaactggcctctttatcaaatgagcctggccttgatctccatttgattaagacattcatccccatcattattaggcaatgcaaaaatctcctttatcgtcttccaaagacacctcttctccaacctatagagaatataattttatcagaggttgttctgaaggaatttaatttgacagactattctagccactttgggcataatattyagaaatgagaacagttttgcctccttggagatgtgtttttccttttatgacctcttctcttagtgagctcccaattcctgtgctgatagtctgcctgaggcttcaggctttttagaagactctcttctccatccctcttatgactacctagtgtagacaatcttacactatcatcttccctggcaagaattagtactgatgcctttcactgtcctggcctccaggtttgcctctctctgattcatcattcacaatgctaccagtgtgaactttct

SEQ ID NO: 450221 - DNA, 561 bp, Homo sapiens
ctacctagtgtagacaatcttacactatcatcttccctggcaagaattagtactgatgcctttcactgtcctggcctccaggtttgcctctctctgattcatcattcacaatgctaccagtgtgaactttctaaagccagattctatcatgttattctcctgctaatagcagctaaaagattagaaactccccatcactcayagaaatataacttgagtatcatagcaagggctttagataggttgaaattcatttattcaggtacatattcatttagtgtttattgagttcctgccatgtgctcagtgctgttataatcaccaggtagacaacatgaatagaatgaaattcctgtcctcatgaagcttatgtttttttcaaagaagaggacaaagcacaaatagataaatttatattatattaaattaccatatttataataagtatcatgagacaaaaatgaagtagggtaatgggatagagaatgacaggtggttctatttttttaaagggtgtcgcacaaagcattacctaaaaaaaaaaaatagcatttgtttgaa

SEQ ID NO: 450222 - DNA, 520 bp, Homo sapiens
ctaaagccagattctatcatgttattctcctgctaatagcagctaaaagattagaaactccccatcactcacagaaatataacttgagtatcatagcaagggctttagataggttgaaattcatttattcaggtacatattcatttagtgtttattgagttcctgccatgtgctcagtgctgttataatcaccaggtagacaacatgaatagaatgaaattcctgtcctcatgaagcttatgtttttttcaaagaagaggacaaagcacaaatagataaatttatattatattaaattaccatatttataataagtatcatgagacaaaaatgaagtagggtaatgggatagagaatgacaggtggttytatttttttaaagggtgtcgcacaaagcattacctaaaaaaaaaaaatagcatttgtttgaagttatgaatggtataaggaagtgaacaagccacagaggtatctgagtagagggctccaggcagagggacagagctgaggattgaccttc

SEQ ID NO: 450223 - DNA, 553 bp, Homo sapiens
ccagtcttctgatgcctagcacattcattgctggttctgccagttcctatgtctgcatcactaaagactatgggtgtgggtgtgygggtgtgtgtgttgaaatgaaatgaaattcataagaagccttctgattccacctggattaagaagtccctgcgggggcagtgggcaatggaaaagccccaggcttagagaatatgtctgccacatcaggtgaagctgatacatgtgcttccaaacagcagaactagcactcagagtgggcggttagtgagtttctaaagaaagggagagaggagatgagtaggcggtgacattttctggggagaatgccacttagaaggcccttgagactgaggtctcaacagattgggacaaagaaggcaacaggataagggcataggtgttaccctgggaccccagagacctgaattctggctccaactctgttgacttccagtaatacggcttgaataagtgccctcttaaatctggatttcagcctctccatctttaaagttaaaaaaaaaaaagacaatgtcagtggttttca

SEQ ID NO: 450224 - DNA, 553 bp, Homo sapiens
ccagtcttctgatgcctagcacattcattgctggttctgccagttcctatgtctgcatcactaaagactatgggtgtgggtgtgtgggtgtgtgtgttgaaatgaaatgaaattcataagaagccttctgattccacctggattaagaagtccctgcgggggcagtgggcaatggaaaagccccaggcttagagaatatgtctgccacatcaggtgaagctgatacatgtgcttccaaacagcagaactagcactcagagtgggcggttagtgagtttctaaagaaagggagagaggagatgagtaggcggtgacattttctggggagaatgccacttagaaggcccttgagactgaggtctcaacagattgggacaaagaaggcaacagrataagggcataggtgttaccctgggaccccagagacctgaattctggctccaactctgttgacttccagtaatacggcttgaataagtgccctcttaaatctggatttcagcctctccatctttaaagttaaaaaaaaaaaagacaatgtcagtggttttca

SEQ ID NO: 450225 - DNA, 625 bp, Homo sapiens
ttggcacaacaatatgaatgtatttaatcctattgagctgtagagttaatatagttcagataataaattttatgctatattcatttcaccactattaaacagatgaaaataaaaagtttaaaatgtaytatttgttcattattttactattttagttggtaactgttaaaagaaattgggagacaaggatgataatgacaaagatctctttgcatggtaatttcttatatggatagcaataacaggaaataggactagaccttttttatttttaaaattaaattatacagtgaggttccaatttcaatgtttagaataaattatattttgtttaaataacaaagcaaaaagtatatagtagaattgaaatacagtgtcaaaataatggatttgagtttctataagattattaaaaatacacccaattttctgaaatatacatatatgtctctatttgatgtatgcatcatggtgtctaggaatcatgaagctcattttacttcattgtgtaatgcatcacaatgcattattattggaattaatttttcaaaaccatggatggcagcaagtaatagtctaagtattttggacattttgctgctgtgtacaaagttaaggaagataa

SEQ ID NO: 450226 - DNA, 539 bp, Homo sapiens
taacttacttattgtctccagggttctgcaattctgccatacaccccattcataatgaaaatgttgtgatgactcttaggcctacgcaatagattccctgtcttttgaagtcatcatctcacttttagagggtcacacttaggaagagattggtacatacgttttcaaacttttaggtgaaatctcattttttcaggaaaacaatgatctggctccttatgtaagtagatgacatctcaccatctccactggtgaaatatrgtacatatgtgaccttgacataaagacaaaaagaacttaatctccaataaccacccatgattttcccagctgtagaagagaatatcattactctattggatatgtatttagtaaataaatgtagtggtaaaaaaaaaccttatcgtcacactactccctgaattaacttatgaactaatactaccctggcagcagcagtcatcattcatggcataaattgatatgctcaatataatgcagcagctctcctgtattaatggtgttactgggtttggaat

SEQ ID NO: 450227 - DNA, 539 bp, Homo sapiens
taacttacttattgtctccagggttctgcaattctgccatacaccccattcataatgaaaatgttgtgatgactcttaggcctacgcaatagattccctgtcttttgaagtcatcatctcacttttagagggtcacacttaggaagagattggtacatacgttttcaaacttttaggtgaaatctcattttttcaggaaaacaatgatctggctccttatgtaagtagatgacatctcaccatctccactggtgaaatatggtacatatgtgaccttgacataaagacaaaaagaacttaatctccaataaccacccatgattttcccagctgtagaagagaatatcattactctattggatatgtatttagtaaataaatrtagtggtaaaaaaaaaccttatcgtcacactactccctgaattaacttatgaactaatactaccctggcagcagcagtcatcattcatggcataaattgatatgctcaatataatgcagcagctctcctgtattaatggtgttactgggtttggaat

SEQ ID NO: 450228 - DNA, 625 bp, Homo sapiens
ttctcatctggtttatttcctattttttgctattatgaaaaatacctcttgtatcttttcatacatcatacatacgttttgmgttttaggtacttattttgatactctcttcttttggggaatattaatgaaaaacaaaatttttaaattatttttattgttttatttttcaacttttgttttaggatcagggagtatatgtgccggtctataacatgggtatattgaatgaaggtaaggtttggggtatgaatgaacccatcaccctggtaatgagcacagtacacaagaggtagatttttcagcccttgccctcctccctctccttctcctctaatgctcctcagtgtcctttgctgccatctttatgtccgtgagtatccagtgttaaactcccacttttaagcaagaccatgcgatattttattttctgtttcggcatcagttcacttagaataatggtgtctagctgcaaccatgtttcacgaaagacatgattttatcgttttttatggctgcatagtattctacggtgtatatgctttctttcttcagtccaccattgatgggcacttgggttgattccatgttttcactattgtgaatagcactgtgatgaacatac

SEQ ID NO: 450229 - DNA, 588 bp, Homo sapiens
ttgcatctcttcctctgtgtctctctgtttaccacggaggtggttaaccaataaaataaatttttagacaaaatgcacaagaaaataaaaacaaataatttacactgagatgaacaaaagtttaataacatataaaaaggaaagtttatacaatttaggagatggctttctgcaaaccagaaagagagccctcaccgggaaccaattacccagcaccctcatcttggactttccagcctccaaaattgtgagtaataagtgtttgttttctaagccacctaatttacggtaatttgttattgtagccccagatcactaagacattcattaatttaaataattttcctgatataamcaattgtttaatttgttttgtttataaatcattattgaaatatcagctctaaaattatttataaatctacagattttcttttaacttaattcagcacttaaaaatatatatacagtcaacaccactttcttcctggttcacttaattttattgtattgtattccttttctaatctatttaaatattttagtttgtttaaatgacttaaatgcttaaccagtataagttccaag

SEQ ID NO: 450230 - DNA, 430 bp, Homo sapiens
attcttttcagtttttccacatcagatcttaaaatctttcactgtagatttacagtggtctggaaagacttgctttgtattactctgaatactgtaaaatattcatgaatcagcatttttcatgttaaaccgaagttgtaaaattgtctgaactatggcaataattaatatcttactacaaaagatatttgtctctaaccctttaagtgtgattacttttatgtctcagccatatgttagtaagcaaagatggcacatatttccaggtaaaggaccataatcagtattcgttaatatctttagcttgtcacataataactaaatgagattaattttaatgaytaaaattttaagtcactttatattgtgttaaaatgtttacaaaatgacctcacaattctatgttctccttcagagtcctcatgagcaa

SEQ ID NO: 450231 - DNA, 586 bp, Homo sapiens
gtttcttaaactggatgctgatgtcatttattttcgatcttctttaattcttatacagaaacttaggatacaaattactgcttcagctgcatcccacagtttttaatgttgtgttttcattttttattcagttcaatatgctatttaaacttccccttgatttctttattttatatatgtgttatttggatatgttatttggtttccaaatatttgaaaatgttccattgtttctgttatctatttccatttaattctattgtraatttgaatatttaaaaatgtaagacatattgtatgtacgagatatgatatggcctatgatggtaagttctatgggaactttacactattctgctattgctgtgtggaaggatataaatataaatcaggtcaatttggtttttagtgttgttcaagccttttatatctttattgattttctgtctacttgttctgtcaattaataaaatagtagtgtcaaaaactaaaaggcatttatggatacacctaatttcggtactctctgcttttgcttactttaggcaatccttactttgcacatttcctgaaggttcaaatcatg

SEQ ID NO: 450232 - DNA, 586 bp, Homo sapiens
gtttcttaaactggatgctgatgtcatttattttcgatcttctttaattcttatacagaaacttaggatacaaattactgcttcagctgcatcccacagtttttaatgttgtgttttcattttttattcagttcaatatgctatttaaacttccccttgatttctttattttatatatgtgttatttggatatgttatttggtttccaaatatttgaaaatgttccattgtttctgttatctatttccatttaattctattgtaaatttgaatatttaaaaatgtaagacatattgtatgtacgagatatgatatggcctatgatggtaagttctatgggaactttacactattctgctattgctgtgtggaaggatataaatataaatcaggtcaatttggtttttagtgttgttcaagccttttatatctttattgattttctgtctacttgttctgtcaattaataaaatagtagtgtcaaaaactaaaaggcatttatggatacacctaatttcggtactctctgcttttgcttactttaggcaatccttactttrcacatttcctgaaggttcaaatcatg

SEQ ID NO: 450233 - DNA, 520 bp, Homo sapiens
ggaggtctcagaagacagaagatgaaagaaagcttgtaacttcttagagacyggttaaatggttcttaccaaaatgctgataaaaatgtgtacagtgacctccagcctgaccaggtcccagatggaaatgaggaccctattggaaactggagtaaaggtcatccttgttatgcctcagcaaagaacttggctgcattatgttcatgccctagggggatatgtggaaatcgaatttaagagtgatgacttagggcatctggtagaaaaaattttgttcaacaaagccttcaaaaaatgacctacctgcttctaacagcttctgtatatacatatatacacacacacacacacatatatatattcttctgaaacaaacatggtaaaatgttaaaattggctaaaataacaaatccaggtatttgttattttattcacattttcctattatttcattaatataaaaattcttatttttatattttatttagaaaaataccaaaattatgttggtttcgtaaat

SEQ ID NO: 450234 - DNA, 520 bp, Homo sapiens
ggaggtctcagaagacagaagatgaaagaaagcttgtaacttcttagagaccggttaaatggttcttaccaaaatgctgataaaaatgtgtacagtgacctccagcctgaccaggtcccagatggaaatgaggaccctattggaaactggagtaaaggtcatccttgttaygcctcagcaaagaacttggctgcattatgttcatgccctagggggatatgtggaaatcgaatttaagagtgatgacttagggcatctggtagaaaaaattttgttcaacaaagccttcaaaaaatgacctacctgcttctaacagcttctgtatatacatatatacacacacacacacacatatatatattcttctgaaacaaacatggtaaaatgttaaaattggctaaaataacaaatccaggtatttgttattttattcacattttcctattatttcattaatataaaaattcttatttttatattttatttagaaaaataccaaaattatgttggtttcgtaaat

SEQ ID NO: 450235 - DNA, 512 bp, Homo sapiens
tgttgtgagcttctgttaagcaccatttatttaattacgtttacataggaacagaggttcttctaaatccttctgccctcttgtgaggttaagctgaacccaatgtctactgagctgctgtagctgttagggctcagagacaactacatagaaacaaaaatggacatagttgctacacttagtgtacaggactcaatttcctgggctttttgaatagactgtttggcctgtcaatttgaacactgtagatgggtargttaaagccaccctttctagggctctgaattatggaagcaaatcaccattggagactcatttgtgtgagccactcctgtagatgtccacaggaaggtctttttatttagtgcgacaacctgaaaccaaactgatgtatgtgcctgatgctgtgtttctgaggagatgctactacaacacaccagacttgtaactcatgctaaagttggactgcatatctagatctagatataatcttctagaaaaaggaacatcat

SEQ ID NO: 450236 - DNA, 607 bp, Homo sapiens
tcacacacctacagtgaactcatttttgacaatggtgccaagaacatatactggggaaaagatggtctcttcataaatgatttctgggaaaactggatatccatatgcagtagaattaaacttgagccctatttcttaccatatacaaaaatcaaatcaaaatggattaaagamctaaacctaagacctcaaactataaaattactacaaaaaaactttggggaacatctccaggacattggtctgggcaaaaatttcttgagcaagaccccacaagcataggcaaatcaaagcaaaaatggacaaatgagaagaatcccatcaacttaaaatgcatctgcagagcaaaagatacaatcaacaaagtgaagagacaacccacaaaatgggaggaaatatttacaaagtactcatctgacaagggattaataactggaatacataagaagctcgaacaactctataagaaaaacaatccaatcagaaaaatgggcaaaaaatctgaatagacatttctcaaaagaagacatactaatggcaaacaggcatatgaaaaggtactcaatgtcattgatcattagaaaaatgtaaaccaaaactataatga

SEQ ID NO: 450237 - DNA, 522 bp, Homo sapiens
ggtctgggcaaaaatttcttgagcaagaccccacaagcataggcaaatcaaagcaaaaatggacaaatgagaagaatcccatcaacttaaaatgcatctgcagagcaaaagatacaatcaacaaagtgaagagacaacccacaaaatgggaggaaatatttacaaagtactcatctgacaagggattaataactggaatacataagaagctcgaacaactctataagaaaaacaatccaatcagaaaaatgggcaaaaaatctgaatagacatttctcaaaagaagacatactaatggcaaacaggcatatgaaaaggtactcaatgtyattgatcattagaaaaatgtaaaccaaaactataatgaaacatcatatcactccagttaaaatggcttttatccaaaaaacaggcaattagaaatgatggtgaggatgcggagaaaagggagcccttctacactgttggtaggaatgtaaattagcataaccactttggaaaacagtttggagggtcctcaaa

SEQ ID NO: 450238 - DNA, 573 bp, Homo sapiens
gcactgttatttaaaacactctctcccaaactccctcaagggaaacaatactaatgataaataaatttaaggaaatttgcttccttaaagcataaagactaatttgctgatggtggtaaaaactttggaaaatcacatagaaaaaccaagtctcttggacaagtcagcatcaagctatcctattattgaccctttcattattctcattgccatggtgtagaaaaggaagggtttctgcaggagtggaaaaattctaatattattgcttataaatctgagtgaataatttgaatgcatgtgtccctcataaaatctctaaagattcttccagtcagtaacagtttcaattccttaaagttataccaaaaaygtccacagctcaaaaatgtccacagctattaaaatgagggttaggtgaggtgtgaatagaacctgtatccatatgcaggcattctatattagtcagggttctccagagaaacagaaatgatggatatatatttagagtggtatgtattatcatcatctctcagtatacacatgggagattgattccaggacttcctgagtata

SEQ ID NO: 450239 - DNA, 573 bp, Homo sapiens
gcactgttatttaaaacactctctcccaaactccctcaagggaaacaatactaatgataaataaatttaaggaaatttgcttccttaaagcataaagactaatttgctgatggtggtaaaaactttggaaaatcacatagaaaaaccaagtctcttggacaagtcagcatcaagctatcctattattgaccctttcattattctcattgccatggtgtagaaaaggaagggtttctgcaggagtggaaaaattctaatattattgcttataaatctgagtgaataatttgaatgcatgtgtccctcataaaatctctaaagattcttccagtcagtaacagtttcaattccttaaagttataccaaaaacgtccacagctcaaaaatgtccacagctattaaaatgagggttaggtgaggtgtgaatagaacctgtatccatatgcaggcattctatattagtcagggttctccagaraaacagaaatgatggatatatatttagagtggtatgtattatcatcatctctcagtatacacatgggagattgattccaggacttcctgagtata

SEQ ID NO: 450240 - DNA, 603 bp, Homo sapiens
aaaatattaaaaatagagttattatatgatccagcaattccactttggggtatatacccmaaagaattgaaaacagtgtctcatagagattatttgtacacccgtgttcatagcaacattaactgcaataaccaaaacatagaagcaaaccgtgtccatcaatgtatgaatggataaaaatatgtggtatgtacatgcaattaaatattatccaactttaacaaagaaggagattttgacatgtgctacaacatggcagatcgtgaggtcataatactaagtataacaagccagtcacaaaaggacaaatactatattattctacttatatgaggtacctagaagtaggcaaatgcataaaggcataatgtagaatgatgtttgccagcggctggaaggaggcaatgtgaagttgttatttaatgggtacagttttagttttttaatatgatatgaattctggagattaacaatgtgaatgtacttatgcaaatgaagtgtgcacttagaaatggttaagatagcaaatcttgtatttattttaccacaataataaaaaacacaagcataaattatttgacattgttttagaggcagactctg

SEQ ID NO: 450241 - DNA, 604 bp, Homo sapiens
tgtgtttgctataagtttatacaaatacaactgatttttgtacgttgattttgtatcctgcaactttgctgaatttattagttccagcagtatttttgcagaatattcagtgttttctgcatttgagattatatattctgcaaatagagataatttctcttcttctttccaatttaaatatcttttatttattttttatgacctagttgctgtgaatrgtatttctataactattttgaatggagtaatactgtttcgaatagagtaatactgttttcagaatagaagctttgttcctgatttgagagtaaaagctttcagatttttatcatcgaatatgttaagtggtgggcttttcatatatagcctttattatgttcatataatttcctcctaaggctagtttgttgagtgtcttttatcatgaaaggatgtcgcattttgtaacatgcttttctgtatctattgagatgatcatgtgattcttttgattctttatttttattgtgatgtatcaaattaattgattttcatatgttgaactactcttgcatctcaggaataaaccccacgtggtcatggtgtatgatttttttaatttgat

SEQ ID NO: 450242 - DNA, 604 bp, Homo sapiens
tgtgtttgctataagtttatacaaatacaactgatttttgtacgttgattttgtatcctgcaactttgctgaatttattagttccagcagtatttttgcagaatattcagtgttttctgcatttgagattatatattctgcaaatagagataatttctcttcttctttccaatttaaatatcttttatttattttttatgacctagttgctgtgaatagtatttctataactattttgaatggagtaatactgtttcgaatagagtaatactgttttcagaatagaagctttgttcctgatttgagagtaaaagctttcagatttttatcatcgaatatgttaagtggtgggcttttcatatatagcctttattatgttcatataatttcctcctaaggctagtttgttgagtgtcttttatcatgaaaggatgtcrcattttgtaacatgcttttctgtatctattgagatgatcatgtgattcttttgattctttatttttattgtgatgtatcaaattaattgattttcatatgttgaactactcttgcatctcaggaataaaccccacgtggtcatggtgtatgatttttttaatttgat

SEQ ID NO: 450243 - DNA, 604 bp, Homo sapiens
tgtgtttgctataagtttatacaaatacaactgatttttgtacgttgattttgtatcctgcaactttgctgaatttattagttccagcagtatttttgcagaatattcagtgttttctgcatttgagattatatattctgcaaatagagataatttctcttcttctttccaatttaaatatcttttatttattttttatgacctagttgctgtgaatagtatttctataactattttgaatggagtaatactgtttcgaatagagtaatactgttttcagaatagaagctttgttcctgatttgagagtaaaagctttcagatttttatcatcgaatatgttaagtggtgggcttttcatatatagcctttattatgttcatataatttcctcctaaggctagtttgttgagtgtcttttatcatgaaaggatgtcgcattttgtaacatgcttttctgtatctattgagatgatcatgtgattcttttgattctttatttttattgtgatgtatcaaattaattgattttcatatgttgaactactcttgcatctcaggaataaaccccacrtggtcatggtgtatgatttttttaatttgat

SEQ ID NO: 450244 - DNA, 508 bp, Homo sapiens
taagagaaaaaggactgacagatacacaggtcataaacttctaagattaatgtttcaaaacataatgaaacaaaactgtaaacaaattttctaggaatattgcaccagtaggaacaagaaaggcctatactttttctgttcctttttctcttctttcttttgygataatttaatttaaaaaatttatttaaaatttttaagtaaaatttaataattctaatattttattttgtttcctatattaattatataatattttataaaattccatattatgttagaaattacaataaaaattcttaacttaccacagtctgctagattcagcatagtactacttcacgattaactcttctgaattgatcatttaataatggccttgtgttatttaagcccagttttccagtggtgttagatgtgttgttcattaatatttgtggatgtcaaattgaaatgtaagaacttaataaaaattggctactcacttttatggcaaaaatagaaaaca

SEQ ID NO: 450245 - DNA, 519 bp, Homo sapiens
ggttagtaattccaaaatctgtggggttggccagcaggctaatgaccctggaacaccaatgttgcagctgtatgaatgtatgaaggctggtgggctggagacccaggagaactaatgttccagtttgagtctaaaggcagtcttctatagaaccagtacaggcctatgctgcaaatgatatctgaaagaagcatgctagacaattctctcttcctcaggggaggctggtcttctcgtttcactcaggtcttcaactgtttgaatgaggcccaygcacattatggagggcaatgtactttattcgaagtccatgaaatttaaatgttcatctcatccaaaatacccttacaaaggcaaccaaagtaagatttggtcacacatgtggacaacctgtgacccagccaagttgacacataaaattaactatcacaacatccaaactcctcttttcataattttcttagattgaattaaaattatttcatgtctttcttcacagataatgagctccttataata

SEQ ID NO: 450246 - DNA, 519 bp, Homo sapiens
ggttagtaattccaaaatctgtggggttggccagcaggctaatgaccctggaacaccaatgttgcagctgtatgaatgtatgaaggctggtgggctggagacccaggagaactaatgttccagtttgagtctaaaggcagtcttctatagaaccagtacaggcctatgctgcaaatgatatctgaaagaagcatgctagacaattctctcttcctcaggggaggctggtcttctcgtttcactcaggtcttcaactgtttgaatgaggcccatgcacattatggagggcaatgtactttattygaagtccatgaaatttaaatgttcatctcatccaaaatacccttacaaaggcaaccaaagtaagatttggtcacacatgtggacaacctgtgacccagccaagttgacacataaaattaactatcacaacatccaaactcctcttttcataattttcttagattgaattaaaattatttcatgtctttcttcacagataatgagctccttataata

SEQ ID NO: 450247 - DNA, 572 bp, Homo sapiens
acaatgctcaagctaatgtcagtattcactgttgtcatacatttctgcattactaaatatgcataattgtggtgagaggatcatctatgtatttaggtctgtttttaattgtgttataaaattcaagtgggtgggcatagtgtcattgtgaattatcatctaatatctaacacactagcaaatgtatgtacttacttagctttatgttatccaactgctgccccagaatttaaaatttttaaatgttatgctttgtcctcatttccttaatacaagtaatttagccaagagaaaagttttataatttgactttcwtttggaaacgtacccaaggccaggggatcagttttggcttaaagggtgtctttgtagctttcctggggagtttttgttggtgtgtaggagaggcaatgatttttgggaggaaacctataactttatctttggtttattctcttctcttaattgatcttttgccacgctttctccattaaaggattctccatccttgacattgactgcaaaggactggagaaaatgcatccctctatttgccagttacaatcttgatc

SEQ ID NO: 450248 - DNA, 572 bp, Homo sapiens
acaatgctcaagctaatgtcagtattcactgttgtcatacatttctgcattactaaatatgcataattgtggtgagaggatcatctatgtatttaggtctgtttttaattgtgttataaaattcaagtgggtgggcatagtgtcattgtgaattatcatctaatatctaacacactagcaaatgtatgtacttacttagctttatgttatccaactgctgccccagaatttaaaatttttaaatgttatgctttgtcctcatttccttaatacaagtaatttagccaagagaaaagttttataatttgactttcttttggaaaygtacccaaggccaggggatcagttttggcttaaagggtgtctttgtagctttcctggggagtttttgttggtgtgtaggagaggcaatgatttttgggaggaaacctataactttatctttggtttattctcttctcttaattgatcttttgccacgctttctccattaaaggattctccatccttgacattgactgcaaaggactggagaaaatgcatccctctatttgccagttacaatcttgatc

SEQ ID NO: 450249 - DNA, 572 bp, Homo sapiens
acaatgctcaagctaatgtcagtattcactgttgtcatacatttctgcattactaaatatgcataattgtggtgagaggatcatctatgtatttaggtctgtttttaattgtgttataaaattcaagtgggtgggcatagtgtcattgtgaattatcatctaatatctaacacactagcaaatgtatgtacttacttagctttatgttatccaactgctgccccagaatttaaaatttttaaatgttatgctttgtcctcatttccttaatacaagtaatttagccaagagaaaagttttataatttgactttcttttggaaacgtacccaaggccaggggatcagttttggcttaaagggtgtctttgtagctttcctggggagtttttrttggtgtgtaggagaggcaatgatttttgggaggaaacctataactttatctttggtttattctcttctcttaattgatcttttgccacgctttctccattaaaggattctccatccttgacattgactgcaaaggactggagaaaatgcatccctctatttgccagttacaatcttgatc

SEQ ID NO: 450250 - DNA, 589 bp, Homo sapiens
tagtctgccttctagtttcctatgaaaatttctagcaaaatttgaataaacagaaaatatataaaaattataagaaatactcaaaatcttaaaggcatttgtctctctagggtgagattattgtgagtttcaccttccttttattttattttgaaaattttctactttcataaaaataagacaagtcctcttaatgctaasacatggatttaaaaatcattaggaagtggagaaaataattgcaaccaattagatagaaccaatatactcatattgttaatacataaaaatactagaacaaatcatcaaaaagtatggataccttattcaaaactgtataaaaaataggacttcatagggaaataacaactataaatgggtatattttcaacctcaggtacaatacaatgctaattaaaataaagtgatgtattatttattatttttcaaaaattattttcaaaattttaaaaatttgtacccagtattgtggggatgcgacaaattgtcatacttgaactgtagtataaattgatcatagtttttgggaggaaaactaggcaaactatcaaaagacttaaaagtgatc

SEQ ID NO: 450251 - DNA, 589 bp, Homo sapiens
tagtctgccttctagtttcctatgaaaatttctagcaaaatttgaataaacagaaaatatataaaaattataagaaatactcaaaatcttaaaggcatttgtctctctagggtgagattattgtgagtttcaccttccttttattttattttgaaaattttctactttcataaaaataagacaagtcctcttaatgctaacacatggatttaaaaatcattaggaagtggagaaaataattgcaaccaattagatagaaccaatatactcatattgttaatacataaaaatactagaacaaatcatcaaaaagtatggataccttattcaaaactgtataaaaaataggacttcatagggaaataacaactataaatgggtatattttcaacctcaggtacaatacaatgctaattaaaataaagtgatgtattatttattatttttcaaaaattattttcaaaattttaaaaatttgtacccagtattgtggggatgcgacraattgtcatacttgaactgtagtataaattgatcatagtttttgggaggaaaactaggcaaactatcaaaagacttaaaagtgatc

SEQ ID NO: 450252 - DNA, 612 bp, Homo sapiens
gccttatcctttttggattagatatacycagttctttaaccacttcccaaatgacaccatctgtcctttcaccatttagccactctttttggaaaaaaaagtctttatataaatagtctggaaaatcaaatccctgcaaggggtagggaaatataagaaatgtgtacaatagttgtaaatgagacactagagagtggtcaagttcatgggaaattgaatgcctgtattgcctaaagttattaatgtttccactttttcattctcttttggctgagtaaatccagtgtgggctggatttcactgggcctgctatctaataataatttttgatataatttttctaaagccaaagtctcagaacttgacacaatattcttattatggtctgtgcaacacagattaaaagcagagatcacctcctttacactcatctatgtttctattaatctggcccactgtttaatgaacactatactttcatgttgtgccatgctattttttcatttctctcgcagcaccatatcttcccatactctgctggaacagttcattttctcggttagaattcagtaacccagtattaatggggaaaacatctaacttgtagtaaga

SEQ ID NO: 450253 - DNA, 515 bp, Homo sapiens
ccagtttgacttaataaaattccagtggaaaccattttttcttcagaatagtgcattggaaccatcaagagatctgctgagaatccctctagagagaacactgaatagattgagaaagaactggtgattcacacttaaataattgtacaaaacatataaagtttttactcttttaactgctgataaaagtgacattctgcatactctccatgtgtgttctcatttactggcaataacttcttatggaactatcaaaagcaaggcaaaagaaataaacaaaaacacttttaataaaaatgcaagtgaaatatatattcgggcttgagatttattctacttgaagattaacataatagtttcagcattttcctctgcatgagcatcggttttgcattgcaaataattggtagtatatacttaggaattttggaaatgaagtagctcgaaggaggcattactaccatcatcrctgtctgcttgtctgtgatgcctggggactgaccagcagaaagttt

SEQ ID NO: 450254 - DNA, 515 bp, Homo sapiens
ccagtttgacttaataaaattccagtggaaaccattttttcttcagaatagtgcattggaaccatcaagagatctgctgagaatccctctagagagaacactgaatagattgagaaagaactggtgattcacacttaaataattgtacaaaacatataaagtttttactcttttaactgctgataaaagtgacattctgcatactctccatgtgtgttctcatttactggcaataacttcttatggaactatcaaaagcaaggcaaaagaaataaacaaaaacacttttaataaaaatgcaagtgaaatatatattcgggcttgagatttattctacttgaagattaacataatagtttcagcattttcctctgcatgagcatcggttttgcattgcaaataattggtagtatatacttaggaattttggaaatgaagtagctcgaaggaggcattactaccatcatcactgtctgcttgtcwgtgatgcctggggactgaccagcagaaagttt

SEQ ID NO: 450255 - DNA, 578 bp, Homo sapiens
ggtcacccaaatcttcaagagaaatggaaaaatagtttttaggtgggtaaattgacacactcaaaacagatttctgttaatgaggtgaagcagaggattagatattgagtcagtgacttaccatatctgttttttttagcaaagataattcaaggtgtttcatagaatataagtttcayaagtaggacagaaaggattgaggtattcactcgctcttattccccacctatctcataccacagtttatcttatttctgtggtatcccctttactgttcctattttccttctactttccccctacctgtctgaattttatgcaacttttaagatcagtgcaaccattttttctcaaaaattttcattttctacactaaatttggactaatctctcttataaacctctcaaacattttattttttattttaagatatcatttacgatattacaaatgcatgatatgttttattgtttccactagattataagatatttgagcagaaaaatagtgtcttactcatctatttccccagatccataaattatttcaagaagattgtgggtagtcaataaatgga

SEQ ID NO: 450256 - DNA, 578 bp, Homo sapiens
ggtcacccaaatcttcaagagaaatggaaaaatagtttttaggtgggtaaattgacacactcaaaacagatttctgttaatgaggtgaagcagaggattagatattgagtcagtgacttaccatatctgttttttttagcaaagataattcaaggtgtttcatagaatataagtttcacaagtaggacagaaaggattgaggtattcactcgctcttattccccacctatctcataccacagtttatcttatttctgtggtatcccctttactgttcctattttccttctactttccccctacctgtctgaattttatgcawcttttaagatcagtgcaaccattttttctcaaaaattttcattttctacactaaatttggactaatctctcttataaacctctcaaacattttattttttattttaagatatcatttacgatattacaaatgcatgatatgttttattgtttccactagattataagatatttgagcagaaaaatagtgtcttactcatctatttccccagatccataaattatttcaagaagattgtgggtagtcaataaatgga

SEQ ID NO: 450257 - DNA, 475 bp, Homo sapiens
tcggccatcttggctcctccccctaattttgttttttataaaatcaaatctttgaagaacacaggccatctgccttcttgaaagttcacatacttaattttttaaattgttttctcatgattaaatttaaacattttccaagaatattatatatttaatattgttttatatgtaatatgcatacatacatattttatacatatatatttatatatatatatcttgttctgtttctcacttgtctctttcaacatagtatttattaaatccaccattaccactctctataccttggtttccctatttctaaccacaggacaataatcttcagtgggctgtagctttccacatatcacctattcatagctccagagatggagactcacactgcatcaaactaatggtgaccaaygacaacactatgtgaacatttgtgctcatataccaagaacataatttttgaacagactagtga

SEQ ID NO: 450258 - DNA, 588 bp, Homo sapiens
ttacaaataataaatttagcaaagtatcaggatgcaaaatcaacacagaaaaatcagctaatatgtttctatacactaacaaagaacaatctgaaaagaaaattagaaaacagttccacttacaataacatccaaaagaatagaaatacctaagaatttaccagggaggtgagagacttatacattggaaactacaaaacattgctgaaagaaaataaagaagacacaaataaatggaaaaataaatctcctatttatgaatagaaagacttaatattgttattatattaattccctcaatgttttacaaatttaatggaagtcctatcaaatcccaatgatgttgctatgatttaaatatggtttgtcttctctgaaacttatgttgaaattcaattttctttttcttttcttttttttttaaattttagacagggtgcagctctgatgcccaaamtggagtacagtgccccaattatggctcacagcaacctctgcctcccaggctcaagtgatcctcatgcctcagctcctcccagtagcagggacgacaggcatgcaccacctccctggtttatttttgtattt

SEQ ID NO: 450259 - DNA, 602 bp, Homo sapiens
tttaagctgaaatcaagaacaagtaaagcttaagagtgacaaaataaaataacagtaattgcaaaagctgcaattacttttgccccaccctaatgttctrtatttccacaaagaagaaataaaaacaaaggaagacaggctaagtcaaattgtacagttaatttctaaatctttaataacagtcaaacagcatcaattaaacctaataaatacagcagtagaaatttagagtgcaatagaatgaataacattattgaataaaattgggtaataaaagaaaaggagacaaaaattttatttttgcttgtagtggggaataaataagaattatctaaattaaatatctaattatctaaattaattgtctaaattaaaaagatgctaagattccattcaataaaaatattatggttaccaccaagaaagaagccaagcatacacacacacacaaagcaatgtaagcagacaagacaatgaaaatcttaaaactgtaaaaaaattataaattatataatgtgtgagagagagaaagccaatgaaatgtgattcaatacctgtaaataggtttaattaacctattaaaataaaaatatttcatattg

SEQ ID NO: 450260 - DNA, 540 bp, Homo sapiens
aataaaaatagaaattaaagttttaaaagttagaaaaaatagtttccctgacaagggattttaaaactttatcttaagaaattcttgatacaggagaggttcaattaatatcataagatttkcatgtaagtacaaatgaaagtacagatgaaataatactaatgggaacattcataatattaaattttcttatgtattgttacaaattaaacttgatgttatccatacatatgtaaattaagcatctgattttgaaatgttaaaaaacaaaatatactaaacaaaatattttataaaaatattattagaaaaatgatagaacaaatttttaaagctttattctttggaagtcagtaaaatagttaaatcattagctgatttaactaaggaataaataaaggtactcacagcacaatagaagtgaccaatggggaaaacaatcacagaaactgagataaaaatttataataataaaacaccactttgcacaaatctgtaaaaatatcttgaatgaaatggataatttttgagaaaaaatgg

SEQ ID NO: 450261 - DNA, 631 bp, Homo sapiens
atgtggcaattccttgtaaaatcaaaaatacaattaccatataatctaggaattcaacttctgggtatatgctttaaggaactgaaagcaggaactcaaataagtatttgtaccttcatgttcatagcagctttattcaaagtagctaaaaaaggtggggagtcttgttccacaatcagagcttagaagcaagctggctctaccctctcacacagaaatccaaaaccaaatgtacagtgatggaattatcaccagcaatatctcagaattcaaataggagagtgcaccatttcccagagctacagagaagtaaacaatcttcaaatagcttgtcagaaaacaagactttcctatccacaacaacccttttctcaacaagcccagcatgaagtacatagaaaaatttctcccaactcatggtttctgcactggaaaaagcacaactgaggtggaaaactagcttccccaccatcatgggttccctggcaggagccctgttcctgcctgaytctatgggaagaattgccagtgcctgaatggagtaatgttcctgatgacagcctaagacagaggaggcaagtggcactaccaaccctagtcctagaaactgtgctctgcaactcttccaaag

SEQ ID NO: 450262 - DNA, 519 bp, Homo sapiens
ctctctcctgtcaccatgtaaagaaggatgagtttgcttcttcttccaccatgattgtaaggcacctttggtcacctgaaaagatttctttctgttttatctagttgactgtggtagttactgggttccatgctttactctccttcccaaatttttcagaattaattgtgaaaaaatcagctcaagttagttcatctacttgaaaggaatcraagttaacatcttatataaatcaatgggcattaaattttagttatcattgggatttctgctaccctacagttgtataaaagtcactaaggtatgaaggaaactcctctaatgggggctcaattgccaagaatattcaatacaatgtgtttgctttctctggaccactacaaggaacaccccatctttagtgaccctggaaacccctaaactaatgtctaggcttcttggtgtcctacctttgcaggtgctggtcccaagaggggacagacagatctaccctcttgaggctgaatgaatcttacctct

SEQ ID NO: 450263 - DNA, 389 bp, Homo sapiens
ttcaaaataaagaattctaggaataagccaagggttgaaacaatctggggaataattattcaagacaaatgtgtgtatcttagtaagaacagtgagttttgtggtgttttactttgtcccattcttattcccttctttccagttccacgtagccttgaaaaccataactttgcaaatacaggagttgtgaaaacgagcatcctagaagtcactgtaagggcagaatgtgtttggagaaagtcccattcccagaaaattgtcactatttagcccatctgaaagtcgcataaaaagctctactgtcgacatttgtctttatttgagctgattcagagcttgctttgtgcaamtagcacaacccatcagaggcaattgcttaatattgcagc

SEQ ID NO: 450264 - DNA, 579 bp, Homo sapiens
tagatatccatatttgaatgtctagtttttaacacaaaattatgacgcatgtaaaaaataggaaattagtatagctcatacacagacaaaaaagaagcaatagatcgtgtatctgaggaaatccagatgttagacttatctgaaatacactttaaatcaaccataataaatatcctgaaaacagtaaagaaaaacacatgtaattaaacacaagtatgagaataatgtgccaccaaacatcaatgagatagaaattattaaaaaagaacctagttaaaattcagaaattgaaaagtataattactgaaatgaaagagaattcactagaggsaatcacaaccagacttgaactgcgaaaagaaaggcacagcgcactagaagataggtcagtggagattatttagtctgagaaacaaatgaaggacaaaaatataaatagaaagtcagattatacatcatgacctggtttgacttatcaaaataatctatggttggattaatatctgaaaatcaattattgtaaaatagcatgttaacagaataaagaacaaaagcatatgatcatctgaatagatgtaa

SEQ ID NO: 450265 - DNA, 579 bp, Homo sapiens
tagatatccatatttgaatgtctagtttttaacacaaaattatgacgcatgtaaaaaataggaaattagtatagctcatacacagacaaaaaagaagcaatagatcgtgtatctgaggaaatccagatgttagacttatctgaaatacactttaaatcaaccataataaatatcctgaaaacagtaaagaaaaacacatgtaattaaacacaagtatgagaataatgtgccaccaaacatcaatgagatagaaattattaaaaaagaacctagttaaaattcagaaattgaaaagtataattactgaaatgaaagagaattcactagaggcaatcacaaccagacttgaactgcgaaaagaaaggcacagcgcactagaagataggtcagtggagattatttagtctgagaaacaaatgaaggacaaaaatataaatagaaagtcagattatacatcatgacctggtttgacttatcaaaataatctatggttggattaatatmtgaaaatcaattattgtaaaatagcatgttaacagaataaagaacaaaagcatatgatcatctgaatagatgtaa

SEQ ID NO: 450266 - DNA, 595 bp, Homo sapiens
agcgcactagaagataggtcagtggagattatttagtctgagaaacaaatgaaggacaaaaatataaatagaaagtcagattatacatcatgacctggtttgacttatcaaaataatctatggttggattaatatctgaaaatcaattattgtaaaatagcatgttaacagaataaagaacaaaagcatatgatcatctgaatagatgtaaaaaaaattacttaataaaatccattatgtgtttatgataaaaacactcaacatactagaagtagaaagaaatgatctcatcatcttaagtatatctatgaaaaactcacagctaacatcatatttaatgaagacaatgctttctccttatatcagaaacaaaacaaatacatctactgttttttatttctattcaacattgcactaggagttctagccagagcaattagttaagataaaaaattataattggcattctgataaaaaaggaaaaagtaaatttttttctccacagatgaaatgattatttatattaaaaaaccctaagtaattcacacatttaaaaagttaaawttaaaaaatagctaatcaaggttgcaggtcc

SEQ ID NO: 450267 - DNA, 414 bp, Homo sapiens
tgtattggcagataaatagacaggtagatcaaaagaaatagcaaactcagaaataactccacttattctgagtggagtatctgatttttgttaaatgtgcaaaagcaatttcttagaatattgaaagccatttcagccatgggtcattgctaggcaaaagaaaaatacaacaaaaccttgacttaagacttaaatctcacacttcatataaaaactcactcaacatggatcacagacttaatgtagtatataaaactrtaaagcttttagaaagaaacagaaaatcctcagaatctatggctaggcaaagagttcttaacatcaaaagtacaattcacataagcaaattttttataaattggacttcaccaaagtacttttgctccatgaaagaccctgttaagaaaatgaaaa

SEQ ID NO: 450268 - DNA, 600 bp, Homo sapiens
aatgatatgcttgaaattaaaaaaaaatagtgaatggagaacagattattggttttcaagctttaagtaagtagaatgaaggagaggaaaaaggaaaattagcgtggctataaaaagaagaaaaaaatgagtaatccatatggtgatggtaatgttctgtcttttgattgtatcaaagtaaataccctgattgtgacgctttactattgttttgaaagttttaccactgtggaaactgggcaaagtgtacatgaaatatttttgtactatctgtgacaacaccatgataatctgtaattaytaaaaaataataagtgtaattgaaaaagatcctgcttattaaaaaggaaaggaagtaaaagttcacagaactaaaacactgcaagacagaacaagaggaatttgattgtaggaaagatatggaaaaaggaaatttttgtcattttctgctattttcagttagtctgtaaaacatttaaaacattaaaatacaataattattatgtacttattttcaaggcactgactcttactttaggagtactttgctttatagttatatttaaaacaacagcatagagaggtggagcaagatgacag

SEQ ID NO: 450269 - DNA, 590 bp, Homo sapiens
aaacatttaaaacattaaaatacaataattattatgtacttattttcaaggcactgactcttactttaggagtactttgctttatagttatatttaaaacaacagcatagagaggtggagcargatgacagaatagaaggctctactgattgttcccactacaaggacaccaagttaacaactagctatgcagaaaaaaaaccttcataagaacaaaaaatcagatgaacactcttagtacccagttttaacttcatatcactgaaagaggcactgagacatagaacagtccagaatcactgaggctatccctcccctaccccagcagtggccctgtggtgcagagaacctctctgggtgctgcgagagggagaacacaggctttctgaggcattgaactcagtgctgttctgttagagcagaaaggaaaaccagatcaaattcagctgatgccttcccagaaagggagcatttaaaccggccttagccagatgggaatcactgatcctagtagttgatacttgagttctgtcaatccttgctgtcaaggtctacagtactctgtgtctccaagtaaacttgaaaggcag

SEQ ID NO: 450270 - DNA, 587 bp, Homo sapiens
attcattgtatgcaacataaatctgactggttacataatataaaacatcagacagagctggcttccattcaagtcatttagaacatgtttcataaaagctgaacctcatgggaggcagcctctcaaagccaaagcaaagctgcagttcatccttagaccctccttggtctcaaattaaaatatccaggaggatagaaattgatgagatttcattaagtaaaaaatttcatgaaaatcaatcctaacctctgtagctcccagcagcgggayctgtgtttatatgaacagcattaaagataagctgtcccacggaaattacagcagcagttatcaaacaactttaatgcactcttaagtagaggcactaaaatttagaattcgcactggcttttctgtcgttcacggcgtggcgctgagtcagcctgcaaccacacaagaaaacagctgttgagaaatacagcttcctgatttaaaaataaatcagtaaatttctactaaaagtttctgctaaattccttattgcattctatttcaaaggaggggtgaaatatctagaatgccacgatggtttttaagcataaggggtt

SEQ ID NO: 450271 - DNA, 561 bp, Homo sapiens
aatataaaaataaaaaaattatggaagtgtacattttaaatggatgattcgaaaggggtatgaattatagttcaataaagctgttttttaaaaaatccatcagaggataattaatctattaccacagtataaagaaaaggaatagactcaataccctactttttttagttcattaaaatgtgggtcaaaatcctaaatttaacatatccacaatgttcataattcagggtatatagttaattccatataatttgcattgtacckgatcggttagggacaggggctttagaataaaactaggtttaagtcccaaccccttcactcacatgttgaatgacctgggatcctcccccaagccccagcttctctataggtaaaatgaggaaaataatagtgcttctttcaccgatgagtgagtacctgacacagtgcagcactcaaacagtaactgtataagtaaataaataacaacaacaaaaccaagtacttgtgtgcaatatactaaaccttgctagaagacacagataatacagtccctttcttctattagattatgacacc

SEQ ID NO: 450272 - DNA, 585 bp, Homo sapiens
aattttcctgcaaaatgccaccaataggtagggctagatctgtaacaagcacagttaccctcagatatatttgtcattcactgtgataatgacatcttcattgctggcctgactgaaacaaacaggttgaccaggccctacctaagctcatagacaccatggcatgtagactgagccctcaagtccaaggctcaacaattggagttcctaggagccacctggctggtaatcagagtattctttttaagtaaaaaaaaaaattactgtccttgatagcactcataaataagaaaggagctcaaaagctaatgggcctgtttggatattaraaacagcatgtaccatgtctgggtattcttttggtccctttaatcaagattactcaaaaagtggccacctttaaatgatccgtggatcatttaaaggtggctttagagcccccaataacaacaggctctaaaggtcatacaacatgcaatgatatgggtcctgccagtagggccaaggaagcctgtcagaactacagatctcacttactcctactgagattgaacctgtgataacaagatactgttacttggatgt

SEQ ID NO: 450273 - DNA, 588 bp, Homo sapiens
tatattttatagttttcttgtctgtgtagtttcaaaagaaagtctttttctccaattatcttttcctgaagtcatcccaaagaatccaacttagttttctttaacaacattttctttctttttcaatgaataattcatctgtatgttatttaattagacaaatttaaaacaagtacaattgacataaatagttcaggatcaaacgattgatgcttcgaaaacgggcacttcattcagtgggagctagggagtggaagcacatcagagcctacctgcttggtcccaagacttcctcttgttttgtgagtctatgtttcaaagcaggaatggagagcacttgctagacaattaattgatgatgagttgaaagagactctattttacaaagtttttgtttgagttaccagtacygtaaaaggaacagcattttattgtgaattattcatattgtctattaatactaaccaagttttcaggtacttgtctttccctcactaaaatgtactgacataaattggcctagcaatagagggcattttgtgtttgctaaatgatttggttcaaattatttcatatgcaactgaaaaa

SEQ ID NO: 450274 - DNA, 589 bp, Homo sapiens
agattggtggtgagattatggagttggagcagtcctcagcgaagtgtaatttttctctgggacctctcaacatcctgctaaaaggcaagaacataggtataattttgcagggagagcacagtggaagcatcatttcctttttgtataaaacagagagatagtgatgatttttttttggattgattgataatttcagtatgtgctcatggactcatgcctataatcactttggatgggtgaggtgggaggattgcttgaggccaggagttcaagagcagcctgggcaacatagggagaccctgtctctacaaaaaaaacctgaaaccccaaaacaaaagaactccaatttgaatatacatgcacacattggttttgttgtggcctgactcacattgctatcagcaaaaggcccagtctgacccttggggccctgtacaatcttatgaaagaatgatatggcagagtagcaactccctttccttctcacctttctgtggtgttgatcatagaggaattagggaatttctgggctacggagtcctactgttctagaccctaaatttaarggcacgcattatttcagaacata

SEQ ID NO: 450275 - DNA, 569 bp, Homo sapiens
tccttcttttccattttgtagtggatattgtaaggattattaactgtattccattacaattgctctaggaatagttatttgataaaataaacatttacatatctgataagtacatggttgtccccatatggattgagaagtaactggagggaaatcaaccttgacattcaaaagtgctacttctctgagtctcctaatattataaggttgaacttcaccagcttatcagcctgcaggaagtgggttgtcctgggtctacggaatggaaagctgatagataaacctcaggtgtattctcttctctggtcacatctgttttcaaatttttctcattgggctggatagaaagtctatagaaagttaatcstctggatgtctatgttgaaagaacctctttttaaaacttttttaaattttttttattttcataggttttggggggaatgggtggtgttttcttacatgaataagttatttagtggtgatttctgagattttggtgcacccatcgcctgggcagtatacacagtacccagctggtagccttttatcccttatccccttcctat

SEQ ID NO: 450276 - DNA, 439 bp, Homo sapiens
cccctactactactattgatgctatgaatatcatccaggggctttaggatccacctgctcattctgcccatcactgcaatggtcaatacrcaagcaaactgccttgaggcccagggactggcctgcctggattaactaccactagttcccatgtacactgcacaggaggtccaaggaatggcacgaccagaccattgttgccatcactgctgcccaagggctggcctgtctggaatccctctccctagcaaaaccttattacagtctccactaacagctgcagcctaagccactggagatctcatggacaccactgaggctgattatagccaatgaaataatacagagactaaactgcatccatccagaatcaaagccaaagcactctatccacccaacactataattacatctataggaaaaagtctttccctacaaa

SEQ ID NO: 450277 - DNA, 577 bp, Homo sapiens
tgtatgatctcacttacgttatatgtgaactctaaaaaaaattaaactcatagatacagaaagcagaatggtagttgccaacaaatgtcttttctccatatatgtgttaaactccagcttaacttcaggcttgagagccaaccctattctatgtgattgcaaataagaaaatacactgaattgttaaaatgaaccttccccaaatgcactattatagagttattttgattttgtgcctgacctaaatgggttattaaacaaatattcataagtcaaaatgggtgaatattatcattaggaaagattctggcaccataacatgttcaatataaataagtgcaatgttgaattcacatataacataagtgagatatctagaaatattaaacatttgaaagatatattgcacagcctcctgacttgttaaattatgatcccacagaacagaatatgatgacctccacaggamaattgatgcactgatgtctacttaacacaaatatatttataaagagtaaataatgtgataaccagtaataccattttattaatttgttattacacagagtagaaatat

SEQ ID NO: 450278 - DNA, 611 bp, Homo sapiens
tgaaattttacaaaatacaccaatgttctatctcatactctaatatgtttagtttcttcaaagtttggataatgttgtcgaattaattagaaccttcaatcaaaatatcagttayacaaatcttctcacaagagccacaatagtggctctcagccagacatgctttgcattatgttactataatatatcatacaattataaaattactcatgtcttggaagacaaaaaataaaattaaggctctggtcactttcttttaactttgaaaagcaccatcccaggcttatgaatatgtatatattttcagatttttgtaacttatatatctgtgccaggaagtgatagagtctaaagtttatggatactaatatttcttcaacaaaacaagcattattttctacaagattaatgtaattcttttttatttctgcctagtattttagcatttcactttctttaatgtcatgtatgtaattacttttaaaaagggctatctaatttaggtcatttcccagtgatgcatcagtgagcataaattgctattcaattgtgtcagctttcatctctgagtcaatgacccacagaactaccatattacaaatgtaaaacga

SEQ ID NO: 450279 - DNA, 611 bp, Homo sapiens
tgaaattttacaaaatacaccaatgttctatctcatactctaatatgtttagtttcttcaaagtttggataatgttgtcgaattaattagaaccttcaatcaaaatatcagttacacaaatcttctcacaagagccacaatagtggctctcagccagacatgctttgcattatgttactataatatatcatacaattataaaattactcatgtcttggaagamaaaaaataaaattaaggctctggtcactttcttttaactttgaaaagcaccatcccaggcttatgaatatgtatatattttcagatttttgtaacttatatatctgtgccaggaagtgatagagtctaaagtttatggatactaatatttcttcaacaaaacaagcattattttctacaagattaatgtaattcttttttatttctgcctagtattttagcatttcactttctttaatgtcatgtatgtaattacttttaaaaagggctatctaatttaggtcatttcccagtgatgcatcagtgagcataaattgctattcaattgtgtcagctttcatctctgagtcaatgacccacagaactaccatattacaaatgtaaaacga

SEQ ID NO: 450280 - DNA, 611 bp, Homo sapiens
tgaaattttacaaaatacaccaatgttctatctcatactctaatatgtttagtttcttcaaagtttggataatgttgtcgaattaattagaaccttcaatcaaaatatcagttacacaaatcttctcacaagagccacaatagtggctctcagccagacatgctttgcattatgttactataatatatcatacaattataaaattactcatgtcttggaagacraaaaataaaattaaggctctggtcactttcttttaactttgaaaagcaccatcccaggcttatgaatatgtatatattttcagatttttgtaacttatatatctgtgccaggaagtgatagagtctaaagtttatggatactaatatttcttcaacaaaacaagcattattttctacaagattaatgtaattcttttttatttctgcctagtattttagcatttcactttctttaatgtcatgtatgtaattacttttaaaaagggctatctaatttaggtcatttcccagtgatgcatcagtgagcataaattgctattcaattgtgtcagctttcatctctgagtcaatgacccacagaactaccatattacaaatgtaaaacga

SEQ ID NO: 450281 - DNA, 495 bp, Homo sapiens
taaattgctattcaattgtgtcagctttcatctctgagtcaatgacccacagaactaccatattacaaatgtaaaacgattctgttaacacatagtgattttctagtttccttaatcattaaaaagagagagagagagcatttaatgtatttccttcgttctactcagctaacccatcaaactaagctgtctsttttcagggccaaatttcttgtcactctctacaatgtctactgtgcattcacatctcaattatttatcactaagcttctatcctgatacatatcccaaactactctttcagagatcactctttagttaacaaacactttgaccctttttcattctcaatcttaggatacagtcattttttaagataatgtaggtaggtggttacatcgcattcatacagcctgagattcaaaatatagctttgttaatttctgaatagttgcccttaggaaactctgagacttattactttgtgcaactaat

SEQ ID NO: 450282 - DNA, 636 bp, Homo sapiens
taacccatcaaactaagctgtctgttttcagggccaaatttcttgtcactctctacaatgtctactgtgcattcacatctcaattatttatcactaagcttctatcctgatacatatcccaaactactctttcagagatcactctttagttaacaaacactttgaccctttttcattctcaatcttaggatacagtcattttttaagataatgtaggtaggtggttacatcgcattcatacagcctgagattcaaaatmtagctttgttaatttctgaatagttgcccttaggaaactctgagacttattactttgtgcaactaatgcttctattttaaagagatgttctgaactctaaatgagataaggtacttaaagtacttagtaaagggtctagtgcatattaatgacagctattaatactagacatgacatctctttttaatatttctgaaccctcattttctgtgaaatatatgacaccagttctcactccacctcccagattactcctttttagtctctttggtcatcattccttcctcccatttcttatttttgcatatttctcaaagattttttttgttcactggcactcctggttcatcttatcctctttctgggaacaaaaactt

SEQ ID NO: 450283 - DNA, 555 bp, Homo sapiens
ttatatgttaatactgcttgttgctatttaggttttccaggagcagaggctgagatgaaatttggcgtgcaggatatttattagagataaacatgtctagcctgcaactatattgcagggtartcctgcaagagttctggagctttatagttcatcagagtgttatatgttggactgaaatgtccaaaccttcatttctctgtatttatataaccaccataatcagtcataaaatgggctactccaggaaatgagcacccgcgggcaaattggctttctagagctgaagtaaaggctgatgttgttaacaatttgaggatatatgctgttagagcggtaattcctccctcaaagaggggtcttactactaatatcaatgtccaatacagtccacccttttagcttgggtctacttctttatatccattcagggtgcagcttctctaggattccagtggacctctatgtgggggaaacaaggaaatagtaagtcagttgaataacctacagccctagtcattgcagcatttcactggtctcagaatcacaaccaat

SEQ ID NO: 450284 - DNA, 578 bp, Homo sapiens
tggtcttcctcatataaaagttttttttctctcaatcccattatgcagatgctgtggctgtaggatataactgtagtgtcatatatacaagctttcatctgagttattttaatctgtcatatttatttttggcatctcatctttatattaaggtataatttaaagttaaatgtgcagatctgggttttgagaaatatatgcactcatgaaactcacctccagaacattctgtaatcattcttctcatttaatcccaagaagcaatcactgtgtcagaggtgtatgaaccagagtgactccatcttgaataggggctgggtaaaataaggctgagacctgctrggctgtattcccaggaggttaaggcatctttagtcacaggatgctataaggggtcagcacaagattcaggtcacaaagaccttgctgataaaacagcatgtggtaaagaatctggccaaatcccacccaagccaagatggtgatgaaaatgacatctggtcaccctcactgctcattatacactaattataatgcattagcatgctaagggacactcccaccagcaccatgacagt

SEQ ID NO: 450285 - DNA, 648 bp, Homo sapiens
ttgaggatatatgctgttagagcggtaattcctccctcaaagaggggtcttactactaatatcaatgtccaatacagtccacccttttagcttgggtctacttctttatatccattcagggtgcagcttctctaggattccagtggacctctatgtgggggaaacaaggaaatagtaagtcagttgaataacctacagccctagtcattgcagcatttcactggtctcagaatcacaaccaataattattgccttaatcaattgccatcaattctagattttctttatcctcagctatcacctctgctagtcttagtgacattactagtggtagaaatcagatttttatccctgaggggcttgagtctctgattgccatgcctttctcaagtacttacccattttgtgctataattattggtcaagagaacgtagtacatcaattgaatgtacatatacttttctctgtcctcattgagtaacagtagtcttacaacctggtgattattatcagttaccactgccaaagtgatgrttcctttgtttgactttttgtccttagaaaaggaacttgcagtgctcagggggccaccttaatttttaagtccaatgtgaattttgctgaatttcctagcagaagtatgtcaa

SEQ ID NO: 450286 - DNA, 566 bp, Homo sapiens
cccacttctacctataccctaaaggtaaccagtttcattaatctctatgttacctattgtgggagtttctttggttcaaaattgcagatatatataggcatgttcttatttctccttttttcttacacaaaaagtaggaagcaatatattaggggtaagcaaacrttttctgtaaaaagccagataagaagcaatttaggctcattaggctaagaagcaaatcagtggtatgtagatgcttatgtaacaagagagaaagaaatgcaaaaattgtaattgataaaattataaatacatatataattttattatatattaaacttgcatacaatttttttgcaatacatgtctgctaagtagaagaatggtattgtttggacagatgtttttcaattaaggttccaagttagcgtttctattaaataaattgcaaaacttcatgtgttacttctgatctgtaatcgcattttacataggtcatctttgaacatgcctttgctcatagataaattctgctatcaatctatgagcatatggttttaattgagaatattttccatttagag

SEQ ID NO: 450287 - DNA, 631 bp, Homo sapiens
tgcactcacaaattcttattttttttccacacaggttccttctttcttggtcaaacatggtaggcagaagtcctttaagtctcagcccttttggtcttaggttccatgcaatctaccagtgtccatgggcttcaccattctttttttttttttttttttttttagtaactaaatcaaaatgatatatcttgttcccttttgcatttgtccctatacatatttaatctcctcctaaaaataagtggcaaacatgattcttctgtacaattcagggattcatcagttctgggaccataacctccaatactatcaatgttacacactgatttctcacagcagaagcacattgctattggcaaatacatagccagagcyattgggctggagttaaacaaagtgcttatcatggagttaggaggtaaagggagtgtatctgtctgaaggcttcctacagtacatttttttttcagcggggggaaaaagaacattatgcagttgtttggtaaaaagagctaccaccacattacactgtctggagaaagttaaaacataatgctacttaagaaacagtccagaaagcatgaaataatcatactcatatgtacaacacactccttaatgtttataaaac

SEQ ID NO: 450288 - DNA, 631 bp, Homo sapiens
tgcactcacaaattcttattttttttccacacaggttccttctttcttggtcaaacatggtaggcagaagtcctttaagtctcagcccttttggtcttaggttccatgcaatctaccagtgtccatgggcttcaccattctttttttttttttttttttttttagtaactaaatcaaaatgatatatcttgttcccttttgcatttgtccctatacatatttaatctcctcctaaaaataagtggcaaacatgattcttctgtacaattcagggattcatcagttctgggaccataacctccaatactatcaatgttacacactgatttctcacagcagaagcacattgctattggcaaatacatagccagagctattgggctggagttaaacaaagtgcttatcatggagttaggaggtaaagggagtgtatctgtctgaaggcttcctacagtacatttttttttcagcggggggaaaaagaacatyatgcagttgtttggtaaaaagagctaccaccacattacactgtctggagaaagttaaaacataatgctacttaagaaacagtccagaaagcatgaaataatcatactcatatgtacaacacactccttaatgtttataaaac

SEQ ID NO: 450289 - DNA, 582 bp, Homo sapiens
taatttacactgttgataataatgcacctagcatccctatgttagtaacaacatctgaacttctaaaaaacaatgtatttctatcagaaatcctttataatattgagtgataaatgtgtaatttttctttcacatttgacaaagccaaatgtctaatctttcagtgacttagtagatattatacttcagaaaagagataactttattattgtaaagrtattttgcagagagataggcaagaaaatatatatgaaagcaactatttgtctacaaacaacagatgtcagacacttctaacttattacctgaatcagaaatatccaggcttaagaatagtatttacaccacactttgcgtttgcttatacaactaaaatatttcagtggaacgtagttagctatctgatcataattagagtcagaattttttgtatacacagactcaggagctacaggtatgccctgtttttccatggcatatgtttgtggttgaaatggacaatgagaacacatggacacagggaggggaatatcacacactggggcctgtcaggaggtggggggctaggggagggataacatt

SEQ ID NO: 450290 - DNA, 295 bp, Homo sapiens
tttgaacacttttgttctagaacacttttatccaataaggttttgcttaacatatttttcagacaggacaatagttattgtttagtctkgagctaactgttctcttttaaatattcttcccaatagcctgtgaattataggttttccagaatgtttggtagaaagaagcaaacaggaataaaaattttaaaataataataaatatatttttagaaattctgtgtcagtaatcaggtaccatttcctcttattttgtgtgattttcttcttggccatagatacttttgtcaccaca

SEQ ID NO: 450291 - DNA, 589 bp, Homo sapiens
cagtataataaaataaatagcatttatatatactagcaacgactagttgaacttttttttcaatttataaagacagtactacttaaaatggtacaaaaaaaacttgaaatatgtagattttaagctaagaaaatacatgcaagatactgctcaaaactaacaaatactaatgaagaaaatcaaaatgttcctaaataaatgaakttatgccatatgttggaattagaagatatattatatttaaaatatcaactctctgaatatttataatatagattcagtataatccaatcaaaatacacgagggttttattttggtagatactgacaagttcatttaaaaaattgtattaaaaaagcaaaagaaatataatagctataaaaatttcagagagagagggggtggagcaagatacccaaatagaactctttaggaattaccctcctgccccagaacactaaatttaacaactatacacacaagaaagcaccttcataagaaccaaaaatcaggtgagtaattatagtacctggttttagcatcatatcaaggaaggagacactgaagagagtaaggaaacacagtctt

SEQ ID NO: 450292 - DNA, 589 bp, Homo sapiens
cagtataataaaataaatagcatttatatatactagcaacgactagttgaacttttttttcaatttataaagacagtactacttaaaatggtacaaaaaaaacttgaaatatgtagattttaagctaagaaaatacatgcaagatactgctcaaaactaacaaatactaatgaagaaaatcaaaatgttcctaaataaatgaatttatgccatatgttggaattagaagatatattatatttaaaatatcaactctctgaatatttataatatagattcagtataatccaatcaaaatacacgagggttttattttggtagatactgacaagttcatttaaaaaattgtattaaaaaagcaaaagaaatataatagctataaaaatttcagagagagagggggtggagcaagatacccaaatagaactctttaggaattaccctcctgccccagaacactaaatttaacaactatacacacaagaaagcaccttcataagaaccaaaaatcaggtgagtaattatagtasctggttttagcatcatatcaaggaaggagacactgaagagagtaaggaaacacagtctt

SEQ ID NO: 450293 - DNA, 646 bp, Homo sapiens
gaagaaaagagggagacagacataatgatgcatcaagtcaacatgtatcaacgtcaatgttttaactaacattcttcaataagtttggatattccttcattcaccagcgtacattcatctaaataaataactataggaaactttggggacacatttgtagaattattactattgaagtcttttccccggtrttgcagaattcttcctccaggagacccagcaaaatcttcagtcaataggttctaggtatgaaaactggcaagatttgggggacttttgtttttgcttttgggggattaacttccctagctacctcatatttcatccctgattttgttttgatagtgtccttattggctgcccatttactttttcccctaggggcattaagtttattatcccatctctataactttccatagagaaaattatagtccttatctgcaatttaaacatgctgctaatattaaatttcagtccatctatcttctgacaggtaaacattgcattttgccattattgttttgggatcctattatccccattcttgtcagctaatctaattctgtaatggttacttccactgaggaatgagagtcaccattgacttctgagttatgattaacacccttctcaccagcatgtt

SEQ ID NO: 450294 - DNA, 593 bp, Homo sapiens
atcatttttaaggttaaaaaggattgtacaagtagagataacatgtacacgaatacatggaattacggtagggcatagagttgtctcattttgaatagaagccatgggaagaggttgcaagagaagagaagaaaggtggtaggaaatcaattcaagtaatagactggctgcagattatgaattacactgtgtctaatgctaaatttttaggactaaactattgacatagtggtgagcactcagtaattgttaagtttattctttctaatttcagtgaaaacagcacggaaagatgatgttwtaaaaaatgatatatttgaggtcttccgtgattgcatctaatttaatccttagcaatgtttgtagaataattactattttagcttagtatgcagtggttctcagagctgacagaatttgtttcaaaataagctttcagggctcatcctcagagagaattatgccaagagttttatcagtgtgcttcattttttgtttatcatctatgagactccatggaaagtctcagggatataggatattaagagcttacatcattatcagtaagactttcctttacatttctagagcct

SEQ ID NO: 450295 - DNA, 593 bp, Homo sapiens
atggcattaccactcagaacattatttcaattactctgaatttgattggacatatttttaatggaatgttggattggaaagtgttgattggacatattcctagtggaatgttggattggaaagtgatgacaacgtagcttgtgaataaactgaccaattagtagtattgctgtactggctagwagtaatttctccattttcctttatctttgtctttcttcctgagaatgcaaataggagaaaatcaatgtgttttcctcctacaaattctgtgcatggacagtgcggttaaatcagaaactcctgccagggaagcaaagtctgagttaacaggagtaatacagggagcaaaaggcaaatgtggcaaataggggaagacagataaatgaataataatgacacagggaagtatatcatcattctgtttccaaagagcatttgaattcaagagaataacactccactctttctctcaaatggagtgtcaacaatcgggaatcattcagattttctgaccctcaaggaagtaaattggattatagttaacacacaaattttaccagagcattttttatctggatgttttggagaaa

SEQ ID NO: 450296 - DNA, 593 bp, Homo sapiens
atggcattaccactcagaacattatttcaattactctgaatttgattggacatatttttaatggaatgttggattggaaagtgttgattggacatattcctagtggaatgttggattggaaagtgatgacaacgtagcttgtgaataaactgaccaattagtagtattgctgtactggctagtagtaatttctccattttcctttatctttgtctttcttcctgagaatgcaaataggagaaaatcaatgtgttttcctcctacmaattctgtgcatggacagtgcggttaaatcagaaactcctgccagggaagcaaagtctgagttaacaggagtaatacagggagcaaaaggcaaatgtggcaaataggggaagacagataaatgaataataatgacacagggaagtatatcatcattctgtttccaaagagcatttgaattcaagagaataacactccactctttctctcaaatggagtgtcaacaatcgggaatcattcagattttctgaccctcaaggaagtaaattggattatagttaacacacaaattttaccagagcattttttatctggatgttttggagaaa

SEQ ID NO: 450297 - DNA, 593 bp, Homo sapiens
atggcattaccactcagaacattatttcaattactctgaatttgattggacatatttttaatggaatgttggattggaaagtgttgattggacatattcctagtggaatgttggattggaaagtgatgacaacgtagcttgtgaataaactgaccaattagtagtattgctgtactggctagtagtaatttctccattttcctttatctttgtctttcttcctgagaatgcaaataggagaaaatcaatgtgttttcctcctacaaattctgtgcatkgacagtgcggttaaatcagaaactcctgccagggaagcaaagtctgagttaacaggagtaatacagggagcaaaaggcaaatgtggcaaataggggaagacagataaatgaataataatgacacagggaagtatatcatcattctgtttccaaagagcatttgaattcaagagaataacactccactctttctctcaaatggagtgtcaacaatcgggaatcattcagattttctgaccctcaaggaagtaaattggattatagttaacacacaaattttaccagagcattttttatctggatgttttggagaaa

SEQ ID NO: 450298 - DNA, 486 bp, Homo sapiens
aaaaacttttctaagtactttgcaaatattaacacatttaatcctcatagaaaccctaagaaatagacactcatcatcccattttacaactgaggaaactaaggcacaaagaagctaaagactgttttagcttttccagccagtgagtggctaatctagcttcaaacccagaatatcatctgcctccagaatttgttttcaatctctttctttacatcaattgtttctcgttttgtcttccctcgatcttccatccccatttagcttctcacatagtactcatagctaaattcgtatctcccttcttttagctttccactttggmcatgcatgactctgtatctatttttctgaagtaaaaggtcacttcacttcaggatattttcatagctacttatctaatcctccagccaaaagggtggtttggtgtgacaaaacacacaaaccagaggattaaaaaatcaacattgatatatagggtgatgc

SEQ ID NO: 450299 - DNA, 474 bp, Homo sapiens
aagtaacaaatatttaagcctcatttgaggttcagatggccatgtgactctgcttgtatcaatgaggcttacagacaaattagcatgtctactaacaaaattatgcaaaatgaatttctaattttaaaaagttataaaacataaaaacagataactmtgcaaaggtaaataatcaagatgatgttgttttctaaaagacaaataaaaaaatctgaagttttatttatacaagtaggaatatttcaagttgaggtgccattttgtaggagattcttaaatgactgacttcagtgctttccctgttgaggcacttgtgatagctttaatacctgtatttggcagcattaactgaaggggaacttttacatcaaatctataaatataataaaggattactttggaaaaactaaactcactaacagaatataaatattttgcctgtaacatttgatgtagtagaattatatctatttt

SEQ ID NO: 450300 - DNA, 582 bp, Homo sapiens
caaatttgtaaactttcttaaaacgtgttacgaggttttttttgtgtgattttggtttttttctttttagctcatcaattattgtaattgttagtgtattttatgtgtggcccaagacaattctttttcttccaatgtggcccaggaaatcccaaaaaattagacacccaaaaaattaatccccaaaaattagagatttactctatatctccacttcctataactccaagcccacctttctctatgtgcattttttctaaccscatatttttgtcatatccattctatgttgaaaccccttaccacctgtaacctacccagggactaagaacacatatcttacatgtgctgtagaacttccatgttcctcctgtgatgatatcattccaaagtacctgagaggaatatgaatcaggagagcaaccattagactatatatatcactttaggaaagtaacagagcacaccagagccttgggacagggatacataaacctaagtcccagcatagtaatcatctggagacagaatctattctgtcctggctcttaaaaggaagcatatatgaaacaaaactggtgt

SEQ ID NO: 450301 - DNA, 582 bp, Homo sapiens
caaatttgtaaactttcttaaaacgtgttacgaggttttttttgtgtgattttggtttttttctttttagctcatcaattattgtaattgttagtgtattttatgtgtggcccaagacaattctttttcttccaatgtggcccaggaaatcccaaaaaattagacacccaaaaaattaatccccaaaaattagagatttactctatatctccacttcctataactccaagcccacctttctctatgtgcattttttctaaccccatatttttgtcatatccattctatgttgaaaccccttaccacctgtaacytacccagggactaagaacacatatcttacatgtgctgtagaacttccatgttcctcctgtgatgatatcattccaaagtacctgagaggaatatgaatcaggagagcaaccattagactatatatatcactttaggaaagtaacagagcacaccagagccttgggacagggatacataaacctaagtcccagcatagtaatcatctggagacagaatctattctgtcctggctcttaaaaggaagcatatatgaaacaaaactggtgt

SEQ ID NO: 450302 - DNA, 608 bp, Homo sapiens
attaattaaaaacaatgactacaattcatgctttccatatttcccccctaatgaacctgccacatgttcatgcataycctattcttcacccatacactgaagtccttttactttgccaagccctctgaagtcccatggccttgtttataccatttacttcatgtattattttgtgcttctcaaactggtgtgcatattcctgcaatttggaagtacaaaatggagtgtagttatttaatgaagtggcaggataaacataaagttacatcttagaatatcaatttatgcccaatatttgaataaaaaagaataatttagcatgtaaataattttaaatatttataaacaacttcagatgcataatataatacacacaaagtgtgaatcattttcaaagtgaaaaatgaaattttcataaaatttcaaacttgcagggagctatctgagctaaactttgacattgttctatgattggggtactttggaggaagattgtaaagagctttgaaatttagtggaataagtaagggctttgaaagtacccagattttgttatgatcaaggatctatttctcactaattataagataatttacctttctgaattt

SEQ ID NO: 450303 - DNA, 608 bp, Homo sapiens
attaattaaaaacaatgactacaattcatgctttccatatttcccccctaatgaacctgccacatgttcatgcataccctattcttcacccatacactgaagtccttttactttgccaagccctctgaagtcccatggccttgtttataccatttacttcatgtattattttgtgcttctcaaactggtgtgcatattcctgcaatttggmagtacaaaatggagtgtagttatttaatgaagtggcaggataaacataaagttacatcttagaatatcaatttatgcccaatatttgaataaaaaagaataatttagcatgtaaataattttaaatatttataaacaacttcagatgcataatataatacacacaaagtgtgaatcattttcaaagtgaaaaatgaaattttcataaaatttcaaacttgcagggagctatctgagctaaactttgacattgttctatgattggggtactttggaggaagattgtaaagagctttgaaatttagtggaataagtaagggctttgaaagtacccagattttgttatgatcaaggatctatttctcactaattataagataatttacctttctgaattt

SEQ ID NO: 450304 - DNA, 608 bp, Homo sapiens
attaattaaaaacaatgactacaattcatgctttccatatttcccccctaatgaacctgccacatgttcatgcataccctattcttcacccatacactgaagtccttttactttgccaagccctctgaagtcccatggccttgtttataccatttacttcatgtattattttgtgcttctcaaactggtgtgcatattcctgcaatttggaagtacaaaatggagtgtagttatttaatgaagtggcaggataaacataaagttacatcttagaatatcaatttatgcccaatatttgaataaaaaagaataatttagcatgtaaataattttaaatatttataaacaacttcagatgcataatataatacacacaaagtgtgaatcattttcaaagtgaaaaatgaaattttcataaaatttcaaacttgcagggagctatctgagctaaactttgacattgttctatgattggggtactttgsaggaagattgtaaagagctttgaaatttagtggaataagtaagggctttgaaagtacccagattttgttatgatcaaggatctatttctcactaattataagataatttacctttctgaattt

SEQ ID NO: 450305 - DNA, 644 bp, Homo sapiens
tacatcttagaatatcaatttatgcccaatatttgaataaaaaagaataatttagcatgtaaataattttaaatatttataaacaacttcagatgcataatataatacacacaaagtgtgaatcattttcaaagtgaaaaatgaaattttcataaaatttcaaacttgcagggagctatctgagctaaactttgacattgttctatgattggggtactttggaggaagattgtaaagagctttgaaatttagtggaataagtaagggctttgaaagtacccagattttgttatgatcaaggatctatttctcactaattataagataatttacctttctgaattttagttcctttatttataaaatgataatagctgggcgtggtggcatgcacctgtaatcccagcaactcgggagtctaaggcacaagaatcacttgaacctgagaggcagaggttgcagtgagccgagacagcaccactgcactccagcctggacaagagagtgagtgagactctgtctcaaaaataaataaataaataaaataaataaaaatagaatgatgataataatgaattaataattcagcaggttactctgagcattaaatatgaygatgagtgtaaagtgcctagcacatagta

SEQ ID NO: 450306 - DNA, 546 bp, Homo sapiens
gcaatatgatataaaataaaattgttctttcagtgggtttatttcttgaacatgcattttaaatggggacttcattgaatataataatgacatccactggtaacgtggagtaaattgatttccctcagtcacttaaccaactgaactataattacaagtgcagtccattaactgcaagggtttaaattctttcttctgtatatattcaacaaggtatgtgtttgaaattgtcatactaaacaactgttaaagaaaatcattgctaggaataaaaattcttcattcattggggktatattctgaaccaggttttatgaaatagaaaagaacattactggatagaatacctgaaaagaatattcctttttaatctcaatgcagccagaagcatgtttattctttccaggataaacagatgttttggcgtatttgtttgctttaaaaatggcacaaatatatttcaaagaagagctttgtgacattacgattcacaaaacagccccatagctatgatctgggtatttaaataatacaagaattttcatc

SEQ ID NO: 450307 - DNA, 582 bp, Homo sapiens
aagtgaccatgtggcagtcttaacttacaggttaattaaattattatgtctcatagaggaagcattccttcctttggaatgctagatggtctaaaccatccagaccaataaggtatgtggtaatgaggaatggaggtaaaaatttygctagtggatcactagaaataatagtaagtgatgccactttcattttcactgtgaagcaggttcactgtgcattggttacaaacttgtttgggtctgctgagacagaataaaatcataagcaacaggttacttgaagcagatgtattactcacagataggcagcaaagtacagcagaaacctagaattcattgtgaacaggtgactcaaggctcaggaaagctgctcggggcagatagagtcctgactatgcatgtcttatttgcacctcagctgagagaccaaggaaagcagcccactgtagggtttatacctcagggcaacctgatgcactaggcaaaagctttgaaggacatctttttatgagggctgcaacagagcccatgttgtttctgtcagccaacccttatctcagggcgttgcattcccagcacatt

SEQ ID NO: 450308 - DNA, 582 bp, Homo sapiens
aagtgaccatgtggcagtcttaacttacaggttaattaaattattatgtctcatagaggaagcattccttcctttggaatgctagatggtctaaaccatccagaccaataaggtatgtggtaatgaggaatggaggtaaaaatttcgctagtggatcactagaaataatagtaagtgatgccactttcattttcactgtgaagcaggttcactgtgcattggttacaaacttgtttgggtctgctgagacagaataaaatcataagcaacaggttacttgaagcagatgtattactcacagataggcagcaaagtacagcagaaacctagaattcattgtgaacaggtgactcaaggctcaggaaagctgctcggggcagatagagtcctgactatgcatgtcttatttgcacctcagctgagagaccaaggaaagcagcccactgtagggwttatacctcagggcaacctgatgcactaggcaaaagctttgaaggacatctttttatgagggctgcaacagagcccatgttgtttctgtcagccaacccttatctcagggcgttgcattcccagcacatt

SEQ ID NO: 450309 - DNA, 587 bp, Homo sapiens
ccttccacagctggcactggtgaacacagtgatgctcagaaatttgaagacaccaggaactgcagagccccaaagagggtgtcacagtcctggtttggggagctcctaggtctgagctccccaaagggcctcagatcttctttccrtctctcttctatcttttcttgttgcctgtaacatggtgagcaaggtgcatgtttcagccctgtttgtgttacagctctttcagccccgtcatttggcaggtactgagttcttttcccacatccaggaagaatgaggtatgtgaacaagtggagggtaagcaaggcaaagagatgctttattgagtgacagaacagctcagaggagatccacagtgggtagctgctttttgcaggcaggtcatcccatcccctagctgagtctggggtttttatgggcttcagaggggaggaagtacatgttgattggtccatgggtgtccatctgtaggcccagagaaagcaccataaattctcattctggtccacagaattggcagcacagccccaggccttaggctgtactcggcctgaaggtggggttttactgggaaccaactcctt

SEQ ID NO: 450310 - DNA, 587 bp, Homo sapiens
ccttccacagctggcactggtgaacacagtgatgctcagaaatttgaagacaccaggaactgcagagccccaaagagggtgtcacagtcctggtttggggagctcctaggtctgagctccccaaagggcctcagatcttctttccatctctcttctatcttttcttgttgcctgtaacatggtgagcaaggkgcatgtttcagccctgtttgtgttacagctctttcagccccgtcatttggcaggtactgagttcttttcccacatccaggaagaatgaggtatgtgaacaagtggagggtaagcaaggcaaagagatgctttattgagtgacagaacagctcagaggagatccacagtgggtagctgctttttgcaggcaggtcatcccatcccctagctgagtctggggtttttatgggcttcagaggggaggaagtacatgttgattggtccatgggtgtccatctgtaggcccagagaaagcaccataaattctcattctggtccacagaattggcagcacagccccaggccttaggctgtactcggcctgaaggtggggttttactgggaaccaactcctt

SEQ ID NO: 450311 - DNA, 477 bp, Homo sapiens
attatctataacatatgataaaaattagcatataaaatatgtattcaatattttaatatgattcaaaatgtctatgtctgttttacagcaacttcagatttttaaaggctgttaagagtgtggtaaagtttcttattactrttgtgtctttatccattgtgttaacccagctctggaatagtcagaggtctagtagaggaattacaagagctgcaatggccaccagtctcatggtttcttcatggctagtcttataatttctcagtcttatctttgtgtttttgtcatttttactcccatttgaaaatgattttcactgaacatctgttttcagtctatgccactgtcccacaaaagttaatgtctgatatagacctaatgttgttgttcatgagatttagttatatgaaatataccatttggctctctgtactatttttttcttaaaatatattttgcctgaaaataattttgccg

SEQ ID NO: 450312 - DNA, 477 bp, Homo sapiens
attatctataacatatgataaaaattagcatataaaatatgtattcaatattttaatatgattcaaaatgtctatgtctgttttacagcaacttcagatttttaaaggctgttaagagtgtggtaaagtttcttattactgttgtgtctttatccrttgtgttaacccagctctggaatagtcagaggtctagtagaggaattacaagagctgcaatggccaccagtctcatggtttcttcatggctagtcttataatttctcagtcttatctttgtgtttttgtcatttttactcccatttgaaaatgattttcactgaacatctgttttcagtctatgccactgtcccacaaaagttaatgtctgatatagacctaatgttgttgttcatgagatttagttatatgaaatataccatttggctctctgtactatttttttcttaaaatatattttgcctgaaaataattttgccg

SEQ ID NO: 450313 - DNA, 582 bp, Homo sapiens
tttgtgtttttgtcatttttactcccatttgaaaatgattttcactgaacatctgttttcagtctatgccactgtcccacaaaagttaatgtctgatatagacctaatgttgttgttcatgakatttagttatatgaaatataccatttggctctctgtactatttttttcttaaaatatattttgcctgaaaataattttgccgtctttattctctttttctaaatctccctgctgtattaatccccatcaattatatctaaactttctggtttggttaagtcttgattttgttaagtctcttgggtaagcagcctttacttaaatttctttaaaaatgttttactatgtaaataagacacattaattttagataaatggaatatgcaaaaaaggaatctctataattatctcacaccagagagtaacactgtttatatatgccatattctttcagatgtcttatgtatatatccttattgctcattatgtcaaaagtaaaatcattttagcactgctctgacattaatgagaatgcctgtaatatttcactagtaaataaatacaaagcattatagtcaa

SEQ ID NO: 450314 - DNA, 582 bp, Homo sapiens
tttgtgtttttgtcatttttactcccatttgaaaatgattttcactgaacatctgttttcagtctatgccactgtcccacaaaagttaatgtctgatatagacctaatgttgttgttcatgagatttagttatatgaaatataccatttggctctctgtactatttttttcttaaaatatattttgcctgaaaataattttgccrtctttattctctttttctaaatctccctgctgtattaatccccatcaattatatctaaactttctggtttggttaagtcttgattttgttaagtctcttgggtaagcagcctttacttaaatttctttaaaaatgttttactatgtaaataagacacattaattttagataaatggaatatgcaaaaaaggaatctctataattatctcacaccagagagtaacactgtttatatatgccatattctttcagatgtcttatgtatatatccttattgctcattatgtcaaaagtaaaatcattttagcactgctctgacattaatgagaatgcctgtaatatttcactagtaaataaatacaaagcattatagtcaa

SEQ ID NO: 450315 - DNA, 581 bp, Homo sapiens
aagtttttttcatttaaaaatctatgaagttctctagttgagggtttytgtttgtttgcttggtttaaccagtagctactaagtttctctaaatttttatctgctagaggcaaagttgttactctaattatctttgtacctttggaacctaggaaataccttggagaggcaactaaataaatgtttcagacttgtattaaatttaggatatttttcagggcttacaaaagtagaataggaagttaaaaaataaatttttgcaaataacttgtataattaaaaattatatttataaaaataaatttaaatatttgttatagaatcaatatatatcattattacatatactagacaggcacacctatgcacacacatctgaagtgcaatcttgccaacccattggaatgttgagggtattttattttctctgaaagttacaggtgaaacactatcaaaataactttttctttggagtattttttctggtaaaaaattaagtactttttttttttttttgagatggagtgttgccctgtcacccaggctagaatgtagtggcacaatctcagctgactgcaacc

SEQ ID NO: 450316 - DNA, 581 bp, Homo sapiens
aagtttttttcatttaaaaatctatgaagttctctagttgagggtttttgtttgtttgcttgktttaaccagtagctactaagtttctctaaatttttatctgctagaggcaaagttgttactctaattatctttgtacctttggaacctaggaaataccttggagaggcaactaaataaatgtttcagacttgtattaaatttaggatatttttcagggcttacaaaagtagaataggaagttaaaaaataaatttttgcaaataacttgtataattaaaaattatatttataaaaataaatttaaatatttgttatagaatcaatatatatcattattacatatactagacaggcacacctatgcacacacatctgaagtgcaatcttgccaacccattggaatgttgagggtattttattttctctgaaagttacaggtgaaacactatcaaaataactttttctttggagtattttttctggtaaaaaattaagtactttttttttttttttgagatggagtgttgccctgtcacccaggctagaatgtagtggcacaatctcagctgactgcaacc

SEQ ID NO: 450317 - DNA, 481 bp, Homo sapiens
cctctataactcaattttctgttacgttctactaaacacattctttgctgagacagtacctcctatataacatatccaataaacttcaataaataatctccacttcttatttttattaaaaatgtctcaccattaaaagcactaaatcttctacagcatgttagcatcttacagcacattacagcctgttttgtgtgtttatggagcttctagaccattttcccttccttctacttagaacatcctggccttaaattcatcttcaaccacttcacccactgtttttacttccttagacattcttccaacctttacctgaatattttrtctcctggatcactgtcacactctctaacattgctgctttggttttctctcccaggtacaaaatataaagtttttctatggataatctaatgagtcaagcttaagtcttgggaatatgaggcacacgaaaaagaaaggtttatgtaagaatctc

SEQ ID NO: 450318 - DNA, 481 bp, Homo sapiens
cctctataactcaattttctgttacgttctactaaacacattctttgctgagacagtacctcctatataacatatccaataaacttcaataaataatctccacttcttatttttattaaaaatgtctcaccattaaaagcactaaatcttctacagcatgttagcatcttacagcacattacagcctgttttgtgtgtttatggagcttctagaccattttcccttccttctacttagaacatcctggccttaaattcatcttcaaccacttcacccactgtttttacttccttagacattcttccaacctttacctgaatattttatctcctggatcacygtcacactctctaacattgctgctttggttttctctcccaggtacaaaatataaagtttttctatggataatctaatgagtcaagcttaagtcttgggaatatgaggcacacgaaaaagaaaggtttatgtaagaatctc

SEQ ID NO: 450319 - DNA, 578 bp, Homo sapiens
cttcctttgcaccctttttccaaaaagaagtggaagttgagtttccttgaagaaggattctggaaagaaagatcacttccaggacacagggaattcaacattgtctcctcattcactgaactccagacccactagccttcttatgctgtcttataagacatttgttaggcatactctacctcagaatgctcacacttcctgattacccttcaggaaattattatctcctagatatctgcacggcttgcctccacaactcatccaggttttagttaattatcacctaatgctagaggcatttatggaccattttctattatgtagccactctacccctcctcatttactctctaacctcttatcttgtagttagccttcataggattcatctccatctgttttattttgttcttatgctgctaataaagacatactgagactgggtaatttataaagaawagaaggtttaatggattcacagttccacatagctggggaagcctcataatcacggcagaagatgaaggaagaacaaagggatgtcttaaatggtgacaggcaagaaagcttgtgcaggg

SEQ ID NO: 450320 - DNA, 574 bp, Homo sapiens
caatgggagttccctccccaccgtctagagccctgaggtggttccaagcatctggtgccctaccagagccatgtgtcacatggctcaacatacagagattccctgcagtaagcagggcttccctgcagctttcttgtttctgtgcaaaacayctctttcttattgagaaaatgccactaaatgtctgtgactgcaaagctattgagaattgaagaaggagagaaaactgcccttacttcctagtaccctgaactttgagcaatgttaatgggagttatgtgagcataaaagaaatgcaagggcagcaggattgcaccctcagtggtttccaaagagcagcccgagctgcaagacacattacaagttcgttgagtagtgtcagaggctatttcagggctgaatacatttaccatgtggctgtttcacttacaccagctgtctccaaagttgctctactactgtgaactgaagattatttttgctatcaaaaataattctctttcactcagaaatgagtcttgtaatgtgataggctttttttttctggatttttgtgctgtgatgaaaagagtat

SEQ ID NO: 450321 - DNA, 558 bp, Homo sapiens
ttgctagttccacttttttggtatgtaaataattcttttacctttaatttcttattctgattctgtttgatttatgtagwatctcaacattttaataaaatcttttgttaacttcatcaatagtcactcaaaaacagtcattcaatttttatctaaaccatacacagttgaaagaggaaaacaattttgttgaaagtagcttttgatttaaaactctaagaataacaacctgaatttagtagaattttcaatttcaaagtgacaatgtacagccaactctctcccaaaaggtttaatccttctccctctctctttttcatctgcaataaataaataattgaaatccatccgatactacatatgaaaacttcagtttctggaaaaatcaaggtttttccctggatgattctaagaaatacatatggctagtattggatataaagtttctttctagagacagttcttgggggtagacagtgtgtgtgtgtgttgataggattgaaatttaaatcggattactcattccactagcatcctgaataagtaaaagcaagtcaa

SEQ ID NO: 450322 - DNA, 530 bp, Homo sapiens
gctgtgttttaatattttggaagtggatagaagagttcaaaagtgagtaggttggggtttcaaatttttaaaatatttcacctactttcaaacctagcaaaagaaagaggagatgggaacaagatagaattgtcataaagaatcctaaggaggaaatgatgactatgtgaggacacagactttaaactattcttaatattctttctggtcaccagtcaactcggtttttctatcagtattctgatcattgcccctggggctaaataatttggaggatatcctataattctgccatttctcaaccaccatcattagagttgtttagaaaatacaccagaactctgactgaatgcatcacctgtttctctttcataaatatcactaaagtttgatcagattcctgacctacagataaacaaacaaatgaaaacaatatgaacacaaatgarctcaaacaacaatgaaaacagtaacaataacaaaacaaaactacaaagttggaggtaggggaaggaatgatggaaaaaaac

SEQ ID NO: 450323 - DNA, 566 bp, Homo sapiens
atggattctaacaggctacacatagatactatgtacagtctcctaaaacattaagattacactgaatgcttagaaatgaaarccattgaataactctcctctacattatatttgtggtcactgatgataaccataccattaagaaacaatatgaaaataaaatttagtcagatacttttttttttgagagacagagtcttgctctgtctctcaggctggagtgcagagacatgatctcagctcactaaaaccttccgctcccaggttcaagcaatctcttgcctcggcttcccaagtagctaggactataggcatgcaccaccacgcccagctaatttttgttttttttagtagagacggggtttcactatatgttggccaggctggtctcgaactcatgacctcaggtgatctgcccgcctcagtctcccaaagtgctgggattacaggtgtgagccaccacatccagcctagtcagatacttttaatggtgttttgttttctcatatataatccttagaggaatggttgtgatgctggcaaactgagtagaaattttttaaagt

SEQ ID NO: 450324 - DNA, 228 bp, Homo sapiens
ggtgaactctggtatgatctctaaaggcagtttcgtctacagaaggagagacctcatctaatgtcatctccttctaacggccgtcaccaaaattataatyaaagccaaggctagtagctcctaatctgatgtctccacatcccaaggagactacaaaggaggtaggtaatatagataagtgatgctactttcagtattggaaatcacctaatgggaatcacacaccta

SEQ ID NO: 450325 - DNA, 645 bp, Homo sapiens
attaggactcagctatgttcaaggcctcatcgagcccaacatacaattatcatttgcattttctgctacaatcaaagaaaacgcattgtgtgctattagtggccattgcaagaaggaagatgctgttttcaataacaggaaatcaagaacaaacaaaataatcatcttccatttaaaaaaaaaaagcctacagaaaagtgaaaaggacagggtcctaaaaacatctagtgatgccaataaaatggaatgttttttaaaaagtgatttgtctcactgaagctgcagaagggtatcccacacttatatattatgtgactgcactaaaaacagacgcttttggtgcactgagcgttacaaaaaggcagaaagctcacaaatagatgcaattttaggtatgggaataaaatgrcataaagaaactgaccttgttatcagtttagctgtagaggtgaaagataaggatatttcaaggaaaaacctattacaggcagtatatagagtacttgggcccagttgaagcccaggtaatgtgatgatagtaatgataatggtccactgaatgctaacagacaagtatatatagttacagctgtacatggatatcacaaccttacacacaaattctagaaagatcattgtgaaaat

SEQ ID NO: 450326 - DNA, 645 bp, Homo sapiens
attaggactcagctatgttcaaggcctcatcgagcccaacatacaattatcatttgcattttctgctacaatcaaagaaaacgcattgtgtgctattagtggccattgcaagaaggaagatgctgttttcaataacaggaaatcaagaacaaacaaaataatcatcttccatttaaaaaaaaaaagcctacagaaaagtgaaaaggacagggtcctaaaaacatctagtgatgccaataaaatggaatgttttttaaaaagtgatttgtctcactgaagctgcagaagggtatcccacacttatatattatgtgactgcactaaaaacagacgcttttggtgcactgagcgttacaaaaaggcagaaagctcacaaatagatgcaattttaggtatgggaataaaatgacataaagaaactgaccttgttatcagtttagctgtagaggtgaaagataaggatatttcaaggaaaaacctattacaggyagtatatagagtacttgggcccagttgaagcccaggtaatgtgatgatagtaatgataatggtccactgaatgctaacagacaagtatatatagttacagctgtacatggatatcacaaccttacacacaaattctagaaagatcattgtgaaaat

SEQ ID NO: 450327 - DNA, 645 bp, Homo sapiens
attaggactcagctatgttcaaggcctcatcgagcccaacatacaattatcatttgcattttctgctacaatcaaagaaaacgcattgtgtgctattagtggccattgcaagaaggaagatgctgttttcaataacaggaaatcaagaacaaacaaaataatcatcttccatttaaaaaaaaaaagcctacagaaaagtgaaaaggacagggtcctaaaaacatctagtgatgccaataaaatggaatgttttttaaaaagtgatttgtctcactgaagctgcagaagggtatcccacacttatatattatgtgactgcactaaaaacagacgcttttggtgcactgagcgttacaaaaaggcagaaagctcacaaatagatgcaattttaggtatgggaataaaatgacataaagaaactgaccttgttatcagtttagctgtagaggtgaaagataaggatatttcaaggaaaaacctattacaggcagtatatagagtacttgggcccagttgaagcccaggtaatgtgatgatagtaatgataatggtccactgaatgctaacagacaagtatatatagttacagctgyacatggatatcacaaccttacacacaaattctagaaagatcattgtgaaaat

SEQ ID NO: 450328 - DNA, 565 bp, Homo sapiens
aactatgaaatttgaggctctgtttgcaagcawagtcacttcctaaatgagttacagcatatgaggagctgcttcctgaggcttcccagaagctgcttccttttctcaacttgctgacactagcactgagctcttttgaaagtcaatattctgtatttatgtggtacttctagaagacatgaaatgttctgcagactttatcatttcccagcagtgcaaataactggcaagtggaactgttatctttctggttcacaaatgggaaactaggacgaatagagaaaatagggttttactgatttgcatatagcaccccctgccctggaaaaacaagttacaaaaatctacaaaaaatgaaagaattgggaattgggtgtgaatattactattgaggtctgaggaatatgaagtaagcccgtcaaaattgagtagaaaaagtgtgagaagcagtccctgacatctggtaggggccttggcacttgcaggaaggccttggcattctgttgcacataaacaattgcacagcatgtcaacagcagataagactgctctgactgtggtaatt

SEQ ID NO: 450329 - DNA, 565 bp, Homo sapiens
aactatgaaatttgaggctctgtttgcaagcatagtcacttcctaaatgagttacagcatatgaggagctgcttcctgaggcttcccagaagctgcttccttttctcaacttgctgacactagcactgagctcttttgaaagtcaatattctgtatttatgtggtacttctagaagacatgaaatgttctgcagactttatcatttcccagcagtgcaaataactggcaagtggaactgttatctttctggttcacaaatgggaaactrggacgaatagagaaaatagggttttactgatttgcatatagcaccccctgccctggaaaaacaagttacaaaaatctacaaaaaatgaaagaattgggaattgggtgtgaatattactattgaggtctgaggaatatgaagtaagcccgtcaaaattgagtagaaaaagtgtgagaagcagtccctgacatctggtaggggccttggcacttgcaggaaggccttggcattctgttgcacataaacaattgcacagcatgtcaacagcagataagactgctctgactgtggtaatt

SEQ ID NO: 450330 - DNA, 602 bp, Homo sapiens
gttcatgagatgaaaataggtaagttactgatgagaagctcaattattcctgacatagggcttgaaagacatttgatayggtttggctgtatcctcacctaaatcttatcttgaattatagttcccataatccccacatattgtaggagggactcagtgggaggtaactgaatcatgggggtggctacagccatgctgctgttctcatgatagtgagtgagttctcacgagatctgatggctttataagggtttttttctcgctctgcttgacacttctccttcctgttgccatgtgaagaaggacgtagttgcttcctcttccaccatgattgtaagttttctgaggcctccccagtcctgcaaaactgtgagtcaattaaacctctttcctttataaattacccaatcatgggtatttcttcagagcagcatgaaaaatgaactaatgcaacatttttctaacctgtcttcatcaggaagatctgtttgatgtagcaaacagcatcctcaacaacatccttatagtacaagtcatgtgggttattttaaaaatgagacttattctcagtgctgcactctcaagaatgataggcaagttac

SEQ ID NO: 450331 - DNA, 594 bp, Homo sapiens
cctgacataacttccccagttcccaaccaatcagcactgaaagcccaagaagctattaactacaaattcctgtgttgagggagggggcagggacttcaccagggtcctgcatgtgcagctaggctcaaattttatcttatagtaaccttttcctcattttaatagtaaaaaaaaaaccctacrtggagattttatatgctaatgatacatgcaatgcatgttggagcatgtagatactgagcacatgcaccagctcatcttttgcatacttgacctcaccagtattttacgactatgtatatacagctcccataaaaggaattcctcttaaggtgctagctgctgtctctccctcttagagtccactctgcctcttagagtgtactttgctttgcaattaacttctttgcctacccttactttggactcactctcaaattcttttgtgcagtgaagtcaagaacttgaaccagcccaccaccaacagtatgacctaagcttggaattacaagccatcacatttgccgtattcattagaaacaagtgactagatcccattcacattcaaggcctaaggactagccaaggatgtgc

SEQ ID NO: 450332 - DNA, 581 bp, Homo sapiens
gcacctggcttattcaaaacaagcaagcaaagaaagtggcaaaaagatagaaatcagtcttgcattgaggcagattaggtaaggttaggaagccatactgacttgtccccttgtgtgaagccctgtgggcttcttttacagtgggtttcttttgctagcaccctaatgagtcagcacctaactcttttgaaaggtaagcactcctgcaggacaccagcagactgccagatggttacacgttcctgatacctagtacagtccaggaaagagaaaaaaaataagagcctcttattcctgacataacttccccagttcccaaccaatcagcactgaaagcccaagaagctattaactacaaattcctgtgttgagggagggggcagggacttcaccagggtcctgcatgtgcagctaggctcaaattttatcttatagtaaccttttcctcattttaatagtaaaaaaaaaaccctacgtggagattttatatgctaatgatacatgcaatgcatgttggagcatgtagatactgagcacatgcaccagctcrtcttttgcatacttgacctcaccagtatttt

SEQ ID NO: 450333 - DNA, 615 bp, Homo sapiens
cacattttgcctgaaattccctgctggccgattgaacccacctggacttcctgaccaggggcacggattcttaacctctggtgcaggggcctggctaggagaggtctgcacagttggacaggtgcaaagtgacgctttgtcagtacccggcgttgagattccttgtggggacaagcagctcctatggcgttatcccattttaartccaagttttcttttccttctagtcctcgggctccacccggggagctgtgcccagacagcagaagggaaggatgtcacttctgagatgaggttcagaaaggcctgggctcctgtcctggctgctctctcccactccctgatgagcttgctggatgaaagctcctgtcaggctgtggggcgtcctgtggagaagctggcaagaaactggtgggggccctttccacctatagccagcaaggaactgaacccagccagcgtccacctgagtgagctcagaggtgggcctcagccccagttgagccttcggatgaggtcacagccctggtccatggtgtgactgcagcttcaggagggaccttaagccagaggtgcctggctaagcttcccgcagattgctgccccacaggagcc

SEQ ID NO: 450334 - DNA, 615 bp, Homo sapiens
cacattttgcctgaaattccctgctggccgattgaacccacctggacttcctgaccaggggcacggattcttaacctctggtgcaggggcctggctaggagaggtctgcacagttggacaggtgcaaagtgacgctttgtcagtacccggcgttgagattccttgtggggacaagcagctcctatggcgttatcccattttaaatccaagttttcttttccttctagtcctcgggctccacccrgggagctgtgcccagacagcagaagggaaggatgtcacttctgagatgaggttcagaaaggcctgggctcctgtcctggctgctctctcccactccctgatgagcttgctggatgaaagctcctgtcaggctgtggggcgtcctgtggagaagctggcaagaaactggtgggggccctttccacctatagccagcaaggaactgaacccagccagcgtccacctgagtgagctcagaggtgggcctcagccccagttgagccttcggatgaggtcacagccctggtccatggtgtgactgcagcttcaggagggaccttaagccagaggtgcctggctaagcttcccgcagattgctgccccacaggagcc

SEQ ID NO: 450335 - DNA, 615 bp, Homo sapiens
cacattttgcctgaaattccctgctggccgattgaacccacctggacttcctgaccaggggcacggattcttaacctctggtgcaggggcctggctaggagaggtctgcacagttggacaggtgcaaagtgacgctttgtcagtacccggcgttgagattccttgtggggacaagcagctcctatggcgttatcccattttaaatccaagttttcttttccttctagtcctcgggctccacccggggagctgtgcccagacagcagaagggaaggatgtcacttctgagatgaggttcagaaaggyctgggctcctgtcctggctgctctctcccactccctgatgagcttgctggatgaaagctcctgtcaggctgtggggcgtcctgtggagaagctggcaagaaactggtgggggccctttccacctatagccagcaaggaactgaacccagccagcgtccacctgagtgagctcagaggtgggcctcagccccagttgagccttcggatgaggtcacagccctggtccatggtgtgactgcagcttcaggagggaccttaagccagaggtgcctggctaagcttcccgcagattgctgccccacaggagcc

SEQ ID NO: 450336 - DNA, 516 bp, Homo sapiens
ttacattctcttggtatacataaacctgttaggtaacaggttacatatatattaaagtttaataggcaaagttatcagtgtgtgagggttttggctattcaccattctatgcatatgttaatattgacattttttagccattttggttgtaatacaatgctatttgcgtttgatttgaatttgaaattttctaatagtcaatgcctcagtctcccgagtagctgggactacaggtgagtgccaccacacctagctaatttttgtatttttagtagagacaggatttcaccatgttggccaggatggtcttgatctcctgacctcgtaatctgcccacctcagcctcccaaaatgctgggattacaggcatgagccaccgygccctgccaaccttttcttatacctgttgaccatttatatgtcttctttagtcttttgcttatttttgaacactaatttttgtttgttgccattgccttgtggagtttatgtttgaaaaagtaaccccttatcaga

SEQ ID NO: 450337 - DNA, 602 bp, Homo sapiens
gaatagatagtttggaaatgttaaggaactgaaaagcagctccaaaaagtctgccttcatctattataagcagacttctactctggctatcataaactcactaatactctttttttgtttgtttgtttgtttgtttctgcaagcaacaactacaaccataagccaggatcaacagtttaaaaatcagttggtatmtttaggaattgcaaattataacactgagatatttctacacacgtatcaaaatgactaaaatccaaaacactgacaataccaaatgccgacaatgatatggagaaacaggaactcttgttagttactgggagaagtgcaaaacagtacagacatgttagaagacagtttggtcctttcttactgtagtcatcatactcttaccacatatttcagtaatcatagttcttggtatttaagcaaatgaactgaaaaattacatctacacaaaacctgtacacaaatatctatatcagatttacgcataattgctaaaacttggaagcaaccaagattcctttcagtaaatgaataaatcagcattctatgacacatccatccaatgaaatattattcagtaataaaaataa

SEQ ID NO: 450338 - DNA, 582 bp, Homo sapiens
ttgtctgaagcttacgtgtcaattgagggagacaaagtttacatggagacaaaggaataaaatagtaattttagacattaagtgcaatctagaaaataaatatatgagaatgaatggaaatyatccttgatcagatattcatggaaggtcatatttgcttttgattagttatcttaattatttatctctcggttgaaatatgtgtttgtttgttaccattatgttgcctttaagaaattgtaagaagttgatataaattttgtaccataaaaatttcttaaagtagcacatatatttgggtaactttggaccaagttatatacattacacacatgtggacataacacattaacagagttcacaacgaaaagctcattaatgaaagaaatgttgctgaaacctcaatcacttatattcagagattattattgcttttaatcacttaaattgagatatcccttttcatggtgccaacatggatttctcttctcactcataattctccatttcctaatcctagtctgcacaagaaaaattggattctcttaccaacgcttctctggttccttttcagctcaatgt

SEQ ID NO: 450339 - DNA, 589 bp, Homo sapiens
tgattttattcaagctatttatcctttcttttccatccattttcttagtttggaaggtcctaaatgtatttttatgacatatttggaatatatgtatctatatctatctctgtatgtgccttatgtgcttttcatggtttactgaaaaatgaaataaaaatgacctcctgtccataacatcattggccagtggtattttttcctagtagattctaccgcagcttcttctgagaggaaaatactgataactctcatcataaaggtgttgtcaacctttactcccatctctaaaactcatttgcaatcttgcgctaaacctaatttcaacaacactcatattgatttktgtgtgtgtgtgtgtgtgtgtgtgtgtgtgtgtgtggtcatgttttgcaatatccgtggtaggaatcttacatcatgagctattagaacatttctgaggaacctcattctataggacattttttatttagtattcaatatgaactttatcaaatctgaatattttagtgagtgtcataaaactggcaaacataaattaattttaaaataaatgagcatacatttgaaaaaaattgctgtagtc

SEQ ID NO: 450340 - DNA, 633 bp, Homo sapiens
actgcaaccatctccagaaagatggaaagaaaaaaaaatccaaattgatatggtttggctgtgtccccaccggaatctcatcttaaattgtagctcccataattctcatgggttatgggagggacccggtgggagataattgaatcatgaaggtggtttcccccatactgttctcatggtagtgaataaatctcataagatctgatggttttataagaggtttctgctttcacttcttgctcattctcttgctgccaccatgtaagaagtgcctttcgcctcctgccatttattccacagggaataaaatatttagcyggcatggtggcttacaaccataattccagcactttgggaggccaaggcaggcggatcacctaaggtcaggagttcgagaccagcctgaccaatatggtaaaaaccccatctccaccagggatatatttagcaatatcaaactgctgggattggtgattttcctctgactagggctggtttaaatgctccctctgtggacaggcatcagttgagtttggtcttgttttcctttttgctctaacaggacagcactgagttcaatgcctcacaattgttgtgttctccctccctcatggtccatagatggtctccgga

SEQ ID NO: 450341 - DNA, 599 bp, Homo sapiens
gaaggtttaaactcaacatcagtagattaaaaaaacatggcttttaaatgtggcatgcactttagaatactggtcatcacctagatggaatctttttttccccctctaaaatgtatagttatcataaaaataatttattttgtataattatctaattaatttttctagctttgaatgttgctcacaatctgtattcatggcagcataaaccattggtatcgtgccatactccagtctgtgttcatttagtgaaagtacatacttttaacaccatttgtaactgatctttcacattgactgttgtcattctagaagatgggctatgatagctgccaaaaaaattaagcattttaggaccaagaaaattcaaagtttgagaaccatgtmgagtacgtattataacattttgtatttttgtctgtatgagacaaaactgtgtgaaaattaatgaggccaaaggaacagaggcaaacttatttagttctcttctcctcctgcctttgccccagtaatgccttctctgattcctcatccattgatgtggacttttttcttttttgttttttgtctcattatttctccctagcccgtgaaatgtt

SEQ ID NO: 450342 - DNA, 587 bp, Homo sapiens
acaatgcttaagctacaaaccaaaatgtttgatgtacaaagaaccaagtaaatatgggccatttccaagtaatactatagccaccagagggggtccctgatatgacccatattttagaaccatcagaagattttaaaagagytatgataaatatattcaaagaggtgaaaaaacacacatcttaaaagaaaataacagaaaatcttaacagagaaatgaaaattatatgaaagaaccaaaggaaatgttagaataaaaaatactaaaaaaaattatgggcttaatagctttataaagtgacagagaaaataatcaataaacatgaaaataaattaatgatttttgccatctgaagaaaataaaacattgagaaactgaacagaatctcagggacttgtgaaataggaagcacatccccatctaaatattaaaatctgaagagaaagaacaaatcttaaaagtagcaagagaaaaatgacactttaaataaagggcaaaaattaaattgattaacagtttatttctcaccagaaattatggaggcagaagataatgaaataatattttaagtttatgaaagaagaata

SEQ ID NO: 450343 - DNA, 505 bp, Homo sapiens
acctagctgagtttatgacaactatttctgttcctttggttgtgttattctcattgccaatcatcttgttatttttgtaacacatatcctggaagagaaaaggtgttcttaacccaccyaaatcacagaaaaatttagggtctggtgatggtgggaatatatcaggcttcaccaagatgctataaaaatggactggaagaatctatgttgattgttttaaattaactgtaaacaatacaactattgtttactgaaatcgtataggtaagcatactcacttttctcactgcaaaacacaatttacttttgcctaacccaatcaagaaattccagaaagaaatatttctcattgtctcccattatcaaggttcccagaactcttatatttcctccaggctgtacaagctccacatacacggcctttggcaacccactggagtaatcaatgtcacctttcaaaatgttccaatttcaggagctttcattctacatcattttcagataa

SEQ ID NO: 450344 - DNA, 505 bp, Homo sapiens
acctagctgagtttatgacaactatttctgttcctttggttgtgttattctcattgccaatcatcttgttatttttgtaacacatatcctggaagagaaaaggtgttcttaacccacctaaatcacagaaaaatttagggtctggtgatggtgggaatatatcaggcttcaccaagatgctataaaaatggactggaagaatctatgttgattgttttaaattaactgtaaacaatacaactattgtttactgaaatcgtataggtaagcatactcacttttctcactgcaaaacacaatttacttttgcctaacccaatcaagaaattccagaaagaaatatttctcattgtctcccattatcaaggttcccagaactcttatatttcctccaggctgtacaagctccacatacacggcctttggcaacccactggagtaatcaatgtcacctttcaaaatgttccaatttcaggagctttcattytacatcattttcagataa

SEQ ID NO: 450345 - DNA, 592 bp, Homo sapiens
ggccccacctccaacactgggagttacaatttgacatgagatttgggcaaagacagagatccaaaccctatcagcaaaatttcttccagtagaaaatctaagagtagaattgtcgaactgcagtatatatataactgaaargacaatgataaaattattttccaaattatttgtttaggccatttttttcaaattgatgataataactttatataaattctaaacactactaattacacttttcttcaaatactttaaaccccaacagaggtgtttaagttgtttattttcatctctttcttgttgacttttgctctgtgtgtatgttaagaaattcaacttattcacttcttaaatatgtgccttcaaattattaataacactacaagggataaaacagactttaaaaccatgagtcaagaaatttcatggaatagatgtgtattgtttgccaaatacatcaagttgtatatatttattatgtacagccatttgtatgtgaaaatacatgaatagaatactgaaaaaaatttcatagactgaaagtttattttgcccatatagcaccaatcaaaagccaaaaaaagcgtgt

SEQ ID NO: 450346 - DNA, 584 bp, Homo sapiens
gcacccggccttaaatgcctattaaaatacattcaaactctgaaattctgagattcagacctgaaaaattaaactgtttctaaatgagatcatattattttctggcataaaaacaaaaaagactgttaacatggttgttactttactaatagaaactttccaagattgttcctggggcatgtgtttcttacacatgaacatacatatttgtgtgaatatgtctttgtttatgtgtgtatgagtaattgctatatttaaaactattctaaagattttatttttatcctgatgggactctattttaaaacacaatgatttgcaggtggcagccacatttatcttatcttttgtgttgtaaatgtaacatttattgtagaaaatatgaaagcttaatttagattgaaaacaaatcaggccataacttaatcttcacttctataagttttattgaagtagaagcaaagccaaaatgcatatttgttttgttaaattgstaagtgtatgaatttgattctttttaaatttatggttattcatattcctaggtggataactgttttttatgtatatacagaggaaatcat

SEQ ID NO: 450347 - DNA, 586 bp, Homo sapiens
tatcttatcttttgtgttgtaaatgtaacatttattgtagaaaatatgaaagcttaatttagattgaaaacaaatcaggccataacttaatcttcacttctataagttttattgaagtagaagcaaagccaaaatgcatatttgttttgttaaattgctaagtgtatgaatttgattctttttaaatttatggttattcatattcctaggtggataactgttttttatgtatatacagaggaaatcatacctgatatagtttgtggaaaatgtagcactttgtttatatctgctgcctaaatgtgtgtatttttatctctgtctaaaatggttttattatcatattaacttaattaaacaattcaaaaacattaaatatacargtaaaatagaaagcaaagtactataaatatgacagctgtgtagttgtaataagttctcctttcccagaaaacatcctgggatttattatacaaggtcatgtctggaaaaaaagattaaatattgcaggaccattacagtctaccatagctgctccttgcacttttatttaaaggctacatgattgacacattttattagctag

SEQ ID NO: 450348 - DNA, 586 bp, Homo sapiens
tatcttatcttttgtgttgtaaatgtaacatttattgtagaaaatatgaaagcttaatttagattgaaaacaaatcaggccataacttaatcttcacttctataagttttattgaagtagaagcaaagccaaaatgcatatttgttttgttaaattgctaagtgtatgaatttgattctttttaaatttatggttattcatattcctaggtggataactgttttttatgtatatacagaggaaatcatacctgatatagtttgtggaaaatgtagcactttgtttatatctgctgcctaaatgtgtgtatttttatctctgtctaaaatggttttattatcatattaacttaattaaacaattcaaaaacattaaatatacaagtaaaatagaaagcaaagtactataaatatgacagctgtgtagttgtaataagttctcctttcccagaaaacatcctgggatttattatacaaggtcatgtctggaaaaaaagattaaatattgcaggaccattacagtctacmatagctgctccttgcacttttatttaaaggctacatgattgacacattttattagctag

SEQ ID NO: 450349 - DNA, 609 bp, Homo sapiens
tgctcaccggagccgcaaacttcttggctcaagtaatccatccgcctcaacctcctgaatagctaggactacaggtgtgcaccaccatgcccagctaatgttttaattttgggtggagacagacgggagtcttgctatcttgcccaggctgatttggaactcttggcttcaagtgctcctcccacttcagcctcccaaagcactggggctgcaggggtgagccacagcaactttcctttaataaaacacattttctctattgtcaatgtattgtgtgaaggcacagggcattggttgttggtgaagataatgttacctatagatgtaggtacaatgtacctacatctaaatatgcacatatttcttcagtcgacttcttactcaggagatagagagtattatcaacttctttaagaaaggaggaatttagtgactatttaataaatgcccctcctggcactggaaaggtgttagtcatcatttttccyatgaaagtatgttaaaacatctagtaagttgcctggcatatgttaattgctcaataatggctaggaaaacttccatctgaaaaacttattctgcaggaatttcaaacatattaccaaaagt

SEQ ID NO: 450350 - DNA, 481 bp, Homo sapiens
aagattatatttcaatatacaacttctgtgcaaccaaaaaayaaaacgtcacagtaaaatgaatgagaaaaaacatatttgcaattctagacaaaatgttaacatctttagtcataaatgaacttttcagaaatcagtacaaagagattaacattacaaaggaagtgaaaataaaaggaacagaggaaaatggaatagcagaaatgagttataaggctatatgaagatgatatacttaacattaaaagttgagaaagcaatttcattataaatgacattatcgatcctcacaaatattgatatctgatgtttgtacagctttaagaatgaagaatgatcaaatactggggaaacctactctagtcaaggggggtttatccaaaaatgtagatttttgcataaacttggccctggcagttccaaaccataggaatcactccaacaaagcagttggatacacacccacacacatacacataca

SEQ ID NO: 450351 - DNA, 481 bp, Homo sapiens
aagattatatttcaatatacaacttctgtgcaaccaaaaaacaaaacgtcacagtaaaatgaatgagaaaaaacatatttgcaattctagacaaaatgttaacatctttagtcataaatgaacttttcagaaatcagtacaaagagaytaacattacaaaggaagtgaaaataaaaggaacagaggaaaatggaatagcagaaatgagttataaggctatatgaagatgatatacttaacattaaaagttgagaaagcaatttcattataaatgacattatcgatcctcacaaatattgatatctgatgtttgtacagctttaagaatgaagaatgatcaaatactggggaaacctactctagtcaaggggggtttatccaaaaatgtagatttttgcataaacttggccctggcagttccaaaccataggaatcactccaacaaagcagttggatacacacccacacacatacacataca

SEQ ID NO: 450352 - DNA, 412 bp, Homo sapiens
aattgctttttttatttttactttcatttttaaaatttttaaattcaggggtacaaatgctggtttsttacataggtaaacttgtgtcatggggattggttgtacaaattattccatcacccaggtattaagcctagtacccattagttgttatttctgatcttctccctcctcccaccctctgccctccagtaggcctcagtgtgtcttcttcctctatgtctccatgtgttctcacttaaaagtgagaacatgcagtatttggttttctgttcctgtgttagtttgctaaggataatggcctccaactccatccatgtccctggaaagaacatgatcttgttcttttttatggttgcctagtattccatgatgtacatgtaccacattttctttatccagtctaccaatg

SEQ ID NO: 450353 - DNA, 654 bp, Homo sapiens
catcaacacttagcttacacaataacctttttttttttttcaaattygattaccctaaatgtgaaagaccacactaaaacctcctcaaagccctctcaggacttgggttttttatatagtacacaaatagagtaaattataatattaagaaaaatgaagagtttaagctttatcaaagtgaaaaacttttgctctttgtttccattaacaaaatgaaaacacaaatcatatgaagggagaaaatactgcgactcaatgtaaaactcaataataaacagtccaacaaggtaatggtagtggaaagtaaaatgtcactaccagttggaaaatgtttaacagtttcttaaaatgttagtaagcactgaccataaaacccagaaattccactgctaggcatttaacaaagaaaaatgagaatacattagaatcaaatacttgtacatgaatattcataatagctttaatcataatggcaaaattttcaaataacacaaacgttcatcaacaggtgaacagaaaacaaaatacactcttttcactcagcaagacattagacaagggtgaaaggagatagattattgataaaagcaaccctagtatgcatctcaaaggcattaggttctgtgtaaaatgaattttgaaagagtacatact

SEQ ID NO: 450354 - DNA, 654 bp, Homo sapiens
catcaacacttagcttacacaataacctttttttttttttcaaatttgattaccctaaatgtgaaagaccacactaaaacctcctcaaagccctctcaggacttgggttttttatatagtacacaaatagagtaaattataatattaagaaaaatgaagagtttaagctttatcaaagtgaaaaacttttgctctttgtttccattaacaaaatgaaaacacaaatcatatgaagggagaaaatactgcgactcaatgtaaaactcaataataaacagtccaacaaggtaatggtrgtggaaagtaaaatgtcactaccagttggaaaatgtttaacagtttcttaaaatgttagtaagcactgaccataaaacccagaaattccactgctaggcatttaacaaagaaaaatgagaatacattagaatcaaatacttgtacatgaatattcataatagctttaatcataatggcaaaattttcaaataacacaaacgttcatcaacaggtgaacagaaaacaaaatacactcttttcactcagcaagacattagacaagggtgaaaggagatagattattgataaaagcaaccctagtatgcatctcaaaggcattaggttctgtgtaaaatgaattttgaaagagtacatact

SEQ ID NO: 450355 - DNA, 508 bp, Homo sapiens
ggggttcacctgctttgcatcaccatcaggagcttcaaattggcactktaggtatgtctttaaaaggtctttccaatgtcctatcaaaacagcagccctaagtaatttactatgaggcatgagcagtaggtcccacaatgtcgtattctcattgaagagcagatattttggcctgtgcagcatcagtgttgtgtgggatcccatgatcgtaaaggacatattctcttagtccttgtatagtgctgctattccagtgttctgtagtcaaaaaggcaaactcttacaaaaaacacaaattgaccctgttcagaataaattactgccctttaaaagtttgaaaagccttactctgacaacttgacacaacttccggtggatttctttgagacatgtgttggaattctatacctcacaatttagattttcagtaatgggaataaccacatcagccttggtgagaggaagactacgttgctgggcctacacatagctgtacatctacttaatt

SEQ ID NO: 450356 - DNA, 508 bp, Homo sapiens
ggggttcacctgctttgcatcaccatcaggagcttcaaattggcactgtaggtatgtctttaaaaggtctttccaatgtcctatcaaaacagcagccctaagtaatttactatgaggcatgagcagtaggtcccacaatgtcgtattctcattgaagagcagatattttggcctgtgcagcatcagtgttgtgtgggatcccatgatcgtaaaggacatattctcttagtccttgtatagtgctgctattccagtgttctgtagtcaaaaaggcaaactcttacaaaaaacacaaawtgaccctgttcagaataaattactgccctttaaaagtttgaaaagccttactctgacaacttgacacaacttccggtggatttctttgagacatgtgttggaattctatacctcacaatttagattttcagtaatgggaataaccacatcagccttggtgagaggaagactacgttgctgggcctacacatagctgtacatctacttaatt

SEQ ID NO: 450357 - DNA, 508 bp, Homo sapiens
ggggttcacctgctttgcatcaccatcaggagcttcaaattggcactgtaggtatgtctttaaaaggtctttccaatgtcctatcaaaacagcagccctaagtaatttactatgaggcatgagcagtaggtcccacaatgtcgtattctcattgaagagcagatattttggcctgtgcagcatcagtgttgtgtgggatcccatgatcgtaaaggacatattctcttagtccttgtatagtgctgctattccagtgttctgtagtcaaaaaggcaaactcttacaaaaaacacaaattgaccctgttcagaataaattactgccctttaaaagtttgaaaagccttactctgacaacttgacacaacttcyggtggatttctttgagacatgtgttggaattctatacctcacaatttagattttcagtaatgggaataaccacatcagccttggtgagaggaagactacgttgctgggcctacacatagctgtacatctacttaatt

SEQ ID NO: 450358 - DNA, 591 bp, Homo sapiens
tcaaatatctcttatagaatttgtgtatttctctttccccagtctacagttacttaggtgaatgatcacacatttggagaaggaatggagggattattagtgcatatattttctgtgtcatggtatgattcttcaagaaatattagtcttttcaactgattatctccggtctgaggaatatctcagatactatataagatattgtgattttttttcagtggagcagctgatagccttgtaaatcattctctttttaatatcaaatgtatcattagacatttttgactattaattaatttttcacaaggaccactataatcaattggccactgtcataattctctttaggtcatgtcccatgctttccatttgatcccagagtctgttaaggtgattatctctgtcatacatctagtggtttagtgctgccacctgaccgccacttttccagcagcgttttatctactctactgataaggagaccagattaataaaaacatgtcttaacagctcccctggtttacttagacactggtgatttgcsgaagcttaaatattacccttctttctagttctgctcgccttatgatc

SEQ ID NO: 450359 - DNA, 430 bp, Homo sapiens
ccacgcatttacaaagccatctggtcattggaaaagttgacaataatgagcaatggggaaaggacttcctattcaataaatggtgctgggataactgtatagccatatgcagaatattgaaactggatccctttattttactgtacacaaaaatttactcaaagacttaaatataagacttaaaactataaaatccctagaagaaaacataggacagaccattctggacataggccttggtgaactatgcttccaacaaaggtctgatatctagaatgtataatgaatttaaacaattcgacaaaaaaaaaaacacaaacatccacattaaaaatggkcaaaggacatgaacagatgcttcttaaaagaagacacacacatggccaacaagcacatgaaaaaatgctcagggtaaaacagaactaccatt

SEQ ID NO: 450360 - DNA, 562 bp, Homo sapiens
gtttaatcatgaaggtgttgaattttataaaaaatcattgtttattgagatgattatgtgctttgtggttctgtttatgtggtaaatcatatttattgatttctccatgttaatccaaccttgcatcccagagataaaacctactcgatcgtgttggattagctttttgatgtgctactggatttgttttcttttcttgttgtctctctgccaggttttggtaycaggataatgctgatctcatagaataagcgagggaggagtccttctttctcagtttctggaatagcttcagtaggagtggtaccatcttcatacatctgatataatttggctgtgaatccatctggtcctgggctttttctggttggtaggctttttaaaactgattcaattttagaacttgttattggtctgttcagggactgaatttattcctagttgatgacatatcttctcaaatacagaaactcaataataaaagcaaaatggaaattttggatttaaaaattacaaatgaaattaaaagttcactagagaagttcagcagtcaatttgaaac

SEQ ID NO: 450361 - DNA, 503 bp, Homo sapiens
ttgagttctctctctgaagctgaggttactatgagtagaaatcatartatctgtgaatgagacacttctaggagcaatagtggcagagaaaaaaaagttctttgtgtaagttaagcagcattgctttcattacagaaaaacagtagttttgtctgaaagtaaaatgactggttgtttcagaatgagaaagcagaatatttagaatgaaacctgaatcaatttagaaagtcatagagaattcatagaagtttgattttatttgccatgcttaaagctagccaaagttaatgtataatttttttgtcaataaaaatatcttttgctcttttgtttgaaagttgagttgatgaaaaagtaaaattcaattttttttgttaaaatctcaaatatccatggattattgggctgccctcagtaggacattattttctatacctctgaataatctgcttaagaagcagagattctgtgtcttatcagaaagaagtcccgtgctttatgtt

SEQ ID NO: 450362 - DNA, 503 bp, Homo sapiens
ttgagttctctctctgaagctgaggttactatgagtagaaatcatagtatctgtgaatgagacacttctaggagcaatagtggcagagaaaaaaaagttctttgtgtaagttaagcagcattgctttcattacagaaaaacagtagttttgtctgaaagtaaaatgactggttgtttcagaatgagaaagcagaatatttagaatgaaacctgaatcaatttagaaagtcatagagaattcatagaagtttgattttatttgccatgcttaaagctagccaaagttaatgtataatttttttgtcaataaaaatatcttttgctcttttgtttgaaagttgagttgaygaaaaagtaaaattcaattttttttgttaaaatctcaaatatccatggattattgggctgccctcagtaggacattattttctatacctctgaataatctgcttaagaagcagagattctgtgtcttatcagaaagaagtcccgtgctttatgtt

SEQ ID NO: 450363 - DNA, 536 bp, Homo sapiens
attctctgggttaaatctgccttgatattctacaaacttcttgtacttgaatactgatagctttctctaggtttaggaaattctgttacccctttgaataaattttctacccaaatatctttctttgtctcctttttaaggacaatagctcttagatttgcattttgaggctattttctagaacttgtagctgtgcttcattcttttttatgtttgtctcttctgattatattttcaaactgactgtcttcatgcacactaattcttctgctttattaattctgctgttcagtgattctgatgattcgtcagtgtgttaatggcattgtcagcttcagaatttyggcttgattcttttgaattatttcaatctatttgtggaatttatctaatatgactctaaagtccttttccatattatgttaaattttgttgagcttcttcaatgcagctattttgagttgtctgtctgaaaagctcacgtatctctgtctctctgggattggtacctggtgcctaattttttttggtggggt

SEQ ID NO: 450364 - DNA, 536 bp, Homo sapiens
attctctgggttaaatctgccttgatattctacaaacttcttgtacttgaatactgatagctttctctaggtttaggaaattctgttacccctttgaataaattttctacccaaatatctttctttgtctcctttttaaggacaatagctcttagatttgcattttgaggctattttctagaacttgtagctgtgcttcattcttttttatgtttgtctcttctgattatattttcaaactgactgtcttcatgcacactaattcttctgctttattaattctgctgttcagtgattctgatgattcgtcagtgtgttaatggcattgtcagcttcagaattttggcttgattcttttgaattatttcaatctatttgtgraatttatctaatatgactctaaagtccttttccatattatgttaaattttgttgagcttcttcaatgcagctattttgagttgtctgtctgaaaagctcacgtatctctgtctctctgggattggtacctggtgcctaattttttttggtggggt

SEQ ID NO: 450365 - DNA, 511 bp, Homo sapiens
actcgggctacagaggttgctctgttagatggatatattgcataatggtgaggcttgggcttctagagtcctcattacctgagtaatgaatattgtatttagtaagtaatttttcaactctcaccacactcccaccatcatcccctctcttgaagtcttcagtgtctgttatttccttctgtagtccatgtgtcctcattgtttagctcccacttaccagtgagaacatacagtatttgatattctattttttagttactttacttaggataatagcctacagcctcaygcattttgctgcagtagacatcattttttttatggctgtgtaatattccatggtggatatgtaccatattttatttccaataattcattgatggaaacttagtttgattccatgactttgctattataaatagttctgctataatcatacaagtccaggtgtcttttgatgtaatgattttttttcttttgggtagatagcaagtagtgggattactggatt

SEQ ID NO: 450366 - DNA, 556 bp, Homo sapiens
agtgggattactggattgaatggtagttctattttaagttgtttgagaaatcatactgtttttcatggagactgtactcatttatatttccataaacagcatgtaagtattcccttctcactgcatgctcaccagtatctttttttgattttgataataaacattttgactggtgtgagattgtacctgcttgtggttttaatttgcatttctttgatggttagaaatgttgagcattttttaatattgttagccacttatctgtattttgagaaatgtccattcatgtactccgcccatttttaatggggcattgttttttttcctgttgagttaattgagttccttttagattctggatattaatcctttgttagatgtacagtttgccaatattttctcccattctgtatattgtctgttttctctactgaatatgtattttggtgagtagaatatctttagtttaattacgttccatttgtatattttgttttgttgcatttgcatttgaggtgttagtyatacattatttgcctatgttaatgtcaagaag

SEQ ID NO: 450367 - DNA, 639 bp, Homo sapiens
ccttgagccatacttgctccctgggttaaaactcacctgatagtgatatattatctttttgatgtacagttggatttggcttgtgaaagcaaaatgaatcttggggcccccaaatcaacaagctcaatagaagagtcaagctgagaactgcttaaggcaaacctgcctcctattccactcaaagtcatccctctgctcactgacataaatgcatatctgattgcctcctttagaaaggctaaccagaaaccaaaaagagctaatkggaaactaaaaagaatgcaaccattccaggtcatcctgtgaccttgtacatcttacatatattgattgatgtctcatgtctccctaaaatgtataaaaccaagctgtgccctgattaccttgggcacatgtcatcaggacccgctaagtttgtgtcaggggtgtgcatcctcaaccttggcaaaataaactttctaaattaacagggacctgtctcagatattctgggttcgctggtttgctagtattttgttgaggattttagcatctatgttcaacagagatattggttgtagttttcttttttagttgtgtccttgcctaattttgatatcagggtgatacctgtttcacagaatgagttaaggaagaatc

SEQ ID NO: 450368 - DNA, 669 bp, Homo sapiens
cgataggtttcagtaagattggtaccagctcttctttgtatgtttaatatctttagtttgttttgtatgccacagaaacaacaaaattttcttgtcagttacattgttcctataatgaactcttattagatattttacttttgaaatttatcattaataagttaaacaacagtgattttgagccttttatcatctaaatatagttattttgctctgatgcttccctgaaagctcttgraagtcaatgagagtaaaatgctttgactttcacaaaaagtgtatcagaaatttagaaaataactatgctacccaggcattcttagacataaacttctgatggcattttgtaagtaattttgagactataccagtagactgactcagaattttcagaactctcttggagaagcagatgtgtttgtgaggttgctacaccgatatcaagcaaaacaaggattaaatccataggactgaatgcacctgatgaatgatgattatggggtttttttggaatattgctactattttaatatattttctcgatatacagaaccatttattttctcttaagctatctataactcataacaatttagtagactaagcttcttataaacagaaatgaagcatttattatttttttacctgctaaagctcacagaatttgga

SEQ ID NO: 450369 - DNA, 539 bp, Homo sapiens
catgacaataaagttattggtataggttctataagtgtctgctcaacgtattaacatgagataactagaaattttctatgcaaattttaaattcttgcagtttccttcaatgttagctacagccctctaaatgaatgcttccaatttagttccaagattaaaacttcaatgttcagacacttattgggactgtaaggtgactcatagctggttttccaccccagcacctgaaaaagtattctcagcaaaagcccaataattttacatagttcttgaaagactcatgattgcagtagatgaagcatggtctggatttctccatgactgagccaatgtttcagccactatgtaaaatgctttggtcatgcgtgcttttataaaaatgataatcaaaactacaggtaacatccccaagaacactgaactcttttttcaaaaatctcaatgagtaatggtatgtaamcaaaatatttttactaacctcttggaacctgctagactaaatagactcaggattaaactcctggctctttaaacaa

SEQ ID NO: 450370 - DNA, 445 bp, Homo sapiens
gctggcacgtaataggggtctgaaaacaatggaaactgattttcttctaaacccttagtctttccccttctccctgtcctttcacccagcatctcmccctagaaatgtttctgtttgtttatttagaacagtcagtaggcatcaatggcattttggggccatgacattggggactttctcattggttggcaagtccctgactttgtcctcattcctcttcttcaactcagtattctgtgctatagcataaaggaaattgaagtaagaaattttgagcatgtcagtgtctaattgtacaatcagtttccaactaggctataaagaaagagatttcaccccctgccagagtgctttaggtcaatagggttgagaagctttaaatattcctctctaaggaaagatcccttgagactctacatctcacctcagactggatgttactcca

SEQ ID NO: 450371 - DNA, 612 bp, Homo sapiens
ggaattggctcacacagttgtggaggcttggtaaatccaaaatctgcaagggtagaccaacaggctggagatccagggaagagttgcagtttgagtgcaaaggcaggctgctggcagagttcccttttattctgaggagttcagtctttttctactaaggccctaacctgattgaatgagtttcacccacataatgaacggtaatttgctttactcaaattctactaatttaaatgtaaatatcatctaaaaaaccattacagaaaaatctagaataatgtttgataaaatacctgggtgctgtgtgacctagccaacttgacacatacacacacatcacaagcacttgggacctcaatttttgccatttcctctgcttaaaaatgttttccagtagctccatgtatgcttcaacagggtttgctttatgataatctccttcctgtggtggggattatgactgctctcctaacagaagcaggagagrcaaacctgacgtgggagggttaaaagtctgactcaaaggcgcactgtcacaatagcctggggaaggttctgcatggctgcctttgtctgcaagagtgctcttgtttcacactcatctccctgtga

SEQ ID NO: 450372 - DNA, 612 bp, Homo sapiens
ggaattggctcacacagttgtggaggcttggtaaatccaaaatctgcaagggtagaccaacaggctggagatccagggaagagttgcagtttgagtgcaaaggcaggctgctggcagagttcccttttattctgaggagttcagtctttttctactaaggccctaacctgattgaatgagtttcacccacataatgaacggtaatttgctttactcaaattctactaatttaaatgtaaatatcatctaaaaaaccattacagaaaaatctagaataatgtttgataaaatacctgggtgctgtgtgacctagccaacttgacacatacacacacatcacaagcacttgggacctcaatttttgccatttcctctgcttaaaaatgttttccagtagctccatgtatgcttcaacagggtttgctttatgataatctccttcctgtggtggggattatgactgctctcctaacagaagcaggagagacaaacctgamgtgggagggttaaaagtctgactcaaaggcgcactgtcacaatagcctggggaaggttctgcatggctgcctttgtctgcaagagtgctcttgtttcacactcatctccctgtga

SEQ ID NO: 450373 - DNA, 612 bp, Homo sapiens
ggaattggctcacacagttgtggaggcttggtaaatccaaaatctgcaagggtagaccaacaggctggagatccagggaagagttgcagtttgagtgcaaaggcaggctgctggcagagttcccttttattctgaggagttcagtctttttctactaaggccctaacctgattgaatgagtttcacccacataatgaacggtaatttgctttactcaaattctactaatttaaatgtaaatatcatctaaaaaaccattacagaaaaatctagaataatgtttgataaaatacctgggtgctgtgtgacctagccaacttgacacatacacacacatcacaagcacttgggacctcaatttttgccatttcctctgcttaaaaatgttttccagtagctccatgtatgcttcaacagggtttgctttatgataatctccttcctgtggtggggattatgactgctctcctaacagaagcaggagagacaaacctgacgtgggagggttaaaagtctgactcaaargcgcactgtcacaatagcctggggaaggttctgcatggctgcctttgtctgcaagagtgctcttgtttcacactcatctccctgtga

SEQ ID NO: 450374 - DNA, 590 bp, Homo sapiens
tactaagtcaaatgaatgtacacattcatctsttcttatgggaattacatccaggaaatcttgattaaaaccagatcaaaactgccaatgtaaccaagagattctcctctgaatgtagacacaataactgtcaacacacaattgtacttttcaaaaatgatgattccaaaatttgaatctaatcagagttccaaataaaaagtttacatggtgttttccttgcttgaatgaatgaaaatctattttagaatccaaatacttgtacaaaccttacctatgattccaaaattgaaattattttggaaaagtataattgttaagcaatagtttttaatctagattgagcagtcagaatgtcagaggatctgtagccccagaattattggaaatgtgctcaattcacttggccccaagcatttaaaaataggctttgtataagaagtctgtaaaacaaatttcgtggccaacatactttcataacaaaagctcaaactagaatagtgtttagactgaattgaggttttaaaatagtcaaaaatttttggttaatctctcttgaatctgttagataatctttataattttcaaat

SEQ ID NO: 450375 - DNA, 546 bp, Homo sapiens
gcatacagatttattaacatgtacacggagagaaccacagagtgactcctacaacccctcaatgggatgcaaaagcttatttaccatcttgaggttacagaaagaatgaaggctcagagcatggccaaaaaggttatggtggtaaatcaggatttactggcaagacaggtaagagggagaggagagacttggctggcaaagatggtcatgttacctaggtgaaacctcacaggtaatatccctccaaragaataaatggtaaatatttctttcagacctttaaaggtgtcaggctcccattaatctttcctagatccagtcaagggaaggtttcagagaaagcctggatgcatcaatgtaaattttctctttagatgcaaatctccacaaaagagctttgcaaggctacttccgtttgcaggccctctgaacagccgtctcaaaatatgtgaaagaagtgtctatgggagtgaaatatttttacttctttcaatagaacaagatgtgttagaaactttttaaaagtggtttctcccacagatagtt

SEQ ID NO: 450376 - DNA, 401 bp, Homo sapiens
actattactcagttgaagaaaagttagaccatgctcaagaataattgttttgagattgtcttatgccccacaacctccctgcaagtgccattttgctatgttccttaaaaccacctctttttcaaggattcaattcccttaagtctgcctgccagcctttgtctcaactcaactcaaaatggcaaggatatgacttggtttatctacccaagttgatggataaccaattagactttagtgtgactgtatatgcttctatacacactctatatacttctcaagaagtatttgtagtgtttgcctttgatctataattgtagcttgraagctctttttttcctattcagtagacttcagataactgcaagccataggcagtctctctcatttgaaaagagaaa

SEQ ID NO: 450377 - DNA, 561 bp, Homo sapiens
ttaaactcattatctttcatgatctgattaaagccattaacctaaccatccaactcataaatgcattgcagagatgggacaccagggtgcagatggactagcataatttctctcaaaagtgttcctgagtgtttgytgtcctgatctggaacaccacactgcaccttcccataccacaccatatcatattcagtcaatttgcttgctagtccaggggagatggcaggaagtttcttttaatctctggctttgttccaaaataaatattcacttgaggtgtcttaattgcagtgggaagtaactcttgtctgaaaggtattcaatttaacaggcatttgttgagagcctactatatgtccagcacaattctaggcactttggatacaacaatgaacataaacaaacaaaaaatccctgccctcatgaagcctacattccagaggaagaagaaagatgttttaaaaaatacttagaataggtcaagtatataaaatgatgaccagagtaatgaaaataaagtagaaaaaggagtgtcagggagacaggtagtggtcagtttta

SEQ ID NO: 450378 - DNA, 561 bp, Homo sapiens
ttaaactcattatctttcatgatctgattaaagccattaacctaaccatccaactcataaatgcattgcagagatgggacaccagggtgcagatggactagcataatttctctcaaaagtgttcctgagtgtttgctgtcctgmtctggaacaccacactgcaccttcccataccacaccatatcatattcagtcaatttgcttgctagtccaggggagatggcaggaagtttcttttaatctctggctttgttccaaaataaatattcacttgaggtgtcttaattgcagtgggaagtaactcttgtctgaaaggtattcaatttaacaggcatttgttgagagcctactatatgtccagcacaattctaggcactttggatacaacaatgaacataaacaaacaaaaaatccctgccctcatgaagcctacattccagaggaagaagaaagatgttttaaaaaatacttagaataggtcaagtatataaaatgatgaccagagtaatgaaaataaagtagaaaaaggagtgtcagggagacaggtagtggtcagtttta

SEQ ID NO: 450379 - DNA, 594 bp, Homo sapiens
ggtggcttgggccagaagagaagcagcgaagtgacgagaaatggtcaaatttcaaatatattttcagctaaagctgacaggatacgctgatagataggwcatagcatggaggagaataagaggagtcaagctggatcctgatgcttttggaccgagaaattgtagactttaagtagaatcacctagcaaagaaaccaaggcagatacaagatggatttatacatttatgctcacatgcaaacagaaggtgacatgaggctattttcttacgtctttcatacatcagcatgaattaactactggagtgtgtcatttaaaggacaggatatggtctgcacacatttaagtctaacaacagtaaacattattcctgtatggttaattgggagttgacatcaccctcagtcagcctgtggttgagtcttgcagggaaaatgccactgagttttctcagccttaaaaaaataatgtatgcttttatctgacctaaagtcaggaactataaaagaagaaatgcaaacttggatgcatgagcagaaatgaaataatatagcaaattactttgaagttaaggatttagtgcaaaaataagtt

SEQ ID NO: 450380 - DNA, 496 bp, Homo sapiens
ctgcacacatttaagtctaacaacagtaaacattattcctgtatggttaattgggagttgacatcaccctcagtcagcctgtggttgagtcttgcagggaaaatgccactgagttttctcagccttaaaaaaataatgtatgcttttatctgacctaaagtcaggaactataaaagaagaaatgcaaacttggatgcatgagcagaaatgaaataatatagcaaattactttgaagttaaggatttagtgcaaaaataagtttatcctgttgtaaaattttagtcataaatatctttttttcagtgtgttttttttttcttccccacagttctcggcagttttttgctctcaaatgtgggcaaggtaacaaaaatttggcttaaaaatgtgggcaaaagttaacaaaatatgtmaattatgttattcttttttccccaacaattagccttatgctttccaaaaacaatcccaatgtttatctctatttccaaggaa

SEQ ID NO: 450381 - DNA, 585 bp, Homo sapiens
gcataattgacaggcagttctcagttttactgtggatgactttaacttgagtataaccaataatgctcttaccatggatttgtgtaagatggattactgcaggtcaagggcaaactatttacatctgatggaggcagcatagaatagtgataagttcctaaataaaattgtcttggttttaaaccccaactcttttacctgttaggcttaaccttcctgagtcatacaaagtcacttgacctcaattgtggataacaacggcccttgctctaaggggytattgtgaggattaaatagtacatgtagtgttcagcctggtgcatgtacaacattggcatttgcaagctgttattataaagtaatggtgaagaatctgagcttcctagatcttatctagatctaaatcctgcctctgtcagatctttgaaaattttcttagtttctatgccttgattttattgtctaaaccaagagaaaatagcacagttactgcaaagattaaacaagaaagtatatataatatgattaccacaatacctagcacataggtcttcaaaaaggcagttcttgttaatattatataat

SEQ ID NO: 450382 - DNA, 609 bp, Homo sapiens
cttgcttccctggaatcacagttgcaaataactgtcttatattttagcacacaagctgaggtttggctcatttccctgggacctagcctaagaaaacagttaacaattattcagtgcctactatgttcccagtrctgttctaggagctttaaatgtatcctttcattgtcttctccaaacaatccaatgacataggtattcttagtatcttcatttccgttttatagatgatatgagaaactagggcacagaaatgttgagcatctttcataggcttctacagctagtaattagcagatttaggatttgaacgcagacagtcttgactacagagctcaggccctattctgtttctgcagttgaatttaattctcaagtctatctctaagttaaatactcataaatgatgcaattccatggcaaaaatggaagttacatgtcatccaacggaagtactgctaagccagacataatgtgaaaaatgtttatctaaccagaaaagttgaaccaagtgaaggaatatcaaccagaggtgagatatttggaggaacaattcaaaggtctggattctctctggcttcctcagtttagttaaccatttaaatttgg

SEQ ID NO: 450383 - DNA, 609 bp, Homo sapiens
cttgcttccctggaatcacagttgcaaataactgtcttatattttagcacacaagctgaggtttggctcatttccctgggacctagcctaagaaaacagttaacaattattcagtgcctactatgttcccagtgctgttctaggagctttaaatgtatcctttcattgtcttctccaaacaatccaatgacataggtattcttagtatcttcatttccgttttatagatgatatgagaaactagggcacagaaatgttgagcatctttcataggcttctacagctagtaattagcagatttaggatttgaaygcagacagtcttgactacagagctcaggccctattctgtttctgcagttgaatttaattctcaagtctatctctaagttaaatactcataaatgatgcaattccatggcaaaaatggaagttacatgtcatccaacggaagtactgctaagccagacataatgtgaaaaatgtttatctaaccagaaaagttgaaccaagtgaaggaatatcaaccagaggtgagatatttggaggaacaattcaaaggtctggattctctctggcttcctcagtttagttaaccatttaaatttgg

SEQ ID NO: 450384 - DNA, 609 bp, Homo sapiens
cttgcttccctggaatcacagttgcaaataactgtcttatattttagcacacaagctgaggtttggctcatttccctgggacctagcctaagaaaacagttaacaattattcagtgcctactatgttcccagtgctgttctaggagctttaaatgtatcctttcattgtcttctccaaacaatccaatgacataggtattcttagtatcttcatttccgttttatagatgatatgagaaactagggcacagaaatgttgagcatctttcataggcttctacagctagtaattagcagatttaggatttgaacgcagacagtcttgactacagagctcaggccctattctgtttctgcagttgaatttaattctcaagtctatctctaagttaaatactcataaatgatgcaattccatggcaaaaatggaagttacatgtcatccaacggaagyactgctaagccagacataatgtgaaaaatgtttatctaaccagaaaagttgaaccaagtgaaggaatatcaaccagaggtgagatatttggaggaacaattcaaaggtctggattctctctggcttcctcagtttagttaaccatttaaatttgg

SEQ ID NO: 450385 - DNA, 423 bp, Homo sapiens
tctggatgttctttaaaatgctttgtgacactgcagatgtcacatatgattttttaaaaaataatagccctgaatatccccagcagtgcaggaagaaatttgatagtatttacatagaagccatcttggcgtccatttctctaccaagtacaagatccacttttcaattcaaactcagtctggaagtttttcttccttccaaagggaacagaattaacaattccgcctagttctactattacggagattgcagacagaacagactgaatgraagatagcagtcagatgatgcccaagagtggcaaaaaacagtagatccagagagacagaaaggcaaatcattctggaggggtcttgaggccaacagtgtgagggaccaccaccttccttcaatacacttcaagatctaagtaaaataattca

SEQ ID NO: 450386 - DNA, 418 bp, Homo sapiens
catacttctttaaaaaaaaaacatatattatctgacataaagaaaacatatcaaagccctagctggaatcaagcttgatgactaaaatctacttaatcctcaaaaagccttgtgtcaggacccaccttctgcaaaagcattacagtttattatggaaaagcgattgctaaaacacgttggcttcctttttcctgtcaggagatctcattccagtgttaacctgaggagcctgcatatakttgcctttgtcccagaaatatataagtgttcctgtgctgtggagaattaggcactgggaagttaagagagggagagagagagagcccagaattggagtcccagtcttctaaatgcaacctatagcttggaaataaattagacttttaaagacagatatttattggaggtactcctaaca

SEQ ID NO: 450387 - DNA, 418 bp, Homo sapiens
catacttctttaaaaaaaaaacatatattatctgacataaagaaaacatatcaaagccctagctggaatcaagcttgatgactaaaatctacttaatcctcaaaaagccttgtgtcaggacccaccttctgcaaaagcattacagtttattatggaaaagcgattgctaaaacacgttggcttcctttttcctgtcaggagatctcattccagtgttaacctgaggagcctgcatatatttgcctttgtcccagaaatatataagtgttcctgtgctgtggagaattaggcactgggaagttaagagagggagagagagagagcccagaattggagtcccagtcttctaaawgcaacctatagcttggaaataaattagacttttaaagacagatatttattggaggtactcctaaca

SEQ ID NO: 450388 - DNA, 545 bp, Homo sapiens
tcaaccatatttctattgctcttgttatttctatttctgttttgaattgctsttttttagcccctaccacaagaagcagagctgtgatgacactttcatgtggctaacgtcaaatccactaggcttcttgcctgaatcaccatgagtgaaagtgttgggataccactgtggctttcagaatgaataaaccctgctctcattcagctgctgttttcaaagttgctttcagtgttgaattttaagtgggattctttctgatttttcactacagacacaagttggtgtgtatggatctcagcctagtcgaccatgacttggcattttaaccaagtcataattctcaatggacatttttgaaagatgctgatcaattgtccattgaggaaaaatagtctacatactctcacttggcaaacattccccaaatttttcagcctctttagatataattaaaagagataatgatggtgggatgtcaggaggctccccttttcccactgaaaccagggagattcagatgaggctcaaatcagtacaaatgggat

SEQ ID NO: 450389 - DNA, 463 bp, Homo sapiens
cacatgctttttgggggatacattcaaaccacagcatttagcccctggcccttaaaattcatgttcttctcacatgcaaaatatgtttattccatcccaataacctcaaagtcttaatgtgctctagcatcaactcaraaaaagtccagagtctaaatcaggtatatgtgagactcaaggcacaattcatcctgaggcaaattcctctactgctgtgagcctgtgaaataaaaataagctatataattgcaaaacataatggtgagataggcataggatagccatttcattacaaaaggaagaagtaggcaagaagaaatgagaaactgatcccaggtaagtaaaaaacccaacagggtaagcaatgttgaatcttaaagcagtagaatcatcttttttgactcaatgtcctttgtgcacactcgggtaggagttgggcttccaaggccttgggcagtcccac

SEQ ID NO: 450390 - DNA, 545 bp, Homo sapiens
gcaaggaaacagattttcctctggaccctccagaaggaagacagtccagccaacaccttgattttagtccacttagacccacatcaggtttctgacatgcaaaactgaaagataaatgtgtgttgtttcaagccactcagtttatgatcatctgttacagcagtagtaggtaactaatacaagcaagtactataatagtcctgaatattagatgtaaaattttgagccttagatggagttaattacctcaataaacaaatactttgtttaaaggcagtctcatagtttggactaggaagaaggcaatctgacaaagttcctgtttttctttttaagatgaaattatttcttctatcctcatctttccaaatggatgtatrgcactggttgactgcatatattgtcatacagcatacgaccttaaaatctaaaaacttaacctgctcataataaaggaatttttctgcaaaatatcccttatttcacaaccatgagataaatatcacatatgatgtggtttggatatttgtccttacccatatctc

SEQ ID NO: 450391 - DNA, 318 bp, Homo sapiens
gtgacttccaagcttcttacatgtcagaccagaaatttgaagttgacatggtcttataaaaatttatttaccatctcaaagccaaaagggcaagaaacaaacaaattccttgtcaaatttgtaattacctagagaaaayttgcagaacgaggaagggatggtacagctgcaggaagtgaattgggaccttgacccacacctgctgctgactcttctatagaacttgccaaagttccagaggcgtgacttaggtgctgtggtagaaataagacaggattggggtccagcctatcccaaggacggctttggaaactgctt

SEQ ID NO: 450392 - DNA, 573 bp, Homo sapiens
tatagaactctgttcaacctagtaatgactacagaatccttctcaacacggtaccccatacaactactactaattgatggtgagatgaaatcaactagccatttctgcctaagccttagagcaggtctgtgtttcctagggcaaaggaggagtcacacagtctacacaagaccctttattactgatgcctgaaagaaatgctataacttttgcacagattcagggttctctctgtcctcctcttcctctgctctgtgttctgttggatagatgacagcacagtgaaatgtaaagtcagaccaactatattaagcaccttaatcaaatctctggaatggacaatttaggcctgggyaaccgagatcttgacactggctagttctgtgaccttgggaagtgtctctggactttgatttctacatttgtaaaatgtggcattaggctagatgagctatcagttcccttcttcctctaacatagctgattctgagtgctgggattagtaaaaatccagggagatgaactgtgttgtccagcattctaagaaaataaaagttaaagacctcaatgaag

SEQ ID NO: 450393 - DNA, 624 bp, Homo sapiens
ctttgtctttcataatatgatgtccagatctaccctggtgattgctctcacaatgaaaatgtaggtagggttttgtcatttaccaagcaatttcatatatcttttctaatctgacctttccaactgccagtgagayggttggggtaattagtgttatctctatttttaaaattcagaaactgagatttaaaagctttagggattggttcaaggtcacatacttagtaaaagcacagactaggcttgaatctagtttttttaaaagccagaactccagcctctcattcttacaccaatgcttccaatctctttgttcctcataacactatgtgagccccattccctagaaacatcaggaaaccaccaaaataactggagagttttgctgaagagatctgggccgtattactgtattgctttttcccttgcagggagagttactatgacctcagttcctggtgcagcccccagtggtttttgcacagaattggcaagattaaagacaccatgggacacagctaagtttctctttcaagttatccacctgttgtctatacagctgctgtttactgacggctcagcaaagagcagtgggattcttatcctatttttatggtgatttct

SEQ ID NO: 450394 - DNA, 546 bp, Homo sapiens
tctctatttttaaaattcagaaactgagatttaaaagctttagggattggttcaaggtcacatacttagtaaaagcacagactaggcttgaatctagtttttttaaaagccagaactccagcctctcattcttacaccaatgcttccaatctctttgttcctcataacactatgtgagccccattccctagaaacatcaggaaaccaccaaaataactggagagttttgctgaagagatctgggccgtattactgtattgctttttcccttgcagggagagttactatgacctcagttcctggtgcagcccccagtggtttttgcacagaattggcaagattaaagacaccatgggacacagctaagtttctctttcaagttatccacctgttgtctayacagctgctgtttactgacggctcagcaaagagcagtgggattcttatcctatttttatggtgatttctaacttcttgctattccctggtctaatttctattaagtacatttctcccatgcacaaatgtctacgctttccaaaaaga

SEQ ID NO: 450395 - DNA, 514 bp, Homo sapiens
ggacacagcacatgacaggaggagaagcagtgctgtgtggtatgagaagcaacaggctttgatcacagccctcgcatttgctaactctgagattttatgaaaattataatactagttatccttttctcactgtctacctgccattgccacgtattacacgaagcacttcatactcatcatctcatttaatccactgaaaaatctccatttcctgcattmtttcccgtttttcacataagaagtctgaggttcagagaagttggtaacttgccccaggtcccagagaggaagcaacaggtctaatctgagtgttaaactggctcataaccagcagtactgctccaggtgtgtttcacctttgaaattgcataatagcaccttctagcatagttcagttcacagagaagctgtgaggaaccaataagcacacaacatgtgaaactctttgagaaccataaagtgctacacaagtgtacaagatatgtacaattccaaatcatttaacttcagacgg

SEQ ID NO: 450396 - DNA, 484 bp, Homo sapiens
gtttagcccaatacatcatgaaaacctaatttaatctaattaatgtctcatttaagtgttagtccactgtcataagacaagatttattaacaaaagtctaaagtgcaatagcaagaaatctagaaatctctgacaagaaaaaattatgtaaaaacatatttactctgaataaaatgaaagcttatcagtgagattggagatctattctaacaggtcgtttaaaactcatttccayaggccttcttatgacccaacaatagattttcctgagcatatctatctcaaaaaatcttttgattctgtcacttgacaagaatttcttaagttctatctctaaacaacttaattaactggcttagagattgaagaatattcttgcaaagaaaagaaaaaaagtgctgcttttagagcttgttattagcttgggaaagtggaatcactcagtaactgaacaaagaataactataaatatttagtagtttaa

SEQ ID NO: 450397 - DNA, 537 bp, Homo sapiens
attctgtcacttgacaagaatttcttaagttctatctctaaacaacttaattaactggcttagagattgaagaatattcttgcaaagaaaagaaaaaaagtgctgcttttagagcttgttattagcttgggaaagtggaatcactcagtaactgaacaaagaataactataaatatttagtagtttaatattctgatgcaactctgcatcaatttgtcacactgatagatccattaacaatttaagcctggtctgcacaagctctgaattattcatttcaccataaaactgtcaacatctctggaaggtgtatctattggtggtaaagttayactaatgtgcatttatggtggtagaagaaaaaacaacaaccaaaacaaccataaccctctctcctgctcggtctgttgagaaagttctcaacttcctaatgaaaatttggacagttttgttatccataaaggaagcaaacggtattctcagatttctcttgagttgatgtaatggtcagagcaattacatggactcccatgttcc

SEQ ID NO: 450398 - DNA, 637 bp, Homo sapiens
cttctattttctgaaatagattgtagataattggcttaatttctttcttaactgtttggtagagtttactagtgaacacatctgggcctaatgctttctattttggaaggttattaattattgattaaatttatttaacaggtataggcttaatcagattgtttatttcctgttgtatgaatttcagcaaattgtktctttcaaggaattagttcatttcatctaggttgtcaaataaagttgttcataatatttctttattatccttttaatgtttatgaggttgtagcaatattttctctttcatttctgttattagtaatctgcacatcttttttcttagcctggctagaagattactaattttattgatcttttcaaagaaccagctttgggttaattttctctattgatttcctattttcagtatcactaatttctgttctaatctttattatttcttttctcctgcttactttggatttaatttgcacactttttctaatttgctaaggtagaaacgtagattattgacttttatatttttattaatttttaatataagcaactcaaagcaacaaatttccctttagaaactacttttatgccacaaattttggtatattgtgtttttatt

SEQ ID NO: 450399 - DNA, 571 bp, Homo sapiens
tttgtagttgcatgcctgtgagatttgtttattacacaatcttattgtggcaagagccaatagattcaagatggaagttagacaacatcagtttaatatttgcaaaacattactgtcacatgactgcagtcrtcaggcgatgaagaatccctgtggtagttactctgcaataggcttctcactcaaaagctccatcacgcaaacgaagttaacatagagcaccactctcaccttagcatttgccctctacaaatgaagtactatcatccttttaagatttttatctctggaattgggaaggacttaatttagtaaggatggattggcatttagaaatgagaaagagaaagaaacaaatctttaactatataatcaaatgtataatttaaggagatttactaatttagatataagttttaataggctctctctattttgactgaattcccaccctatggaattttggcttaattgtccttgggtggggcctcatcatcttgaatcttctctgataattctaatgtacaggcagggctgagatggcagagatgaaaatcagatttgtattaac

SEQ ID NO: 450400 - DNA, 567 bp, Homo sapiens
acaggtcaggtgatagagacaataagagccgtggataaaaatagcttccaaattatagccccaggttttcttattatttaagccatattgtactaaattttctaaatttagcagccactatagcactccctgggccttttgataatattgacagattctgaatgcttttgtgtcaaagcactaactataactcttctagacacttcttgttttcagaaatccaattagacaaaaccgaaggtgattggagcatctgttcttcctcaacagattttggcttttcgtcatataagtaatcacctttaatttaatttaatcacctctaaatcaaccagcagagtatatttasttatacaataaaaaataaataaatgtaatcccactccctctggtggcacaatctacaaatatccactgagggtgtaatttggttaaaatattcaaaatggattagaggactcttccatatttcgtttctttttcattcaggagacactgatacaaatccatctctccaaagggaatagtttatgagttttgttaaaatacataacaaaagaagcagcc

SEQ ID NO: 450401 - DNA, 439 bp, Homo sapiens
caaatcttcccagatcatgctggatatttccttcagagatttcttacatttatacatatgtttaatgaagtattcccactagggtgtaaggactttgaaaaaaagggatcatatacgcacatagtaaacacctaataaatattgmagactgaatgactataataggaaatttataaaatcacttaatattttaatagctaatatatatcacatgcttactgtgtgctgggcactattctgaacaccttatgtgttttaagctatttaagtctaacaactccatgaggtattaggtgcttgtattcattatctattgctgcataataagttaccataagcattgtagcttaaaacaacatgcattattatctcacagtttctgtgggctagaggtctaggtgtagcttatctgaatcctctgtttaggtctcacagactg

SEQ ID NO: 450402 - DNA, 439 bp, Homo sapiens
caaatcttcccagatcatgctggatatttccttcagagatttcttacatttatacatatgtttaatgaagtattcccactagggtgtaaggactttgaaaaaaagggatcatatacgcacatagtaaacacctaataaatattgcagactgaatgactataataggaaatttataaaatcacttaatattttaatagctaatayatatcacatgcttactgtgtgctgggcactattctgaacaccttatgtgttttaagctatttaagtctaacaactccatgaggtattaggtgcttgtattcattatctattgctgcataataagttaccataagcattgtagcttaaaacaacatgcattattatctcacagtttctgtgggctagaggtctaggtgtagcttatctgaatcctctgtttaggtctcacagactg

SEQ ID NO: 450403 - DNA, 599 bp, Homo sapiens
gttaatgtgggtaaccaggaaggatcactaacactgccatgcggtgcagcagcaggtcaggctcagcttcctaaacsagtgccaggatcagccacagcaaagtgacggggaagcacgagccatcttggcttattctaactggggtggacagcagagacacttgaggtactccttacagcacagctccaagccatgtgacccagccgaacagtgccaaggcacaggggaagttggcctgcagccatcactactgagtaattcatgttcaccaaaagctctggtcagacaaggaggcccaggggcagaacagctcattgccaggcaggctctattgtcactgcaagtcataggacacccttaggtttatccagtgtagaagggcctcctggccatagtagtgtctcttaaactgtgctgatgagaacacacaggtagaacaaatacaaaagacatataatatagatataggaatatattaatgtatatattgatgtagttaccctagtacacattgtgtcataagtttttaaatatcttttattaaaatgaatgcctttgttatatggactacatcctattctatggccattactactatt

SEQ ID NO: 450404 - DNA, 454 bp, Homo sapiens
  misc_feature (1)...(454): n = A,T,C or G
tatattttatggggaatgtgtccaccttataataccttcccccagtttcccgtcatataacttgaagacaaaaactgtaccatcagcttgctagagtttagtgaggttatttggagtkgtttttgttgttattttaagtaaagctttccacagtttttatgatgaaaatatctcagttttgttctctgatggattcttccatctctttatcccctctcanaatattgtaatttctggataaaccaacatagacacctgcttcgaatcataatctatagatagtgtgaccaaatgttctaattaggcaacctgattttttcacagtcatagttttcacgtcttttcatatccatgcatacaaatttttaggtaggatgactatatgctttatccaaacaaagatacttgttaagtgccaggaggtgatatgaatcattcactgggacaacagaca

SEQ ID NO: 450405 - DNA, 580 bp, Homo sapiens
taaatattattaaatttcaattttgttctttactgcttctctgaattacagacacgctgaatrcagacctcaatttaagccttctcatttttctttttaaaatttcatacaaaatagatattctccaaggaatgctcagcatatgcattttaccttctctcttagtaatttcacatgcaaaaagatggaccatttgctaagcttgaagaacataataatgaaactacaagttagaagcaggcatggatcagatgtattttactttctaatggctgttatagctatacaaaaaggataagcctacagagatggtttttaaggctcatagggaatataaacatatcgtgacaacctccaagtcaatttctaaatagggtaggagccattctgtgacttttgtgtcccagaaaataactcccctcaaaacattctgcaaagactggcagcgccactggttcagatcttcttccattaaactagaccagtggttctcaaccagattttgagattttgagtctctctccccccagggaacttttgacaatgtctgagacaggtttggttgtcgcagccaggagag

SEQ ID NO: 450406 - DNA, 561 bp, Homo sapiens
ctgtctgcctgaaagaggaaaagagagcagttattcatcaatcctcatcccccttgatggacaagggtggcctcacagatatcaactccctcgtacttctgaaytgtgcatgccttagtattgacgtgcttcccaaggcatggtgtcaggacagtccagcgtcagagaagtgagaaagccacagcacaaggctagtctctatcaggctgcacccatgcaaaagctgattgacacctgcacagacctggtaaacacaatagtggcatgagcaagaggatctggagtggtgtacagggaggtacaatccatttcttgtgcttgttttttgtgcccttctttaaattcagtctatcagagaatccctttcatggtggtggccagccatagtctctgcaaagacttaattcaagagggttagtggaacgagttccagttctactgttccagctgatcccaagatcataatattcttcatctccctcctccactatccactttagacttttctcacccttgcctgatgtaggctcattaacatcttgcctgatctagattgcttgc

SEQ ID NO: 450407 - DNA, 580 bp, Homo sapiens
atctagattgcttgcttggagggtgaccttgagtgtgagaatgacascacaatccaccaatgtgagtctcctgatacacttccatacagatcctctggctttcatgacatgccttatgttgctaattaacaaacctgagcctgtcattttcttcatttgcttttttcaaagcctccaaagcagtctaaacacaccagccagctcaatccttgttattaccattgctcctgtactatttaaggaccacggctatcacaccacccaatgctctgcctctgcctgcacctcatcccaatccacctcagtaagagtcttagtaactgagatggcgctggccagataccaccactccacccacctccaaaaatggagtccttattacctctgaacagtgagtgatctcactccaaaatcccaattattgtagcctgagttcccctgaaagcaggacctcagacaaagtcttgcatgcaagtagcagtgaaacaaggaaagagagaaggccaatacaaggatgaattttcaaggtagcattgcaatggacaaccagtgctcaatcctaaggactattctgagaagc

SEQ ID NO: 450408 - DNA, 638 bp, Homo sapiens
aggtggcaagaaatgggaacgttttctacatccagaaaaatgtcgcgacaaccgttatgaaatctaagggctcaaggaggatttagcaataaattgagagcagagtgtttaattgaataaggccatgaagcatgcacacaccgcccgtcaccctcctcaaatatattctagaaattcattctacacmcccctgtgatattgtccataatatccagggagggagagaatgatttgatttttttttttttttttgagacagagccttgctctgtcgcccgggttggagtgcagtggcctgatcttggcacactgcaagcaacgcctcccaggttcacaccattctcctgcctcagcctccctagtagctgggactacaggcgcccgccaccgcgcccggctaattttttgtatttttagtagagacggggtttcaccatgttagccaggatggtctcgatctcctgacctcgtgatctgcccgccttggcttcccaaagtgctgggattacaggtgtgagccaccgctcctggccagagagaatgattttactccccatatcgcaggggatttacattcccctgcattatttttcgtaatatccagggggaagatgaagatgttactccccatatagcat

SEQ ID NO: 450409 - DNA, 390 bp, Homo sapiens
tcctcttcctttgccttccacagatctctctgctggttcacasaggaacactttcgtggctctcagttcattttgcaattctgctagaatctcattccatcctcagttgtaactagcttgtccttcacccaacgcttatttacagagggacagatagcaagaagaaatcgcactctggattacaaagtgggaagacgcaccccttggccagaatgcctgcctcctatgttcatgaaggatatttctaattgatctcagcactcttttccattgagcccatgtcccaaattggccgtgagttagggagagggctctagagtgggaaaggtgtacccaaaactttcctaatctgactatcaagcctaaaaaattaaactttcaattcaacat

SEQ ID NO: 450410 - DNA, 390 bp, Homo sapiens
tcctcttcctttgccttccacagatctctctgctggttcacacaggaacactttcgtggctctcagttcattttgcaattctgctagaatctcattccatcctcagttgtaactagcttgtccttcacccaacgcttatttacrgagggacagatagcaagaagaaatcgcactctggattacaaagtgggaagacgcaccccttggccagaatgcctgcctcctatgttcatgaaggatatttctaattgatctcagcactcttttccattgagcccatgtcccaaattggccgtgagttagggagagggctctagagtgggaaaggtgtacccaaaactttcctaatctgactatcaagcctaaaaaattaaactttcaattcaacat

SEQ ID NO: 450411 - DNA, 544 bp, Homo sapiens
cagttcattttgcaattctgctagaatctcattccatcctcagttgtaactagcttgtccttcacccaacgcttatttacagagggacagatagcaagaagaaatcgcactctggattacaaagtgggaagacgcaccccttggccagaatgcctgcctcctatgttcatgaaggatatttctaattgatctcrgcactcttttccattgagcccatgtcccaaattggccgtgagttagggagagggctctagagtgggaaaggtgtacccaaaactttcctaatctgactatcaagcctaaaaaattaaactttcaattcaacatcccttgtttctccaacttggagtgcctgatggtgtgggaagcccctactcataaaaattcatagttgaagattgttggtaattttgcccaacctccttcttatttttattatactttaagttctagggtacatgtgcacaacgtgcaggttcattacatatgtatacatgtgacatgttggtgtgctgcacccattaactcgtcatttacattaggt

SEQ ID NO: 450412 - DNA, 544 bp, Homo sapiens
cagttcattttgcaattctgctagaatctcattccatcctcagttgtaactagcttgtccttcacccaacgcttatttacagagggacagatagcaagaagaaatcgcactctggattacaaagtgggaagacgcaccccttggccagaatgcctgcctcctatgttcatgaaggatatttctaattgatctcagcactcttttccattgagcccatgtcccaaattggccgtgagttagggagagggctctagagtgggaaaggtgtacccaaaacttycctaatctgactatcaagcctaaaaaattaaactttcaattcaacatcccttgtttctccaacttggagtgcctgatggtgtgggaagcccctactcataaaaattcatagttgaagattgttggtaattttgcccaacctccttcttatttttattatactttaagttctagggtacatgtgcacaacgtgcaggttcattacatatgtatacatgtgacatgttggtgtgctgcacccattaactcgtcatttacattaggt

SEQ ID NO: 450413 - DNA, 544 bp, Homo sapiens
cagttcattttgcaattctgctagaatctcattccatcctcagttgtaactagcttgtccttcacccaacgcttatttacagagggacagatagcaagaagaaatcgcactctggattacaaagtgggaagacgcaccccttggccagaatgcctgcctcctatgttcatgaaggatatttctaattgatctcagcactcttttccattgagcccatgtcccaaattggccgtgagttagggagagggctctagagtgggaaaggtgtacccaaaactttcctaatctgactatcaagcctaaaaaattaaactttcaattcaacatcccttgtttctccaacttggagtgcctgatggtgtgggaagcccctactcataaaaattcatagttgaagattgttggtaattttgcccaacctccttcttatttttattatactttaagttctagggtacatgtgcacaacgtgcaggttcattacatatgtatacatgtgacatgttggtgtgytgcacccattaactcgtcatttacattaggt

SEQ ID NO: 450414 - DNA, 541 bp, Homo sapiens
atggtttccagcttcatccttgtccctacaaaggacatgaactcatcctttttatggctgcatagtattccatggtgtatatgtgccacattttcttaatccagtctatcattgttggacatttgggttggttccaagtctttgctattgtcagtagtgcctcaataaactccttctttctttgcctagttacacctcaatgcaacctcctggcaggccagccttaagcccagcagtmcaaccatgcatctaagctgagttctcatcagagccaacttcaattataaacaactgagatgatgccagaggccagaatccctgagaacccaatttgctgtcatcaccgcagctgaaacaaggcgcttggcatctagaaaagctgatctgtaggaaatttccaatagagttcaattttttttctaagtttaaagtgtacaatatcatcaaggtcagacactcgaggtaaaactaggcttgtgtttaaatataataaaaatatttgaggaatagtaagagtggtgactacttttacacaggaatg

SEQ ID NO: 450415 - DNA, 541 bp, Homo sapiens
atggtttccagcttcatccttgtccctacaaaggacatgaactcatcctttttatggctgcatagtattccatggtgtatatgtgccacattttcttaatccagtctatcattgttggacatttgggttggttccaagtctttgctattgtcagtagtgcctcaataaactccttctttctttgcctagttacacctcaatgcaacctcctggcaggccagccttaagcccagcagtacaaccatgcatctaagctgagttctcatcagagccaacttcaattataaacaactgagatgatgccagaggccagaatccctgagaacccaatttgctgtcatcaccgcagctgaaacaaggcgcttggcatctagaaaagctgatctgtaggaaatttccaatagagttcaattttttttctaagtttaaagtgtacaatatcatcaaggtcagacactcraggtaaaactaggcttgtgtttaaatataataaaaatatttgaggaatagtaagagtggtgactacttttacacaggaatg

SEQ ID NO: 450416 - DNA, 576 bp, Homo sapiens
gatgatgccagaggccagaatccctgagaacccaatttgctgtcatcaccgcagctgaaacaaggcgcttggcatctagaaaagctgatctgtaggaaatttccaatagagttcaattttttttctaagtttaaagtgtacaatatcatcaaggtcagacactcgagrtaaaactaggcttgtgtttaaatataataaaaatatttgaggaatagtaagagtggtgactacttttacacaggaatgtttcaaataaattgtttttttcttgtgccttttaaattttgtgatttgtcaatgagatgctgacatatttttaatgaagcatgccttgtaaaataataagtgaatgaaaactacacagtaatatttacatcaacaaagctagaagactgtatgtctcaagaggctccattatctacccagtggccacttgaccaaattaagatccaaataccaaaaagaaaagtaattaaaatttgtgttgtatgccttataagaccaaacctataaaatgaggggaaacttcacaattacttgtaatttgctctgtggaattgtaacagatggattata

SEQ ID NO: 450417 - DNA, 541 bp, Homo sapiens
atggtttccagcttcatccttgtccctacaaaggacatgaactcatcctttttatggctgcatagtattccatggtgtatatgtgccacattttcttaatccagtctatcattgttggacatttgggttggttccaagtctttgctattgtcagtagtgcctcaataaactccttctttctttgcctagttacacctcaatgcaacctcctggcaggccagccttaagcccagcagtacaaccatgcatctaagctgagttctcatcagagccaacttcaattataaacaactgagatgatgccagaggccagaatccctgagaacccaatttgctgtcatcaccgcagctgaaacaaggcgcttggcatctagaaaagctgatctgtaggaaatttccaatagagttcaattttttttctaagtttaaagtgtacaatatcatcaaggtcagacactcgaggtaaaactaggcttgtgtttaaatataataaaaatatttgargaatagtaagagtggtgactacttttacacaggaatg

SEQ ID NO: 450418 - DNA, 603 bp, Homo sapiens
tgatctgtaggaaatttccaatagagttcaattttttttctaagtttaaagtgtacaatatcatcaaggtcagacactcgaggtaaaactaggcttgtgtttaaatataataaaaatatttgaggaatagtaagagtggygactacttttacacaggaatgtttcaaataaattgtttttttcttgtgccttttaaattttgtgatttgtcaatgagatgctgacatatttttaatgaagcatgccttgtaaaataataagtgaatgaaaactacacagtaatatttacatcaacaaagctagaagactgtatgtctcaagaggctccattatctacccagtggccacttgaccaaattaagatccaaataccaaaaagaaaagtaattaaaatttgtgttgtatgccttataagaccaaacctataaaatgaggggaaacttcacaattacttgtaatttgctctgtggaattgtaacagatggattataaagatgattccatgataaacatctaaatgtggttactaccttctgtgctttcttggttcatatttttattttttttctttataaacagacaattcattcttatctatggcaa

SEQ ID NO: 450419 - DNA, 470 bp, Homo sapiens
gtggtgactacttttacacaggaatgtttcaaataaattgtttttttcttgtgccttttaaattttgtgatttgtcaatgagatgctgacatrtttttaatgaagcatgccttgtaaaataataagtgaatgaaaactacacagtaatatttacatcaacaaagctagaagactgtatgtctcaagaggctccattatctacccagtggccacttgaccaaattaagatccaaataccaaaaagaaaagtaattaaaatttgtgttgtatgccttataagaccaaacctataaaatgaggggaaacttcacaattacttgtaatttgctctgtggaattgtaacagatggattataaagatgattccatgataaacatctaaatgtggttactaccttctgtgctttcttggttcatatttttattttttttctttataaacagacaattcattcttatctatggcaatg

SEQ ID NO: 450420 - DNA, 574 bp, Homo sapiens
agtggtgactacttttacacaggaatgtttcaaataaattgtttttttcttgtgccttttaaattttgtgatttgtcaatgagatgctgacatatttttaatgaagcatgccttgtaaaataataagtgaatgaaaactacacagtaatatttacatcaacaaagctagaagactgtatgtctcaagaggctccatyatctacccagtggccacttgaccaaattaagatccaaataccaaaaagaaaagtaattaaaatttgtgttgtatgccttataagaccaaacctataaaatgaggggaaacttcacaattacttgtaatttgctctgtggaattgtaacagatggattataaagatgattccatgataaacatctaaatgtggttactaccttctgtgctttcttggttcatatttttattttttttctttataaacagacaattcattcttatctatggcaatgcaaacttttcagatgtattgaatatgtcatagtttttttctattgtaggcatctctaaaaaaggtatagaaaacaaacagagaaaagtctggtgttggaaagg

SEQ ID NO: 450421 - DNA, 576 bp, Homo sapiens
gatgatgccagaggccagaatccctgagaacccaatttgctgtcatcaccgcagctgaaacaaggcgcttggcatctagaaaagctgatctgtaggaaatttccaatagagttcaattttttttctaagtttaaagtgtacaatatcatcaaggtcagacactcgaggtaaaactaggcttgtgtttaaatataataaaaatatttgaggaatagtaagagtggtgactacttttacacaggaatgtttcaaataaattgtttttttcttgtgccttttaaattttgtgatttgtcaatgagatgctgacatatttttaatgaagcatgccttgtaaaataataagtgaatgaaaactacacagtaatatttacatcaacaaagctagaagactgtatgtctcaagaggctccattatctacccagtgrccacttgaccaaattaagatccaaataccaaaaagaaaagtaattaaaatttgtgttgtatgccttataagaccaaacctataaaatgaggggaaacttcacaattacttgtaatttgctctgtggaattgtaacagatggattata

SEQ ID NO: 450422 - DNA, 470 bp, Homo sapiens
gtggtgactacttttacacaggaatgtttcaaataaattgtttttttcttgtgccttttaaattttgtgatttgtcaatgagatgctgacatatttttaatgaagcatgccttgtaaaataataagtgaatgaaaactacacagtaatatttacatcaacaaagctagaagactgtatgtctcaagaggctccattatctacccagtggccacttsaccaaattaagatccaaataccaaaaagaaaagtaattaaaatttgtgttgtatgccttataagaccaaacctataaaatgaggggaaacttcacaattacttgtaatttgctctgtggaattgtaacagatggattataaagatgattccatgataaacatctaaatgtggttactaccttctgtgctttcttggttcatatttttattttttttctttataaacagacaattcattcttatctatggcaatg

SEQ ID NO: 450423 - DNA, 464 bp, Homo sapiens
taccaaaaagaaaagtaattaaaatttgtgttgtatgccttataagaccaaacctataaaatgaggggaaacttcacaattacttgtaatttgctctgtggaattgtaacagatggattataaagatgattccatgataaacatctaaatgtggttactaccttctgtgctttcttggttcatatttttattttttttctttataaacagacaattcattcttatctatggcaatgcaaacttttcagatgtattgaatatgtcatagtttttttctattgtaggcatctctaaaaarggtatagaaaacaaacagagaaaagtctggtgttggaaaggagagagaaataaagcttgtaaaggaatgaagattagagctttctggagataaaaattcttagaagatacaaaagctagttactgaattagatgaaggttctttttcagtttttcccagttgttca

SEQ ID NO: 450424 - DNA, 599 bp, Homo sapiens
atgcaaacttttcagatgtattgaatatgtcatagtttttttctattgtaggcatctctaaaaaaggtatagaaaacaaacagagaaaartctggtgttggaaaggagagagaaataaagcttgtaaaggaatgaagattagagctttctggagataaaaattcttagaagatacaaaagctagttactgaattagatgaaggttctttttcagtttttcccagttgttcacctcttagaaggcacatattcacagcagaaaagaaaaaaagggttaaaaagaaaatacctcggtgtagtgagactgtaatttcatgagggcattactgaagactcactttttccagcatcactcagcatggtattatgcatgtgtgtaatgtaaaggaaagtgaatatgcattcttggatgggtgatcaaatcgtaattccagaatgtaatcagaagctgattcattatcctcttgagatttcacaatcttttcatcaggaattaaaattcagaagagggtaaatgtatctaatcatttgaaagttaaaaattagtggatggaggcaacatggccgaataggaacagctccagtctacacctcccagc

SEQ ID NO: 450425 - DNA, 501 bp, Homo sapiens
ttctttttcagtttttcccagttgttcacctcttagaaggcacatattcacagcagaaaagaaaaaaagggttaaaaagaaaatacctcggtgtagtgagactgtaatttcatgagggcattactgaagactcactttttccagcatcactcagcatggtattatgcatgtgtgtaatgtaaaggaaagtgaatatgcattcttggatgggtgatcaaatcgtaattccagaatgtaatcagaagctgattcattatcctcttgagatttcasaatcttttcatcaggaattaaaattcagaagagggtaaatgtatctaatcatttgaaagttaaaaattagtggatggaggcaacatggccgaataggaacagctccagtctacacctcccagcgtcagtgatgcagaagacaggtgatatctgcatttccaactgaggtacaaggttcatctcaatggggagtgctggacagtgggtgcagcacaccatgcatgagcc

SEQ ID NO: 450426 - DNA, 501 bp, Homo sapiens
ttctttttcagtttttcccagttgttcacctcttagaaggcacatattcacagcagaaaagaaaaaaagggttaaaaagaaaatacctcggtgtagtgagactgtaatttcatgagggcattactgaagactcactttttccagcatcactcagcatggtattatgcatgtgtgtaatgtaaaggaaagtgaatatgcattcttggatgggtgatcaaatcgtaattccagaatgtaatcagaagctgattcattatcctcttgagatttcacaatcttttcatcaggaattaaaattcagaagagggtaaatgtatctaatcatttgaaagttaaaaattagtggatggaggcaacatggccgaataggaacagctccagtctacacctcccagcgtcagtgatgcagaagacaggtgatatctgcatttccaactgaggtacmaggttcatctcaatggggagtgctggacagtgggtgcagcacaccatgcatgagcc

SEQ ID NO: 450427 - DNA, 464 bp, Homo sapiens
tgccaatcctctgcaaaatattccaaaaatgttcaaaaaccagaaggggacattccaatccattctatcaggtcaacgtttatctggttccagagccagatgaacaccttttgtaataaaaacactcaaagaattagtaatatatggaaactcctcaataaataaagattatacatgaaaggctcacagctaacatcmtactcaatggtgaaaaactaaaatcttttcctctaggatcaggaataagatagcaacatctcttcctgccacttctattcatcacagtactggaatttctactcagaataattaggcaagagaaagtaataaaaaggatgcaaattggaaaggaaaaagtacaaaattttgttcacagacaacaggatgtaatgtgtaaaaatcctgaaattccacaaaatactggtagaataatgaaattcaacaaagtttcaggatacagtaac

SEQ ID NO: 450428 - DNA, 464 bp, Homo sapiens
tgccaatcctctgcaaaatattccaaaaatgttcaaaaaccagaaggggacattccaatccattctatcaggtcaacgtttatctggttccagagccagatgaacaccttttgtaataaaaacactcaaagaattagtaatatatggaaactcctcaataaataaagattatacatgaaaggctcacagctaacatcctactcaatggtgaaaaactaaaatmttttcctctaggatcaggaataagatagcaacatctcttcctgccacttctattcatcacagtactggaatttctactcagaataattaggcaagagaaagtaataaaaaggatgcaaattggaaaggaaaaagtacaaaattttgttcacagacaacaggatgtaatgtgtaaaaatcctgaaattccacaaaatactggtagaataatgaaattcaacaaagtttcaggatacagtaac

SEQ ID NO: 450429 - DNA, 568 bp, Homo sapiens
atgtcaacactactcgaagtgacctagattcaatacaatccttataaagattccaatgacatttttgataaacagaaaatcctatcctaaaattcatatggaatctatggggcccatgaataggcaaatmaatcttgaaacagaacaaaattaaaggtctcaaaacaattacaaaactgcaataagccaaaaaaaaatatgtggtcatggcaaaaagacactcttgacacacttatggaccaacacaacggagacctcagaaaccaaccctggcatatatggtccaatgatcttccacaaggatgccaagaccactcaatggcgaaggacactttcttcaacaaatggtgttgggaaaattgtatatctacatgcaaaacaatgaagttggacgcttaccttacaccatgttaaaattaattcaaagtgaattataaacctaaatgtaaaactagaactatcaaactcctagggaaaacaaatttggaaaatgccttatgacgttgaatttgtcaataatttttaggatatgacattaaaatctcaggcagtaaaagcaaaaatatat

SEQ ID NO: 450430 - DNA, 568 bp, Homo sapiens
atgtcaacactactcgaagtgacctagattcaatacaatccttataaagattccaatgacatttttgataaacagaaaatcctatcctaaaattcatatggaatctatggggcccatgaataggcaaatcaatcttgaaacagaacaaaattaaaggtctcaaaacaattacaaaactgcaataagccaaaaaaaaatatgtggtcatggcaaaaagacactcttgacacacttatggaccaacacaacggagacctcagaaaccaaccmtggcatatatggtccaatgatcttccacaaggatgccaagaccactcaatggcgaaggacactttcttcaacaaatggtgttgggaaaattgtatatctacatgcaaaacaatgaagttggacgcttaccttacaccatgttaaaattaattcaaagtgaattataaacctaaatgtaaaactagaactatcaaactcctagggaaaacaaatttggaaaatgccttatgacgttgaatttgtcaataatttttaggatatgacattaaaatctcaggcagtaaaagcaaaaatatat

SEQ ID NO: 450431 - DNA, 568 bp, Homo sapiens
atgtcaacactactcgaagtgacctagattcaatacaatccttataaagattccaatgacatttttgataaacagaaaatcctatcctaaaattcatatggaatctatggggcccatgaataggcaaatcaatcttgaaacagaacaaaattaaaggtctcaaaacaattacaaaactgcaataagccaaaaaaaaatatgtggtcatggcaaaaagacactcttgacacacttatggaccaacacaacggagacctcagaaaccaaccctggcatatatggtccaatgatctyccacaaggatgccaagaccactcaatggcgaaggacactttcttcaacaaatggtgttgggaaaattgtatatctacatgcaaaacaatgaagttggacgcttaccttacaccatgttaaaattaattcaaagtgaattataaacctaaatgtaaaactagaactatcaaactcctagggaaaacaaatttggaaaatgccttatgacgttgaatttgtcaataatttttaggatatgacattaaaatctcaggcagtaaaagcaaaaatatat

SEQ ID NO: 450432 - DNA, 568 bp, Homo sapiens
atgtcaacactactcgaagtgacctagattcaatacaatccttataaagattccaatgacatttttgataaacagaaaatcctatcctaaaattcatatggaatctatggggcccatgaataggcaaatcaatcttgaaacagaacaaaattaaaggtctcaaaacaattacaaaactgcaataagccaaaaaaaaatatgtggtcatggcaaaaagacactcttgacacacttatggaccaacacaacggagacctcagaaaccaaccctggcatatatggtccaatgatcttccacaaggatgccaagaccactcaatggcgaaggacactttcttcaacaaatggtgttgggaaaattgtatatctacatgcaaaacaatgaagttggackcttaccttacaccatgttaaaattaattcaaagtgaattataaacctaaatgtaaaactagaactatcaaactcctagggaaaacaaatttggaaaatgccttatgacgttgaatttgtcaataatttttaggatatgacattaaaatctcaggcagtaaaagcaaaaatatat

SEQ ID NO: 450433 - DNA, 435 bp, Homo sapiens
caacctatagtagctcatcatgtatctcataagaagtgaacattcagaatacgtaaagwactcctacagagagactaccagaagcagagaggagcaaacacattttcacactagggcacctcctatctctcctggattctaattagggcagagtaagtgctagttctctgccaacccaggattaggccctgcagctgcagtgaaaataatcacagaagaaaactaagaaataaaaaatggagaaagtgagacatcaaactagaattactagaaacccccaggaagaaggaaaaaaaaaaaacccaggaaaacagaaaaacaatcaaacgagttaattaaaccttgtggtgcgacccgaagatcagggtttcctaaaggagtggaaatttattgacttgaagagtatttattgattactgatttgaagaggaagaa

SEQ ID NO: 450434 - DNA, 438 bp, Homo sapiens
caaacacattttcacactagggmacctcctatctctcctggattctaattagggcagagtaagtgctagttctctgccaacccaggattaggccctgcagctgcagtgaaaataatcacagaagaaaactaagaaataaaaaatggagaaagtgagacatcaaactagaattactagaaacccccaggaagaaggaaaaaaaaaaaacccaggaaaacagaaaaacaatcaaacgagttaattaaaccttgtggtgcgacccgaagatcagggtttcctaaaggagtggaaatttattgacttgaagagtatttattgattactgatttgaagaggaagaaaaaccatgaatggtctaaagcaaaagcctagtgtctgaagaagtcagtagggtgaaaacaagagctggccagaatgtccacagatggtgacaagttt

SEQ ID NO: 450435 - DNA, 438 bp, Homo sapiens
caaacacattttcacactagggcacctsctatctctcctggattctaattagggcagagtaagtgctagttctctgccaacccaggattaggccctgcagctgcagtgaaaataatcacagaagaaaactaagaaataaaaaatggagaaagtgagacatcaaactagaattactagaaacccccaggaagaaggaaaaaaaaaaaacccaggaaaacagaaaaacaatcaaacgagttaattaaaccttgtggtgcgacccgaagatcagggtttcctaaaggagtggaaatttattgacttgaagagtatttattgattactgatttgaagaggaagaaaaaccatgaatggtctaaagcaaaagcctagtgtctgaagaagtcagtagggtgaaaacaagagctggccagaatgtccacagatggtgacaagttt

SEQ ID NO: 450436 - DNA, 438 bp, Homo sapiens
caaacacattttcacactagggcacctcctatctctcctggattcyaattagggcagagtaagtgctagttctctgccaacccaggattaggccctgcagctgcagtgaaaataatcacagaagaaaactaagaaataaaaaatggagaaagtgagacatcaaactagaattactagaaacccccaggaagaaggaaaaaaaaaaaacccaggaaaacagaaaaacaatcaaacgagttaattaaaccttgtggtgcgacccgaagatcagggtttcctaaaggagtggaaatttattgacttgaagagtatttattgattactgatttgaagaggaagaaaaaccatgaatggtctaaagcaaaagcctagtgtctgaagaagtcagtagggtgaaaacaagagctggccagaatgtccacagatggtgacaagttt

SEQ ID NO: 450437 - DNA, 435 bp, Homo sapiens
caacctatagtagctcatcatgtatctcataagaagtgaacattcagaatacgtaaagtactcctacagagagactaccagaagcagagaggagcaaacacattttcacactagggcacctcctatctctcctggattctaattagggcagagtaagtgctagttctctgccaacccaggattaggccctgcarctgcagtgaaaataatcacagaagaaaactaagaaataaaaaatggagaaagtgagacatcaaactagaattactagaaacccccaggaagaaggaaaaaaaaaaaacccaggaaaacagaaaaacaatcaaacgagttaattaaaccttgtggtgcgacccgaagatcagggtttcctaaaggagtggaaatttattgacttgaagagtatttattgattactgatttgaagaggaagaa

SEQ ID NO: 450438 - DNA, 435 bp, Homo sapiens
caacctatagtagctcatcatgtatctcataagaagtgaacattcagaatacgtaaagtactcctacagagagactaccagaagcagagaggagcaaacacattttcacactagggcacctcctatctctcctggattctaattagggcagagtaagtgctagttctctgccaacccaggattaggccctgcagctgcagtgaaaataatcacagaagaaaactaagaaataaaaaatggagaaagtgagacatcaaactagaattactagaaacccccaggaagaaggaaaaaaaaaaaacccargaaaacagaaaaacaatcaaacgagttaattaaaccttgtggtgcgacccgaagatcagggtttcctaaaggagtggaaatttattgacttgaagagtatttattgattactgatttgaagaggaagaa

SEQ ID NO: 450439 - DNA, 356 bp, Homo sapiens
atgcacgtgtagtcccagctactcagggggctcaagtgaggattggttgggcctgggaggcagagtttgcagtgagccaagattgcaccactgcactacagtctgggtgacagagcaagaccctgtcttaaaaaaaaataaaaaaatagaaaataagtagaaaaatggcagacctaaatccaaccttagcaatgattagttacaatgtaactggacaaatactctacttaagacagagactgccagacctgagaggaaggcaagacccaamaatatggcatccacagagacacaatttaaacacaaagatacaaagtatgagaaaaaatatgctatgcagacactaatcgtaaaaa

SEQ ID NO: 450440 - DNA, 356 bp, Homo sapiens
atgcacgtgtagtcccagctactcagggggctcaagtgaggattggttgggcctgggaggcagagtttgcagtgagccaagattgcaccactgcactacagtctgggtgacagagcaagaccctgtcttaaaaaaaaataaaaaaatagaaaataagtagaaaaatggcagacctaaatccaaccttagcaatgattagttacaatgtaactggacaaatactctacttaagacagagactgccagacctgagaggaaggcaagacccaaaaatatggcatccacagagacacaatttaaacacaaagayacaaagtatgagaaaaaatatgctatgcagacactaatcgtaaaaa

SEQ ID NO: 450441 - DNA, 626 bp, Homo sapiens
cacaatttaaacacaaagatacaaagtatgagaaaaaatatgctatgcagacactaatcgtaaaaatatgctattcagacactaatcataaaaagctycaacagagatgttaacactagatgaaagaggcttcagaacaaaatatatcaccagaaataaacagggtaatttaataaaaataaaagaatcagagacgatgatgttacaattataaattgtgcctcaaagtgcacacaaagtacacacacacacacacagagcctcaacgtatgtgaatcaaaaacaacagaacaaaagcaggaaattgacaatccaaaattatagctggtgaattaatactgctctctcagtaactgatggaacaaccagataaaaatataggaaaaatacggatctaaatgacaaaatcctgacccaaatggtacttggcagtaccaagatagactctatgtcgatcgattgagaaaaggttcaagcctgaaatagtatacaaagtatgttgtctgaacacttgaaattaaattagaaaccaacaacaaattgatatccagaaaagcctcaaatgtctgaaaaccaagtaataaactttgaaataccctgtgagtcaaaaaagtattcacaagggg

SEQ ID NO: 450442 - DNA, 626 bp, Homo sapiens
cacaatttaaacacaaagatacaaagtatgagaaaaaatatgctatgcagacactaatcgtaaaaatatgctattcagacactaatcataaaaagctccaacagagatgttaacactagatgaaagaggcttcagaacaaaatatatcaccagaaataaacagggtaatttaataaaaataaaagaatcagagacgatgatgttacaattataaattgtgcctcaaagtgcayacaaagtacacacacacacacacagagcctcaacgtatgtgaatcaaaaacaacagaacaaaagcaggaaattgacaatccaaaattatagctggtgaattaatactgctctctcagtaactgatggaacaaccagataaaaatataggaaaaatacggatctaaatgacaaaatcctgacccaaatggtacttggcagtaccaagatagactctatgtcgatcgattgagaaaaggttcaagcctgaaatagtatacaaagtatgttgtctgaacacttgaaattaaattagaaaccaacaacaaattgatatccagaaaagcctcaaatgtctgaaaaccaagtaataaactttgaaataccctgtgagtcaaaaaagtattcacaagggg

SEQ ID NO: 450443 - DNA, 554 bp, Homo sapiens
gcttcagaacaaaatatatcaccagaaataaacagggtaatttaataaaaataaaagaatcagagacgatgatgttacaattataaattgtgcctcaaagtgcacacaaagtacacacacacacacacagagcctcaacgtatgtgaatcaaaaacaacagaacaaaagcaggaaattgacaatycaaaattatagctggtgaattaatactgctctctcagtaactgatggaacaaccagataaaaatataggaaaaatacggatctaaatgacaaaatcctgacccaaatggtacttggcagtaccaagatagactctatgtcgatcgattgagaaaaggttcaagcctgaaatagtatacaaagtatgttgtctgaacacttgaaattaaattagaaaccaacaacaaattgatatccagaaaagcctcaaatgtctgaaaaccaagtaataaactttgaaataccctgtgagtcaaaaaagtattcacaaggggaactggaatgtatttggaacaaacttgttataaaaatctcatttctggtagactaa

SEQ ID NO: 450444 - DNA, 564 bp, Homo sapiens
tcagtaactgatggaacaaccagataaaaatataggaaaaatacggatctaaatgacaaaatcctgacccaaatggtacttggcagtaccaagatagactctatgtcgatcgattgagaaaaggttcaagcctgaaatagtatacaaagtatgttgtctgaacacttgaaattaaattagaaaccaacaacaaattgatatccagaaaagcctcaaatgtctgaaaaccaagtaataaactttgaaataccctgtgagtcaaaaaagtattcacaaggggaactggaatgtatttggaacaaacttgttataaaaatctcatttctggtagactaaaggtgacaaattctttcctgctcctgtctctgtgagaaccaattccccttaaaccttgcccagactactgacttgtttggccaacagaaggtgacaaaggtggtatttggggacttcagaagccaggctgagaaaacagaacacttatccaggagaaagccagtcaccaggcaggaaatcccactcccctgagacctcatgatrgaaaccacatggccagtccatgac

SEQ ID NO: 450445 - DNA, 340 bp, Homo sapiens
aggctgagaaaacagaacacttatccaggagaaagccagtcaccaggcaggaaatcccactcccctgagacctcatgatagaaaccacatggccagtccatgactagctacacgcattgacatcccccactgagcctccagcaacaccgactcccaacaactagtgagcctccagcaacatccactcccaaccactagtgggccaccctgcacaccaccccactgtgctttcacacaatccagcttggctgcaaatgtgtgtgagatgagctggccaccaagactctctaagccaaamaacaagtaataatgagttgttttaagctgccaacttttgggg

SEQ ID NO: 450446 - DNA, 569 bp, Homo sapiens
caggttcctactatgcttctcatcaagaggtggaatctaatcaccttcccmccttgaatcatggctgatctcagtgatgagtacgactggacagtgtggcaggagagatgctctgggacttctgagggatgatcatgagagaccttacagcttctgcctgggcctcttggacacacaccctgggagaagccagacaaacctgactaccttactgccagactgggaggaagtccgtgctggccacaaagagagggctgggtgcctgctccatgtccccagccactagagtccttctgggtgcctgcttcacgtccccagccactagagtccttacagatgagaccagggagatcatgaagcaacaaacccacaccaccctgtccagtgtcttgaccaagaaaattgtgacatgtaaaaagaataaattcctggtttaagccagtaagtttactggtacattgttacatctcagataattaaaaccttgaaaaactcatgagagatcacaagtagaaccttgatctgaaacatggcatgtggcgatttatattgagtattaggttaaaaat

SEQ ID NO: 450447 - DNA, 443 bp, Homo sapiens
tcactgtgtctgtgtgtgtgggtgcagatgacaggccaccacaacctgattcaggattcagttgggctaccagccagtgccataaggaaaaccattctggggctcttgagaggggcaaagcataatttccatgtgggagaaacgttaatagtttgtggccagaggacaagctgtggtttatgaaagactgctgcaggttcctactatgcttctcatcaagaggtggaatctaatcaccttcccacctkgaatcatggctgatctcagtgatgagtacgactggacagtgtggcaggagagatgctctgggacttctgagggatgatcatgagagaccttacagcttctgcctgggcctcttggacacacaccctgggagaagccagacaaacctgactaccttactgccagactgggaggaagtccgtgctggccacaaagag

SEQ ID NO: 450448 - DNA, 569 bp, Homo sapiens
caggttcctactatgcttctcatcaagaggtggaatctaatcaccttcccaccttgaatcatggctgatctcagtgatgagtacgactggacagtgtggcaggakagatgctctgggacttctgagggatgatcatgagagaccttacagcttctgcctgggcctcttggacacacaccctgggagaagccagacaaacctgactaccttactgccagactgggaggaagtccgtgctggccacaaagagagggctgggtgcctgctccatgtccccagccactagagtccttctgggtgcctgcttcacgtccccagccactagagtccttacagatgagaccagggagatcatgaagcaacaaacccacaccaccctgtccagtgtcttgaccaagaaaattgtgacatgtaaaaagaataaattcctggtttaagccagtaagtttactggtacattgttacatctcagataattaaaaccttgaaaaactcatgagagatcacaagtagaaccttgatctgaaacatggcatgtggcgatttatattgagtattaggttaaaaat

SEQ ID NO: 450449 - DNA, 582 bp, Homo sapiens
gtgtgtgggtgcagatgacaggccaccacaacctgattcaggattcagttgggctaccagccagtgccataaggaaaaccattctggggctcttgagaggggcaaagcataatttccatgtgggagaaacgttaatagtttgtggccagaggacaagctgtggtttatgaaagactgctgcaggttcctactatgcttctcatcaagaggtggaatctaatcaccttcccaccttgaatcatggctgatctcagtgatgagtacgactggacagtgtggcaggagagatgctctgggacttctgagggatgatcatgagagaccttacagcttctgcctgggcctcttggacacacaccctgggagaagccagacaaacctgactacctkactgccagactgggaggaagtccgtgctggccacaaagagagggctgggtgcctgctccatgtccccagccactagagtccttctgggtgcctgcttcacgtccccagccactagagtccttacagatgagaccagggagatcatgaagcaacaaacccacaccaccctgtccagtgtcttgaccaagaaaa

SEQ ID NO: 450450 - DNA, 569 bp, Homo sapiens
caggttcctactatgcttctcatcaagaggtggaatctaatcaccttcccaccttgaatcatggctgatctcagtgatgagtacgactggacagtgtggcaggagagatgctctgggacttctgagggatgatcatgagagaccttacagcttctgcctgggcctcttggacacacaccctgggagaagccagacaaacctgactaccttactgccagactgggaggaagtccgtgctggccacaaagagagggctgggtgcctgctccatgtccccagccactagagtccttctgggtgcctgcttcacgtccccagccactagagtccttacagatgagaccagggagatcatgaagcaacaaacccacaccwccctgtccagtgtcttgaccaagaaaattgtgacatgtaaaaagaataaattcctggtttaagccagtaagtttactggtacattgttacatctcagataattaaaaccttgaaaaactcatgagagatcacaagtagaaccttgatctgaaacatggcatgtggcgatttatattgagtattaggttaaaaat

SEQ ID NO: 450451 - DNA, 569 bp, Homo sapiens
caggttcctactatgcttctcatcaagaggtggaatctaatcaccttcccaccttgaatcatggctgatctcagtgatgagtacgactggacagtgtggcaggagagatgctctgggacttctgagggatgatcatgagagaccttacagcttctgcctgggcctcttggacacacaccctgggagaagccagacaaacctgactaccttactgccagactgggaggaagtccgtgctggccacaaagagagggctgggtgcctgctccatgtccccagccactagagtccttctgggtgcctgcttcacgtccccagccactagagtccttacagatgagaccagggagatcatgaagcaacaaacccacaccaccctgtccagtgtcttgaccaagaaaattgtgacatgtaaaaagaataaattcctggtttaagccagtaagkttactggtacattgttacatctcagataattaaaaccttgaaaaactcatgagagatcacaagtagaaccttgatctgaaacatggcatgtggcgatttatattgagtattaggttaaaaat

SEQ ID NO: 450452 - DNA, 237 bp, Homo sapiens
ttactcattttaaacagctatctgaaataggaagygtaatataatctttaaagaatctgaaaacatgacagaaatgtttaaactataaaaacatattgtatatgttagcatattgtatacattgcatattaacataagctagaatcattgacataaatttatatagacaaaaggtagaaaatatgacaatgttcttcttgttttttgtctttgcatatttctttattggcgcttgtc

SEQ ID NO: 450453 - DNA, 606 bp, Homo sapiens
ctatagaacccactcctctgcttttaaaaaattaaagttagctgtagattgagatgtcagtgacacagtttatagaacataacttagattgtcatctacattactgtaactacaagtaccaccctcagatggaagaataagttttatcagtgaacatctctaattgaactataaatggtgtatgtcttctggcttttagaagctcttggtctaacacaggggatatatgatgtaaaaattacaaagcaaggtcactcacggtggctcatgcctgtaatcccagcactttgggaggccaaggcgggyggatcacaaggtcaggagatcgagatcatcctggctaatatggtgaaaccccatctctactaaaaatagaaaaattagctgggtgtggtgacacacgcctgtagtcccagctactcagtaggctgaagcaggagaatcgcttgaacccaggacacggaggttgcagtgagctgagatagcaccactgcactccagcctggtggcagaacaagactccatctcaaaaataaataaataaataaataaataaataaataaataaataataaaatagcaatgactataatgttttgtgatgtt

SEQ ID NO: 450454 - DNA, 606 bp, Homo sapiens
ctatagaacccactcctctgcttttaaaaaattaaagttagctgtagattgagatgtcagtgacacagtttatagaacataacttagattgtcatctacattactgtaactacaagtaccaccctcagatggaagaataagttttatcagtgaacatctctaattgaactataaatggtgtatgtcttctggcttttagaagctcttggtctaacacaggggatatatgatgtaaaaattacaaagcaaggtcactcacggtggctcatgcctgtaatcccagcactttgggaggccaaggcgggtggatcacaaggtcaggagatcgagatcatcctggctaatatggtgaaaccccatctctactaaaaatagaaaaattagctgggtgtggtgacacacgcctgtagtcccagctactcagtaggctgaagcaggagaatcgcttgaacccaggacrcggaggttgcagtgagctgagatagcaccactgcactccagcctggtggcagaacaagactccatctcaaaaataaataaataaataaataaataaataaataaataaataataaaatagcaatgactataatgttttgtgatgtt

SEQ ID NO: 450455 - DNA, 613 bp, Homo sapiens
cagtaaagttccttcatccaagttcatgtcccttctcaaggcatcccacatccgagaactgcttggtacagaaatataatggcctggttttcttgctccaattcgaggtcwttaggtaaactcaccaagatccttgtagagtggactgcggccatgatagtgattgcattccagccgacttcctgctccacccaatcctattgctttcactcttccacaggtgttgggaatatcatttcaacctccttgcatgcaaatctccaactcggagtcggcttcctaggacacctgactggtgatatctctatcactatcacagtacttagaggggagcatcttaaaatgattgaaggctaactgccctaacagcacaggcagatgatggcttaaaatagaatttaagtggatttataaaaacatgaaaaaagttgacattgcacgctcatatgagcttatggatcaaaccatgtgtatgatttctaagatccctcgtgcagtatatatttgcactgtttataaatgacatccccttgaattgaattcagtgcaattcaaaacagtaatttgtgggaaaaattagatatgcagatagcctggactctagagaagcaca

SEQ ID NO: 450456 - DNA, 370 bp, Homo sapiens
gtggggacaagatgtcaagccccaaatgtttaacccaccaaccatcctccaaattctggctctgtttaacaaggctgtggtctgacactacatgccgcctcagtgactaaagcataatttcccgtctcctgggagtgttgacagctgactcctggcaacaatactcacagcacagtaaagttccttcatccaagttcatgtcccttctcaaggcatcccacatccgagaactgcttggtacagaaatataatggcctggttttcttgctccaattcgaggtcattaggtaaactcaccaagatccytgtagagtggactgcggccatgatagtgattgcattccagccgacttcctgctccacccaatcc

SEQ ID NO: 450457 - DNA, 613 bp, Homo sapiens
cagtaaagttccttcatccaagttcatgtcccttctcaaggcatcccacatccgagaactgcttggtacagaaatataatggcctggttttcttgctccaattcgaggtcattaggtaaactcaccaagatccttgtagagtggactgcggccatgatagtgattgcattccagccgacttcctgctccacccaatcctattgctttcactcttccacaggtgttgggaatatcatttcaacctccttgcatgcaaatctccaactcggastcggcttcctaggacacctgactggtgatatctctatcactatcacagtacttagaggggagcatcttaaaatgattgaaggctaactgccctaacagcacaggcagatgatggcttaaaatagaatttaagtggatttataaaaacatgaaaaaagttgacattgcacgctcatatgagcttatggatcaaaccatgtgtatgatttctaagatccctcgtgcagtatatatttgcactgtttataaatgacatccccttgaattgaattcagtgcaattcaaaacagtaatttgtgggaaaaattagatatgcagatagcctggactctagagaagcaca

SEQ ID NO: 450458 - DNA, 613 bp, Homo sapiens
cagtaaagttccttcatccaagttcatgtcccttctcaaggcatcccacatccgagaactgcttggtacagaaatataatggcctggttttcttgctccaattcgaggtcattaggtaaactcaccaagatccttgtagagtggactgcggccatgatagtgattgcattccagccgacttcctgctccacccaatcctattgctttcactcttccacaggtgttgggaatatcatttcaacctccttgcatgcaaatctccaactcggagtcggcttcctaggacacctgactggtgatatctctatcactatcacagtacttagaggggagcatcttaaaatgattgaaggctaactgccctaacagcacagrcagatgatggcttaaaatagaatttaagtggatttataaaaacatgaaaaaagttgacattgcacgctcatatgagcttatggatcaaaccatgtgtatgatttctaagatccctcgtgcagtatatatttgcactgtttataaatgacatccccttgaattgaattcagtgcaattcaaaacagtaatttgtgggaaaaattagatatgcagatagcctggactctagagaagcaca

SEQ ID NO: 450459 - DNA, 575 bp, Homo sapiens
ctgctccacccaatcctattgctttcactcttccacaggtgttgggaatatcatttcaacctccttgcatgcaaatctccaactcggagtcggcttcctaggacacctgactggtgatatctctatcactatcacagtacttagaggggagcatcttaaaatgattgaaggctaactgccctaacagcacaggcagatgatggcttaaaatagaatttaagtggatttawaaaaacatgaaaaaagttgacattgcacgctcatatgagcttatggatcaaaccatgtgtatgatttctaagatccctcgtgcagtatatatttgcactgtttataaatgacatccccttgaattgaattcagtgcaattcaaaacagtaatttgtgggaaaaattagatatgcagatagcctggactctagagaagcacacatcatttggagaataatagtgaaccggctggtctatgagggaagaaaacagagtgaatatagactattagtgaacaaggatattttcccatgtatattcaaattaaagtgaacttctttagagaattgtgccttagaaagaaa

SEQ ID NO: 450460 - DNA, 575 bp, Homo sapiens
ctgctccacccaatcctattgctttcactcttccacaggtgttgggaatatcatttcaacctccttgcatgcaaatctccaactcggagtcggcttcctaggacacctgactggtgatatctctatcactatcacagtacttagaggggagcatcttaaaatgattgaaggctaactgccctaacagcacaggcagatgatggcttaaaatagaatttaagtggatttataaaaacatgaaaaaagttgacattgcacgctcatatgagcttatggatcaaaccatgtgtatgatttctaagatccctcgtgcagtatatatttgcactgtttataaatgacatccccttgaattgaattcagtgcaattcaaaacagtaatttgtgggaaaaattagatatgcagatagcctggactctagagaagcacacatcatttggagaataatagtgaaccggctrgtctatgagggaagaaaacagagtgaatatagactattagtgaacaaggatattttcccatgtatattcaaattaaagtgaacttctttagagaattgtgccttagaaagaaa

SEQ ID NO: 450461 - DNA, 575 bp, Homo sapiens
ctgctccacccaatcctattgctttcactcttccacaggtgttgggaatatcatttcaacctccttgcatgcaaatctccaactcggagtcggcttcctaggacacctgactggtgatatctctatcactatcacagtacttagaggggagcatcttaaaatgattgaaggctaactgccctaacagcacaggcagatgatggcttaaaatagaatttaagtggatttataaaaacatgaaaaaagttgacattgcacgctcatatgagcttatggatcaaaccatgtgtatgatttctaagatccctcgtgcagtatatatttgcactgtttataaatgacatccccttgaattgaattcagtgcaattcaaaacagtaatttgtgggaaaaattagatatgcagatagcctggactctagagaagcacacatcatttggagaataatagtgaaccggctggtctatgagggaagaaaacagagtgaatatagactattagtgaacaaggatattttcccatgtatattcaaattaargtgaacttctttagagaattgtgccttagaaagaaa

SEQ ID NO: 450462 - DNA, 586 bp, Homo sapiens
ttgtgaaatctttaattcctcatccccaggaatgtaaataaataaatataaatactgtaagtcagtgattttttcctaggaagacagtaaaaatactttacrtgccttctcattgtaaacctaaataacaaacagagaaaggctctctaaaggaaaaagacacatcttagggaggagggcactgtaatgggaatatgcatgacaaagcaaactatatagattcaaatggtaaaggaagacaaggtctttaaaagaaaaatgatcaacctggaagtacgggggagtagaaaaaaataaataagggaaaaatgaaggggcttctataatagttttgatatagttacctttgactataaagatcaacaacaaggtcaatatcagttgaagtttgggcaggcggttgctggatagatgtcctcacagaagtgtattttgtgtaaggttgctatggcctttgtgcagggttgtggttttgtggtattttgtgatagtttttatcaggcctagaagcatgagaaccctctcttcaaggccttctctgaatctatttgttcaggtttcttcttctctttttaaacattattga

SEQ ID NO: 450463 - DNA, 586 bp, Homo sapiens
ttgtgaaatctttaattcctcatccccaggaatgtaaataaataaatataaatactgtaagtcagtgattttttcctaggaagacagtaaaaatactttacgygccttctcattgtaaacctaaataacaaacagagaaaggctctctaaaggaaaaagacacatcttagggaggagggcactgtaatgggaatatgcatgacaaagcaaactatatagattcaaatggtaaaggaagacaaggtctttaaaagaaaaatgatcaacctggaagtacgggggagtagaaaaaaataaataagggaaaaatgaaggggcttctataatagttttgatatagttacctttgactataaagatcaacaacaaggtcaatatcagttgaagtttgggcaggcggttgctggatagatgtcctcacagaagtgtattttgtgtaaggttgctatggcctttgtgcagggttgtggttttgtggtattttgtgatagtttttatcaggcctagaagcatgagaaccctctcttcaaggccttctctgaatctatttgttcaggtttcttcttctctttttaaacattattga

SEQ ID NO: 450464 - DNA, 586 bp, Homo sapiens
ttgtgaaatctttaattcctcatccccaggaatgtaaataaataaatataaatactgtaagtcagtgattttttcctaggaagacagtaaaaatactttacgtgccttctcattgtaaacctaaataacaaacagagaaaggctctctaaaggaaaaagacacatcttagggaggagggcactgyaatgggaatatgcatgacaaagcaaactatatagattcaaatggtaaaggaagacaaggtctttaaaagaaaaatgatcaacctggaagtacgggggagtagaaaaaaataaataagggaaaaatgaaggggcttctataatagttttgatatagttacctttgactataaagatcaacaacaaggtcaatatcagttgaagtttgggcaggcggttgctggatagatgtcctcacagaagtgtattttgtgtaaggttgctatggcctttgtgcagggttgtggttttgtggtattttgtgatagtttttatcaggcctagaagcatgagaaccctctcttcaaggccttctctgaatctatttgttcaggtttcttcttctctttttaaacattattga

SEQ ID NO: 450465 - DNA, 586 bp, Homo sapiens
ttgtgaaatctttaattcctcatccccaggaatgtaaataaataaatataaatactgtaagtcagtgattttttcctaggaagacagtaaaaatactttacgtgccttctcattgtaaacctaaataacaaacagagaaaggctctctaaaggaaaaagacacatcttagggaggagggcactgtaatgggaatatgcatgacaaagcaaactatatagattcaaatggtaaaggaagacarggtctttaaaagaaaaatgatcaacctggaagtacgggggagtagaaaaaaataaataagggaaaaatgaaggggcttctataatagttttgatatagttacctttgactataaagatcaacaacaaggtcaatatcagttgaagtttgggcaggcggttgctggatagatgtcctcacagaagtgtattttgtgtaaggttgctatggcctttgtgcagggttgtggttttgtggtattttgtgatagtttttatcaggcctagaagcatgagaaccctctcttcaaggccttctctgaatctatttgttcaggtttcttcttctctttttaaacattattga

SEQ ID NO: 450466 - DNA, 505 bp, Homo sapiens
ccttctcattgtaaacctaaataacaaacagagaaaggctctctaaaggaaaaagacacatcttagggaggagggcactgtaatgggaatatgcatgacaaagcaaactatatagattcaaatggtaaaggaagacaaggwctttaaaagaaaaatgatcaacctggaagtacgggggagtagaaaaaaataaataagggaaaaatgaaggggcttctataatagttttgatatagttacctttgactataaagatcaacaacaaggtcaatatcagttgaagtttgggcaggcggttgctggatagatgtcctcacagaagtgtattttgtgtaaggttgctatggcctttgtgcagggttgtggttttgtggtattttgtgatagtttttatcaggcctagaagcatgagaaccctctcttcaaggccttctctgaatctatttgttcaggtttcttcttctctttttaaacattattgacagttttgattctgataactttc

SEQ ID NO: 450467 - DNA, 505 bp, Homo sapiens
ccttctcattgtaaacctaaataacaaacagagaaaggctctctaaaggaaaaagacacatcttagggaggagggcactgtaatgggaatatgcatgacaaagcaaactatatagattcaaatggtaaaggaagacaaggtctttaaaagaaaaatgatcaacctggaagtacgggggagtagaaaaaaataaataagggaaaaatgaaggggcttctataatwgttttgatatagttacctttgactataaagatcaacaacaaggtcaatatcagttgaagtttgggcaggcggttgctggatagatgtcctcacagaagtgtattttgtgtaaggttgctatggcctttgtgcagggttgtggttttgtggtattttgtgatagtttttatcaggcctagaagcatgagaaccctctcttcaaggccttctctgaatctatttgttcaggtttcttcttctctttttaaacattattgacagttttgattctgataactttc

SEQ ID NO: 450468 - DNA, 505 bp, Homo sapiens
ccttctcattgtaaacctaaataacaaacagagaaaggctctctaaaggaaaaagacacatcttagggaggagggcactgtaatgggaatatgcatgacaaagcaaactatatagattcaaatggtaaaggaagacaaggtctttaaaagaaaaatgatcaacctggaagtacgggggagtagaaaaaaataaataagggaaaaatgaaggggcttctataatagttttgatatagttacctttgactataaagatcaacaacaaggtcaatatcagttgaagtttgggcaggcggttgctggatagatgtcctcacagaagtgtattttgtgtaaggttgctatggcctttgtgcagggttgtggttttgtggtattttgtratagtttttatcaggcctagaagcatgagaaccctctcttcaaggccttctctgaatctatttgttcaggtttcttcttctctttttaaacattattgacagttttgattctgataactttc

SEQ ID NO: 450469 - DNA, 605 bp, Homo sapiens
tgataactttcatatcatgatccctaatttcaaaaaaaaattaaacgtgtaacttatttatgatgtatttgataggcttggatttgtgaatcacctctactgtctatagtggtagatatatctgagcctgcttacacaggacttccatcagattctctcttcagtggaatggaagagggggttttggagaaggggatgaaggaattgtgctgcatcagaggtccccacctaacagccacagggactttttctctgctctggccaggcygttgtattaggctgatacaaaagtaattttggttttgtcattgaaagtaatgagaccatctgacttacaatgtctgtgccgtaaccagctcctaatagcctcctaggacagctttgccctgacatacactgtcgtgtagccacgtctgctttgtaactcctgaggtagctgccaccatgaccaatgccttctcatctttactctacatgcaggtaacagttataattatatctctctgtattcacagaacatttagtacatctgggacttctacaaaatttccctagctgattttggtgttctagtgtcctggcagctctagccatgtagggatgat

SEQ ID NO: 450470 - DNA, 391 bp, Homo sapiens
acttatttatgatgtatttgataggcttggatttgtgaatcacctctactgtctatagtggtagatatatctgagcctgcttacacaggacttccatcagattctctcttcagtggaatggaagagggggttttggagaaggggatgaaggaattgtgctgcatcagaggtccccacctaacagccacagggactttttctctgctctggccaggccgttgtattaggctgatrcaaaagtaattttggttttgtcattgaaagtaatgagaccatctgacttacaatgtctgtgccgtaaccagctcctaatagcctcctaggacagctttgccctgacatacactgtcgtgtagccacgtctgctttgtaactcctgaggtagctgcca

SEQ ID NO: 450471 - DNA, 391 bp, Homo sapiens
acttatttatgatgtatttgataggcttggatttgtgaatcacctctactgtctatagtggtagatatatctgagcctgcttacacaggacttccatcagattctctcttcagtggaatggaagagggggttttggagaaggggatgaaggaattgtgctgcatcagaggtccccacctaacagccacagggactttttctctgctctggccaggccgttgtattaggctgatacaaaagtaattttggttttgtcattgaaagtaatgagaccatctgacttacaatgtctgtgccgtaaccagctcctaatagcctcctaggacagctttgccctgacatayactgtcgtgtagccacgtctgctttgtaactcctgaggtagctgcca

SEQ ID NO: 450472 - DNA, 583 bp, Homo sapiens
tcagaatttctgttgagttttttgctttttctcacaaactgattccacttttcccacatacatttgacaattcatttgaactcatttattctaaacccattattttttgtctattatttaatagggaggggggcgagggataaaagmtaacaaataaggtgcagtgtacactgttcgggtgatgggtgcacccaaatctcacaaataaccagtaaagaagttattcatggaaccacataccaccataccccaataacctatgggaaaaaaaataaaaaatacaataaaaaagagtcagaaaaaaaggaaataatcactgtacttaccatgacacttagaaaggtggttagcattatttgtgtcacctaataatattattattttttctttatgctacaaactagctctgctattacaatcactactatttgaagtgttactaaattaaattaaatttattgtatccttctggactcagaaatgggggtaaatgctaagacaatttcagaatatgatcacatattaaaggcatattatatggggaaaatgtgatttttaaaaaatagaaattggtagagaaaca

SEQ ID NO: 450473 - DNA, 609 bp, Homo sapiens
ctaaacccattattttttgtctattatttaatagggaggggggcgagggataaaagctaacaaataaggtgcagtgtacactgttcgggtgatgggtgcacccaaatctcacaaataaccagtaaagaagttattcatggaaccacataccaccataccccaataacctatgggaaaaaaaataaaaaatacaataaaaaagagtcagaaaaaaaggaaataatcactgtacttaccatgacacttagaaaggtggttarcattatttgtgtcacctaataatattattattttttctttatgctacaaactagctctgctattacaatcactactatttgaagtgttactaaattaaattaaatttattgtatccttctggactcagaaatgggggtaaatgctaagacaatttcagaatatgatcacatattaaaggcatattatatggggaaaatgtgatttttaaaaaatagaaattggtagagaaacagtttttgggtctctttaatttccgcaattttgcaagtttggacgctgactttcttgttccaaatgattgttttcaagaatgtttgtatagaaaacagccttggaatagaaagccag

SEQ ID NO: 450474 - DNA, 609 bp, Homo sapiens
ctaaacccattattttttgtctattatttaatagggaggggggcgagggataaaagctaacaaataaggtgcagtgtacactgttcgggtgatgggtgcacccaaatctcacaaataaccagtaaagaagttattcatggaaccacataccaccataccccaataacctatgggaaaaaaaataaaaaatacaataaaaaagagtcagaaaaaaaggaaataatcactgtacttaccatgacacttagaaaggtggttagcattatttgtgtcacctaataatattattattttttctttatgctacaaactagctctgctattacaatcactactatttgaagtgttactaaattaaattaaatttattgtatccttctggactcagaaatgggggtaaatgctaagacaatttcagaatatgatcacatattaaaggcatattatatggggaaaatgtgatttttaaaaaatagaaattggtagagaaacagtttttgggtctctttaatttcygcaattttgcaagtttggacgctgactttcttgttccaaatgattgttttcaagaatgtttgtatagaaaacagccttggaatagaaagccag

SEQ ID NO: 450475 - DNA, 445 bp, Homo sapiens
atcgctaccatgctattttgtctattgtggccttagggtatagtatgaagtcaagtaatgtgatgtctccagctttgttcttcttgcttaggtttcctttggttgtctgggytctttaaaaatccatatgaaatttagaatatttttttttctaattctgtgaaaaacgacattggttgtttcataggaataatgttgaatgtatagattgcttttggcagtatagccattttaacaatattgatcattctaatccatgagcatggaatagttttccatttgctttgtgatctatgatttctttctgcagtgttttgtagttctccttttagatatcctttacctccttgcttagacatattcttcttttattttattttattttgggggttgctgttgtaaacaggattgcactcttgatttacctctcagtttaaacattttt

SEQ ID NO: 450476 - DNA, 445 bp, Homo sapiens
atcgctaccatgctattttgtctattgtggccttagggtatagtatgaagtcaagtaatgtgatgtctccagctttgttcttcttgcttaggtttcctttggttgtctgggctctttaaaaatccatatgaaatttagaatatttttttttctaattctgtgaaaaacgacattggttgtttcataggaataatgttgaakgtatagattgcttttggcagtatagccattttaacaatattgatcattctaatccatgagcatggaatagttttccatttgctttgtgatctatgatttctttctgcagtgttttgtagttctccttttagatatcctttacctccttgcttagacatattcttcttttattttattttattttgggggttgctgttgtaaacaggattgcactcttgatttacctctcagtttaaacattttt

SEQ ID NO: 450477 - DNA, 445 bp, Homo sapiens
atcgctaccatgctattttgtctattgtggccttagggtatagtatgaagtcaagtaatgtgatgtctccagctttgttcttcttgcttaggtttcctttggttgtctgggctctttaaaaatccatatgaaatttagaatatttttttttctaattctgtgaaaaacgacattggttgtttcataggaataatgttgaatgtrtagattgcttttggcagtatagccattttaacaatattgatcattctaatccatgagcatggaatagttttccatttgctttgtgatctatgatttctttctgcagtgttttgtagttctccttttagatatcctttacctccttgcttagacatattcttcttttattttattttattttgggggttgctgttgtaaacaggattgcactcttgatttacctctcagtttaaacattttt

SEQ ID NO: 450478 - DNA, 445 bp, Homo sapiens
atcgctaccatgctattttgtctattgtggccttagggtatagtatgaagtcaagtaatgtgatgtctccagctttgttcttcttgcttaggtttcctttggttgtctgggctctttaaaaatccatatgaaatttagaatatttttttttctaattctgtgaaaaacgacattggttgtttcataggaataatgttgaatgtatagattgcttttggcagtatagccattttaacaatattgatcattctaatccatgagcatggaatagttttccatttgctttgtsatctatgatttctttctgcagtgttttgtagttctccttttagatatcctttacctccttgcttagacatattcttcttttattttattttattttgggggttgctgttgtaaacaggattgcactcttgatttacctctcagtttaaacattttt

SEQ ID NO: 450479 - DNA, 515 bp, Homo sapiens
ctctctttttgtgcaaactttatttaaaaatatggctcttgataatagattactaccatataattaggatactttgacaaaacctgttctcactccatctcagtacttgcagtttaaaacttggtaggctgatgaagctcaaactcaggcaaaagaaaacacacaagtgcagccacctgtgcctgttttctttgatcagttaatatgagttggccctaactggggttgattagagaatcaagcactaatggaagatgttgccattgttcagctgtgcttcatgtgcttacatgcatagaaaaggataaatgttacaggggaaaagtatccttatttcagttctgtctgacaaggacctaaagaaccatatrttaattttattgctcagctccaagaggctgtgtataaagctgtaaatgatcaaaacagctcaggatgttgtaatacagcttcttgcatacaataatgctaatacacagtgtcaaactgctattagatcccagagagggcccatt

SEQ ID NO: 450480 - DNA, 515 bp, Homo sapiens
ctctctttttgtgcaaactttatttaaaaatatggctcttgataatagattactaccatataattaggatactttgacaaaacctgttctcactccatctcagtacttgcagtttaaaacttggtaggctgatgaagctcaaactcaggcaaaagaaaacacacaagtgcagccacctgtgcctgttttctttgatcagttaatatgagttggccctaactggggttgattagagaatcaagcactaatggaagatgttgccattgttcagctgtgcttcatgtgcttacatgcatagaaaaggataaatgttacaggggaaaagtatccttatttcagttctgtctgacaaggacctaaagaaccatatgttaattttattgctcagctccaagaggctgtgtataaagcygtaaatgatcaaaacagctcaggatgttgtaatacagcttcttgcatacaataatgctaatacacagtgtcaaactgctattagatcccagagagggcccatt

SEQ ID NO: 450481 - DNA, 576 bp, Homo sapiens
cttgcatacaataatgctaatacacagtgtcaaactgctattagatcccagagagggcccatttaactaaatatattaaggcttgcgatggcattggagataacttacataaggttattcttttagctcaggctgtggctagattaagagtaaggaaaaaatatgcttcatttctcaggctctttccttaattgtgggcaaattggacacaagaaaggaatgtagaaaggaattcaaaagacgaaaactactaccatcaatcaacagaaaagtcccaatgtacgtccctggtgtaagaaagacaatcactaggcaagtccgtgtcattctaaatttagcaaagatggacaacctctttcaggaaataggaagggggacccgcctcaagcctctcaacaaactgaggcaaacccagcacagccactgcccttacaaatgtatagcaattgtcccccgcctcagcaagcagtgctgctgtagacctctacagcacaattcccatctccttacttcctggggagccaccaaagatggtccccacaggagttagkgcacccttacccagaagaactgttg

SEQ ID NO: 450482 - DNA, 539 bp, Homo sapiens
caggcaggaatacagcaagctagacaaaagtgggatttagaggcttggcagttccctgtttgaatacactccccagatcaacagggaaatattatagctacatttgagccttttccttttaaattactcaaaaaatttaaacaagctataaatcagtttggaccaggttctccttttgaaatgggactgttaaagaatgttgctgtttccagtcggaygattcctactgactgggacactcttactcgagcttgtctaactcctgctcagttcttacagtttaaaacttagtaggcagatgaagcttccattcaggctgctcgcaattcctgggcccaacctcagattaatataactgcagaccaacttttgggggttggtggctgggctggtttacatgcactagtggtcatgcaggatgatgccatagaacagcttagaggagtgtgcattagagcttggaaaaaatcacttcatgtggagaacaatacccttcctttagtgctataaaacagggaccaagagaaccatatgtggat

SEQ ID NO: 450483 - DNA, 312 bp, Homo sapiens
atgccatagaacagcttagaggagtgtgcattagagcttggaawaaatcacttcatgtggagaacaatacccttcctttagtgctataaaacagggaccaagagaaccatatgtggattttatagcttggttacaggagtctcttaaaaagatgattgcagatttggctgcttaggatatagtgttgcagttattggttttgacaatgctaatccttattgccaggctgctctgcgacctatcagagggaaagcacatttagttgattataacaaggactgtgatgatatcagagataatctacataaagct

SEQ ID NO: 450484 - DNA, 589 bp, Homo sapiens
acagtttaaaacttagtaggcagatgaagcttccattcaggctgctcgcaattcctgggcccaacctcagattaatataactgcagaccaacttttgggggttggtggctgggctggtttacatgcactagtggtcatgcaggatgatgccatagaacagcttagaggagtgtgcattagagcttggaaaaaatcacttcatgtggagaacaatacccttcctttagtgctataaaacagggaccaagagaaccatatgtggattttatagcttggttacaggagtctcttaaaaagatgattgcagatttggctgcttaggatatagtgttgcagttattggttttgacaatgctaatccttattgccaggctgctctgygacctatcagagggaaagcacatttagttgattataacaaggactgtgatgatatcagagataatctacataaagctactttgttggcacaggcgatggcaggactgagagtggataaaggaaatactctatttcctggagcttgttttaactgtgggaagcgtggtcatactaaaaataatgtaaaaaaaaatcaccgagtcaggcc

SEQ ID NO: 450485 - DNA, 312 bp, Homo sapiens
atgccatagaacagcttagaggagtgtgcattagagcttggaaaaaatcacttcatgtggagaacaatacccttcctttagtgctataaaacagggaccaagagaaccatatgtggattttatagcttggttacaggagtctcttaaaaagatgattgcagatttggctgcttaggatatagtgttgcagttattggttttgacaatgctaatccttattgccaggctgctctgcgacctatcagagggaaagcacatttagttgattataacaaggmctgtgatgatatcagagataatctacataaagct

SEQ ID NO: 450486 - DNA, 529 bp, Homo sapiens
taaaggaaatactctatttcctggagcttgttttaactgtgggaagcgtggtcatactaaaaataatgtaaaaaaaaatcaccgagtcaggccaccagataggggaaaaagaaaactgctgaycctgaaatatgtccaaaatgtaaaaaaggaaattttgggctaatcagtgtcactctaagtttgataaagatttgaacccgattttgggaaactccctgaggggcccatcccaggccctgttctaaaccagggcatttccagctcaggccattccctcacccccatacgttatctgtctcccaccacagcccatagtgctgcagtagatttttgctgcacaatagctgtgagccttctgcctggggaacccccgcaaaaggtcccaacaggagtctgtggaccgttgccagcagggacaatgggattacttttaggaaggtctagtttaagtttaaaaggggtacaaatatacactggagtcattgattcagattacaatgaggaaattcaaattgtgatatttagt

SEQ ID NO: 450487 - DNA, 529 bp, Homo sapiens
taaaggaaatactctatttcctggagcttgttttaactgtgggaagcgtggtcatactaaaaataatgtaaaaaaaaatcaccgagtcaggccaccagataggggaaaaagaaaactgctgatcctgaaatatgtccaaaatgtaaaaaaggaaattttgggctaatcagtgtcactctaagtttgataaagatttgaacccgattttgggaaactccctgaggggcccatcccaggccctgttctaaaccagggcatttccagctcaggccattccctcacccccatacgttatctgtcycccaccacagcccatagtgctgcagtagatttttgctgcacaatagctgtgagccttctgcctggggaacccccgcaaaaggtcccaacaggagtctgtggaccgttgccagcagggacaatgggattacttttaggaaggtctagtttaagtttaaaaggggtacaaatatacactggagtcattgattcagattacaatgaggaaattcaaattgtgatatttagt

SEQ ID NO: 450488 - DNA, 529 bp, Homo sapiens
taaaggaaatactctatttcctggagcttgttttaactgtgggaagcgtggtcatactaaaaataatgtaaaaaaaaatcaccgagtcaggccaccagataggggaaaaagaaaactgctgatcctgaaatatgtccaaaatgtaaaaaaggaaattttgggctaatcagtgtcactctaagtttgataaagatttgaacccgattttgggaaactccctgaggggcccatcccaggccctgttctaaaccagggcatttccagctcaggccattccctcacccccatacgttatctgtctcccaccacagcccatagtgctgcagtagatttttgctgcacaatagctgtgagccttctgcctggggaacccycgcaaaaggtcccaacaggagtctgtggaccgttgccagcagggacaatgggattacttttaggaaggtctagtttaagtttaaaaggggtacaaatatacactggagtcattgattcagattacaatgaggaaattcaaattgtgatatttagt

SEQ ID NO: 450489 - DNA, 589 bp, Homo sapiens
cagtagatttttgctgcacaatagctgtgagccttctgcctggggaacccccgcaaaaggtcccaacaggagtctgtggaccgttgccagcagggacaatgggattacttttaggaaggtctagtttaagtttaaaaggggtacaaatayacactggagtcattgattcagattacaatgaggaaattcaaattgtgatatttagttctgttccctggaaagcacagccaggagtgcgcatagcacagctcctgagtgagccgtatgtgggaatgggaaaaagtgaaattaaatgaactggaggatttggaagcacaaataaaaaaggcaaggcagcttattgggtaaatcaaattactgataaacatcctatctgtgaaataactatccagggaaagaactttaaaggtttggtagatactattttttttttgtaggagtggacatttcaattttttctctatagcactggccgtccatgtggccaattcagcctactcaatttaacacagtggaaactgctaaagctttagaagtgtatcaaagtagctatactttgcattgtgaagggcccgatggacaacctggg

SEQ ID NO: 450490 - DNA, 496 bp, Homo sapiens
gactgttcaaccaattgcaacttctgtacctataaattaacgggggagagatttattatgacaatggggagcacaagttctaattccataacaattacacagccctcaaaatcaacatatgatgcacgaaatggggcatgtccctggtataggagtagaaaaaaaattgcaagktttgaaagaactgcttcaaacggaaagacaaagttcctgccaaagattaggataccatttttgatggtggccatagttaagcctccagaacctatacctttaaaatggttaacagataagccaatttggatagaatcatggctgctaagcaaagagaaactggatgctttagagaaattagttactgaacaattagaaaatgggcacatagctccaacattttccccttggaattctccagttttcataattaagaaaaaatcaggtaaatggagaatgttaactgacttaagagccatcaattcagttatacaacctatgg

SEQ ID NO: 450491 - DNA, 496 bp, Homo sapiens
gactgttcaaccaattgcaacttctgtacctataaattaacgggggagagatttattatgacaatggggagcacaagttctaattccataacaattacacagccctcaaaatcaacatatgatgcacgaaatggggcatgtccctggtataggagtagaaaaaaaattgcaaggtttgaaagaactgcttcaaacggaaagacaaagttcctgccaaagattaggataccatttttgatggtggccatagttaagcctccagaacctatacctttaaaatggttaacasataagccaatttggatagaatcatggctgctaagcaaagagaaactggatgctttagagaaattagttactgaacaattagaaaatgggcacatagctccaacattttccccttggaattctccagttttcataattaagaaaaaatcaggtaaatggagaatgttaactgacttaagagccatcaattcagttatacaacctatgg

SEQ ID NO: 450492 - DNA, 496 bp, Homo sapiens
gactgttcaaccaattgcaacttctgtacctataaattaacgggggagagatttattatgacaatggggagcacaagttctaattccataacaattacacagccctcaaaatcaacatatgatgcacgaaatggggcatgtccctggtataggagtagaaaaaaaattgcaaggtttgaaagaactgcttcaaacggaaagacaaagttcctgccaaagattaggataccatttttgatggtggccatagttaagcctccagaacctatacctttaaaatggttaacagataagccaatttggatagaatmatggctgctaagcaaagagaaactggatgctttagagaaattagttactgaacaattagaaaatgggcacatagctccaacattttccccttggaattctccagttttcataattaagaaaaaatcaggtaaatggagaatgttaactgacttaagagccatcaattcagttatacaacctatgg

SEQ ID NO: 450493 - DNA, 291 bp, Homo sapiens
tagttaagcctccagaacctatacctttaaaatggttaacagataagccaatttggatagaatcatggctgctaagcaaagrgaaactggatgctttagagaaattagttactgaacaattagaaaatgggcacatagctccaacattttccccttggaattctccagttttcataattaagaaaaaatcaggtaaatggagaatgttaactgacttaagagccatcaattcagttatacaacctatggaaacataacagccaggattgccttctcctactataattccaa

SEQ ID NO: 450494 - DNA, 496 bp, Homo sapiens
gactgttcaaccaattgcaacttctgtacctataaattaacgggggagagatttattatgacaatggggagcacaagttctaattccataacaattacacagccctcaaaatcaacatatgatgcacgaaatggggcatgtccctggtataggagtagaaaaaaaattgcaaggtttgaaagaactgcttcaaacggaaagacaaagttcctgccaaagattaggataccatttttgatggtggccatagttaagcctccagaacctatacctttaaaatggttaacagataagccaatttggatagaatcatggctgctaagcaaagagaaactggatgctttagagaaattagttactgaacaattagaaaatgggcacatagctccaacattttccccttkgaattctccagttttcataattaagaaaaaatcaggtaaatggagaatgttaactgacttaagagccatcaattcagttatacaacctatgg

SEQ ID NO: 450495 - DNA, 553 bp, Homo sapiens
tcaggtaaatggagaatgttaactgacttaagagccatcaattcagttatacaacctatggaaacataacagccaggattgccttctcctactataattccaaaaaattggcctttaatagtcacagatttaaaagactgtttctttactacccttttagctgagctagactgtgaacsgtttgcatttacaattcctgcagtaaacaacctgcagcctgctaagcgttttcattgtttcacagatgggtctagtaatggtaaagcttcttattctggatcaaaaggtaaagttttccagacaccctatactttagctcaaaaggcagagcttgtagctgtaattgaggtattgactgcttttgatatgcctggtaatgtgatttctgattcttcatacatgggtcattccacacagttaattgaaaatgctcagttaagatttcatacagatgaacaactgataataaaaacaaaaaagggggagaaacagggattacgggatagcccatacacaattgaatcttgcattattaactttcaaatttttgagc

SEQ ID NO: 450496 - DNA, 553 bp, Homo sapiens
tcaggtaaatggagaatgttaactgacttaagagccatcaattcagttatacaacctatggaaacataacagccaggattgccttctcctactataattccaaaaaattggcctttaatagtcacagatttaaaagactgtttctttactacccttttagctgagctagactgtgaaccgtttgcatttacaattcctgcagtaaacaacctgcagcctgctaagcgttttcattgtttcacagatgggtctagtaatggtaaagcttcttattctggatcaaaaggtaaagttttccagacaccctatactttagctcaaaaggcagagcttgtagctgtaattgaggtattgactgcttttgatatgcctgktaatgtgatttctgattcttcatacatgggtcattccacacagttaattgaaaatgctcagttaagatttcatacagatgaacaactgataataaaaacaaaaaagggggagaaacagggattacgggatagcccatacacaattgaatcttgcattattaactttcaaatttttgagc

SEQ ID NO: 450497 - DNA, 545 bp, Homo sapiens
gtaatcccagtttgggaggctgagacaggataagtgcttaaacctgagaggtggaggttgcagtgaagcaatattgcaccattgcactccagcctgggcaacaagagtgaaactccatctcaacaaaaataaaaaataaaaaaagacccccagccttgtctakactgtggggtttcagtttcaacccaggggggtcctggttgggttagaaccctgaatcttgtttgagttcgtatcctaaagaataaagggaataaaggctgtagccactgagctactcaatctggtctggttctggcttttgtgtgtctgtctgtatttttggtctaaatatttggcccaacagaggttaaaggctttgatgttctcagcaaaagccttgtgagatctctagtttatctgtgtgctcaactggaacaaagagactccataaactagaaaaacctaaagaaaatggcacgcgtgaaaaaatgagagccaactcctgttggttgttctgtccacctccctctctcactcctccttctgcctttgctgtggtccca

SEQ ID NO: 450498 - DNA, 545 bp, Homo sapiens
gtaatcccagtttgggaggctgagacaggataagtgcttaaacctgagaggtggaggttgcagtgaagcaatattgcaccattgcactccagcctgggcaacaagagtgaaactccatctcaacaaaaataaaaaataaaaaaagacccccagccttgtctatactgtggggtttcagtttcamcccaggggggtcctggttgggttagaaccctgaatcttgtttgagttcgtatcctaaagaataaagggaataaaggctgtagccactgagctactcaatctggtctggttctggcttttgtgtgtctgtctgtatttttggtctaaatatttggcccaacagaggttaaaggctttgatgttctcagcaaaagccttgtgagatctctagtttatctgtgtgctcaactggaacaaagagactccataaactagaaaaacctaaagaaaatggcacgcgtgaaaaaatgagagccaactcctgttggttgttctgtccacctccctctctcactcctccttctgcctttgctgtggtccca

SEQ ID NO: 450499 - DNA, 545 bp, Homo sapiens
gtaatcccagtttgggaggctgagacaggataagtgcttaaacctgagaggtggaggttgcagtgaagcaatattgcaccattgcactccagcctgggcaacaagagtgaaactccatctcaacaaaaataaaaaataaaaaaagacccccagccttgtctatactgtggggtttcagtttcaacccaggggggtcctggttgggttagaaccctgaatcttgtttgagttcgtatcctaaagaataaagggaataaaggctgtagccactgagmtactcaatctggtctggttctggcttttgtgtgtctgtctgtatttttggtctaaatatttggcccaacagaggttaaaggctttgatgttctcagcaaaagccttgtgagatctctagtttatctgtgtgctcaactggaacaaagagactccataaactagaaaaacctaaagaaaatggcacgcgtgaaaaaatgagagccaactcctgttggttgttctgtccacctccctctctcactcctccttctgcctttgctgtggtccca

SEQ ID NO: 450500 - DNA, 545 bp, Homo sapiens
gtaatcccagtttgggaggctgagacaggataagtgcttaaacctgagaggtggaggttgcagtgaagcaatattgcaccattgcactccagcctgggcaacaagagtgaaactccatctcaacaaaaataaaaaataaaaaaagacccccagccttgtctatactgtggggtttcagtttcaacccaggggggtcctggttgggttagaaccctgaatcttgtttgagttcgtatcctaaagaataaagggaataaaggctgtagccactgagctactcaatctggtctggttctggcttttgtgtgtctgtctgtatttttggtctaaatatttggcccaacagaggttaaaggctttgatgttctcagcaaaagccttgtgagakctctagtttatctgtgtgctcaactggaacaaagagactccataaactagaaaaacctaaagaaaatggcacgcgtgaaaaaatgagagccaactcctgttggttgttctgtccacctccctctctcactcctccttctgcctttgctgtggtccca

SEQ ID NO: 450501 - DNA, 529 bp, Homo sapiens
gctcactgcaacctctgcctcccaggtttgagtgattatcctgcctcagcctcctgaatagytgggactacaggtgcacaccaccacacccagttaatttttgtattttcagtagagatagggttttgtcacgttgaccaggctggtctcaaactcctggcctcaagtgacccacctgcctcagcctcccatagtgttgggattacacgcacactttaaacctgatggccaaattacatgaaagaaaattcagaactcaaatagttactatttttaaaaaccctaaaatgaaaaattctcagttcttttgcctatctattttttttccctgcctactttgaatctgctgatttgtctactggtgttgagataagacttactgtctgtggtgttaccaattcaaggttatttggctgaagaaaaacaaaagaatgaaacaattctttatttttttttctctttttgagataaggtctcactctaaggtctcactctgttccccagactggagtgcagtagtgggatcata

SEQ ID NO: 450502 - DNA, 529 bp, Homo sapiens
gctcactgcaacctctgcctcccaggtttgagtgattatcctgcctcagcctcctgaatagttgggactacaggtgcacaccaccacacccagttaatttttgtattttcagtagagatagggttttgtcacgttgrccaggctggtctcaaactcctggcctcaagtgacccacctgcctcagcctcccatagtgttgggattacacgcacactttaaacctgatggccaaattacatgaaagaaaattcagaactcaaatagttactatttttaaaaaccctaaaatgaaaaattctcagttcttttgcctatctattttttttccctgcctactttgaatctgctgatttgtctactggtgttgagataagacttactgtctgtggtgttaccaattcaaggttatttggctgaagaaaaacaaaagaatgaaacaattctttatttttttttctctttttgagataaggtctcactctaaggtctcactctgttccccagactggagtgcagtagtgggatcata

SEQ ID NO: 450503 - DNA, 609 bp, Homo sapiens
cctgctctgtttattcttgctatcttaagaggaaatccctgcctcttccgtggcttttcccacttggcctacatactggtttctgttgttctcagagacacactgagaccyttcacatctcactgtcacttcttggaagggctctctacctcgtctgcctgctgagcaacctcttggggagacgcaggccctcttgagtcactgaacttgagctatatggtgttggtatgttaatttatcttcttagaccacttaccacttctttaacttcaaaagaggagaataagtattattttccatggttgatatgaagagtagaaataacttataccaaatgcattgcagttaagtgataataaatggccgtgaatgcccttattaatgttattctatcagtctcggctcagatagcatctgctctgtaagctctgctctgaatcatatctgcttcttctctgggttccttgtgctctgttcttaactactttaaagcagtaattgttctgattctaattagtgatccttcccaataaaattttaattttgtagatctcttccccctacccctgccgcatcctaaccagtgttttcttacttttttgtgtacaa

SEQ ID NO: 450504 - DNA, 609 bp, Homo sapiens
cctgctctgtttattcttgctatcttaagaggaaatccctgcctcttccgtggcttttcccacttggcctacatactggtttctgttgttctcagagacacactgagacccttcacatctcactgtcacttcttggaaggrctctctacctcgtctgcctgctgagcaacctcttggggagacgcaggccctcttgagtcactgaacttgagctatatggtgttggtatgttaatttatcttcttagaccacttaccacttctttaacttcaaaagaggagaataagtattattttccatggttgatatgaagagtagaaataacttataccaaatgcattgcagttaagtgataataaatggccgtgaatgcccttattaatgttattctatcagtctcggctcagatagcatctgctctgtaagctctgctctgaatcatatctgcttcttctctgggttccttgtgctctgttcttaactactttaaagcagtaattgttctgattctaattagtgatccttcccaataaaattttaattttgtagatctcttccccctacccctgccgcatcctaaccagtgttttcttacttttttgtgtacaa

SEQ ID NO: 450505 - DNA, 622 bp, Homo sapiens
aaagatagataaaactaaatgtgtataaaaagttgggaaagatgaaaaaattatacaaggttattaaaagtttatgtaaatcttacatcgaggtcaaaactgattgagatcagatagtttataaagtttatttaaattagctgtaatattaaaaacatagtgataaaaaactaaaaattttggttaaaacaacaaggttttcttaaggtatttatttgctcataataagaggtaataaatattgacttttaatcctgaaatctgttactataaaaacttttcagatttgtatatcagaagttcaacttttcctgtactttcatgttacacatgactcacagatcacatcattgtctcctgttccttcttgagaaggaataaaaggtttgggtttcctgcttggctgcgatgataactccttcagatttttcatcaggtctaattttgtactcttrgcttttaaatatgtcttaattacttcatgtaaccaggaaacttccatgctatcattgtgagctatggatccccactgctctatgctctggttttcctgtttacattcctttgtaatattatgctcactcatgaccctggacacactctttctatgtctaaattcaag

SEQ ID NO: 450506 - DNA, 612 bp, Homo sapiens
gtctaattttgtactcttggcttttaaatatgtcttaattacttcatgtaaccaggaaacttccatgctatcattgtgagctatggatccccactgctctatgctctggttttcctgtttacattcctytgtaatattatgctcactcatgaccctggacacactctttctatgtctaaattcaagtctccttatcatcggaattgacttccaagtgatttaaattagcttcccgtaagaagacacagttatgccacaggagttttaccctttaaatgactggcctgtaataaagattttaggttttatcaagataatccatgtgttgcctttatttttttttaattacttgggaaaactgagggttttcagttttcacatccatgtaaccttctatgttgcttttgatgtcttttggttgtcatgctaattaaatgaatgactgttatttaaaaatgacatgtggctgtgtgcagcggctcttgtctgtaattccagccctttgggaggccaaggtgggtggatcacttgagcccaggagttcaagtccagcctgggcaaaatggcaaaaccccatctctactaaaaatacaaaagctagctaggtgtggt

SEQ ID NO: 450507 - DNA, 509 bp, Homo sapiens
ttgggtttcctgcttggctgcgatgataactccttcagatttttcatcaggtctaattttgtactcttggcttttaaatatgtcttaattacttcatgtaaccaggaaacttccatgctatcattgtgagctatggatccccactgctctatgctctggttttcctgtttacattcctttgtaatattatgctcactcatgaccctggacacactctttctatgtctaaattcaagtctccttatcatcgsaattgacttccaagtgatttaaattagcttcccgtaagaagacacagttatgccacaggagttttaccctttaaatgactggcctgtaataaagattttaggttttatcaagataatccatgtgttgcctttatttttttttaattacttgggaaaactgagggttttcagttttcacatccatgtaaccttctatgttgcttttgatgtcttttggttgtcatgctaattaaatgaatgactgttatttaaaaatga

SEQ ID NO: 450508 - DNA, 612 bp, Homo sapiens
gtctaattttgtactcttggcttttaaatatgtcttaattacttcatgtaaccaggaaacttccatgctatcattgtgagctatggatccccactgctctatgctctggttttcctgtttacattcctttgtaatattatgctcactcatgaccctggacacactctttctatgtctaaattcaagtctccttatcatcggaattgacttccaagtgatttaaattagcttcccrtaagaagacacagttatgccacaggagttttaccctttaaatgactggcctgtaataaagattttaggttttatcaagataatccatgtgttgcctttatttttttttaattacttgggaaaactgagggttttcagttttcacatccatgtaaccttctatgttgcttttgatgtcttttggttgtcatgctaattaaatgaatgactgttatttaaaaatgacatgtggctgtgtgcagcggctcttgtctgtaattccagccctttgggaggccaaggtgggtggatcacttgagcccaggagttcaagtccagcctgggcaaaatggcaaaaccccatctctactaaaaatacaaaagctagctaggtgtggt

SEQ ID NO: 450509 - DNA, 612 bp, Homo sapiens
gtctaattttgtactcttggcttttaaatatgtcttaattacttcatgtaaccaggaaacttccatgctatcattgtgagctatggatccccactgctctatgctctggttttcctgtttacattcctttgtaatattatgctcactcatgaccctggacacactctttctatgtctaaattcaagtctccttatcatcggaattgacttccaagtgatttaaattagcttcccgtaagaagacacarttatgccacaggagttttaccctttaaatgactggcctgtaataaagattttaggttttatcaagataatccatgtgttgcctttatttttttttaattacttgggaaaactgagggttttcagttttcacatccatgtaaccttctatgttgcttttgatgtcttttggttgtcatgctaattaaatgaatgactgttatttaaaaatgacatgtggctgtgtgcagcggctcttgtctgtaattccagccctttgggaggccaaggtgggtggatcacttgagcccaggagttcaagtccagcctgggcaaaatggcaaaaccccatctctactaaaaatacaaaagctagctaggtgtggt

SEQ ID NO: 450510 - DNA, 483 bp, Homo sapiens
ggtctaattttgtactcttggcttttaaatatgtcttaattacttcatgtaaccaggaaacttccatgctatcattgtgagctatggatccccactgctctatgctctggttttcctgtttacattcctttgtaatattatgctcactcatgaccctggacacactctttctatgtctaaattcaagtctccttatcatcggaattgacttccaagtgatttaaattagcttcccgtaagaagacacagttatgccacaggagttttaccctttaaatgactggcctgtaataaagattttaggttttatcaagrtaatccatgtgttgcctttatttttttttaattacttgggaaaactgagggttttcagttttcacatccatgtaaccttctatgttgcttttgatgtcttttggttgtcatgctaattaaatgaatgactgttatttaaaaatgacatgtggctgtgtgcagcggctc

SEQ ID NO: 450511 - DNA, 612 bp, Homo sapiens
gtctaattttgtactcttggcttttaaatatgtcttaattacttcatgtaaccaggaaacttccatgctatcattgtgagctatggatccccactgctctatgctctggttttcctgtttacattcctttgtaatattatgctcactcatgaccctggacacactctttctatgtctaaattcaagtctccttatcatcggaattgacttccaagtgatttaaattagcttcccgtaagaagacacagttatgccacaggagttttaccctttaaatgactggcctgtaataaagattttaggttttatcaagataatccatgtgttgcctttatttttttttaattacttgggaaaactgagggttttcagttttcacatccatgtaaccttctatgttgcttttgatgtcttttggttgtcatgytaattaaatgaatgactgttatttaaaaatgacatgtggctgtgtgcagcggctcttgtctgtaattccagccctttgggaggccaaggtgggtggatcacttgagcccaggagttcaagtccagcctgggcaaaatggcaaaaccccatctctactaaaaatacaaaagctagctaggtgtggt

SEQ ID NO: 450512 - DNA, 618 bp, Homo sapiens
gtgttgcctttatttttttttaattacttgggaaaactgagggttttcagttttcacatccatgtaaccttctatgttgcttttgatgtcttttggttgtcatgctaattaaatgaatgactgttatttaaaaatgacatgtggctgtgtgcagcggctcwtgtctgtaattccagccctttgggaggccaaggtgggtggatcacttgagcccaggagttcaagtccagcctgggcaaaatggcaaaaccccatctctactaaaaatacaaaagctagctaggtgtggtagcaagtgctcatagtcctggctacttgggagactaaggtggaggatcacctgagcctgggaggttgaggctgcattgagccatgatttcaccactgcactccagcctgggcaatagggtgagaccctgtctcaaatatataataaaataaaaaacaataaactgtcattctgttttggtcaaatgttttcaatttttttacatctttgctaaaatttagttgataactttgtatgggaagcattgccaaaagataagtctaaatcttcttttttttttctctaagacagaatcttgctttgtcacccaggctggagtgcagtggcgt

SEQ ID NO: 450513 - DNA, 609 bp, Homo sapiens
cctgctctgtttattcttgctatcttaagaggaaatccctgcctcttccgtggcttttcccacttggcctacatactggtttctgttgttctcagagacacactgagacccttcacatctcactgtcacttcttggaagggctctctacctcgtctgcctgctgagcaacctcttggggagacgcaggccctcttgagtcactgaacttgagctatatggtgttggtatgttaatttatcttcttagaccacttaccacttctttaacttcaaaagaggagaataagtattattttccatggttgatatgaagagtagaaataacttataccaaatgcattgcagttaagtgataataaatggccgtgaatgcccttattaatgttattctatyagtctcggctcagatagcatctgctctgtaagctctgctctgaatcatatctgcttcttctctgggttccttgtgctctgttcttaactactttaaagcagtaattgttctgattctaattagtgatccttcccaataaaattttaattttgtagatctcttccccctacccctgccgcatcctaaccagtgttttcttacttttttgtgtacaa

SEQ ID NO: 450514 - DNA, 618 bp, Homo sapiens
gtgttgcctttatttttttttaattacttgggaaaactgagggttttcagttttcacatccatgtaaccttctatgttgcttttgatgtcttttggttgtcatgctaattaaatgaatgactgttatttaaaaatgacatgtggctgtgtgcagcggctcttgtctgtaattccagccctttgggaggccaaggtgggtggatcacttgagcccaggagttcaagtccagcctgggcaaaatggcaaaaccccatctctactaaaaatacaaaagctagctaggtgtggtagcaagtgctcatagtcctggctacttgggagactaaggtggaggatcacctgagcctgggaggttgaggctgcattgagccatgatttcaccactgcactccagcctgggcaatagggtgagaccctgtctcaaatatataataaaataaaaaacaataaactgtcattctgttttrgtcaaatgttttcaatttttttacatctttgctaaaatttagttgataactttgtatgggaagcattgccaaaagataagtctaaatcttcttttttttttctctaagacagaatcttgctttgtcacccaggctggagtgcagtggcgt

SEQ ID NO: 450515 - DNA, 374 bp, Homo sapiens
ataaaaatctaatatggtatcagtcataattttgatgatgttaaatattctstaaagttgtatatgtatagatatattattaatataaatattctaaagattatataaaatttgtggaagtctgatggatctgatgtgttgccgtcagtcatgattctggcttttatcttaaaatgctacatataatagaaataactaaattttctctccagttgagaacttccattggattttaaccaaaggatattctaagtttttttcatccacggtgattgtttaaagttcttctctaaaaccctttacaggccaggcatgctgctggaggctgtgcagggcacggtgctgggcatggtgcagggcatggtggctcatgc

SEQ ID NO: 450516 - DNA, 374 bp, Homo sapiens
ataaaaatctaatatggtatcagtcataattttgatgatgttaaatattctctaaagttgtatatgtatagatatattattaatataaatattctaaagattatayaaaatttgtggaagtctgatggatctgatgtgttgccgtcagtcatgattctggcttttatcttaaaatgctacatataatagaaataactaaattttctctccagttgagaacttccattggattttaaccaaaggatattctaagtttttttcatccacggtgattgtttaaagttcttctctaaaaccctttacaggccaggcatgctgctggaggctgtgcagggcacggtgctgggcatggtgcagggcatggtggctcatgc

SEQ ID NO: 450517 - DNA, 374 bp, Homo sapiens
ataaaaatctaatatggtatcagtcataattttgatgatgttaaatattctctaaagttgtatatgtatagatatattattaatataaatattctaaagattatataaaatttgtggaagtctgatggatctgatgtgttgccgtcagtcatgattctggcttttatcttaaaatgckacatataatagaaataactaaattttctctccagttgagaacttccattggattttaaccaaaggatattctaagtttttttcatccacggtgattgtttaaagttcttctctaaaaccctttacaggccaggcatgctgctggaggctgtgcagggcacggtgctgggcatggtgcagggcatggtggctcatgc

SEQ ID NO: 450518 - DNA, 374 bp, Homo sapiens
ataaaaatctaatatggtatcagtcataattttgatgatgttaaatattctctaaagttgtatatgtatagatatattattaatataaatattctaaagattatataaaatttgtggaagtctgatggatctgatgtgttgccgtcagtcatgattctggcttttatcttaaaatgctacatataatagaaataactaaattttctctccagttgagaacttccaytggattttaaccaaaggatattctaagtttttttcatccacggtgattgtttaaagttcttctctaaaaccctttacaggccaggcatgctgctggaggctgtgcagggcacggtgctgggcatggtgcagggcatggtggctcatgc

SEQ ID NO: 450519 - DNA, 608 bp, Homo sapiens
tttttggtaacaggattcaattggagacacwgtttgttttatcaaggctttaactcgaacggcagatacaaccagaccactttaaggaattgaggttgactctatagcaccaatacaaagccccttagaatgactggcttggtgtcctgtctacaagggtcatttagaaagttgctgtccttgtggaaagaagtaaagaatgtcaatttctgacgggcccaggaaccttaagttatttggggagcttgagaagagaggactacaccaattcataaaagtattacaggagggctggcaagatgtctgaaaaggaacagttccggcctgcagcacccaatgagatcaacacagaaggcaggtggttcatgcatttccaacagcctccactggtgatacccatgcaaacagggtctggagtggacctccagcatctcaagcaaacctgcagcagagggacctgactgttagaaggaaaactaacaaacagaaaggaatagtctcaacatcaccaacatcaaagaacaaaggtaaataaatccacaaagatggggagaaaccagtgcaaaaaggctgaaaactccaaaagccagaatgcctcttctcctcca

SEQ ID NO: 450520 - DNA, 609 bp, Homo sapiens
cctgctctgtttattcttgctatcttaagaggaaatccctgcctcttccgtggcttttcccacttggcctacatactggtttctgttgttctcagagacacactgagacccttcacatctcactgtcacttcttggaagggctctctacctcgtctgcctgctgagcaacctcttggggagacgcaggccctcttgagtcactgaacttgagctatatggtgttggtatgttaatttatcttcttagaccacttaccacttctttaacttcaaaagaggagaataagtattattttccatggttgatatgaagagtagaaataacttataccaaatgcattgcagttaagtgataataaatggccgtgaatgcccttattaatgttattctatcagtctcggctcagatagcatctgctctgtaagctctgctctgaatcatatctgcttcttctctgggttccttgtgctctgttcttaactactttaaagcagtaattgttctgattctaattagtgatccttcccaataaaattttaattttgtagatctcttccccctacccctgccgcakcctaaccagtgttttcttacttttttgtgtacaa

SEQ ID NO: 450521 - DNA, 545 bp, Homo sapiens
ccaataaatattcttgctgcactttatggaaataatcaggccaggtatgataagactaaaacttattttgcatacaaaattggtcctactatgatttgtctttgataawatgatggactagagaaaatttttgttccaaaagaaaactatgacatatgctattagattccaaccctgatcattgttttagagtttttattatttgcctataatttgggctgaatcctgaattatttcctggatccaagtgttccctagtgaatctgaatataatatatttttaaaaacttcttttatcctgtcaggaatgagatgtattttttgaaggactacttaaactagcaattacaattcgattattatgattatagaatctcgggatttctcttccttcttgtcaaggtctttacttgatgtttgtctcattaaaaaaaaaatgagactgattacactctactcaagactgaagacatgtactttaacctgtctctgttaccagtaaaccaaagccttaactttcagaatctgtcagggacactgtgtgg

SEQ ID NO: 450522 - DNA, 545 bp, Homo sapiens
ccaataaatattcttgctgcactttatggaaataatcaggccaggtatgataagactaaaacttattttgcatacaaaattggtcctactatgatttgtctttgataaaatgatggactagagaaaatttktgttccaaaagaaaactatgacatatgctattagattccaaccctgatcattgttttagagtttttattatttgcctataatttgggctgaatcctgaattatttcctggatccaagtgttccctagtgaatctgaatataatatatttttaaaaacttcttttatcctgtcaggaatgagatgtattttttgaaggactacttaaactagcaattacaattcgattattatgattatagaatctcgggatttctcttccttcttgtcaaggtctttacttgatgtttgtctcattaaaaaaaaaatgagactgattacactctactcaagactgaagacatgtactttaacctgtctctgttaccagtaaaccaaagccttaactttcagaatctgtcagggacactgtgtgg

SEQ ID NO: 450523 - DNA, 545 bp, Homo sapiens
ccaataaatattcttgctgcactttatggaaataatcaggccaggtatgataagactaaaacttattttgcatacaaaattggtcctactatgatttgtctttgataaaatgatggactagagaaaatttttgttccaaaagaaaactatgacatatgctattagattccaaccctgatcattgttttagagtttttattatttgcctataatttgggctgaatcctgaattatttcctggatccaagtgttccctagtgaatctgaatataatatatttttaaaaacttcttttatcctgtcargaatgagatgtattttttgaaggactacttaaactagcaattacaattcgattattatgattatagaatctcgggatttctcttccttcttgtcaaggtctttacttgatgtttgtctcattaaaaaaaaaatgagactgattacactctactcaagactgaagacatgtactttaacctgtctctgttaccagtaaaccaaagccttaactttcagaatctgtcagggacactgtgtgg

SEQ ID NO: 450524 - DNA, 286 bp, Homo sapiens
acatgtactttaacctgtctctgttaccagtaaaccaaagccttaactttcagaatctgtcagggacactgtgtggtccctggatcaaccacccatgggcttatgaatgtgttgactgctggcatatgagaagtaattgtctattaggttatgtgactcttcctctttctatttataactccaatgtttctgaacactgaagtarttcatcgaaattactttccaggattagacaaaccttacctgcacaccaaggagatgaattttggcctatgtttggcagaag

SEQ ID NO: 450525 - DNA, 634 bp, Homo sapiens
ctgtgaccctttgggaagcccagacctgggagctccccgagccagggctgtgattccctctttggggccctgtggttcctggtatctccaagcttctgggtgccactgtgttcccagtgtgccagctgtggaagctgcttgcggtgcccgtggtccagccacagacttgtggagagctggtacccatgttggcacctggagttacctgctccactgcagcagccaggaagtctgactgcacagtggccagaccccatgcttgctcacacaccccttgccactccgcgcagtctcccttggcaaacatgggatccaacctggtagcatgagctgagcacagcctgccaggctgagtgggcggggcccaagcaaaactcaggtaaaggtgccaccagccatagagttttctgtccagaaaagtgacactccaaagatcccgtaacaccgctactcttcccaacctctggaaactctcagtctactctctatcttgatgagttcaattgttttaatttttagctcccacaaatgtgtgagaacatgcaaagtctttctgtgcctggctcattgtacttaacataatgtcccctagttccatccacgttgttgcaratgacagaatcttattcttttt

SEQ ID NO: 450526 - DNA, 510 bp, Homo sapiens
attttttttttaaattttaaatcatgattcattgcattgctgtaagagtaattagaggtaaattagggcttgaaactgcctgtagtgggttactttctgagatcttagyataattatcaggtgagagggtgaagttttaatcagcgctaagtgggatagaaattcaatgcactgaaactgtagtgtccaattcagtaggcgctagccacctgtaactgttgagcacttgaaatcctggctagtcctaattgagatgtgttgtgttaaatatactggattttgtcattggagtgggaagaacagcgtagaatatctgcttgataattttttatattgattacatgttaaaattattactatgattactatttgggacatactgagttaagtatatttaaaattaatttcaccttttaatggggcttactagtacatttaaaattacatatgtggctcacatatttattggacagcacggctctagaagtttaggaagaaataagaaaaata

SEQ ID NO: 450527 - DNA, 510 bp, Homo sapiens
attttttttttaaattttaaatcatgattcattgcattgctgtaagagtaattagaggtaaattagggcttgaaactgcctgtagtgggttactttctgagatcttagtataattatcaggtgagagggtgaagttttaatyagcgctaagtgggatagaaattcaatgcactgaaactgtagtgtccaattcagtaggcgctagccacctgtaactgttgagcacttgaaatcctggctagtcctaattgagatgtgttgtgttaaatatactggattttgtcattggagtgggaagaacagcgtagaatatctgcttgataattttttatattgattacatgttaaaattattactatgattactatttgggacatactgagttaagtatatttaaaattaatttcaccttttaatggggcttactagtacatttaaaattacatatgtggctcacatatttattggacagcacggctctagaagtttaggaagaaataagaaaaata

SEQ ID NO: 450528 - DNA, 510 bp, Homo sapiens
attttttttttaaattttaaatcatgattcattgcattgctgtaagagtaattagaggtaaattagggcttgaaactgcctgtagtgggttactttctgagatcttagtataattatcaggtgagagggtgaagttttaatcagcgctaagtgggatagaaattcaatgcactgaaactgyagtgtccaattcagtaggcgctagccacctgtaactgttgagcacttgaaatcctggctagtcctaattgagatgtgttgtgttaaatatactggattttgtcattggagtgggaagaacagcgtagaatatctgcttgataattttttatattgattacatgttaaaattattactatgattactatttgggacatactgagttaagtatatttaaaattaatttcaccttttaatggggcttactagtacatttaaaattacatatgtggctcacatatttattggacagcacggctctagaagtttaggaagaaataagaaaaata

SEQ ID NO: 450529 - DNA, 510 bp, Homo sapiens
attttttttttaaattttaaatcatgattcattgcattgctgtaagagtaattagaggtaaattagggcttgaaactgcctgtagtgggttactttctgagatcttagtataattatcaggtgagagggtgaagttttaatcagcgctaagtgggatagaaattcaatgcactgaaactgtagtgtccaattcagtaggcgctagccacctgtaactrttgagcacttgaaatcctggctagtcctaattgagatgtgttgtgttaaatatactggattttgtcattggagtgggaagaacagcgtagaatatctgcttgataattttttatattgattacatgttaaaattattactatgattactatttgggacatactgagttaagtatatttaaaattaatttcaccttttaatggggcttactagtacatttaaaattacatatgtggctcacatatttattggacagcacggctctagaagtttaggaagaaataagaaaaata

SEQ ID NO: 450530 - DNA, 620 bp, Homo sapiens
aatatctagttttcccagcacaatttgttgaagagactgtcctctcccccatgtatattcttggaatcttcattgaaaatgagttatttgtaaatgtaaggatttatttctggkttctctattctgttccattggtctatgtgtctgttttatgccagtatcatgctgctttgtttacaattgccctgtagtataatttaacgtcaggtgatgtgattcttccagttttgttctttttgctaaggatggctttgggtattctgggtcttttatgatttcatataaattttaggatttttttttctgtttctgtgaagaatgttattagtatttcaatagggattgcattgaatctgtagattgctttgtgaagtatgtgtattttaacaatatttactcttccattcaatgaacatggactatctttccatttttttggtgtcttctttaatttttttgcattggtgttctatagttttcatcgtagagatctttcacttcttttgttacatttattcctagatattttattttatttgtaggtattgtaaatgggagtatgtactttattttctgctttagattgttcatttttggcatttagaaatgctactgagttt

SEQ ID NO: 450531 - DNA, 620 bp, Homo sapiens
aatatctagttttcccagcacaatttgttgaagagactgtcctctcccccatgtatattcttggaatcttcattgaaaatgagttatttgtaaatgtaaggatttatttctggtttctctattctgttccattggtctatgtgtctgttttatgccagtatcatgctgctttgtttacaattgccctgtagtataatttaacgtcaggtgatgtgattcttccagttttgttctttttgctaaggatggctttgggtattctgggtcttttatgatttcatataaattttaggatttttttttctgtttctgtgaagaatgttattagtatttcaatagggattgcattgaatctgtagattgctttgtgaagtatgtgtattttaacaatatttaytcttccattcaatgaacatggactatctttccatttttttggtgtcttctttaatttttttgcattggtgttctatagttttcatcgtagagatctttcacttcttttgttacatttattcctagatattttattttatttgtaggtattgtaaatgggagtatgtactttattttctgctttagattgttcatttttggcatttagaaatgctactgagttt

SEQ ID NO: 450532 - DNA, 620 bp, Homo sapiens
aatatctagttttcccagcacaatttgttgaagagactgtcctctcccccatgtatattcttggaatcttcattgaaaatgagttatttgtaaatgtaaggatttatttctggtttctctattctgttccattggtctatgtgtctgttttatgccagtatcatgctgctttgtttacaattgccctgtagtataatttaacgtcaggtgatgtgattcttccagttttgttctttttgctaaggatggctttgggtattctgggtcttttatgatttcatataaattttaggatttttttttctgtttctgtgaagaatgttattagtatttcaatagggattgcattgaatctgtagattgctttgtgaagtatgtgtattttaacaatatttactcttccattcaatgaacatggactatctttccatttttttggtgtcttctttaatttttttgcattggtgttctatagttttcatcgtagagatctttcacttcttttgttacatttattcctagatattttattttatttgtagstattgtaaatgggagtatgtactttattttctgctttagattgttcatttttggcatttagaaatgctactgagttt

SEQ ID NO: 450533 - DNA, 573 bp, Homo sapiens
tttttggttgtttttggttttttgtgggtttttttgtttttgtttttgttttgttttgtttttttttttttgagatggagtcttkctctgtcacccaggatggagcttgatacaatctcagctcactgcaacttctgcctcccatgttcaagtgattctcctgcctcagcctcaggagtagctgggagtagaggtgcacaccaccatgcctggctaatttttgtatttttagtagagatggggtttcaccatgttggccaggctggtcttgaactcctgacctcagatgatcacctgccttgtcctctcaaagtgttgggattacaggcatgggccacggtgcctggccattacttgcaggtttttcaatttactggaatatagttggtcatagtagtttctaatgattctttgaatttctgcagtatcagttgtagtgtctcctttttaatctctggttttatgtatttgagtcttctctcttttctcttagtctggctaaatgtttgttgattttgttgatcttttaaaaaatattaacttttcatttcattgatattttatatttttcaa

SEQ ID NO: 450534 - DNA, 573 bp, Homo sapiens
tttttggttgtttttggttttttgtgggtttttttgtttttgtttttgttttgttttgtttttttttttttgagatggagtctttctctgtcacccaggatggagcttgatacaatctcagctcactgcaacttctgcctcccatgttcaagtgattctcctgcctcagcctcaggagtagctgggagtagaggtgcacaccaccatgcctggctaatttttgtatttttagtagagatggggtttcaccatgttggccaggctggtcttgaactcctgacctcagatgatcacctgccttgtcctctcaaagtgttgggattacaggcatgggccacggtgcctggccattacttgcaggtttttcaatttaytggaatatagttggtcatagtagtttctaatgattctttgaatttctgcagtatcagttgtagtgtctcctttttaatctctggttttatgtatttgagtcttctctcttttctcttagtctggctaaatgtttgttgattttgttgatcttttaaaaaatattaacttttcatttcattgatattttatatttttcaa

SEQ ID NO: 450535 - DNA, 644 bp, Homo sapiens
gcctgtatcccatagggtttggtttgactttaaagtttttcttttctcaaaaactcagtgtcgtggtaccggcttctagtgctctgggcagtgagacccttttacttgataactggtagctgggacaacttggcaatrtaaataaataaacggcatctagattaaaaaggaagaagtacagttatctttatgtacagatgacatgatcttgcatttagaaaatcataagaaatttactaaaaagtggtaggactcattaacaaatttaggaatgtaacactatgtaagattggtatacaaaaataactgtatttctttaccaagaaatcaagaatccaaaaatggaattacaaaaataaatcttgttacaatagaattaaagctggggtaactttaacataagaagcttaaacttgaacactaaaaacatggttagtgttggaaacacccaggtaccatccctgagccttctctccttggctctgaggactttaccttcatggggtgaagaaaggggttgcattcttggcttttacataatattaggtgggttcagggtgaggtatctgcaagtcaaatgagtattacaatctctacttttatgtataagagactgaggaccacaaagagagagaatgacaatc

SEQ ID NO: 450536 - DNA, 647 bp, Homo sapiens
gcctgtatcccatagggtttggtttgactttaaagtttttcttttctcaaaaactcagtgtcgtggtaccggcttctagtgctctgggcagtgagacccttttacttgataactggtagctgggacaacttggcaatgtaaataaataaacggcatctagattraaaaggaagaagtacagttatctttatgtacagatgacatgatcttgcatttagaaaatcataagaaatttactaaaaagtggtaggactcattaacaaatttaggaatgtaacactatgtaagattggtatacaaaaataactgtatttctttaccaagaaatcaagaatccaaaaatggaattacaaaaataaatcttgttacaatagaattaaagctggggtaactttaacataagaagcttaaacttgaacactaaaaacatggttagtgttggaaacacccaggtaccatccctgagccttctctccttggctctgaggactttaccttcatggggtgaagaaaggggttgcattcttggcttttacataatattaggtgggttcagggtgaggtatctgcaagtcaaatgagtattacaatctctacttttatgtataagagactgaggaccacaaagagagagaatgacaatccat

SEQ ID NO: 450537 - DNA, 644 bp, Homo sapiens
gcctgtatcccatagggtttggtttgactttaaagtttttcttttctcaaaaactcagtgtcgtggtaccggcttctagtgctctgggcagtgagacccttttacttgataactggtagctgggacaacttggcaatgtaaataaataaacggcatctagattaaaaaggaagaagtacagttatctttatgtacagatgacatgatcttgcatttagaaaatcataagaaatttactaaaaagtgktaggactcattaacaaatttaggaatgtaacactatgtaagattggtatacaaaaataactgtatttctttaccaagaaatcaagaatccaaaaatggaattacaaaaataaatcttgttacaatagaattaaagctggggtaactttaacataagaagcttaaacttgaacactaaaaacatggttagtgttggaaacacccaggtaccatccctgagccttctctccttggctctgaggactttaccttcatggggtgaagaaaggggttgcattcttggcttttacataatattaggtgggttcagggtgaggtatctgcaagtcaaatgagtattacaatctctacttttatgtataagagactgaggaccacaaagagagagaatgacaatc

SEQ ID NO: 450538 - DNA, 647 bp, Homo sapiens
gcctgtatcccatagggtttggtttgactttaaagtttttcttttctcaaaaactcagtgtcgtggtaccggcttctagtgctctgggcagtgagacccttttacttgataactggtagctgggacaacttggcaatgtaaataaataaacggcatctagattaaaaaggaagaagtacagttatctttatgtacagatgacatgatcttgcatttagaaaatcataagaaatttactaaaaagtggtaggactcattaacaaatttaggaatgtaacactatgtaagattggtatacaaaaataactgtatttctttaccaagaaatcaagaatccaaaaatggaattacaaaaataaatcttgttacaatagaattaaagctggggtaactttaacataagaagcttaaacttgaacactaaaaacatggttagtgttggaaacacccaggtaccatccctgagccttctctccttggctctgaggactttaccttcatggggtgargaaaggggttgcattcttggcttttacataatattaggtgggttcagggtgaggtatctgcaagtcaaatgagtattacaatctctacttttatgtataagagactgaggaccacaaagagagagaatgacaatccat

SEQ ID NO: 450539 - DNA, 590 bp, Homo sapiens
atttaaaattaatttcaccttttaatggggcttactagtacatttaaaattacatatgtggctcacatatttattggacagcacggctctagaagtttaggaagaaataagaaaaatattgagaataggtagcaacagtaggaagtttgacctcctgtaagactgattccaataaaactaataggtgatagttttaattggctttttcctactagaaaaagtaagtgtactttacrtgtctctttgttctccctctttccccttcaatttagtggttagcgtgtatttactatatcaggcttaaaattcactaagcagtgttaagaagacttaggtaaatgattccctgatgaacacacttgattttcaaagcaccttcctaacccatttttaattggaatagagtcaaaggtagatggcttattagtagtcatctcatttaaacctcatggaattttcctgttaaatctcaaagtaaacaatttgttataggctgttttgtcaagtgcatggaagggacagcataagacatgtggtacttcatttcaaaattgcttgagatggttttcattataatcatacattatttg

SEQ ID NO: 450540 - DNA, 372 bp, Homo sapiens
aaactaataggtgatagttttaattggctttttcctactagaaaaagtaagtgtactttacgtgtctctttgttctccctctttccccttcaatttagtggttagcgtgtatttactatatcaggcttaawattcactaagcagtgttaagaagacttaggtaaatgattccctgatgaacacacttgattttcaaagcaccttcctaacccatttttaattggaatagagtcaaaggtagatggcttattagtagtcatctcatttaaacctcatggaattttcctgttaaatctcaaagtaaacaatttgttataggctgttttgtcaagtgcatggaagggacagcataagacatgtggtacttcattt

SEQ ID NO: 450541 - DNA, 372 bp, Homo sapiens
aaactaataggtgatagttttaattggctttttcctactagaaaaagtaagtgtactttacgtgtctctttgttctccctctttccccttcaatttagtggttagcgtgtatttactatatcaggcttaaaattcactaagcagtgttaagaagacttaggtaaatgattccctgatgaacacacttgattttcaaagcacyttcctaacccatttttaattggaatagagtcaaaggtagatggcttattagtagtcatctcatttaaacctcatggaattttcctgttaaatctcaaagtaaacaatttgttataggctgttttgtcaagtgcatggaagggacagcataagacatgtggtacttcattt

SEQ ID NO: 450542 - DNA, 461 bp, Homo sapiens
gacatgtggtacttcatttcaaaattgcttgagatggttttcattataatcatacattatttgcttctggttttccrgaaaagccagctaaacctgtggttcatttagatataaatgaaatatcctcaaaggattgctcaaagtgacttatgcaacttgaatatatatttttttctgtagggtgtttattccaaattatctggccatttgtggcaatttgcagttttttagaaaacaccaaatatttttcaagttagagatgttttaataaaaacagtcatattgaactggaagcagccaaataaaatggccctttatttcacagttgagaatttgaaattggaaggtaattaacatatgtaaggatgatgtatttgctgcctggcttataggaaggagccaaggtgttttttgagggatgttgttgctgtgtatgtcccacctattttgcttccttaatg

SEQ ID NO: 450543 - DNA, 570 bp, Homo sapiens
tgcaggggctttaaattcaccaaaaagtgataggtgagggggctctgggcattatctgccggacaaatgtgggggctttatgatactatctctgagtaatttgctgggaactgcggacatctcttgtctcagcactttatcagttaattgcactctttgatatgttgaaaatcagcttgcacaagttaaagtccttgaggaaarggggtgggtaagaagcccttgatgttttgtaaatgaaggagccaaatggaatttgtctggttttctcagctaagggagagtctattcatattaaaaacaaagttagctatctaaggaacaatctattcatgttaatacaacgttgggtattacaaaacatctgttcatgatctggaaattcttctgtgttagttctgttaaaagaaaaactttaaaggagtttaattgagcaataaatgattcacaaatcggacagtccccagaatcacagcagattcacagagactccagcgcagtcatgtggtggaagaagatttatagacaaaagggaaatggcataccgaaatcggaagtgaggtacagaaa

SEQ ID NO: 450544 - DNA, 570 bp, Homo sapiens
tgcaggggctttaaattcaccaaaaagtgataggtgagggggctctgggcattatctgccggacaaatgtgggggctttatgatactatctctgagtaatttgctgggaactgcggacatctcttgtctcagcactttatcagttaattgcactctttgatatgttgaaaatcagcttgcacaagttaaagtccttgaggaaagggggtgggtaagaagcccttgatgttttgtaaatgaaggagccaaatggaatttgtctggttttctcagctaagggagagtctattcatattaaaaacaargttagctatctaaggaacaatctattcatgttaatacaacgttgggtattacaaaacatctgttcatgatctggaaattcttctgtgttagttctgttaaaagaaaaactttaaaggagtttaattgagcaataaatgattcacaaatcggacagtccccagaatcacagcagattcacagagactccagcgcagtcatgtggtggaagaagatttatagacaaaagggaaatggcataccgaaatcggaagtgaggtacagaaa

SEQ ID NO: 450545 - DNA, 461 bp, Homo sapiens
gacatgtggtacttcatttcaaaattgcttgagatggttttcattataatcatacattatttgcttctggttttccagaaaagccagctaaacctgtggttcatttagatataaatgaaatatcytcaaaggattgctcaaagtgacttatgcaacttgaatatatatttttttctgtagggtgtttattccaaattatctggccatttgtggcaatttgcagttttttagaaaacaccaaatatttttcaagttagagatgttttaataaaaacagtcatattgaactggaagcagccaaataaaatggccctttatttcacagttgagaatttgaaattggaaggtaattaacatatgtaaggatgatgtatttgctgcctggcttataggaaggagccaaggtgttttttgagggatgttgttgctgtgtatgtcccacctattttgcttccttaatg

SEQ ID NO: 450546 - DNA, 570 bp, Homo sapiens
tgcaggggctttaaattcaccaaaaagtgataggtgagggggctctgggcattatctgccggacaaatgtgggggctttatgatactatctctgagtaatttgctgggaactgcggacatctcttgtctcagcactttatcagttaattgcactctttgatatgttgaaaatcagcttgcacaagttaaagtccttgaggaaagggggtgggtaagaagcccttgatgttttgtaaatgaaggagccaaatggaatttgtctggttttctcagctaagggagagtctattcatattaaaaacaaagttagctatctaaggaacaatctattcatgttaatacaacgttgggtattacaaaacatctgttcatgatctggaaattcttctgtgttagttctgttaaaagaaaaactttaaaggagtttaattgagcaataaaygattcacaaatcggacagtccccagaatcacagcagattcacagagactccagcgcagtcatgtggtggaagaagatttatagacaaaagggaaatggcataccgaaatcggaagtgaggtacagaaa

SEQ ID NO: 450547 - DNA, 396 bp, Homo sapiens
gctccttactcagggtccccataaatcaaaccacctaaaatmaaatagattaaagaatgaattagataaagagtttacttgcttaactaagtgggttttttgttaattccctacaaccaaatctttataataccccatgttttctccacatgctgtaagtgttagcagctgcacagatacttaagataagagtctcatgatagtagagaagtcttgatctgtgatcttgggagaagctgttcacattaaggatgccatcttcttctggggggaactgtccttgttagctttaccttaagggttccaataggtatatggttccaagtgtggagggacccttctgagttgtgaaactatgaacccaaagtttaagtttttaaagttttgctgtcatgt

SEQ ID NO: 450548 - DNA, 396 bp, Homo sapiens
gctccttactcagggtccccataaatcaaaccacctaaaataaaatagattaaagaatgaattagataaagagtttacttgcttaactaagtgggttttttgttaattccctacaaccaaatctttataataccccatgttttctccacatgctgtaagtgttagcagctgcacagatacttaagataagwgtctcatgatagtagagaagtcttgatctgtgatcttgggagaagctgttcacattaaggatgccatcttcttctggggggaactgtccttgttagctttaccttaagggttccaataggtatatggttccaagtgtggagggacccttctgagttgtgaaactatgaacccaaagtttaagtttttaaagttttgctgtcatgt

SEQ ID NO: 450549 - DNA, 396 bp, Homo sapiens
gctccttactcagggtccccataaatcaaaccacctaaaataaaatagattaaagaatgaattagataaagagtttacttgcttaactaagtgggttttttgttaattccctacaaccaaatctttataataccccatgttttctccacatgctgtaagtgttagcagctgcacagatacttaagataagagtctcatgatagtagagaagtcttgatctgtgatcttgggaraagctgttcacattaaggatgccatcttcttctggggggaactgtccttgttagctttaccttaagggttccaataggtatatggttccaagtgtggagggacccttctgagttgtgaaactatgaacccaaagtttaagtttttaaagttttgctgtcatgt

SEQ ID NO: 450550 - DNA, 469 bp, Homo sapiens
tttttgagggatgttgttgctgtgtatgtcccacctattttgcttccttaatgaacaatgcaagtttgagacagaaatatttgagaacatttttatcagttgcgacattttgatagtgaacattttatatcttctgtcaacttaaaatgtttgcatcttctgtctgcttaaaatgtttaatttgttatagccaaataatttggctataattgakaatttaatttatcaaattaaattgctttttttccctttagactttcttcagtcacatctgaataaatcacttagaagtaagctagatgtaatataatgaaatgcttaaaagggctgtgtatcttcatattacacttacagtgattttctgttgtacccattatattctacctgcagctagttgaggtaaagagagggcatttaactgtcaagggaacctgtgaggagactgtagaaatctggaaagtctcttgag

SEQ ID NO: 450551 - DNA, 576 bp, Homo sapiens
aatttggctataattgagaatttaatttatcaaattaaattgctttttttccctttagactttcttcagtcacatctgaataaatcacttagaagtaagctagatgtaatataatgaaatgcttaaaagggctgtgtatcttcatattacacttacagtgattttctgttgtacccattatattctacctgcagctagttgaggtaaagagagggcatttaactgtcaagggaacctgtgaggagactgtagaaatctggaaagtctcttgagtctttgagggattttgggatgcagagagtggggctgggatctctggctaggttggagccagcctgcatttgtatctttatcttggaagcaaacwtagaatgcagagatagatgtggcctggatgctgctaactctagccaaccactaaatcttaaggtgggagagatgcaggctttggctgtgtgctaagctgctgtagctggttgaatgtagaggtcactatcttttctgaatacttgtaagtaaattaaatcattctctactcctgtatgcctgccaaccaaatgggaaatcgctatagaa

SEQ ID NO: 450552 - DNA, 262 bp, Homo sapiens
tatcttggaagcaaacatagaatgcagagatagatgtggcctggatgctgctaactctagccaaccactaaatcttaaggtgggagagatgcaggctttggctgkgtgctaagctgctgtagctggttgaatgtagaggtcactatcttttctgaatacttgtaagtaaattaaatcattctctactcctgtatgcctgccaaccaaatgggaaatcgctatagaaaagatggtttaaattttagtctttgaagtggttaat

SEQ ID NO: 450553 - DNA, 499 bp, Homo sapiens
cttctccttctcaaagctgagcccactcctcctccctcaccacctgtaggctatgctttccagcctgtgtccaggattagtcctgatgtaaggcacgtggggtttaaggatctctctcttcagtcttatttccgcaccatcgctgacacatatattccagttgtaatcatggggctacctccttttctttccagtcccatgctcattttctctatcacattctaccttgtaataacctaaatcttctggtgggcaagcttcttcctcaatcaaatttgtgtttatgattgtgttggggattggcttagtaatccaggtactgctrctgccttgaaagcggagactgcatccttctgtctggatatcttgagtttctggattgtaaaccttattagggcccatttttcctagaattggagcctctactttgttcttgctactttagttcacccagaaagcacgatctctgcctgaatttcaaagtgttggctagcttaaa

SEQ ID NO: 450554 - DNA, 519 bp, Homo sapiens
ttgctaatctttttgtcttgaatgtaattgaaatagttttaatctgtgttacmagcaacaagaaccccttttatgagatgaagaggccaggtcagtctcataacatgtgtccccctccgtgtgttgaatttatgtcagagccaggttctttcctatttgacgtctctcaccaaattccagtgtttatgtcctaggaggtgcccaataaattctagagttgatacaagctgcaattttagagaaattaaattagcaagtaaaattagattatatacaacctaatcaactttttttttctgaggatgaccaagatttgggcttcagtgacaatagttgtcccctaaatatttatactcaaaatctaggatcaccagtacaatgttgaatagaggtgatgaacacacacatccctttcttgtcctaatctatgtggtttaaacatttacgctttcaccattaaatatagtattgtttatatgttttgttgtggatgctttccatcacgtcgagaaaatttct

SEQ ID NO: 450555 - DNA, 639 bp, Homo sapiens
taaatatagtattgtttatatgttttgttgtggatgctttccatcacgtcgagaaaatttctttatctagcttgctgagagttttttttaaatcagcaatagatatatctccaaagaaaatatccacatgaccaacagatacatgaaaaaaatgctctgcatcactaatcagggaaatgcaaatcaaaaccacaaacagatattgcctcaagccctttagaatggtcttattaaaakaaaaagatatcgagtgttaacaatggggagaaattggaacacttctacagtgtttctgggaaagtaaaactgtgcagcctctatggaaaacagtacggtggttcctcaaaaaaattaagaaagtagaactaccatatgatctagtagtctcacttcaggttatttatctgaaagaatggagattgggatgattctcaggctcattgcagcattatttacactaattaaaatgtggaaataaggttaatgtctattggcagatgaaaagataaagaaaatgtggtatattcatacaacggaatattattcagctttaaaacaagaaagcccgtcaatatgcaacatggatgaacctagaggacattaatgctaagtaaagtaaatcagtcacagaaggacaaa

SEQ ID NO: 450556 - DNA, 599 bp, Homo sapiens
atcgagtgttaacaatggggagaaattggaacacttctacagtgtttctgggaaagtaaaactgtgcagcctctatggaaaacagtacggtggttcctcaaaaaaattaagaaagtagaactaccatatgatctagtagtctcacttcaggttatttatctgaaagaatggagattgggatgattctcaggctcattgcagcattatttacactaattaaaatgtggaaataaggttaatgtctattggcagatgaaaagataaagaaaatgtggtatattcatacaacggaatattattcagctttaaaacaagaaagcccgtcaatatgcaacrtggatgaacctagaggacattaatgctaagtaaagtaaatcagtcacagaaggacaaactgtatgattccacttgtataaagtatctaagatagccaaattcattagaatcacagattagaatgatgatagctctttaaattgaagtcaattttgcattcctaggttttgtaattttggtatcaggattctgactcataaaacaagtttggaatttcccccttctttatttctgaaataatttaaaaattttattttttttaa

SEQ ID NO: 450557 - DNA, 599 bp, Homo sapiens
atcgagtgttaacaatggggagaaattggaacacttctacagtgtttctgggaaagtaaaactgtgcagcctctatggaaaacagtacggtggttcctcaaaaaaattaagaaagtagaactaccatatgatctagtagtctcacttcaggttatttatctgaaagaatggagattgggatgattctcaggctcattgcagcattatttacactaattaaaatgtggaaataaggttaatgtctattggcagatgaaaagataaagaaaatgtggtatattcatacaacggaatattattcagctttaaaacaagaaagcccgtcaatatgcaacatggatgaacctagaggacattaatgctaagtaaagtaaatcagtcacagaaggacaaactgtatgattccacttgtataaagtatctaagatagccaaattcattagaatcacagattagaatgatgatagctctttaaattgaagtcaattttgcattcctaggttttgtaattttggtatcaggattctgactcawaaaacaagtttggaatttcccccttctttatttctgaaataatttaaaaattttattttttttaa

SEQ ID NO: 450558 - DNA, 456 bp, Homo sapiens
aaagtaaatcagtcacagaaggacaaactgtatgattccacttgtataaagtatctaagatagccaaattcattagaatcacagattagaatgatgatagctctttaaattgaagtcaattttgcattcctaggttttgtaattttggtatcaggattctgactcataaaacaagtttggaatttcccccttctttatttctgaaataatttaaaaattttatttttttwaaacgtttgaaagaattcaccagtgaaattctttagatctggggtttgcttatttttttatttatttaattttatgtttttatgtgcaggtattttacaattaatttaattactttaataaatgtcaattacttcatatgttccattaaatcttgtgaatttttttataagtttttttcaaggaagtcaccctttcatccaagtaatgaaaatttgtatataatgt

SEQ ID NO: 450559 - DNA, 456 bp, Homo sapiens
aaagtaaatcagtcacagaaggacaaactgtatgattccacttgtataaagtatctaagatagccaaattcattagaatcacagattagaatgatgatagctctttaaattgaagtcaattttgcattcctaggttttgtaattttggtatcaggattctgactcataaaacaagtttggaatttcccccttctttatttctgaaataatttaaaaattttattttttttaaacgtttgaaagaattcaccagtgaaattctttagatctggggtttgcttatttttttatttatttaattttatgtttttatgtgcaggtattttacaattaatttaattactttaataaatgtcaattacttcmtatgttccattaaatcttgtgaatttttttataagtttttttcaaggaagtcaccctttcatccaagtaatgaaaatttgtatataatgt

SEQ ID NO: 450560 - DNA, 634 bp, Homo sapiens
ccccttctttatttctgaaataatttaaaaattttattttttttaaacgtttgaaagaattcaccagtgaaattctttagatctggggtttgcttatttttttatttatttaattttatgtttttatgtgcaggtattttacaattaatttaattactttaataaatgtcaattacttcatatgttccattaaatcttgtgaatttttttataagtttttttcaaggaagtcaccctttcatccaagtaatgaaaatttgtatataatgtttcacaatattccattatcttgttaatgtctcttgtgtytacaactgtacaatctcattaatccctgatatgtataatttgcgttttctttctttctcacagaactaacttttggccatgttgattttctcctgtttctgttttctgtctcattgatttctaatttctgttttatttcctttcctctacttgttttggacttaatttgctctcttgttttagattttctttttaaggtagaaaattagttcacttgttttgaacttctcttttctagaataagcatttatacaaaaaatttactctgggtctgcttaactttatcccatacatttttatatagtatatttttatttgtattcag

SEQ ID NO: 450561 - DNA, 609 bp, Homo sapiens
atgtcaattacttcatatgttccattaaatcttgtgaatttttttataagtttttttcaaggaagtcaccctttcatccaagtaatgaaaatttgtatataatgtttcacaatattccattatcttgttaatgtctcttgtgtttacaactgtacaatctcattaatccctgatatgtataatttgcgttttctttctttctcacagaactaacttttggccatgttgattttctcctgtttctgttttctgtctcattgatttctaatttctgttttatttcctttcctctacttgttttggacttaatttgctctcttgttttagattttctttttaaggtagaaaattagttcacttgttttgaacttctcttttctagaataagcatttatacaaaaaatttactctgggtctgcttaactttatcccatacattttkatatagtatatttttatttgtattcagttcaatgtatttaaaagtgtttcttatgatttcttcattgagctaaagggcattttaaggtgtatttaaatcttccaatagtgtagactttcctgggtagcttgtttttacccatttcaactcattttcattatggtcag

SEQ ID NO: 450562 - DNA, 563 bp, Homo sapiens
tctttctcacagaactaacttttggccatgttgattttctcctgtttctgttttctgtctcattgatttctaatttctgttttatttcctttcctctacttgttttggacttaatttgctctcttgttttagattttctttttaaggtagaaaattagttcacttgttttgaacttctcttttctagaataagcatttatacaaaaaatttactctgggtctgcttaactttatcccatacatttttatatagtatatttttatttgtattcagttcaatgtatttaaargtgtttcttatgatttcttcattgagctaaagggcattttaaggtgtatttaaatcttccaatagtgtagactttcctgggtagcttgtttttacccatttcaactcattttcattatggtcagaaagcttactttccatgattacagtgttttgaaacttcttgagagatattttgtggtctatagcctattgataaatgtttcatgtgtagcataatagaacatatattctattgtcttggtcaatatcgattaggtcaagctgttgtcaa

SEQ ID NO: 450563 - DNA, 563 bp, Homo sapiens
tctttctcacagaactaacttttggccatgttgattttctcctgtttctgttttctgtctcattgatttctaatttctgttttatttcctttcctctacttgttttggacttaatttgctctcttgttttagattttctttttaaggtagaaaattagttcacttgttttgaacttctcttttctagaataagcatttatacaaaaaatttactctgggtctgcttaactttatcccatacatttttatatagtatatttttatttgtattcagttcaatgtatttaaaagtgtttcttatgatttcttcattgagctaaagggcattttaaggtgtatttaaatcttccaatagtgtagactttcctgggtagcttgtttttacccatttcaactcattttcattatggtcagaaagcwtactttccatgattacagtgttttgaaacttcttgagagatattttgtggtctatagcctattgataaatgtttcatgtgtagcataatagaacatatattctattgtcttggtcaatatcgattaggtcaagctgttgtcaa

SEQ ID NO: 450564 - DNA, 550 bp, Homo sapiens
tggaaattattttactctcaacttatctataccataatatttggcatgcatctcttataggtacttttattatccagttggacaatctgtgttttatttggagtatttaaattacatttgaaataattactgaaaaggttggatttaagcctactatttttgctttttcttttttttttttttgagacggagtctggccctgtcacccargctggagtgcagtggcgggatctcggctcactacaagctccgcctcctgggttcacgccattttcctgcctcagcatccggagtggctggtactacaggcgcccgccgccatgcctggctaatttttgtatttttagtagagacggagtttcaccgtgttagccaggatggtctcaatctcctgacctcgtgatccacccgcctcggcctcccaaagtgctgggattacaggctgagccactgcgaccagcctattttgctcttatgttctatttgctccatcattttttgctcctctttctttcatgcctttttatattaactgaacaatattcagcat

SEQ ID NO: 450565 - DNA, 602 bp, Homo sapiens
tttggcatgcatctcttataggtacttttattatccagttggacaatctgtgttttatttggagtatttaaattacatttgaaataattactgaaaaggttggatttaagcctactatttttgctttttcttttttttttttttgagacggagtctggccctgtcacccaggctggagtgcagtggcgggatctcggctcactacaagctccgcctcctgggttcacgccattttcctgcctcagcatccggagtggctggtactacaggcgcccgccgccatgcctggctaatttttgtatttttagtagagacggagtttcaccgtgttagccaggatggtctcaatctcctgacctygtgatccacccgcctcggcctcccaaagtgctgggattacaggctgagccactgcgaccagcctattttgctcttatgttctatttgctccatcattttttgctcctctttctttcatgcctttttatattaactgaacaatattcagcattccattttaattcctttattggcattttagaagaatatcttcatataatgtggtggttctctagggattataataaacatcctgggcttat

SEQ ID NO: 450566 - DNA, 602 bp, Homo sapiens
tttggcatgcatctcttataggtacttttattatccagttggacaatctgtgttttatttggagtatttaaattacatttgaaataattactgaaaaggttggatttaagcctactatttttgctttttcttttttttttttttgagacggagtctggccctgtcacccaggctggagtgcagtggcgggatctcggctcactacaagctccgcctcctgggttcacgccattttcctgcctcagcatccggagtggctggtactacaggcgcccgccgccatgcctggctaatttttgtatttttagtagagacggagtttcaccgtgttagccaggatggtctcaatctcctgacctcgtgatccaccygcctcggcctcccaaagtgctgggattacaggctgagccactgcgaccagcctattttgctcttatgttctatttgctccatcattttttgctcctctttctttcatgcctttttatattaactgaacaatattcagcattccattttaattcctttattggcattttagaagaatatcttcatataatgtggtggttctctagggattataataaacatcctgggcttat

SEQ ID NO: 450567 - DNA, 550 bp, Homo sapiens
tggaaattattttactctcaacttatctataccataatatttggcatgcatctcttataggtacttttattatccagttggacaatctgtgttttatttggagtatttaaattacatttgaaataattactgaaaaggttggatttaagcctactatttttgctttttcttttttttttttttgagacggagtctggccctgtcacccaggctggagtgcagtggcgggatctcggctcactacaagctccgcctcctgggttcacgccattttcctgcctcagcatccggagtggctggtactacaggcgcccgccgccatgcctggctaatttttgtatttttagtagagacggagtttcaccgtgttagccaggatggtctcaatctcctgacctcgtgatccaccckcctcggcctcccaaagtgctgggattacaggctgagccactgcgaccagcctattttgctcttatgttctatttgctccatcattttttgctcctctttctttcatgcctttttatattaactgaacaatattcagcat

SEQ ID NO: 450568 - DNA, 472 bp, Homo sapiens
attgggaaactgttcttgatctgtttttaagtgcactgataattttttgtgccatctttaatttactggtatgtacataaaatgacatttttataaaagatattctgtctctcagttctaaaatttgtcctattatctctttatcatttttacttctctgttgagattctccatatattccctcttatgaccatctattccttaaatccttgaatatgcttataatagcttattttaaatttcttatattctaattccagcatgtgggccatttcaatgtcttaatycattgtttactttttttgtcatgtgtcatattttcctggttctatgtctaggcaggttaaattatatgttagattatgtgtatgatattttgtagagataggttcgtttattttcctttgaagaatgactcttttctaacattagtcttctttccgtagtcaaacaccaaactttcactcctgag

SEQ ID NO: 450569 - DNA, 472 bp, Homo sapiens
attgggaaactgttcttgatctgtttttaagtgcactgataattttttgtgccatctttaatttactggtatgtacataaaatgacatttttataaaagatattctgtctctcagttctaaaatttgtcctattatctctttatcatttttacttctctgttgagattctccatatattccctcttatgaccatctattccttaaatccttgaatatgcttataatagcttattttaaatttcttatattctaattccagcatgtgggccatttcaatgtcttaattcattgtttactttttttgtyatgtgtcatattttcctggttctatgtctaggcaggttaaattatatgttagattatgtgtatgatattttgtagagataggttcgtttattttcctttgaagaatgactcttttctaacattagtcttctttccgtagtcaaacaccaaactttcactcctgag

SEQ ID NO: 450570 - DNA, 599 bp, Homo sapiens
tcatttttacttctctgttgagattctccatatattccctcttatgaccatctattccttaaatccttgaatatgcttataatagcttattttaaatttcttatattctaattccagcatgtgggccatttcaatgtcttaattcattgtttactttttttgtcatgtgtcatattttcctggttctatgtctaggcaggttaaattatatgttagattatgtgtatgatattttgtagagataggttcgtttattttcctttgaagaatgactcttttctaacattagtcttctttccgtagtcaaacaccaaactttcactcctgagctatatgcaatggttgaaatctctgctctgtrctagtaatttagctgttgttttctgctggattctatggagtctccttttatgaatgtgaaatgtagcagccatcatatatctgaatgaagttgaagtgctgattttagatttttactctgtgatattctcctctgtgactttcagttgtgtgagatttcctcccatgtcattcaaatttcccagttcctcttttctgtcagcctggaactctgtgctcttattcctcaagctagtaaa

SEQ ID NO: 450571 - DNA, 394 bp, Homo sapiens
gtctccttttatgaatgtgaaatgtagcagccatcatatatytgaatgaagttgaagtgctgattttagatttttactctgtgatattctcctctgtgactttcagttgtgtgagatttcctcccatgtcattcaaatttcccagttcctcttttctgtcagcctggaactctgtgctcttattcctcaagctagtaaaactcaccgctttactcgtagacatctaattttgcacagactgggaagcgtcatcaggtgtgaagttgcattgatgcaaatttaaatcattgcaattttctttattctgtggtcaaatacttcatcattagtggagtattctactatttctgcctcttttctgtttctcattaccatcaaagtgtatttaattttt

SEQ ID NO: 450572 - DNA, 394 bp, Homo sapiens
gtctccttttatgaatgtgaaatgtagcagccatcatatatctgaatgaagttgaagtgctgattttagatttttactctgtgatattctcctctgtgactttcagttgtgtgagatktcctcccatgtcattcaaatttcccagttcctcttttctgtcagcctggaactctgtgctcttattcctcaagctagtaaaactcaccgctttactcgtagacatctaattttgcacagactgggaagcgtcatcaggtgtgaagttgcattgatgcaaatttaaatcattgcaattttctttattctgtggtcaaatacttcatcattagtggagtattctactatttctgcctcttttctgtttctcattaccatcaaagtgtatttaattttt

SEQ ID NO: 450573 - DNA, 611 bp, Homo sapiens
gtgctgattttagatttttactctgtgatattctcctctgtgactttcagttgtgtgagatttcctcccatgtcattcaaatttcccagttcctcttttctgtcagcctggaactctgtgctcttattcctcaagctagtaaaactcaccgctttactcgtagacatctaattttgcacagactgggaagcrtcatcaggtgtgaagttgcattgatgcaaatttaaatcattgcaattttctttattctgtggtcaaatacttcatcattagtggagtattctactatttctgcctcttttctgtttctcattaccatcaaagtgtatttaatttttttagagttaatagttttttccctgcatttggtttagacctgagctactaccatattttgtaattcaaactttttgtctaacaatgttttagaaaactctttatttggagggaattctcaaacttctaaatactctacaaacattaggatcagggctcacattcccagtttcccttgtagccagatgtacatatggaacatggcctcagctaatgaagcatacccacatatttgaaagtaagaaaagtgttaagaggaactgtagatatcattt

SEQ ID NO: 450574 - DNA, 595 bp, Homo sapiens
cttttctgtcagcctggaactctgtgctcttattcctcaagctagtaaaactcaccgctttactcgtagacatctaattttgcacagactgggaagcgtcatcaggtgtgaagttgcmttgatgcaaatttaaatcattgcaattttctttattctgtggtcaaatacttcatcattagtggagtattctactatttctgcctcttttctgtttctcattaccatcaaagtgtatttaatttttttagagttaatagttttttccctgcatttggtttagacctgagctactaccatattttgtaattcaaactttttgtctaacaatgttttagaaaactctttatttggagggaattctcaaacttctaaatactctacaaacattaggatcagggctcacattcccagtttcccttgtagccagatgtacatatggaacatggcctcagctaatgaagcatacccacatatttgaaagtaagaaaagtgttaagaggaactgtagatatcattttagttgatgcaaggatggaaaaaaataaccaactttcactggtgaactttgtcttcaatcattgttttcccgttggta

SEQ ID NO: 450575 - DNA, 595 bp, Homo sapiens
cttttctgtcagcctggaactctgtgctcttattcctcaagctagtaaaactcaccgctttactcgtagacatctaattttgcacagactgggaagcgtcatcaggtgtgaagttgcattgatgcaaatttaaatcattgcaattttctttattcwgtggtcaaatacttcatcattagtggagtattctactatttctgcctcttttctgtttctcattaccatcaaagtgtatttaatttttttagagttaatagttttttccctgcatttggtttagacctgagctactaccatattttgtaattcaaactttttgtctaacaatgttttagaaaactctttatttggagggaattctcaaacttctaaatactctacaaacattaggatcagggctcacattcccagtttcccttgtagccagatgtacatatggaacatggcctcagctaatgaagcatacccacatatttgaaagtaagaaaagtgttaagaggaactgtagatatcattttagttgatgcaaggatggaaaaaaataaccaactttcactggtgaactttgtcttcaatcattgttttcccgttggta

SEQ ID NO: 450576 - DNA, 595 bp, Homo sapiens
cttttctgtcagcctggaactctgtgctcttattcctcaagctagtaaaactcaccgctttactcgtagacatctaattttgcacagactgggaagcgtcatcaggtgtgaagttgcattgatgcaaatttaaatcattgcaattttctttattctrtggtcaaatacttcatcattagtggagtattctactatttctgcctcttttctgtttctcattaccatcaaagtgtatttaatttttttagagttaatagttttttccctgcatttggtttagacctgagctactaccatattttgtaattcaaactttttgtctaacaatgttttagaaaactctttatttggagggaattctcaaacttctaaatactctacaaacattaggatcagggctcacattcccagtttcccttgtagccagatgtacatatggaacatggcctcagctaatgaagcatacccacatatttgaaagtaagaaaagtgttaagaggaactgtagatatcattttagttgatgcaaggatggaaaaaaataaccaactttcactggtgaactttgtcttcaatcattgttttcccgttggta

SEQ ID NO: 450577 - DNA, 595 bp, Homo sapiens
cttttctgtcagcctggaactctgtgctcttattcctcaagctagtaaaactcaccgctttactcgtagacatctaattttgcacagactgggaagcgtcatcaggtgtgaagttgcattgatgcaaatttaaatcattgcaattttctttattctgtggtcaaatacttcatcattagtggagtattctactatttctgcctsttttctgtttctcattaccatcaaagtgtatttaatttttttagagttaatagttttttccctgcatttggtttagacctgagctactaccatattttgtaattcaaactttttgtctaacaatgttttagaaaactctttatttggagggaattctcaaacttctaaatactctacaaacattaggatcagggctcacattcccagtttcccttgtagccagatgtacatatggaacatggcctcagctaatgaagcatacccacatatttgaaagtaagaaaagtgttaagaggaactgtagatatcattttagttgatgcaaggatggaaaaaaataaccaactttcactggtgaactttgtcttcaatcattgttttcccgttggta

SEQ ID NO: 450578 - DNA, 611 bp, Homo sapiens
gtgctgattttagatttttactctgtgatattctcctctgtgactttcagttgtgtgagatttcctcccatgtcattcaaatttcccagttcctcttttctgtcagcctggaactctgtgctcttattcctcaagctagtaaaactcaccgctttactcgtagacatctaattttgcacagactgggaagcgtcatcaggtgtgaagttgcattgatgcaaatttaaatcattgcaattttctttattctgtggtcaaatacttcatcattagtggagtattctactatttctgcctcttttctgtttctcattaccatcaaagtgtatttaatttttttagagttaatagttttttccctgcatttggkttagacctgagctactaccatattttgtaattcaaactttttgtctaacaatgttttagaaaactctttatttggagggaattctcaaacttctaaatactctacaaacattaggatcagggctcacattcccagtttcccttgtagccagatgtacatatggaacatggcctcagctaatgaagcatacccacatatttgaaagtaagaaaagtgttaagaggaactgtagatatcattt

SEQ ID NO: 450579 - DNA, 611 bp, Homo sapiens
gtgctgattttagatttttactctgtgatattctcctctgtgactttcagttgtgtgagatttcctcccatgtcattcaaatttcccagttcctcttttctgtcagcctggaactctgtgctcttattcctcaagctagtaaaactcaccgctttactcgtagacatctaattttgcacagactgggaagcgtcatcaggtgtgaagttgcattgatgcaaatttaaatcattgcaattttctttattctgtggtcaaatacttcatcattagtggagtattctactatttctgcctcttttctgtttctcattaccatcaaagtgtatttaatttttttagagttaatagttttttccctgcatttggtttagacctgagctactaccatattttgtaattcaaactttttgtctaacaatgttttagaaaactctttatttggagggaattctcaaacttctaaatactctacaaacattaggatcagkgctcacattcccagtttcccttgtagccagatgtacatatggaacatggcctcagctaatgaagcatacccacatatttgaaagtaagaaaagtgttaagaggaactgtagatatcattt

SEQ ID NO: 450580 - DNA, 609 bp, Homo sapiens
ttttgtaattcaaactttttgtctaacaatgttttagaaaactctttatttggagggaattctcaaacttctaaatactctacaaacattaggatcagggctcacattcccagtttcccttgtagccagatgtrcatatggaacatggcctcagctaatgaagcatacccacatatttgaaagtaagaaaagtgttaagaggaactgtagatatcattttagttgatgcaaggatggaaaaaaataaccaactttcactggtgaactttgtcttcaatcattgttttcccgttggtaagtggctaattttctggcctagaggtggcattggtgtgttggtaacaattgatttgatgataacctgcttttgtctttttaaaaattgctaatccaccattgtttctggtcctgttttatatttatgcagtgtataatgtctcatgcaaaatttagttctttgtttctcagcttaaactggattttgatgagcagttttcaccttcaaatgaaataaatggctttggttgatgttaggcaaaaataacaagaaggaattaaagaaatatgtttgtcttcttgtaacattaaataaatgaaactgaaaattca

SEQ ID NO: 450581 - DNA, 515 bp, Homo sapiens
tagccccaccttaatttttggtgttgttttaaaatttcattttaataacataatattataagataaggtaacttggtactaatttctgttgtatgatccatcttaagttgcagcgctggttacttttttgactttcgrtgacgaacagctatttgtacataagttaccatagcaatgttaggtaattataatctgtcctatttatctcatttacctttcagtaaaattgttaaataagcaaaataatttgagttaaaattagaataaaaattgtcttttatttggattacatgaataatctagttttcatattgtgctaaagccctgcttagaattatgaaataagataaaatattcaatcatttttatcaatattttcttacctaagcatgcaattaaatttatttattttatatattttatatacttcaatttgagaaataatgaccacatgttgttactttggtcttcaatgatctctaatttttagggtcaccgtgtcttgcttaaatata

SEQ ID NO: 450582 - DNA, 449 bp, Homo sapiens
cagggctcacattcccagtttcccttgtagccagatgtacatatggaacatggcctcagctaatgaagcatacccacatatttgaaagtaagaaaagtgttaagaggaactgtagatatcattttagttgatgcaaggatggaaaaaaataaccaactttcactggtgaactttgtcttcaatcattgttttcccgtkggtaagtggctaattttctggcctagaggtggcattggtgtgttggtaacaattgatttgatgataacctgcttttgtctttttaaaaattgctaatccaccattgtttctggtcctgttttatatttatgcagtgtataatgtctcatgcaaaatttagttctttgtttctcagcttaaactggattttgatgagcagttttcaccttcaaatgaaataaatggctttggttgatgttaggcaaaaataa

SEQ ID NO: 450583 - DNA, 609 bp, Homo sapiens
ttttgtaattcaaactttttgtctaacaatgttttagaaaactctttatttggagggaattctcaaacttctaaatactctacaaacattaggatcagggctcacattcccagtttcccttgtagccagatgtacatatggaacatggcctcagctaatgaagcatacccacatatttgaaagtaagaaaagtgttaagaggaactgtagatatcattttagttgatgcaaggatggaaaaaaataaccaactttcactggtgaactttgtcttcaatcattgttttcccgttggtaagtggctaattttctggcctagaggtggmattggtgtgttggtaacaattgatttgatgataacctgcttttgtctttttaaaaattgctaatccaccattgtttctggtcctgttttatatttatgcagtgtataatgtctcatgcaaaatttagttctttgtttctcagcttaaactggattttgatgagcagttttcaccttcaaatgaaataaatggctttggttgatgttaggcaaaaataacaagaaggaattaaagaaatatgtttgtcttcttgtaacattaaataaatgaaactgaaaattca

SEQ ID NO: 450584 - DNA, 606 bp, Homo sapiens
gttttttccctgcatttggtttagacctgagctactaccatattttgtaattcaaactttttgtctaacaatgttttagaaaactctttatttggagggaattctcaaacttctaaatactctacaaacattaggatcagggctcacattcccagtttcccttgtagccagatgtacatatggaacatggcctcagctaatgaagcatacccacatatttgaaagtaagaaaagtgttaagaggaactgtagatatcattttagttgatgcaaggatggaaaaaaataaccaactttcactggtgaactttgtcttcaatcattgttttcccgttggtaagtggctaattttctggcctagaggtggcattggtgtgttggtaacaattgatttgatgataacctgcttttgtctttttaaaaawtgctaatccaccattgtttctggtcctgttttatatttatgcagtgtataatgtctcatgcaaaatttagttctttgtttctcagcttaaactggattttgatgagcagttttcaccttcaaatgaaataaatggctttggttgatgttaggcaaaaataacaagaaggaattaaagaaat

SEQ ID NO: 450585 - DNA, 449 bp, Homo sapiens
cagggctcacattcccagtttcccttgtagccagatgtacatatggaacatggcctcagctaatgaagcatacccacatatttgaaagtaagaaaagtgttaagaggaactgtagatatcattttagttgatgcaaggatggaaaaaaataaccaactttcactggtgaactttgtcttcaatcattgttttcccgttggtaagtggctaattttctggcctagaggtggcattggtgtgttggtaacaattgatttgatgataacctgcttttgtctttttaaaaattgctaatcyaccattgtttctggtcctgttttatatttatgcagtgtataatgtctcatgcaaaatttagttctttgtttctcagcttaaactggattttgatgagcagttttcaccttcaaatgaaataaatggctttggttgatgttaggcaaaaataa

SEQ ID NO: 450586 - DNA, 659 bp, Homo sapiens
ctaatgaattctcaaaatattwcttgaaaggtgaaagagtacctcaagtaaatggtgtaatttatttatttatcagaattttaaattaattgttctgtttaatctcaaaggggtaccaatgaagtcagggcataaggactccgtggttaataaaatggcaagaattaaaaaggattattacattttttcctcatactatgatggctataattttttaaaacagtagaaatgtttaatttttaaaggctactagtgtctatttcattcaaagatgtgagctcttcagttcaacttgttgtttgaaatttgaacagctttttcttgctcttgttcaatacagttatttaacagtccaggcaggcctctggagttacatatatgtatgtggctatgtgtgtatatatacacagaagtacaaatagcatataaacaatttacataagacttttgcttttgatgaaaattcttctaaaagtgaatataaattaatagcatatggagcctacaaaaattgtctaatagggaactaggaaaagataatttgtgaagaaagagttcgctaaaacagactttttatttttacatgtaataacattatattgaagggtttccagaaatataaaatgttatagggcacttatcctgagacacacgaagga

SEQ ID NO: 450587 - DNA, 499 bp, Homo sapiens
aaaatatttcttgaaaggtgaaagagtacctcaagtaaatggtgtaatttatttatttatcagaattttaaattaaktgttctgtttaatctcaaaggggtaccaatgaagtcagggcataaggactccgtggttaataaaatggcaagaattaaaaaggattattacattttttcctcatactatgatggctataattttttaaaacagtagaaatgtttaatttttaaaggctactagtgtctatttcattcaaagatgtgagctcttcagttcaacttgttgtttgaaatttgaacagctttttcttgctcttgttcaatacagttatttaacagtccaggcaggcctctggagttacatatatgtatgtggctatgtgtgtatatatacacagaagtacaaatagcatataaacaatttacataagacttttgcttttgatgaaaattcttctaaaagtgaatataaattaatagcatatggagcctacaaaaat

SEQ ID NO: 450588 - DNA, 499 bp, Homo sapiens
aaaatatttcttgaaaggtgaaagagtacctcaagtaaatggtgtaatttatttatttatcagaattttaaattaattgttctgtttaatctcaaaggggtaccaatgaagtcagggcataaggactccgtggttaataaaatggyaagaattaaaaaggattattacattttttcctcatactatgatggctataattttttaaaacagtagaaatgtttaatttttaaaggctactagtgtctatttcattcaaagatgtgagctcttcagttcaacttgttgtttgaaatttgaacagctttttcttgctcttgttcaatacagttatttaacagtccaggcaggcctctggagttacatatatgtatgtggctatgtgtgtatatatacacagaagtacaaatagcatataaacaatttacataagacttttgcttttgatgaaaattcttctaaaagtgaatataaattaatagcatatggagcctacaaaaat

SEQ ID NO: 450589 - DNA, 499 bp, Homo sapiens
aaaatatttcttgaaaggtgaaagagtacctcaagtaaatggtgtaatttatttatttatcagaattttaaattaattgttctgtttaatctcaaaggggtaccaatgaagtcagggcataaggactccgtggttaataaaatggcaagaattaaaaargattattacattttttcctcatactatgatggctataattttttaaaacagtagaaatgtttaatttttaaaggctactagtgtctatttcattcaaagatgtgagctcttcagttcaacttgttgtttgaaatttgaacagctttttcttgctcttgttcaatacagttatttaacagtccaggcaggcctctggagttacatatatgtatgtggctatgtgtgtatatatacacagaagtacaaatagcatataaacaatttacataagacttttgcttttgatgaaaattcttctaaaagtgaatataaattaatagcatatggagcctacaaaaat

SEQ ID NO: 450590 - DNA, 489 bp, Homo sapiens
tcaaaggggtaccaatgaagtcagggcataaggactccgtggttaataaaatggcaagaattaaaaaggattattacattttttcctcatactatgatgsctataattttttaaaacagtagaaatgtttaatttttaaaggctactagtgtctatttcattcaaagatgtgagctcttcagttcaacttgttgtttgaaatttgaacagctttttcttgctcttgttcaatacagttatttaacagtccaggcaggcctctggagttacatatatgtatgtggctatgtgtgtatatatacacagaagtacaaatagcatataaacaatttacataagacttttgcttttgatgaaaattcttctaaaagtgaatataaattaatagcatatggagcctacaaaaattgtctaatagggaactaggaaaagataatttgtgaagaaagagttcgctaaaacagactttttatttttacatgtaataac

SEQ ID NO: 450591 - DNA, 489 bp, Homo sapiens
tcaaaggggtaccaatgaagtcagggcataaggactccgtggttaataaaatggcaagaattaaaaaggattattacattttttcctcatactatgatggctataattttttaaaacagtagaaatgtttaatttttaaaggctactagtgtctatttcattcaaagatgtgagctcttcagttcaacttgttgtttgaaatttgaamagctttttcttgctcttgttcaatacagttatttaacagtccaggcaggcctctggagttacatatatgtatgtggctatgtgtgtatatatacacagaagtacaaatagcatataaacaatttacataagacttttgcttttgatgaaaattcttctaaaagtgaatataaattaatagcatatggagcctacaaaaattgtctaatagggaactaggaaaagataatttgtgaagaaagagttcgctaaaacagactttttatttttacatgtaataac

SEQ ID NO: 450592 - DNA, 499 bp, Homo sapiens
aaaatatttcttgaaaggtgaaagagtacctcaagtaaatggtgtaatttatttatttatcagaattttaaattaattgttctgtttaatctcaaaggggtaccaatgaagtcagggcataaggactccgtggttaataaaatggcaagaattaaaaaggattattacattttttcctcatactatgatggctataattttttaaaacagtagaaatgtttaatttttaaaggctactagtgtctatttcattcaaagatgtgagctcttcagttcaacttgttgtttgaaatttgaacagctttttcttgctyttgttcaatacagttatttaacagtccaggcaggcctctggagttacatatatgtatgtggctatgtgtgtatatatacacagaagtacaaatagcatataaacaatttacataagacttttgcttttgatgaaaattcttctaaaagtgaatataaattaatagcatatggagcctacaaaaat

SEQ ID NO: 450593 - DNA, 562 bp, Homo sapiens
tcaaaggggtaccaatgaagtcagggcataaggactccgtggttaataaaatggcaagaattaaaaaggattattacattttttcctcatactatgatggctataattttttaaaacagtagaaatgtttaatttttaaaggctactagtgtctatttcattcaaagatgtgagctcttcagttcaacttgttgtttgaaatttgaacagctttttcttgctcttgttcaatacagttayttaacagtccaggcaggcctctggagttacatatatgtatgtggctatgtgtgtatatatacacagaagtacaaatagcatataaacaatttacataagacttttgcttttgatgaaaattcttctaaaagtgaatataaattaatagcatatggagcctacaaaaattgtctaatagggaactaggaaaagataatttgtgaagaaagagttcgctaaaacagactttttatttttacatgtaataacattatattgaagggtttccagaaatataaaatgttatagggcacttatcctgagacacacgaaggagacaagg

SEQ ID NO: 450594 - DNA, 659 bp, Homo sapiens
ctaatgaattctcaaaatatttcttgaaaggtgaaagagtacctcaagtaaatggtgtaatttatttatttatcagaattttaaattaattgttctgtttaatctcaaaggggtaccaatgaagtcagggcataaggactccgtggttaataaaatggcaagaattaaaaaggattattacattttttcctcatactatgatggctataattttttaaaacagtagaaatgtttaatttttaaaggctactagtgtctatttcattcaaagatgtgagctcttcagttcaacttgttgtttgaaatttgaacagctttttcttgctcttgttcaatacagttatttaacagtccaggcaggcctcyggagttacatatatgtatgtggctatgtgtgtatatatacacagaagtacaaatagcatataaacaatttacataagacttttgcttttgatgaaaattcttctaaaagtgaatataaattaatagcatatggagcctacaaaaattgtctaatagggaactaggaaaagataatttgtgaagaaagagttcgctaaaacagactttttatttttacatgtaataacattatattgaagggtttccagaaatataaaatgttatagggcacttatcctgagacacacgaagga

SEQ ID NO: 450595 - DNA, 489 bp, Homo sapiens
tcaaaggggtaccaatgaagtcagggcataaggactccgtggttaataaaatggcaagaattaaaaaggattattacattttttcctcatactatgatggctataattttttaaaacagtagaaatgtttaatttttaaaggctactagtgtctatttcattcaaagatgtgagctcttcagttcaacttgttgtttgaaatttgaacagctttttcttgctcttgttcaatacagttatttaacagtccaggcaggcctctggagttacatatatgtatgtggctatgygtgtatatatacacagaagtacaaatagcatataaacaatttacataagacttttgcttttgatgaaaattcttctaaaagtgaatataaattaatagcatatggagcctacaaaaattgtctaatagggaactaggaaaagataatttgtgaagaaagagttcgctaaaacagactttttatttttacatgtaataac

SEQ ID NO: 450596 - DNA, 562 bp, Homo sapiens
tcaaaggggtaccaatgaagtcagggcataaggactccgtggttaataaaatggcaagaattaaaaaggattattacattttttcctcatactatgatggctataattttttaaaacagtagaaatgtttaatttttaaaggctactagtgtctatttcattcaaagatgtgagctcttcagttcaacttgttgtttgaaatttgaacagctttttcttgctcttgttcaatacagttatttaacagtccaggcaggcctctggagttacatatatgtatgtggctatgtgtgtatatatacacagaagtacaaatagcatataaacaatttacataagacttttgcttttgatgaaaattcttctaaargtgaatataaattaatagcatatggagcctacaaaaattgtctaatagggaactaggaaaagataatttgtgaagaaagagttcgctaaaacagactttttatttttacatgtaataacattatattgaagggtttccagaaatataaaatgttatagggcacttatcctgagacacacgaaggagacaagg

SEQ ID NO: 450597 - DNA, 659 bp, Homo sapiens
ctaatgaattctcaaaatatttcttgaaaggtgaaagagtacctcaagtaaatggtgtaatttatttatttatcagaattttaaattaattgttctgtttaatctcaaaggggtaccaatgaagtcagggcataaggactccgtggttaataaaatggcaagaattaaaaaggattattacattttttcctcatactatgatggctataattttttaaaacagtagaaatgtttaatttttaaaggctactagtgtctatttcattcaaagatgtgagctcttcagttcaacttgttgtttgaaatttgaacagctttttcttgctcttgttcaatacagttatttaacagtccaggcaggcctctggagttacatatatgtatgtggctatgtgtgtatatatacacagaagtacaaatagcatataaacaatttacataagacttttgcttttgatgaaaattcttctaaaagtgaatataaattaatagcatatggagcctacaaaaattgtctaatagggaactaggaaaagataatttgtgaagaaagagttcgctaaaacagactttttatttttacatgtaataacwttatattgaagggtttccagaaatataaaatgttatagggcacttatcctgagacacacgaagga

SEQ ID NO: 450598 - DNA, 540 bp, Homo sapiens
tttaccaaacaaagtgcaaatttaggtgtccagttgtgaagtttggttgtgtgtggattgtacggtgaaggtaccagtggacaacagttgctcatcaagcaagtttatacaaaagcttttggacaagtccaactctagataaaattcgaaagtatttcatgcttgtgttcagagtttctttttctctctccaaggtaactcacatatcaaaagacatacgggttgtgggtagaacttcctaaaattgctggtgagaagtgtaccatgcataagcatacttcactagcttgaattttctgttagtctcacaggcaacaattacaatcctgtatgtttttctatctccasacactcctgaacataaaaagaccaagtaacatccctggttaagatgtgtacaggttccaagacatgtctaaatatattcaccaagaggtttattattttcacagtggcattcactaaatcagttgtcagtgtagcattactcaaggaatacgcagggtctttaatttatcaaagtttggagtgcaccccaag

SEQ ID NO: 450599 - DNA, 538 bp, Homo sapiens
catacgggttgtgggtagaacttcctaaaattgctggtgagaagtgtaccatgcataagcatacttcactagcttgaattttctgttagtctcacaggcaacaattacaatcctgtatgtttttctatctccagacactcctgaacataaaaagaccaagtaacatccctggttaagatgtgtacaggttccaagacatgtctaaatatattcaccaagaggtttattattttcacagtggcattcactaaatcagttgtcagtgtagcattactcaaggaatacgcagggtctttaatttatcaaagtttggagtgcaccccaagttggatcactgaagcacataactatarataagttcactcaaaagcacaaatccaggtaataaatattcactagtagtttatatgcatttagcaatttgaatgctgtgaagtgtagcccagaaaatcaatcgacatggagctattaaagaggcattcatggcacctgcactttgaagctcttcagactcaggttaaacaggagacatggtagc

SEQ ID NO: 450600 - DNA, 609 bp, Homo sapiens
tatgcatttagcaatttgaatgctgtgaagtgtagcccagaaaatcaatcgacatggagctattaaagaggcattcatggcacctgcactttgaakctcttcagactcaggttaaacaggagacatggtagctcatatatactgcaaaaacccttcctctttccctttttatctatgaacctgcccttttcaatgttatctagatgcctgaaggtatgaatacccttgatcttggtaaaaaatggtaccacccatcagcaaaatctcactgatcagtgtctatgttacctcactgagttagccttttgtgttgttgtggcccagaatgacaatgttgacacaatccaaaccagtagttggaaagttaatgttggatgcgtctttgacaattgatggaatgacctgaaatcaaatgtgaggcagtggagacacaagaatgctattcaggaagttagtgatctgtggagatactaaatgaaatatctggaaggaattgtaatcttgcaactatgcttttatgtgttttttgacataaacagtttctatttatagtggagctagagtgtccatttcccatgaagttcccatagtgttaactaatacagtcat

SEQ ID NO: 450601 - DNA, 531 bp, Homo sapiens
acctgcccttttcaatgttatctagatgcctgaaggtatgaatacccttgatcttggtaaaaaatggtaccayccatcagcaaaatctcactgatcagtgtctatgttacctcactgagttagccttttgtgttgttgtggcccagaatgacaatgttgacacaatccaaaccagtagttggaaagttaatgttggatgcgtctttgacaattgatggaatgacctgaaatcaaatgtgaggcagtggagacacaagaatgctattcaggaagttagtgatctgtggagatactaaatgaaatatctggaaggaattgtaatcttgcaactatgcttttatgtgttttttgacataaacagtttctatttatagtggagctagagtgtccatttcccatgaagttcccatagtgttaactaatacagtcatgtgtcacttaatgacaggggtgagtctgagaaatgcattgctggacaattttattattgtatgaacatcacagagtttacttacacaaacctagatgcta

SEQ ID NO: 450602 - DNA, 609 bp, Homo sapiens
tatgcatttagcaatttgaatgctgtgaagtgtagcccagaaaatcaatcgacatggagctattaaagaggcattcatggcacctgcactttgaagctcttcagactcaggttaaacaggagacatggtagctcatatatactgcaaaaacccttcctctttccctttttatctatgaacctgcccttttcaatgttatctagatgcctgaaggtatgaatacccttgatcttggtaaaaaatggtaccacccatcagcaaaatctcactgatcagtgtctatgttacctcactgagttagccttttgtgttgttgtggcccagaatgacaatgttgacacaatccaaaccagtagttggaaagttaatgttggatgcrtctttgacaattgatggaatgacctgaaatcaaatgtgaggcagtggagacacaagaatgctattcaggaagttagtgatctgtggagatactaaatgaaatatctggaaggaattgtaatcttgcaactatgcttttatgtgttttttgacataaacagtttctatttatagtggagctagagtgtccatttcccatgaagttcccatagtgttaactaatacagtcat

SEQ ID NO: 450603 - DNA, 610 bp, Homo sapiens
ctttgaagctcttcagactcaggttaaacaggagacatggtagctcatatatactgcaaaaacccttcctctttccctttttatctatgaacctgcccttttcaatgttatctagatgcctgaaggtatgaatacccttgatcttggtaaaaaatggtaccacccatcagcaaaatctcactgatcagtgtctatgttacctcactgagttagccttttgtgttgttgtggcccagaatgacaatgttgacacaatccaaaccagtagttggaaagttaatgttggatgcgtctttgacaattgatggaatgacctgaaatcaaatgtgaggcagtggagacasaagaatgctattcaggaagttagtgatctgtggagatactaaatgaaatatctggaaggaattgtaatcttgcaactatgcttttatgtgttttttgacataaacagtttctatttatagtggagctagagtgtccatttcccatgaagttcccatagtgttaactaatacagtcatgtgtcacttaatgacaggggtgagtctgagaaatgcattgctggacaattttattattgtatgaacatcacagagtttacttacacaaa

SEQ ID NO: 450604 - DNA, 609 bp, Homo sapiens
tatgcatttagcaatttgaatgctgtgaagtgtagcccagaaaatcaatcgacatggagctattaaagaggcattcatggcacctgcactttgaagctcttcagactcaggttaaacaggagacatggtagctcatatatactgcaaaaacccttcctctttccctttttatctatgaacctgcccttttcaatgttatctagatgcctgaaggtatgaatacccttgatcttggtaaaaaatggtaccacccatcagcaaaatctcactgatcagtgtctatgttacctcactgagttagccttttgtgttgttgtggcccagaatgacaatgttgacacaatccaaaccagtagttggaaagttaatgttggatgcgtctttgacaattgatggaatgacctgaaatcaaatgtgaggcagtggagacacaagaatgctattcaggaagttartgatctgtggagatactaaatgaaatatctggaaggaattgtaatcttgcaactatgcttttatgtgttttttgacataaacagtttctatttatagtggagctagagtgtccatttcccatgaagttcccatagtgttaactaatacagtcat

SEQ ID NO: 450605 - DNA, 531 bp, Homo sapiens
acctgcccttttcaatgttatctagatgcctgaaggtatgaatacccttgatcttggtaaaaaatggtaccacccatcagcaaaatctcactgatcagtgtctatgttacctcactgagttagccttttgtgttgttgtggcccagaatgacaatgttgacacaatccaaaccagtagttggaaagttaatgttggatgcgtctttgacaattgatggaatgacctgaaatcaaatgtgaggcagtggagacacaagaatgctattcaggaagttagtgatctgtggagatactaaatgaaatatctggaaggaawtgtaatcttgcaactatgcttttatgtgttttttgacataaacagtttctatttatagtggagctagagtgtccatttcccatgaagttcccatagtgttaactaatacagtcatgtgtcacttaatgacaggggtgagtctgagaaatgcattgctggacaattttattattgtatgaacatcacagagtttacttacacaaacctagatgcta

SEQ ID NO: 450606 - DNA, 510 bp, Homo sapiens
gagttagccttttgtgttgttgtggcccagaatgacaatgttgacacaatccaaaccagtagttggaaagttaatgttggatgcgtctttgacaattgatggaatgacctgaaatcaaatgtgaggcagtggagacacaagaatgctattcaggaagttagtgatctgtggagatactaaatgaaatatctggaaggaattgtaatcttgcaactatgcttttatgtgttttttgacataaacagtttctatttatrgtggagctagagtgtccatttcccatgaagttcccatagtgttaactaatacagtcatgtgtcacttaatgacaggggtgagtctgagaaatgcattgctggacaattttattattgtatgaacatcacagagtttacttacacaaacctagatgctatagctgattgcatacctaggttaggtggtatagcctattcctcctaggctacaaacctgtgcagcatgttactgtactgaatactgtaggcaatt

SEQ ID NO: 450607 - DNA, 565 bp, Homo sapiens
tctatgttacctcactgagttagccttttgtgttgttgtggcccagaatgacaatgttgacacaatccaaaccagtagttggaaagttaatgttggatgcgtctttgacaattgatggaatgacctgaaatcaaatgtgaggcagtggagacacaagaatgctattcaggaagttagtgatctgtggagatactaaatgaaatatctggaaggaattgtaatcttgcaactatgcttttatgtgttttttgacataaacagtttctatttatagtggarctagagtgtccatttcccatgaagttcccatagtgttaactaatacagtcatgtgtcacttaatgacaggggtgagtctgagaaatgcattgctggacaattttattattgtatgaacatcacagagtttacttacacaaacctagatgctatagctgattgcatacctaggttaggtggtatagcctattcctcctaggctacaaacctgtgcagcatgttactgtactgaatactgtaggcaattgtaacacaacagttaagtatatctatacttacttatatc

SEQ ID NO: 450608 - DNA, 510 bp, Homo sapiens
gagttagccttttgtgttgttgtggcccagaatgacaatgttgacacaatccaaaccagtagttggaaagttaatgttggatgcgtctttgacaattgatggaatgacctgaaatcaaatgtgaggcagtggagacacaagaatgctattcaggaagttagtgatctgtggagatactaaatgaaatatctggaaggaattgtaatcttgcaactatgcttttatgtgttttttgacataaacagtttctatttatagtggagctagagtgtccatttcccatgaagttcccatagtgttaactaatacagtcatgtgtcacttaatgacaggggtgwgtctgagaaatgcattgctggacaattttattattgtatgaacatcacagagtttacttacacaaacctagatgctatagctgattgcatacctaggttaggtggtatagcctattcctcctaggctacaaacctgtgcagcatgttactgtactgaatactgtaggcaatt

SEQ ID NO: 450609 - DNA, 403 bp, Homo sapiens
tttcccatgaagttcccatagtgttaactaatacagtcatgtgtcacttaatgacaggggtgagtctgagaaatgcattgctggacaattttattattgtatgaacatcacagagtttacttacacaaacctagatgctatagctgattrcatacctaggttaggtggtatagcctattcctcctaggctacaaacctgtgcagcatgttactgtactgaatactgtaggcaattgtaacacaacagttaagtatatctatacttacttatatctatacagtaagtgtatctatacatgtctaaacatacaagaggtacagtacaaatacagtgttatgattttattgcaccactgtcatacaagtgcactatccttgaccaaaatgttgttacgtgatgcat

SEQ ID NO: 450610 - DNA, 403 bp, Homo sapiens
tttcccatgaagttcccatagtgttaactaatacagtcatgtgtcacttaatgacaggggtgagtctgagaaatgcattgctggacaattttattattgtatgaacatcacagagtttacttacacaaacctagatgctatagctgattgcatacctaggttaggtggtatagcctattcctcctaggctacaaamctgtgcagcatgttactgtactgaatactgtaggcaattgtaacacaacagttaagtatatctatacttacttatatctatacagtaagtgtatctatacatgtctaaacatacaagaggtacagtacaaatacagtgttatgattttattgcaccactgtcatacaagtgcactatccttgaccaaaatgttgttacgtgatgcat

SEQ ID NO: 450611 - DNA, 172 bp, Homo sapiens
tattttatatacttcaatttgagaaataatgaccacatgttgttactttggtcttcaatgatctctaatttttagggtcaccgtgtcttgcttaaatatatcatagtaacaggttcagtgamtatctttatttttaattttatttacttatttttttttttgagacagagtt

SEQ ID NO: 450612 - DNA, 403 bp, Homo sapiens
tttcccatgaagttcccatagtgttaactaatacagtcatgtgtcacttaatgacaggggtgagtctgagaaatgcattgctggacaattttattattgtatgaacatcacagagtttacttacacaaacctagatgctatagctgattgcatacctaggttaggtggtatagcctattcctcctaggctacaaacctgtgcagcatrttactgtactgaatactgtaggcaattgtaacacaacagttaagtatatctatacttacttatatctatacagtaagtgtatctatacatgtctaaacatacaagaggtacagtacaaatacagtgttatgattttattgcaccactgtcatacaagtgcactatccttgaccaaaatgttgttacgtgatgcat

SEQ ID NO: 450613 - DNA, 557 bp, Homo sapiens
ttaagtatatctatacttacttatatctayacagtaagtgtatctatacatgtctaaacatacaagaggtacagtacaaatacagtgttatgattttattgcaccactgtcatacaagtgcactatccttgaccaaaatgttgttacgtgatgcatgattgtaacaaaagaattaattaaatataatatcgaagtgcctattgagatttcaatgaagaaaggaatatttgtaaattctgattaccttaagtgggaattgactttcttcctgtttccatggctcttcttgtgaaagagcatagctttccaaagacctgaaatctctgacaaatcttgcaattctctatagcctgcattatgaaggtcacctggtatcaaaaggggcaaaatggtagattataaagacctgtactttcttgtcacttcctaaacatagcaagcattggtctatcttgaacatttctgcagttataaatgagccttgggtcatgattttctgcctttttatcatagacaagatttaatttaggagatgtccttttaatgtgtaatgtgaa

SEQ ID NO: 450614 - DNA, 568 bp, Homo sapiens
agtgttatgattttattgcaccactgtcatacaagtgcactatccttgaccaaaatgttgttaygtgatgcatgattgtaacaaaagaattaattaaatataatatcgaagtgcctattgagatttcaatgaagaaaggaatatttgtaaattctgattaccttaagtgggaattgactttcttcctgtttccatggctcttcttgtgaaagagcatagctttccaaagacctgaaatctctgacaaatcttgcaattctctatagcctgcattatgaaggtcacctggtatcaaaaggggcaaaatggtagattataaagacctgtactttcttgtcacttcctaaacatagcaagcattggtctatcttgaacatttctgcagttataaatgagccttgggtcatgattttctgcctttttatcatagacaagatttaatttaggagatgtccttttaatgtgtaatgtgaataataagtgacacttatgaagcctattttcttccagccattttaattgtcaaatctgtccagtcaagatgcaatgttagaggtttcactgacaa

SEQ ID NO: 450615 - DNA, 557 bp, Homo sapiens
ttaagtatatctatacttacttatatctatacagtaagtgtatctatacatgtctaaacatacaagaggtacagtacaaatacagtgttatgattttattgcaccactgtcatacaagtgcactatccttgaccaaaatgttgttacgtgatgcatgattgtaacaaaagaattaattaaatataatatcraagtgcctattgagatttcaatgaagaaaggaatatttgtaaattctgattaccttaagtgggaattgactttcttcctgtttccatggctcttcttgtgaaagagcatagctttccaaagacctgaaatctctgacaaatcttgcaattctctatagcctgcattatgaaggtcacctggtatcaaaaggggcaaaatggtagattataaagacctgtactttcttgtcacttcctaaacatagcaagcattggtctatcttgaacatttctgcagttataaatgagccttgggtcatgattttctgcctttttatcatagacaagatttaatttaggagatgtccttttaatgtgtaatgtgaa

SEQ ID NO: 450616 - DNA, 568 bp, Homo sapiens
agtgttatgattttattgcaccactgtcatacaagtgcactatccttgaccaaaatgttgttacgtgatgcatgattgtaacaaaagaattaattaaatataatatcgaagtgcctattgagatttcaatgaagaaaggaatatttgtaaattctgattaccttaagtgggaattgactttcttcctgtttccatggctsttcttgtgaaagagcatagctttccaaagacctgaaatctctgacaaatcttgcaattctctatagcctgcattatgaaggtcacctggtatcaaaaggggcaaaatggtagattataaagacctgtactttcttgtcacttcctaaacatagcaagcattggtctatcttgaacatttctgcagttataaatgagccttgggtcatgattttctgcctttttatcatagacaagatttaatttaggagatgtccttttaatgtgtaatgtgaataataagtgacacttatgaagcctattttcttccagccattttaattgtcaaatctgtccagtcaagatgcaatgttagaggtttcactgacaa

SEQ ID NO: 450617 - DNA, 568 bp, Homo sapiens
agtgttatgattttattgcaccactgtcatacaagtgcactatccttgaccaaaatgttgttacgtgatgcatgattgtaacaaaagaattaattaaatataatatcgaagtgcctattgagatttcaatgaagaaaggaatatttgtaaattctgattaccttaagtgggaattgactttcttcctgtttccatggctcttcttgtgaaagagcatagctttccaaagacctgaaatctctgacaaatcttgyaattctctatagcctgcattatgaaggtcacctggtatcaaaaggggcaaaatggtagattataaagacctgtactttcttgtcacttcctaaacatagcaagcattggtctatcttgaacatttctgcagttataaatgagccttgggtcatgattttctgcctttttatcatagacaagatttaatttaggagatgtccttttaatgtgtaatgtgaataataagtgacacttatgaagcctattttcttccagccattttaattgtcaaatctgtccagtcaagatgcaatgttagaggtttcactgacaa

SEQ ID NO: 450618 - DNA, 494 bp, Homo sapiens
tactttcttgtcacttcctaaacatagcaagcmttggtctatcttgaacatttctgcagttataaatgagccttgggtcatgattttctgcctttttatcatagacaagatttaatttaggagatgtccttttaatgtgtaatgtgaataataagtgacacttatgaagcctattttcttccagccattttaattgtcaaatctgtccagtcaagatgcaatgttagaggtttcactgacaacaccgtctgtgtgtgtgtgtgtgtgtgtgtgtgtgtgtgtgtgtgtgtgtgtgtatacatacatatgattgagcaggatttattgtaagtcaaaacagtctcaaatttcttaggacaatacagcttccttggccattcccttggagctctgagttgaggagctggtgatgtgtatttcttttgcatgttctccacattatccctatgcaggccttccatgggcttggttttggaaccagtgatgaggaagat

SEQ ID NO: 450619 - DNA, 386 bp, Homo sapiens
ttctgcagttataaatgagccttgggtyatgattttctgcctttttatcatagacaagatttaatttaggagatgtccttttaatgtgtaatgtgaataataagtgacacttatgaagcctattttcttccagccattttaattgtcaaatctgtccagtcaagatgcaatgttagaggtttcactgacaacaccgtctgtgtgtgtgtgtgtgtgtgtgtgtgtgtgtgtgtgtgtgtgtgtgtatacatacatatgattgagcaggatttattgtaagtcaaaacagtctcaaatttcttaggacaatacagcttccttggccattcccttggagctctgagttgaggagctggtgatgtgtatttcttttgcatgttctccac

SEQ ID NO: 450620 - DNA, 454 bp, Homo sapiens
attcttctgtataagcaatggaaattttcccagaccaatatttcttcttttgaaatggtaaattttgaatattaactggttagtataatcccataaaataacaaagtttgagccctatgatctgtgttttaggctcaagttgtgttttatgctaaatyatcatttactccttgtatgatcttttttttttttttgagacagagtctcacactgtcactcaggttggagtgcagtggcacaattttggcttacggcaagctccgcctcccaggtgcacaccatccttctgcttcagcctcctgagtagctgggactacaggtgcccgccaccacacccagctaattgttttttaagattaaggatgaaataaaagctgctcccctatattacattcataaatcagaattattaaagcaagctatttatttattagaaacacatactccaaattta

SEQ ID NO: 450621 - DNA, 602 bp, Homo sapiens
gggcttggttttggaaccagtgatgaggaagatcattagaattgtttttctcaaaaagattcctccattcttctgtataagcaatggaaattttcccagaccaatatttcttcttttgaaatggtaaattttgaatattaactggttagtataatcccataaaataacaaagtttgagccctatgatctgtgttttaggctcaagttgtgttttatgctaaattatcatttactccttrtatgatcttttttttttttttgagacagagtctcacactgtcactcaggttggagtgcagtggcacaattttggcttacggcaagctccgcctcccaggtgcacaccatccttctgcttcagcctcctgagtagctgggactacaggtgcccgccaccacacccagctaattgttttttaagattaaggatgaaataaaagctgctcccctatattacattcataaatcagaattattaaagcaagctatttatttattagaaacacatactccaaatttagcatctaagacatgacagtctttcaagagacatcaatttactttttagggtctatagctatatttgtattcatgttattggt

SEQ ID NO: 450622 - DNA, 454 bp, Homo sapiens
attcttctgtataagcaatggaaattttcccagaccaatatttcttcttttgaaatggtaaattttgaatattaactggttagtataatcccataaaataacaaagtttgagccctatgatctgtgttttaggctcaagttgtgttttatgctaaattatcatttactccttgtatgatcttttttttttttttgagacagagtctcacactgtcactcaggytggagtgcagtggcacaattttggcttacggcaagctccgcctcccaggtgcacaccatccttctgcttcagcctcctgagtagctgggactacaggtgcccgccaccacacccagctaattgttttttaagattaaggatgaaataaaagctgctcccctatattacattcataaatcagaattattaaagcaagctatttatttattagaaacacatactccaaattta

SEQ ID NO: 450623 - DNA, 454 bp, Homo sapiens
attcttctgtataagcaatggaaattttcccagaccaatatttcttcttttgaaatggtaaattttgaatattaactggttagtataatcccataaaataacaaagtttgagccctatgatctgtgttttaggctcaagttgtgttttatgctaaattatcatttactccttgtatgatcttttttttttttttgagacagagtctcacactgtcactcaggttggagtgcagtggcacaattttggcttacrgcaagctccgcctcccaggtgcacaccatccttctgcttcagcctcctgagtagctgggactacaggtgcccgccaccacacccagctaattgttttttaagattaaggatgaaataaaagctgctcccctatattacattcataaatcagaattattaaagcaagctatttatttattagaaacacatactccaaattta

SEQ ID NO: 450624 - DNA, 637 bp, Homo sapiens
acatttcatttttaggtttctactgagaggaaatatgacactcagttattattttctccacatatctctggttattttgtcacaaccttttatgtaagctactacyaaacactgggttatccaagatctatgggtcgtattcaatatttgcttttccctcaactactaacacatttgattccctttgtaactttctcccctatttctcctttcaacctgttttctccaaacacactgagtaaataagcctcctatatactctcataacctgttttatctaaagagatttcttttttctactattatacccatctcattccctaatttatttattcttatttctcactctattttttattcttttaggcacagctcatgtctcatgactttcaaaaagtttttcttctgatattcccagctcgaattaggtacatcccaatcagtttccttagacttacaactctgcatattattggcttgcaatctgtcttaggctgggaattagctccttgtaggcaggggctagaatttatttactcttatgtccataatgcctgacacaggaactattctcatatacaaattgtaaggccataattcctgagaacatatgtacattgtagtgactcataaaggc

SEQ ID NO: 450625 - DNA, 398 bp, Homo sapiens
cctttgtaactttctcccctatttctcctttcaacctgttttctccaaacacactgagtwaataagcctcctatatactctcataacctgttttatctaaagagatttcttttttctactattatacccatctcattccctaatttatttattcttatttctcactctattttttattcttttaggcacagctcatgtctcatgactttcaaaaagtttttcttctgatattcccagctcgaattaggtacatcccaatcagtttccttagacttacaactctgcatattattggcttgcaatctgtcttaggctgggaattagctccttgtaggcaggggctagaatttatttactcttatgtccataatgcctgacacaggaactattctcatata

SEQ ID NO: 450626 - DNA, 637 bp, Homo sapiens
acatttcatttttaggtttctactgagaggaaatatgacactcagttattattttctccacatatctctggttattttgtcacaaccttttatgtaagctactactaaacactgggttatccaagatctatgggtcgtattcaatatttgcttttccctcaactactaacacatttgattccctttgtaactttctcccctatttctcctttcaacctgttttctccaaacacactgagtaaataagcctcctatatactctcataacctgttttatctaaagagatttcytttttctactattatacccatctcattccctaatttatttattcttatttctcactctattttttattcttttaggcacagctcatgtctcatgactttcaaaaagtttttcttctgatattcccagctcgaattaggtacatcccaatcagtttccttagacttacaactctgcatattattggcttgcaatctgtcttaggctgggaattagctccttgtaggcaggggctagaatttatttactcttatgtccataatgcctgacacaggaactattctcatatacaaattgtaaggccataattcctgagaacatatgtacattgtagtgactcataaaggc

SEQ ID NO: 450627 - DNA, 531 bp, Homo sapiens
tcttttttctactattatacccatctcattccctaatttatttattcttatttctcwctctattttttattcttttaggcacagctcatgtctcatgactttcaaaaagtttttcttctgatattcccagctcgaattaggtacatcccaatcagtttccttagacttacaactctgcatattattggcttgcaatctgtcttaggctgggaattagctccttgtaggcaggggctagaatttatttactcttatgtccataatgcctgacacaggaactattctcatatacaaattgtaaggccataattcctgagaacatatgtacattgtagtgactcataaaggcttgaaataaatttttaaaatgataaattgggaagtccatgaacttgacatcttgatgtagaagaaaagcaagggcagatgaagaagttatacaggatacttgaaataccagaagaatataatcagagagcaataaattaatcctagatttttagatgtgaagaagttctgagaaatatttga

SEQ ID NO: 450628 - DNA, 398 bp, Homo sapiens
cctttgtaactttctcccctatttctcctttcaacctgttttctccaaacacactgagtaaataagcctcctatatactctcataacctgttttatctaaagagatttcttttttctactattatacccatctcattccctaatttatttattcttatttctcactctattttttattcttttaggcayagctcatgtctcatgactttcaaaaagtttttcttctgatattcccagctcgaattaggtacatcccaatcagtttccttagacttacaactctgcatattattggcttgcaatctgtcttaggctgggaattagctccttgtaggcaggggctagaatttatttactcttatgtccataatgcctgacacaggaactattctcatata

SEQ ID NO: 450629 - DNA, 398 bp, Homo sapiens
cctttgtaactttctcccctatttctcctttcaacctgttttctccaaacacactgagtaaataagcctcctatatactctcataacctgttttatctaaagagatttcttttttctactattatacccatctcattccctaatttatttattcttatttctcactctattttttattcttttaggcacagctcatgtctcatgactttcaaaaagtttttcttctgatattcccagctcgaattaggtacatcccaatcagtttccttagacttacaactctgcawattattggcttgcaatctgtcttaggctgggaattagctccttgtaggcaggggctagaatttatttactcttatgtccataatgcctgacacaggaactattctcatata

SEQ ID NO: 450630 - DNA, 531 bp, Homo sapiens
tcttttttctactattatacccatctcattccctaatttatttattcttatttctcactctattttttattcttttaggcacagctcatgtctcatgactttcaaaaagtttttcttctgatattcccagctcgaattaggtacatcccaatcagtttccttagacttacaactctgcatattattggcttgcaatctgtcttaggctgggaattagctccttgtaggcaggggctagaatttatttactcttatgtccataatgcctgacacaggaactattctcatatacaaattgtarggccataattcctgagaacatatgtacattgtagtgactcataaaggcttgaaataaatttttaaaatgataaattgggaagtccatgaacttgacatcttgatgtagaagaaaagcaagggcagatgaagaagttatacaggatacttgaaataccagaagaatataatcagagagcaataaattaatcctagatttttagatgtgaagaagttctgagaaatatttga

SEQ ID NO: 450631 - DNA, 481 bp, Homo sapiens
attattggcttgcaatctgtcttaggctgggaattagctccttgtaggcaggggctagaatttatttactcttatgtccataatgcctgacacaggaactattctcatatacaaattgtaaggccataattcctgagaacatatgtacattgtagtgactcataaaggcttgaaataaatttttaaaatgatwaattgggaagtccatgaacttgacatcttgatgtagaagaaaagcaagggcagatgaagaagttatacaggatacttgaaataccagaagaatataatcagagagcaataaattaatcctagatttttagatgtgaagaagttctgagaaatatttgaagacatggctctagggatgagtacataacagagaccattagccagagtcagagcttttcagagtgaagaaattccattgcagggggcaggactcttgtatactaaatagaaattgtcattaaatggagac

SEQ ID NO: 450632 - DNA, 336 bp, Homo sapiens
tacattgtagtgactcataaaggcttgaaataaatttttaaaatgataaattgggaagtccatgaacttgacatcttgatgtagaagaaaagcaagggcagatgaagaagttatacaggatacttgaaataccagaagaatataatcagagagcaataaattaatcctagatttttagatgtgaagaagttctgagaaatatttgaagacatggctctagggatgagtacataacagagaccattagccagaktcagagcttttcagagtgaagaaattccattgcagggggcaggactcttgtatactaaatagaaattgtcattaaatggagac

SEQ ID NO: 450633 - DNA, 336 bp, Homo sapiens
tacattgtagtgactcataaaggcttgaaataaatttttaaaatgataaattgggaagtccatgaacttgacatcttgatgtagaagaaaagcaagggcagatgaagaagttatacaggatacttgaaataccagaagaatataatcagagagcaataaattaatcctagatttttagatgtgaagaagttctgagaaatatttgaagacatggctctagggatgagtacataacagagaccattagccagagtcagagcttttcagagtgaagaaattccwttgcagggggcaggactcttgtatactaaatagaaattgtcattaaatggagac

SEQ ID NO: 450634 - DNA, 336 bp, Homo sapiens
tacattgtagtgactcataaaggcttgaaataaatttttaaaatgataaattgggaagtccatgaacttgacatcttgatgtagaagaaaagcaagggcagatgaagaagttatacaggatacttgaaataccagaagaatataatcagagagcaataaattaatcctagatttttagatgtgaagaagttctgagaaatatttgaagacatggctctagggatgagtacataacagagaccattagccagagtcagagcttttcagagtgaagaaattccattgcagggggmaggactcttgtatactaaatagaaattgtcattaaatggagac

SEQ ID NO: 450635 - DNA, 477 bp, Homo sapiens
gatgaggttttaccatgttagtcaggctggtctcgaactcctgacctcaggtgatccacccacctcagcctctcaaagtgctgggattacagacwtgagccactgcccccagccatcttttttatttatttattttaattgttgttctggagatcctgggatgcatagacagtgaatatcttttttgttttttgagacagaatctcactctgtctcccaggctgcagtgcagtggtgcgatcttggttaactgcaacctctgctttctaggctcaagcgattctcctgcctcagcctcccaggtagctgaaattacaggtgccagctaccatgcccagctaatttttgtatttttattagagatgaggttttgccatgttggccaggctggtcttgaactcctgacctcaggtgatccacccacctttgcctcccaaagtgctgagattacaggcatgagccactgagcccagctga

SEQ ID NO: 450636 - DNA, 578 bp, Homo sapiens
tgtagttgccctgggagggcggggaatggggagtcactttttaatgggtacaggatttcaattttacaagacaaaaagaattatggagatgggtggtggtgatgcttgcacaacattgtgaatacgtttaatgacactgaattgtatacttaacagtggttaagatgtaaattgttgagtgtgttttgccacagttaaaaaayggaaaacaatagtatttgaagatatagcccatttcatctggtagctagctgtatgtgtctgctcagctgtggatagatatttatgctgtttctgaactggaggttactggtattctctaaggtataggaaaattgatcttatgtggctaactgaggtggatatagttgtatcagtcagacagtaatgatataatcatgatagtttacatttaacacaacttacatgtgttatactttagaaagcacttcattcatattattacttcataccattttccccttaccatatttgtctctcctttctctgctgacttcagaaaatgtctcttccacactactcaattcatctccttattttgtcaaaattttaagtct

SEQ ID NO: 450637 - DNA, 500 bp, Homo sapiens
taagatgtaaattgttgagtgtgttttgccacagttaaaaaacggaaaacaatagtatttgaagatatagcccatttcatctggtagctagctstatgtgtctgctcagctgtggatagatatttatgctgtttctgaactggaggttactggtattctctaaggtataggaaaattgatcttatgtggctaactgaggtggatatagttgtatcagtcagacagtaatgatataatcatgatagtttacatttaacacaacttacatgtgttatactttagaaagcacttcattcatattattacttcataccattttccccttaccatatttgtctctcctttctctgctgacttcagaaaatgtctcttccacactactcaattcatctccttattttgtcaaaattttaagtctcagagtctccaaaaaaattccagacaagtctcatcagctttcagtcattgattaatcgatatccttagaggctttcccttcc

SEQ ID NO: 450638 - DNA, 578 bp, Homo sapiens
tgtagttgccctgggagggcggggaatggggagtcactttttaatgggtacaggatttcaattttacaagacaaaaagaattatggagatgggtggtggtgatgcttgcacaacattgtgaatacgtttaatgacactgaattgtatacttaacagtggttaagatgtaaattgttgagtgtgttttgccacagttaaaaaacggaaaacaatagtatttgaagatatagcccatttcatctggtagctagctgtatgtgtctgctcagctgtggatagatatttatgctgtttctgaactggaggttactggtattctctaagrtataggaaaattgatcttatgtggctaactgaggtggatatagttgtatcagtcagacagtaatgatataatcatgatagtttacatttaacacaacttacatgtgttatactttagaaagcacttcattcatattattacttcataccattttccccttaccatatttgtctctcctttctctgctgacttcagaaaatgtctcttccacactactcaattcatctccttattttgtcaaaattttaagtct

SEQ ID NO: 450639 - DNA, 578 bp, Homo sapiens
taactgaggtggatatagttgtatcagtcagmcagtaatgatataatcatgatagtttacatttaacacaacttacatgtgttatactttagaaagcacttcattcatattattacttcataccattttccccttaccatatttgtctctcctttctctgctgacttcagaaaatgtctcttccacactactcaattcatctccttattttgtcaaaattttaagtctcagagtctccaaaaaaattccagacaagtctcatcagctttcagtcattgattaatcgatatccttagaggctttcccttccccttctcaatttaacatagcttccaaatacacttgccagtaaaacaaagttgtttatatggttttgtatttcttcctgctgaattatgaacattttttcatattgacattgatttccatctggccatgaaatactcaaggtgaagaaaatgaaacaaaattgttaatatttatcaagagccaggtactgttttcagtgtcctagaagcataaactagtgtaacgctcaccagatcatatgagaggcaaaaatggatgaaactataaaa

SEQ ID NO: 450640 - DNA, 496 bp, Homo sapiens
gtttctgaactggaggttactggtattctctaaggtataggaaaattgatcttatgtggctaactgaggtggatatagttgtatcagtcagacagtaatgatataatcatgatagtttacatttaacacaacttacatgtgttatactttagaaagcacttcattcatattattacttyataccattttccccttaccatatttgtctctcctttctctgctgacttcagaaaatgtctcttccacactactcaattcatctccttattttgtcaaaattttaagtctcagagtctccaaaaaaattccagacaagtctcatcagctttcagtcattgattaatcgatatccttagaggctttcccttccccttctcaatttaacatagcttccaaatacacttgccagtaaaacaaagttgtttatatggttttgtatttcttcctgctgaattatgaacattttttcatattgacattgatttccatctggcca

SEQ ID NO: 450641 - DNA, 578 bp, Homo sapiens
taactgaggtggatatagttgtatcagtcagacagtaatgatataatcatgatagtttacatttaacacaacttacatgtgttatactttagaaagcacttcattcatattattacttcataccattttccccttaccatatttgtctctcstttctctgctgacttcagaaaatgtctcttccacactactcaattcatctccttattttgtcaaaattttaagtctcagagtctccaaaaaaattccagacaagtctcatcagctttcagtcattgattaatcgatatccttagaggctttcccttccccttctcaatttaacatagcttccaaatacacttgccagtaaaacaaagttgtttatatggttttgtatttcttcctgctgaattatgaacattttttcatattgacattgatttccatctggccatgaaatactcaaggtgaagaaaatgaaacaaaattgttaatatttatcaagagccaggtactgttttcagtgtcctagaagcataaactagtgtaacgctcaccagatcatatgagaggcaaaaatggatgaaactataaaa

SEQ ID NO: 450642 - DNA, 578 bp, Homo sapiens
taactgaggtggatatagttgtatcagtcagacagtaatgatataatcatgatagtttacatttaacacaacttacatgtgttatactttagaaagcacttcattcatattattacttcataccattttccccttaccatatttgtctctcctttctctgctgacttcagaaaatgtctcttccacactactcaattcatctccttattttgtcaaaattttaagtctcagagtctccaaaaaaattccagacaagtctcatsagctttcagtcattgattaatcgatatccttagaggctttcccttccccttctcaatttaacatagcttccaaatacacttgccagtaaaacaaagttgtttatatggttttgtatttcttcctgctgaattatgaacattttttcatattgacattgatttccatctggccatgaaatactcaaggtgaagaaaatgaaacaaaattgttaatatttatcaagagccaggtactgttttcagtgtcctagaagcataaactagtgtaacgctcaccagatcatatgagaggcaaaaatggatgaaactataaaa

SEQ ID NO: 450643 - DNA, 386 bp, Homo sapiens
ttattacttcataccattttccccttaccatatttgtctctcctttctctgctgacttcagaaaatgtctcttccacactactcaattcatctccttattttgtcaaaattttaagtctcagagtctccaaaaaaattccagacaagtctcatcasctttcagtcattgattaatcgatatccttagaggctttcccttccccttctcaatttaacatagcttccaaatacacttgccagtaaaacaaagttgtttatatggttttgtatttcttcctgctgaattatgaacattttttcatattgacattgatttccatctggccatgaaatactcaaggtgaagaaaatgaaacaaaattgttaatatttatcaagagccaggt

SEQ ID NO: 450644 - DNA, 386 bp, Homo sapiens
ttattacttcataccattttccccttaccatatttgtctctcctttctctgctgacttcagaaaatgtctcttccacactactcaattcatctccttattttgtcaaaattttaagtctcagagtctccaaaaaaattccagacaagtctcatcagctttcrgtcattgattaatcgatatccttagaggctttcccttccccttctcaatttaacatagcttccaaatacacttgccagtaaaacaaagttgtttatatggttttgtatttcttcctgctgaattatgaacattttttcatattgacattgatttccatctggccatgaaatactcaaggtgaagaaaatgaaacaaaattgttaatatttatcaagagccaggt

SEQ ID NO: 450645 - DNA, 496 bp, Homo sapiens
gtttctgaactggaggttactggtattctctaaggtataggaaaattgatcttatgtggctaactgaggtggatatagttgtatcagtcagacagtaatgatataatcatgatagtttacatttaacacaacttacatgtgttatactttagaaagcacttcattcatattattacttcataccattttccccttaccatatttgtctctcctttctctgctgacttcagaaaatgtctcttccacactactcaattcatctccttattttgtcaaaattttaagtctcagagtctccaaaaaaattccagacaagtctcatcagctttcagtcattgattaatcgatrtccttagaggctttcccttccccttctcaatttaacatagcttccaaatacacttgccagtaaaacaaagttgtttatatggttttgtatttcttcctgctgaattatgaacattttttcatattgacattgatttccatctggcca

SEQ ID NO: 450646 - DNA, 386 bp, Homo sapiens
ttattacttcataccattttccccttaccatatttgtctctcctttctctgctgacttcagaaaatgtctcttccacactactcaattcatctccttattttgtcaaaattttaagtctcagagtctccaaaaaaattccagacaagtctcatcagctttcagtcattgattaatcgatatccttagaggctttcccttccccttctcaatttaacatagcttccmaatacacttgccagtaaaacaaagttgtttatatggttttgtatttcttcctgctgaattatgaacattttttcatattgacattgatttccatctggccatgaaatactcaaggtgaagaaaatgaaacaaaattgttaatatttatcaagagccaggt

SEQ ID NO: 450647 - DNA, 598 bp, Homo sapiens
ctgctgacttcagaaaatgtctcttccacactactcaattcatctccttattttgtcaaaattttaagtctcagagtctccaaaaaaattccagacaagtctcatcagctttcagtcattgattaatcgatatccttagaggctttcccttccccttctcaatttaacatagcttccaaatacacttgccartaaaacaaagttgtttatatggttttgtatttcttcctgctgaattatgaacattttttcatattgacattgatttccatctggccatgaaatactcaaggtgaagaaaatgaaacaaaattgttaatatttatcaagagccaggtactgttttcagtgtcctagaagcataaactagtgtaacgctcaccagatcatatgagaggcaaaaatggatgaaactataaaatcaagacacagagagttaagggaaatttcccaagatcacacagccactgaggatatgaactagattttgacttcaggctatttaccccagaacctgtgctttcaaccattatttgtactgcttccctaaattactcttgagtacactgtgacatcatacttcacccatgacactgat

SEQ ID NO: 450648 - DNA, 598 bp, Homo sapiens
ctgctgacttcagaaaatgtctcttccacactactcaattcatctccttattttgtcaaaattttaagtctcagagtctccaaaaaaattccagacaagtctcatcagctttcagtcattgattaatcgatatccttagaggctttcccttccccttctcaatttaacatagcttccaaatacacttgccagtaaaacaaagttgtttatatggttttgtatttcttcctgctgaattatgaacattttttcatattgacattgatttccatctggccatgaaatactcaaggtgaagaaaatgaaacaaaattgttaatatttatcaagagccaggyactgttttcagtgtcctagaagcataaactagtgtaacgctcaccagatcatatgagaggcaaaaatggatgaaactataaaatcaagacacagagagttaagggaaatttcccaagatcacacagccactgaggatatgaactagattttgacttcaggctatttaccccagaacctgtgctttcaaccattatttgtactgcttccctaaattactcttgagtacactgtgacatcatacttcacccatgacactgat

SEQ ID NO: 450649 - DNA, 598 bp, Homo sapiens
ctgctgacttcagaaaatgtctcttccacactactcaattcatctccttattttgtcaaaattttaagtctcagagtctccaaaaaaattccagacaagtctcatcagctttcagtcattgattaatcgatatccttagaggctttcccttccccttctcaatttaacatagcttccaaatacacttgccagtaaaacaaagttgtttatatggttttgtatttcttcctgctgaattatgaacattttttcatattgacattgatttccatctggccatgaaatactcaaggtgaagaaaatgaaacaaaattgttaatatttatcaagagccaggtactgttttcagtgtcctagaagcataaactagtgtaacgctcaccagatcatatgagaggcaaaaatggatgaaactataaaatcaagacacagagagttaagggaaatttcccaagatcacacagccactgaggatatgaactagattttgacttcaggctatttaccccagaacctgtgctttcaaccatyatttgtactgcttccctaaattactcttgagtacactgtgacatcatacttcacccatgacactgat

SEQ ID NO: 450650 - DNA, 523 bp, Homo sapiens
catggaaagaaataagcttttttgttttcaatcatttttcaataggttatcagtgttgtgaatggttcatgaaaaatgactttgggctcagtgagtaactgaaatgttgttgcttaatagtgtgtttaatattaatataatagtaacaaatgttgttattgttgagtaatacttatttggcttttcactgcttttcttttctagtgttttagtcagagacttcttaagtctcctcaagtgtgtacacatttcttaaatttgttggaaagtaccaaatttaagatatcttgcatttttttcttccttartaaacactaaattccatcacgcagcagaaaaagggctctgttattgttggtacaatggcttaatattcacttttattccctgtatcgtagttctgatataattgctatttagaataaagcttgttccttattatatgcattcgtaattataaaatttgtgttttaaagccttctacacatatactgtgcttttctttatttccttatatctctta

SEQ ID NO: 450651 - DNA, 575 bp, Homo sapiens
catggaaagaaataagcttttttgttttcaatcatttttcaataggttatcagtgttgtgaatggttcatgaaaaatgactttgggctcagtgagtaactgaaatgttgttgcttaatagtgtgtttaatattaatataatagtaacaaatgttgttattgttgagtaatacttatttggcttttcactgcttttcttttctagtgttttagtcagagacttcttaagtctcctcaagtgtgtacacatttcttaaatttgttggaaagtaccaaatttaagatatcttgcatttttttcttccttagtaaacactaaattccatcacgcagcagaaaaagggctctgttattgttggtacaatggcttaatattcacttttattccctgtatcgtagttctgatataattgctatttagaataaarcttgttccttattatatgcattcgtaattataaaatttgtgttttaaagccttctacacatatactgtgcttttctttatttccttatatctcttactgtttcatgatcctggtatttgaaatctcattaagtgttgtttggggattt

SEQ ID NO: 450652 - DNA, 575 bp, Homo sapiens
catggaaagaaataagcttttttgttttcaatcatttttcaataggttatcagtgttgtgaatggttcatgaaaaatgactttgggctcagtgagtaactgaaatgttgttgcttaatagtgtgtttaatattaatataatagtaacaaatgttgttattgttgagtaatacttatttggcttttcactgcttttcttttctagtgttttagtcagagacttcttaagtctcctcaagtgtgtacacatttcttaaatttgttggaaagtaccaaatttaagatatcttgcatttttttcttccttagtaaacactaaattccatcacgcagcagaaaaagggctctgttattgttggtacaatggcttaatattcacttttattccctgtatcgtagttctgatataattgctatttagaataaagcttgttccttattatatgcattcgtaattataaaatttgtgttttaawgccttctacacatatactgtgcttttctttatttccttatatctcttactgtttcatgatcctggtatttgaaatctcattaagtgttgtttggggattt

SEQ ID NO: 450653 - DNA, 494 bp, Homo sapiens
gcattcgtaattataaaatttgtgttttaaagccttctacacatatactgtgcttttctttatttccttatatctyttactgtttcatgatcctggtatttgaaatctcattaagtgttgtttggggatttgctgggaatgtcatctacatagtaatgtctcaagtttgtagcaactttaaaacataataggagatggaattcacagcagagtaataaccctcccactttaggcaatgtatttgtgattggtatgactttgttcccagagggcagttagcaacacaatattaaggctatgtgtacaaggaaaacaaattttaaaaatctcctttaaaaaaaaacagttcccaatcctaaccagtatcatgcacagaatccgtttccacctcttcatatggaagcagctctgggtggacatctagaaagttggataactatttatcacatatgatctgtaaagggagagatttacaagaaagtgttaaatttaat

SEQ ID NO: 450654 - DNA, 494 bp, Homo sapiens
gcattcgtaattataaaatttgtgttttaaagccttctacacatatactgtgcttttctttatttccttatatctcttactgtttcatgatcctggtatttgaaatctcattaagtgttgtttggggatttgctgggaatgtcatctacatartaatgtctcaagtttgtagcaactttaaaacataataggagatggaattcacagcagagtaataaccctcccactttaggcaatgtatttgtgattggtatgactttgttcccagagggcagttagcaacacaatattaaggctatgtgtacaaggaaaacaaattttaaaaatctcctttaaaaaaaaacagttcccaatcctaaccagtatcatgcacagaatccgtttccacctcttcatatggaagcagctctgggtggacatctagaaagttggataactatttatcacatatgatctgtaaagggagagatttacaagaaagtgttaaatttaat

SEQ ID NO: 450655 - DNA, 424 bp, Homo sapiens
atctcattaagtgttgtttggggatttgctgggaatgtcatctacatagtaatgtctcaagtttgtagcawctttaaaacataataggagatggaattcacagcagagtaataaccctcccactttaggcaatgtatttgtgattggtatgactttgttcccagagggcagttagcaacacaatattaaggctatgtgtacaaggaaaacaaattttaaaaatctcctttaaaaaaaaacagttcccaatcctaaccagtatcatgcacagaatccgtttccacctcttcatatggaagcagctctgggtggacatctagaaagttggataactatttatcacatatgatctgtaaagggagagatttacaagaaagtgttaaatttaatccataggaaagcaaaatcaaaaatcaatgaattt

SEQ ID NO: 450656 - DNA, 424 bp, Homo sapiens
atctcattaagtgttgtttggggatttgctgggaatgtcatctacatagtaatgtctcaagtttgtagcaactttaaaacataataggagatggaattcacagcagagtaataaccctcccactttaggcaatgtatttgtgattggtatgactttgttcccagagggcagttagcaacacaatattaaggctatgtgtacaaggaaaacaaattttaaaaatctcctttaaaaaaaaacagttcccratcctaaccagtatcatgcacagaatccgtttccacctcttcatatggaagcagctctgggtggacatctagaaagttggataactatttatcacatatgatctgtaaagggagagatttacaagaaagtgttaaatttaatccataggaaagcaaaatcaaaaatcaatgaattt

SEQ ID NO: 450657 - DNA, 477 bp, Homo sapiens
gatgaggttttaccatgttagtcaggctggtctcgaactcctgacctcaggtgatccacccacctcagcctctcaaagtgctgggattacagacatgagccactgcccccagccatcttttttatttatttattttaattgttgttctggagatcctgggatgcatagacagtgaatatcttttttgttttttgagacagaatctcactctgtctcccaggctgcagtgcagtggtgcgatcttggttaactgcaacctctgctttctaggctcaagcgattctcctgcctcagcctcccrggtagctgaaattacaggtgccagctaccatgcccagctaatttttgtatttttattagagatgaggttttgccatgttggccaggctggtcttgaactcctgacctcaggtgatccacccacctttgcctcccaaagtgctgagattacaggcatgagccactgagcccagctga

SEQ ID NO: 450658 - DNA, 579 bp, Homo sapiens
tttccatttgtagttttccctaggggctccactctctagatggcttaaatgcgttagaattaaatgactaggcacaattgtttgttagtgacataaaagcaaggtaagcatttctgctttatgagtccaagcacagggaaacttggttttctttggaaggatatcataaaggcaatgtttatgagtaatccctcattgtctttccttctgtagcattcaatggtatgtactataatttrgaaatgaaaactacttaaagaccacttgctaagtttcatgtatttcaaattctcagatcctgagtgtttaaatatgcctatatttcttcatgaaaaaaacataatctttgccaagttagaaaaagaaagtcatattcccatttttaactcaatgtaatcagaaatttggacagtttttagccttcaatacattatgtaatttaggtaacaggctgaataaaagtaaggaacttcagttaaattcagagagaagctagtaattatttctaagactcaaatgtatagaacagatctctgatattaaggataagaccctcaaaggtgacccaaaatgggtaat

SEQ ID NO: 450659 - DNA, 581 bp, Homo sapiens
ggctccactctctagatggcttaaatgcgttagaattaaatgactaggcacaattgtttgttagtgacataaaagcaaggtaagcatttctgctttatgagtccaagcacagggaaacttggttttctttggaaggatatcataaaggcaatgtttatgagtaatccctcattgtctttccttctgtagcattcaatggtatgtactataatttagaaatgaaaactacttaaagaccacttgctaagtttcatgtatttcaaattctcagatcctgagtgtttaaatatgcctatatttcttcatgaaaaaaacataatctttgccaagttagaaaaagaaagtcatattcccatttttaactcaatgtaatcagaaatttggacagtttwtagccttcaatacattatgtaatttaggtaacaggctgaataaaagtaaggaacttcagttaaattcagagagaagctagtaattatttctaagactcaaatgtatagaacagatctctgatattaaggataagaccctcaaaggtgacccaaaatgggtaattgtgggattattttgggaggaatcat

SEQ ID NO: 450660 - DNA, 581 bp, Homo sapiens
ggctccactctctagatggcttaaatgcgttagaattaaatgactaggcacaattgtttgttagtgacataaaagcaaggtaagcatttctgctttatgagtccaagcacagggaaacttggttttctttggaaggatatcataaaggcaatgtttatgagtaatccctcattgtctttccttctgtagcattcaatggtatgtactataatttagaaatgaaaactacttaaagaccacttgctaagtttcatgtatttcaaattctcagatcctgagtgtttaaatatgcctatatttcttcatgaaaaaaacataatctttgccaagttagaaaaagaaagtcatattcccatttttaactcaatgtaatcagaaatttggacagtttttagccttcaatacattatgtaatttaggtaacaggctgaataaaagtaaggaacytcagttaaattcagagagaagctagtaattatttctaagactcaaatgtatagaacagatctctgatattaaggataagaccctcaaaggtgacccaaaatgggtaattgtgggattattttgggaggaatcat

SEQ ID NO: 450661 - DNA, 421 bp, Homo sapiens
aaaaagaaagtcatattcccatttttaactcaatgtaatcagaaatttggacagtttttagccttcaatacattatgtaatttaggtaacaggctgaataaaagtaaggaacttcagttaaattcagagagaagctagtaattatttctaagactcaaatgtatagaacagatctctgatattaaggataagaccctcaaaggtgacccaaaatgkgtaattgtgggattattttgggaggaatcatcatagattcttactgctataaatacagtcaaatgtcagataaatatactccactgaaatgttttctaggaatgatgttggaaccaatgttggtaattttgaaagtcatggagaggatttcagatgatagaagtcgggcaactatcccaggtttaataaataagcaaatggtgag

SEQ ID NO: 450662 - DNA, 421 bp, Homo sapiens
aaaaagaaagtcatattcccatttttaactcaatgtaatcagaaatttggacagtttttagccttcaatacattatgtaatttaggtaacaggctgaataaaagtaaggaacttcagttaaattcagagagaagctagtaattatttctaagactcaaatgtatagaacagatctctgatattaaggataagaccctcaaaggtgacccaaaatgggtaattgtgggattattttgggaggaatcatcatagattcttactgctataaatacagtcaaatgtcagataaatatactccactgaaatgttttctaggaatgatgttggaaccaatgttggtaaytttgaaagtcatggagaggatttcagatgatagaagtcgggcaactatcccaggtttaataaataagcaaatggtgag

SEQ ID NO: 450663 - DNA, 602 bp, Homo sapiens
ttaccatacttcgctaatttgattaccaactacttgaacacagggaccaatgtgcttattaaaaattttgcatattatgagggcattaacttttaagtattcgattgttaagacaatrtatattattataaaccatagaaggcacacttattacctccttaagacccagtctctatttctctggttcatagaactccaaggtcatagagggattggacattcgtgtcttcaattggccctcttcagccctaggataaatagtgattaatctaagccaatggttttcggctctgtctgacccaatgcctctacttcataagaaattcttcaaagaccccttcactattctaaactattagtgagaacacaatgtatgcattcaagttgttgaaaatattaatggtatgctgaagctaacaaaggagaaataatttactgtcaatatatgatccaaaatgtatataattgtgccagaacatttacatatcaaatacaatagaacataatgaaattttcatatcttcgcccataccttgaaacactgtaaataaaaagctacaaatatagtttcattgaataaccaaatgccaaaactgccattt

SEQ ID NO: 450664 - DNA, 476 bp, Homo sapiens
tattagatcatatgaatgtgcccttaggaaacacagaaggcccacactattatagagacaaatttcttacattctctgctgtttaatgctcttcaaaagacttaccatacttcgctaatttgattaccaactacttgaacacagggaccaatgtgcttattaaaaattttgcatattatgagggcattaacttttaagtattcgattgttaagacaatgyatattattataaaccatagaaggcacacttattacctccttaagacccagtctctatttctctggttcatagaactccaaggtcatagagggattggacattcgtgtcttcaattggccctcttcagccctaggataaatagtgattaatctaagccaatggttttcggctctgtctgacccaatgcctctacttcataagaaattcttcaaagaccccttcactattctaaactattagtgagaacacaatgtat

SEQ ID NO: 450665 - DNA, 476 bp, Homo sapiens
tattagatcatatgaatgtgcccttaggaaacacagaaggcccacactattatagagacaaatttcttacattctctgctgtttaatgctcttcaaaagacttaccatacttcgctaatttgattaccaactacttgaacacagggaccaatgtgcttattaaaaattttgcatattatgagggcattaacttttaagtattcgattgttaagacaatgtatattattataaaccatagaaggcacacttattacctccttaagamccagtctctatttctctggttcatagaactccaaggtcatagagggattggacattcgtgtcttcaattggccctcttcagccctaggataaatagtgattaatctaagccaatggttttcggctctgtctgacccaatgcctctacttcataagaaattcttcaaagaccccttcactattctaaactattagtgagaacacaatgtat

SEQ ID NO: 450666 - DNA, 476 bp, Homo sapiens
tattagatcatatgaatgtgcccttaggaaacacagaaggcccacactattatagagacaaatttcttacattctctgctgtttaatgctcttcaaaagacttaccatacttcgctaatttgattaccaactacttgaacacagggaccaatgtgcttattaaaaattttgcatattatgagggcattaacttttaagtattcgattgttaagacaatgtatattattataaaccatagaaggcacacttattacctccttaagacccagtctctatttctctggttcatagaactccaaggtcataragggattggacattcgtgtcttcaattggccctcttcagccctaggataaatagtgattaatctaagccaatggttttcggctctgtctgacccaatgcctctacttcataagaaattcttcaaagaccccttcactattctaaactattagtgagaacacaatgtat

SEQ ID NO: 450667 - DNA, 476 bp, Homo sapiens
tattagatcatatgaatgtgcccttaggaaacacagaaggcccacactattatagagacaaatttcttacattctctgctgtttaatgctcttcaaaagacttaccatacttcgctaatttgattaccaactacttgaacacagggaccaatgtgcttattaaaaattttgcatattatgagggcattaacttttaagtattcgattgttaagacaatgtatattattataaaccatagaaggcacacttattacctccttaagacccagtctctatttctctggttcatagaactccaaggtcatagagggattggacattygtgtcttcaattggccctcttcagccctaggataaatagtgattaatctaagccaatggttttcggctctgtctgacccaatgcctctacttcataagaaattcttcaaagaccccttcactattctaaactattagtgagaacacaatgtat

SEQ ID NO: 450668 - DNA, 602 bp, Homo sapiens
ttaccatacttcgctaatttgattaccaactacttgaacacagggaccaatgtgcttattaaaaattttgcatattatgagggcattaacttttaagtattcgattgttaagacaatgtatattattataaaccatagaaggcacacttattacctccttaagacccagtctctatttctctggttcatagaactccaaggtcatagagggattggacattcgtgtcttcaattggccctcttcagccctaggataaatagtgattaatctaagccaatggttttcggctctgtctgacccaatgcctctacttcataagaaattcttcaaagaccccttcactattctaaactattagtgagaacacaatgtatgcattcaagttgttgaaaatattaatgktatgctgaagctaacaaaggagaaataatttactgtcaatatatgatccaaaatgtatataattgtgccagaacatttacatatcaaatacaatagaacataatgaaattttcatatcttcgcccataccttgaaacactgtaaataaaaagctacaaatatagtttcattgaataaccaaatgccaaaactgccattt

SEQ ID NO: 450669 - DNA, 247 bp, Homo sapiens
gaataaccaaatgccaaaactgccatttctgtttttgacatgattgatctgcattggtaaatgtaatagatactttctgtttggcccttgtcccctgttatactcccctatttactggcttttgtccaagtggaatggtccatattgaatatctcaatckgttcccttgctcattgccttctatgcatgttcatgagattaaagggaaggaggaaatgggattggggtttattgcctaaactccctc

SEQ ID NO: 450670 - DNA, 634 bp, Homo sapiens
tctgtttttgacatgattgatctgcattggtaaatgtaatagatactttctgtttggcccttgtcccctgttatactcccctatttactggcttttgtccaagtggaatggtccatattgaatatctcaatctgttcccttgctcattgccttctatgcatgttcatgagattaaagggaaggaggaaatgggattggggtttattgcctaaactccctctctgctaggtctccttgaccaatctttttcataagaaaattagtgtttccttgcgtgatcagggaagtttactccccagaattctgcctgctgctactaacccagagttattgtggggtgtgatttctgtgattccttcacccttctcccctgacattttcgtaagtagtctctttggaaataaacctatgttaaattatcktagtttgagtgtgttctgtttttcctattgagactctgaaatgagtatctaaatgaaaaaatctaccatcttttctcatatacatagtagtttcattcttgcaaaattcatggcatattaaaaccatgcaaaagtacttggcacttaggcagttacatttgggattgtataattaaacaaagcaggttattcaccttcattacattagaaag

SEQ ID NO: 450671 - DNA, 599 bp, Homo sapiens
caattaaaaatatatataacatgtttaatgcaatacaaatgcttttcaatgtacaatggggttaagtcttgataagctgattataaattgaaaatacagtaagttaaaaatgtatttaatacctaacttactgaatatcacagcttagcctggcatactttaatgtgctcagaacacttacatcagctgacaattgggcaaaatcattgaatacaaaacccactttataataaagtwttggatattttatgtaatttgttgaatattgtactgaaagtgaaaagcagaatggttatattctattcaaagctatcacttttgcttcatcataaagtaaaaataatcataaattgaaccattataatttgttgaccatctgtgtatatgtatgtgtgtgtgtacctatataaacatgtatgtttatatatatatttgtgtgtgtatatatcctcggtgtgtgggtatgtgtgtttgagagtgtgtgtgtgtgtgtgtgtgtatgaaattgtaggaaagtaaaatttcttatcttatagatatagcatgttaacatgttggtacctatcttcctgagatgtaaaattttacatggatagatg

SEQ ID NO: 450672 - DNA, 599 bp, Homo sapiens
caattaaaaatatatataacatgtttaatgcaatacaaatgcttttcaatgtacaatggggttaagtcttgataagctgattataaattgaaaatacagtaagttaaaaatgtatttaatacctaacttactgaatatcacagcttagcctggcatactttaatgtgctcagaacacttacatcagctgacaattgggcaaaatcattgaatacaaaacccactttataataaagtattggatattttatgtaatttgttgaatattgtactgaaagtgaaaagcagaatggttatattctattcaaagctatcacttttgcttcatcataaagtaaaaataatcataaattgaaccattataatttgttgaccatctgtgtatatgtatgtgtgtgtgtacctatataaacatgtatgtttatatatatatttgtgtgtgtatatatcctcggtgtgtgggtatgtrtgtttgagagtgtgtgtgtgtgtgtgtgtgtatgaaattgtaggaaagtaaaatttcttatcttatagatatagcatgttaacatgttggtacctatcttcctgagatgtaaaattttacatggatagatg

SEQ ID NO: 450673 - DNA, 542 bp, Homo sapiens
gtgtatatgtatgtgtgtgtgtacctatataaacatgtatgtttatatatatatttgtgtgtgtatatatcctcggtgtgtgggtatgtgtgtttgagagtgtgtgtgtgtgtgtgtgtgtatgaaattgtaggaaagtaaaatttcttatcttatagatatagcatgttaacatgttggtacctatcttcctgagatgtaaaattttacatggatagatgtgtacatttacygttgtacacaaagagaaacatattctgtaggctctttgtttttctgtaatttaattcaacactatctggtttatatggatgattacatatataatgctaggatgaaggttcttctctataactttgaaacttccttgattatcaaccctcggtgtattcttagaataggattttattttagaattaagatccttgtttcaggactctagactgttaacacacagaaccaacaattattcagaatggttgggttagttcacattcccacagatgagacatcaaatgtccaggctgcacagcctcattaac

SEQ ID NO: 450674 - DNA, 255 bp, Homo sapiens
gaaacatattctgtaggctctttgtttttctgyaatttaattcaacactatctggtttatatggatgattacatatataatgctaggatgaaggttcttctctataactttgaaacttccttgattatcaaccctcggtgtattcttagaataggattttattttagaattaagatccttgtttcaggactctagactgttaacacacagaaccaacaattattcagaatggttgggttagttcacattcccaca

SEQ ID NO: 450675 - DNA, 255 bp, Homo sapiens
gaaacatattctgtaggctctttgtttttctgtaatttmattcaacactatctggtttatatggatgattacatatataatgctaggatgaaggttcttctctataactttgaaacttccttgattatcaaccctcggtgtattcttagaataggattttattttagaattaagatccttgtttcaggactctagactgttaacacacagaaccaacaattattcagaatggttgggttagttcacattcccaca

SEQ ID NO: 450676 - DNA, 603 bp, Homo sapiens
ttttttttaaatcaataaccttatttcttagagtagttttaggttcacagcaaaattgagaggaaggtacagagatttctcatatatcccatgcctcccacacacgcatagcctcccccattattagtattttccaccagagagtggtccatttgttacaactgatgaacttacattgacacattataatcacttgaagttcatagtttacatcaggcctcactctwgatgctgtacattctgtgaatttggacaaatgtataatgacatgacatgtatctattactgtaatattatcgacagaacagtttcaccgccctaaaaattctctgtgctatgcctgttcatctctccctttctccctagcaactcgtgacaaccattgatgtttactctgtcttcatagttttacttttttcagaagagtcatacagttggaataagaagagtggatatctttttgagtagttaaaaaattaaagctccatggcagttgaatgtagtcatttaagatgttctttgtccttttgtttttcttttgcttctttatcattgtaaagaatgatgtattctgatgagatatgatttacatacttagaaaac

SEQ ID NO: 450677 - DNA, 542 bp, Homo sapiens
gtgtatatgtatgtgtgtgtgtacctatataaacatgtatgtttatatatatatttgtgtgtgtatatatcctcggtgtgtgggtatgtgtgtttgagagtgtgtgtgtgtgtgtgtgtgtatgaaattgtaggaaagtaaaatttcttatcttatagatatagcatgttaacatgttggtacctatcttcctgagatgtaaaattttacatggatagatgtgtacatttaccgttgtacacaaagagaaacatattctgtaggctctttgtttttctgtaatttaattcaacactatctggtttatatggatgattacatatataatgctaggatgaaggttcttctctataactttgaaacttccttgattatcaaccctyggtgtattcttagaataggattttattttagaattaagatccttgtttcaggactctagactgttaacacacagaaccaacaattattcagaatggttgggttagttcacattcccacagatgagacatcaaatgtccaggctgcacagcctcattaac

SEQ ID NO: 450678 - DNA, 426 bp, Homo sapiens
tgattacatatataatgctaggatgaaggttcttctctataactttgaaacttccttgattatcaaccctcggtrtattcttagaataggattttattttagaattaagatccttgtttcaggactctagactgttaacacacagaaccaacaattattcagaatggttgggttagttcacattcccacagatgagacatcaaatgtccaggctgcacagcctcattaacactagattttctggacattttatgtagtatttcatctgatataaaaagtagaattctaatttaattatggttgttaatttatttttatctttttagtcattatgaaaatgtttaactatatgaaaagctaggaaagagttttattttttaaggtagtacttcagaaatatttgtgatacttaatttttaaaaatta

SEQ ID NO: 450679 - DNA, 426 bp, Homo sapiens
tgattacatatataatgctaggatgaaggttcttctctataactttgaaacttccttgattatcaaccctcggtgtattcttagaataggattttattttagaattaagatccttgtttcaggactctagactgttaacacacagaaccaacaattattcagaatggttgggttagttcacattcccacagatgagacatcaaatgtccaggctgcacagcctcattaacaytagattttctggacattttatgtagtatttcatctgatataaaaagtagaattctaatttaattatggttgttaatttatttttatctttttagtcattatgaaaatgtttaactatatgaaaagctaggaaagagttttattttttaaggtagtacttcagaaatatttgtgatacttaatttttaaaaatta

SEQ ID NO: 450680 - DNA, 426 bp, Homo sapiens
tgattacatatataatgctaggatgaaggttcttctctataactttgaaacttccttgattatcaaccctcggtgtattcttagaataggattttattttagaattaagatccttgtttcaggactctagactgttaacacacagaaccaacaattattcagaatggttgggttagttcacattcccacagatgagacatcaaatgtccaggctgcacagcctcattaacactagattttctggacattttatgtagtatttcatctgatataaaaagtagaattctaatttaattatggttgytaatttatttttatctttttagtcattatgaaaatgtttaactatatgaaaagctaggaaagagttttattttttaaggtagtacttcagaaatatttgtgatacttaatttttaaaaatta

SEQ ID NO: 450681 - DNA, 603 bp, Homo sapiens
ttttttttaaatcaataaccttatttcttagagtagttttaggttcacagcaaaattgagaggaaggtacagagatttctcatatatcccatgcctcccacacacgcatagcctcccccattattagtattttccaccagagagtggtccatttgttacaactgatgaacttacattgacacattataatcacttgaagttcatagtttacatcaggcctcactctagatgctgtacattctgtgaatttggacaaatrtataatgacatgacatgtatctattactgtaatattatcgacagaacagtttcaccgccctaaaaattctctgtgctatgcctgttcatctctccctttctccctagcaactcgtgacaaccattgatgtttactctgtcttcatagttttacttttttcagaagagtcatacagttggaataagaagagtggatatctttttgagtagttaaaaaattaaagctccatggcagttgaatgtagtcatttaagatgttctttgtccttttgtttttcttttgcttctttatcattgtaaagaatgatgtattctgatgagatatgatttacatacttagaaaac

SEQ ID NO: 450682 - DNA, 426 bp, Homo sapiens
tgattacatatataatgctaggatgaaggttcttctctataactttgaaacttccttgattatcaaccctcggtgtattcttagaataggattttattttagaattaagatccttgtttcaggactctagactgttaacacacagaaccaacaattattcagaatggttgggttagttcacattcccacagatgagacatcaaatgtccaggctgcacagcctcattaacactagattttctggacattttatgtagtatttcatctgatataaaaagtagaattctaatttaattatggttgttaatttatttttatctttttagtcattatgaaaatgtttaactatatgaaaagctaggaaagagttttattttttaagrtagtacttcagaaatatttgtgatacttaatttttaaaaatta

SEQ ID NO: 450683 - DNA, 603 bp, Homo sapiens
ttttttttaaatcaataaccttatttcttagagtagttttaggttcacagcaaaattgagaggaaggtacagagatttctcatatatcccatgcctcccacacacgcatagcctcccccattattagtattttccaccagagagtggtccatttgttacaactgatgaacttacattgacacattataatcacttgaagttcatagtttacatcaggcctcactctagatgctgtacattctgtgaatttggacaaatgtataatgacatgacatgtatctattactgtaatattatcgacagaacagtttcacygccctaaaaattctctgtgctatgcctgttcatctctccctttctccctagcaactcgtgacaaccattgatgtttactctgtcttcatagttttacttttttcagaagagtcatacagttggaataagaagagtggatatctttttgagtagttaaaaaattaaagctccatggcagttgaatgtagtcatttaagatgttctttgtccttttgtttttcttttgcttctttatcattgtaaagaatgatgtattctgatgagatatgatttacatacttagaaaac

SEQ ID NO: 450684 - DNA, 540 bp, Homo sapiens
attatcgacagaacagtttcaccgccctaaaaattctctgtgctatgcctgttcatctctccctttctccctagcaactcgtgacaacmattgatgtttactctgtcttcatagttttacttttttcagaagagtcatacagttggaataagaagagtggatatctttttgagtagttaaaaaattaaagctccatggcagttgaatgtagtcatttaagatgttctttgtccttttgtttttcttttgcttctttatcattgtaaagaatgatgtattctgatgagatatgatttacatacttagaaaacatgatttgtatagatatgtggcacataatagaaagggttgaggaaaaggacaccacgccgtactacacagcacaacctggagcatcttgctctgtgaggtgggtccagatagactctttagcaatggaaggggacaagtgcaaagggttgtgctttataaaactggaatcacaaagtctttcatacttaccttcggttggaaataagaccaggcagtgaatgctattag

SEQ ID NO: 450685 - DNA, 603 bp, Homo sapiens
ttttttttaaatcaataaccttatttcttagagtagttttaggttcacagcaaaattgagaggaaggtacagagatttctcatatatcccatgcctcccacacacgcatagcctcccccattattagtattttccaccagagagtggtccatttgttacaactgatgaacttacattgacacattataatcacttgaagttcatagtttacatcaggcctcactctagatgctgtacattctgtgaatttggacaaatgtataatgacatgacatgtatctattactgtaatattatcgacagaacagtttcaccgccctaaaaattctctgtgctatgcctgttcatctctccctttctccctagcaactcgtgacaaccattgatgtttactctgtcttcatagttttacttttttcagaagagtcatayagttggaataagaagagtggatatctttttgagtagttaaaaaattaaagctccatggcagttgaatgtagtcatttaagatgttctttgtccttttgtttttcttttgcttctttatcattgtaaagaatgatgtattctgatgagatatgatttacatacttagaaaac

SEQ ID NO: 450686 - DNA, 540 bp, Homo sapiens
attatcgacagaacagtttcaccgccctaaaaattctctgtgctatgcctgttcatctctccctttctccctagcaactcgtgacaaccattgatgtttactctgtcttcatagttttacttttttcagaagagtcatacagttggaataagaagartggatatctttttgagtagttaaaaaattaaagctccatggcagttgaatgtagtcatttaagatgttctttgtccttttgtttttcttttgcttctttatcattgtaaagaatgatgtattctgatgagatatgatttacatacttagaaaacatgatttgtatagatatgtggcacataatagaaagggttgaggaaaaggacaccacgccgtactacacagcacaacctggagcatcttgctctgtgaggtgggtccagatagactctttagcaatggaaggggacaagtgcaaagggttgtgctttataaaactggaatcacaaagtctttcatacttaccttcggttggaaataagaccaggcagtgaatgctattag

SEQ ID NO: 450687 - DNA, 540 bp, Homo sapiens
attatcgacagaacagtttcaccgccctaaaaattctctgtgctatgcctgttcatctctccctttctccctagcaactcgtgacaaccattgatgtttactctgtcttcatagttttacttttttcagaagagtcatacagttggaataagaagagtggatatctttttgagtagttaaaaaattaaagctccatggcagttgaatgtagtcatttaagatgttctttgtccttttgtttttcttttgcttctttatcattgtaaagaatgatgtattctgwtgagatatgatttacatacttagaaaacatgatttgtatagatatgtggcacataatagaaagggttgaggaaaaggacaccacgccgtactacacagcacaacctggagcatcttgctctgtgaggtgggtccagatagactctttagcaatggaaggggacaagtgcaaagggttgtgctttataaaactggaatcacaaagtctttcatacttaccttcggttggaaataagaccaggcagtgaatgctattag

SEQ ID NO: 450688 - DNA, 512 bp, Homo sapiens
cttaaacacaacttggaggacactatccagaatttgtagggcttggccttattctagagaaacatacactggaataggcagttggattttaaattcagtcttaaatctgttgaaaataatgcatttttttctcagagatgagatattgttcaactcttttgacttattttagatttgatattctacagttcgaacaccatggagatttactaatctgaatgaacacataccaaattagtctttgctccagtctcaaaatctgagattaattctggctgctgaakaaattttccagtgttaagagtatgcttcaatgctggtgactggtactactttctggtaaactatagatgacatgtgtgctttcattgcctgaactcactttgtagaacaccattaaatgaaaatcatcaccagcaatttgggaggctaaggcgggcagatcatttgaggtcaggagtttgagaccagcctggccaacatgatgaaaccccatctctactgaaaataca

SEQ ID NO: 450689 - DNA, 512 bp, Homo sapiens
cttaaacacaacttggaggacactatccagaatttgtagggcttggccttattctagagaaacatacactggaataggcagttggattttaaattcagtcttaaatctgttgaaaataatgcatttttttctcagagatgagatattgttcaactcttttgacttattttagatttgatattctacagttcgaacaccatggagatttactaatctgaatgaacacataccaaattagtctttgctccagtctcaaaatctgagattaattctggctgctgaataaattttccagtgttargagtatgcttcaatgctggtgactggtactactttctggtaaactatagatgacatgtgtgctttcattgcctgaactcactttgtagaacaccattaaatgaaaatcatcaccagcaatttgggaggctaaggcgggcagatcatttgaggtcaggagtttgagaccagcctggccaacatgatgaaaccccatctctactgaaaataca

SEQ ID NO: 450690 - DNA, 512 bp, Homo sapiens
cttaaacacaacttggaggacactatccagaatttgtagggcttggccttattctagagaaacatacactggaataggcagttggattttaaattcagtcttaaatctgttgaaaataatgcatttttttctcagagatgagatattgttcaactcttttgacttattttagatttgatattctacagttcgaacaccatggagatttactaatctgaatgaacacataccaaattagtctttgctccagtctcaaaatctgagattaattctggctgctgaataaattttccagtgttaagagtaygcttcaatgctggtgactggtactactttctggtaaactatagatgacatgtgtgctttcattgcctgaactcactttgtagaacaccattaaatgaaaatcatcaccagcaatttgggaggctaaggcgggcagatcatttgaggtcaggagtttgagaccagcctggccaacatgatgaaaccccatctctactgaaaataca

SEQ ID NO: 450691 - DNA, 512 bp, Homo sapiens
cttaaacacaacttggaggacactatccagaatttgtagggcttggccttattctagagaaacatacactggaataggcagttggattttaaattcagtcttaaatctgttgaaaataatgcatttttttctcagagatgagatattgttcaactcttttgacttattttagatttgatattctacagttcgaacaccatggagatttactaatctgaatgaacacataccaaattagtctttgctccagtctcaaaatctgagattaattctggctgctgaataaattttccagtgttaagagtatgcttcaatgctggtgactggtactactttctggtaaactayagatgacatgtgtgctttcattgcctgaactcactttgtagaacaccattaaatgaaaatcatcaccagcaatttgggaggctaaggcgggcagatcatttgaggtcaggagtttgagaccagcctggccaacatgatgaaaccccatctctactgaaaataca

SEQ ID NO: 450692 - DNA, 540 bp, Homo sapiens
attatcgacagaacagtttcaccgccctaaaaattctctgtgctatgcctgttcatctctccctttctccctagcaactcgtgacaaccattgatgtttactctgtcttcatagttttacttttttcagaagagtcatacagttggaataagaagagtggatatctttttgagtagttaaaaaattaaagctccatggcagttgaatgtagtcatttaagatgttctttgtccttttgtttttcttttgcttctttatcattgtaaagaatgatgtattctgatgagatatgatttacatacttagaaaacatgatttgtatagatatgtggcacataatagaaagggttgaggaaaaggacaccacgccgtactacacagcacaacctggagcatcttgctctgtgaggtgggtccagatagactytttagcaatggaaggggacaagtgcaaagggttgtgctttataaaactggaatcacaaagtctttcatacttaccttcggttggaaataagaccaggcagtgaatgctattag

SEQ ID NO: 450693 - DNA, 550 bp, Homo sapiens
cactggctgcatggtagtaataccatatacataagggaagagaggaggatgtggctttcactttgaaatttttgagcttaaggtaacttttgtgtagctacaaagaagcattcaacagagagttaaacttatgatggaaagactgaaggggtccaagctgtagagaaacaggactgcaaaccacaaagggctgaatcagtcaaggagaactgcagggcgggatgaacagggaccaacggaacatttggataagctgttgagaagaaaggagaattcagagaaaaagaactgtcagtgaggtcataataggaactgttacagtgaactaaatatggcctgggaaggactctgtacttctagatttgagtccctgtggacaaactgcaacctcacttaataggtagaaagactgaaaacctaacttaggagtatgcgcctgtaactatagctgagtcctgrccaatcccaacagccaaacttctgccactcacacactgctgagtgttcagctgtgttcaaataaggcaaatgctgagcactgtaaccagtc

SEQ ID NO: 450694 - DNA, 413 bp, Homo sapiens
ttctgtccctgaccccacaaatctcatgtccttctcacattgcaaaatacagtcatgccttgccagcagtctcccaaattcttaactcatttcagcattaactcaaagttacaaagtscaaagtctcatctgggtcaaggctacattctcttttgcctacgagtctctgaaataaaaagcaagttcactgtgtctaaggtacaatgatggtacaggcattttgtaagctttccatatccaaaagggagacattttccagaaaccttcttatttttatctgaggccccctcagcctggccttcactgtccatgtttttgtcagcattcttgtcacagccatttaaccagtctctaagatggtccaaaaatgttctcatctgtctgtcttctttggagccctccaaactcttcca

SEQ ID NO: 450695 - DNA, 413 bp, Homo sapiens
ttctgtccctgaccccacaaatctcatgtccttctcacattgcaaaatacagtcatgccttgccagcagtctcccaaattcttaactcatttcagcattaactcaaagttacaaagtccaaagtctcatctgggtcaaggctacattctcttttgcctacragtctctgaaataaaaagcaagttcactgtgtctaaggtacaatgatggtacaggcattttgtaagctttccatatccaaaagggagacattttccagaaaccttcttatttttatctgaggccccctcagcctggccttcactgtccatgtttttgtcagcattcttgtcacagccatttaaccagtctctaagatggtccaaaaatgttctcatctgtctgtcttctttggagccctccaaactcttcca

SEQ ID NO: 450696 - DNA, 413 bp, Homo sapiens
ttctgtccctgaccccacaaatctcatgtccttctcacattgcaaaatacagtcatgccttgccagcagtctcccaaattcttaactcatttcagcattaactcaaagttacaaagtccaaagtctcatctgggtcaaggctacattctcttttgcctacgagtctctgaaataaaaagcaagttcactgygtctaaggtacaatgatggtacaggcattttgtaagctttccatatccaaaagggagacattttccagaaaccttcttatttttatctgaggccccctcagcctggccttcactgtccatgtttttgtcagcattcttgtcacagccatttaaccagtctctaagatggtccaaaaatgttctcatctgtctgtcttctttggagccctccaaactcttcca

SEQ ID NO: 450697 - DNA, 413 bp, Homo sapiens
ttctgtccctgaccccacaaatctcatgtccttctcacattgcaaaatacagtcatgccttgccagcagtctcccaaattcttaactcatttcagcattaactcaaagttacaaagtccaaagtctcatctgggtcaaggctacattctcttttgcctacgagtctctgaaataaaaagcaagttcactgtgtctaaggtacaatgatggtacaggcattktgtaagctttccatatccaaaagggagacattttccagaaaccttcttatttttatctgaggccccctcagcctggccttcactgtccatgtttttgtcagcattcttgtcacagccatttaaccagtctctaagatggtccaaaaatgttctcatctgtctgtcttctttggagccctccaaactcttcca

SEQ ID NO: 450698 - DNA, 598 bp, Homo sapiens
aaaatggtgaggtcgatccctctgacactttcacatgctcagtcacgcatcttgaacatataagttggatcctgtgcctagagaggtaggtttctgagccaaggcatattccaaaaattgcatgagaagctggctttcccagacacagtgacccctccctgctcactaactcctgagtcatacctcctgcccctagccaggtttatctaggacttgagcacaaagaaaaagtgggagcatctttgaacaagaaatatcttgaaaaactagttaagtggtatcatgtatttgtgggatgggtgatttcaaaacccaatctaaaaggacaggaccttgctcattgacaatttattgtctgatgcaatgtttcttaatctttttgggtcttgaattcctttgagaatcttttgaagtttatggactcttttcccagaagaacacactcatgtgtatgtaacacaattttgcattcaatcttagggastgcaggtgtctacattagttatatattgatgtaaaaaaaaaagccccaaacttaaggcttaaaggaacaatagatgtttattatctcacagtttctgtggttcagaaagtcagt

SEQ ID NO: 450699 - DNA, 525 bp, Homo sapiens
ctacctatttgccaacttaacctcaccatagaaagccaaaagattcatcctgtggccagtctttcacattacagagtttaaagtactttttttaaatttctattttatttttaacaaaatatttaacaaaatatagtatatctcatgtgccaggtactatttgtaatatttataaacactgatttatttaatcttcacagagactcattttacagattggaaaacagaggcagagagaagttaagtaactttaatgtcactcagctgggaagtrtcaaagtcttggctgctggctccagagtctagacctttaaccactgtgttatgctttccatgggtaaagcaacctaaaaaggcccctggaatcagttacatgtggttggagactaactctgtcattgacttactaaatgcttgatattgggcaatttatctaacctctctctgcatcagtttctacatctgcaggaagagatgacaagcctgcctgttctacaaggttgttttggggattcagtggagcat

SEQ ID NO: 450700 - DNA, 498 bp, Homo sapiens
tttattgtctgatgcaatgtttcttaatctttttgggtcttgaattcctttgagaatcttttgaagtttatggactcttttcccagaagaacacactcatgtgtatgtaacacaattttgcattcaatcttagggactgcaggtgtctacattagttatatattgatgtaaaaaaaaaagccccaaacttaaggcttaaaggaacaatagatgtttattatctcacagtttctgtggttcagaaagtcagtaacatcttaactggatacttctgactcggagtctcccaggaggttgcagtcaagatgttgttggggggaaaggggcaggttcagtggctcatgcctgtratccctacactctgggaagcaaagccaggaggattacttgagcccaggagtttgagaccagcctgggcaacacagtgagaccctatgtattagtcagttctcacattgctataaatacatgagactggagaatttataaagaaaagag

SEQ ID NO: 450701 - DNA, 498 bp, Homo sapiens
tttattgtctgatgcaatgtttcttaatctttttgggtcttgaattcctttgagaatcttttgaagtttatggactcttttcccagaagaacacactcatgtgtatgtaacacaattttgcattcaatcttagggactgcaggtgtctacattagttatatattgatgtaaaaaaaaaagccccaaacttaaggcttaaaggaacaatagatgtttattatctcacagtttctgtggttcagaaagtcagtaacatcttaactggatacttctgactcggagtctcccaggaggttgcagtcaagatgttgttggggggaaaggggcaggttcagtggctcatgcctgtgatcyctacactctgggaagcaaagccaggaggattacttgagcccaggagtttgagaccagcctgggcaacacagtgagaccctatgtattagtcagttctcacattgctataaatacatgagactggagaatttataaagaaaagag

SEQ ID NO: 450702 - DNA, 291 bp, Homo sapiens
ttagactcctttaatctagaacaattccctaacctgtgtgtttgtgtgtgtgtgtgtgtgtgtgtgtgtgtrtatgtatgtgtctgtagacatggacatttgtgaaatgcacaggccaattgttttaaagaaagcccttttctttacttaacctcatctcctataatcctcatacaattatgtggaagtgatatcattgtctcctgttcatagacaaggaaattctgagtaaagagggagggtaataggcacctattgagcatcttctttgcatgaggcgctgaaggtcag

SEQ ID NO: 450703 - DNA, 291 bp, Homo sapiens
ttagactcctttaatctagaacaattccctaacctgtgtgtttgtgtgtgtgtgtgtgtgtgtgtgtgtgtatatgtrtgtgtctgtagacatggacatttgtgaaatgcacaggccaattgttttaaagaaagcccttttctttacttaacctcatctcctataatcctcatacaattatgtggaagtgatatcattgtctcctgttcatagacaaggaaattctgagtaaagagggagggtaataggcacctattgagcatcttctttgcatgaggcgctgaaggtcag

SEQ ID NO: 450704 - DNA, 291 bp, Homo sapiens
ttagactcctttaatctagaacaattccctaacctgtgtgtttgtgtgtgtgtgtgtgtgtgtgtgtgtgtatatgtatgtgtctgtagacatggacatttgtgaaatgcacaggycaattgttttaaagaaagcccttttctttacttaacctcatctcctataatcctcatacaattatgtggaagtgatatcattgtctcctgttcatagacaaggaaattctgagtaaagagggagggtaataggcacctattgagcatcttctttgcatgaggcgctgaaggtcag

SEQ ID NO: 450705 - DNA, 291 bp, Homo sapiens
ttagactcctttaatctagaacaattccctaacctgtgtgtttgtgtgtgtgtgtgtgtgtgtgtgtgtgtatatgtatgtgtctgtagacatggacatttgtgaaatgcacaggccaattgttttaaagaaagcccttttctttacttaacctcatctcctrtaatcctcatacaattatgtggaagtgatatcattgtctcctgttcatagacaaggaaattctgagtaaagagggagggtaataggcacctattgagcatcttctttgcatgaggcgctgaaggtcag

SEQ ID NO: 450706 - DNA, 476 bp, Homo sapiens
cttcctggagagaatgtccgatttactgcgggagatgctccgcagtgttgctcagtcatggcattgggaattggactttgccacaccttggcttgctaaatccttccatccattcagaacatttgtctgtgtgttacagggagaccaagtggcagtctgtggctttcacaagttttggttctgtgatgcatgggactcaatcaacccttgatgctgccaaaccaagcttaagccagctggcaggccagggtcatgaccagtgggctgggtcctgggtctggatgcagttcctggggttgagctggactaaagagacaagagtctgaccagyagagtgctggagcctggccaggcatccctgccctgcccctgcccctgccctccacacaagctcggttggaggaggcctaggttgctgtccctgggtggaatctgcaccttgcccctgctttctttctcagctgggaagtggtttg

SEQ ID NO: 450707 - DNA, 476 bp, Homo sapiens
cttcctggagagaatgtccgatttactgcgggagatgctccgcagtgttgctcagtcatggcattgggaattggactttgccacaccttggcttgctaaatccttccatccattcagaacatttgtctgtgtgttacagggagaccaagtggcagtctgtggctttcacaagttttggttctgtgatgcatgggactcaatcaacccttgatgctgccaaaccaagcttaagccagctggcaggccagggtcatgaccagtgggctgggtcctgggtctggatgcagttcctggggttgagctggactaaagagacaagagtctgaccagtagagtgctggagcctggccaggcayccctgccctgcccctgcccctgccctccacacaagctcggttggaggaggcctaggttgctgtccctgggtggaatctgcaccttgcccctgctttctttctcagctgggaagtggtttg

SEQ ID NO: 450708 - DNA, 476 bp, Homo sapiens
cttcctggagagaatgtccgatttactgcgggagatgctccgcagtgttgctcagtcatggcattgggaattggactttgccacaccttggcttgctaaatccttccatccattcagaacatttgtctgtgtgttacagggagaccaagtggcagtctgtggctttcacaagttttggttctgtgatgcatgggactcaatcaacccttgatgctgccaaaccaagcttaagccagctggcaggccagggtcatgaccagtgggctgggtcctgggtctggatgcagttcctggggttgagctggactaaagagacaagagtctgaccagtagagtgctggagcctggccaggcatccctgccctgcccctgcccctgccctccacacaagmtcggttggaggaggcctaggttgctgtccctgggtggaatctgcaccttgcccctgctttctttctcagctgggaagtggtttg

SEQ ID NO: 450709 - DNA, 579 bp, Homo sapiens
caaaggtttggcagaaacgagagtcaagacaccagagagtggcatgctaggaagaacagccccggcctcttcagctgccctcttttcttactttctcatccatgattatctacagtgacaagaagataaaactggaccttgcaatactagtcacagcatgaaaaatacatccacccctccttttgatagcaggttctcagtatgtaaagggaatctttttggctgcctgcttaacgcattgcaggtccagcattcctgagctgcttttgattcataaaattaaccaggcatttgagggcttctaaaagtgcttgatggacagcatttctctcaatgaaagagcaggcactgctccttggtcaaaggagagtccaaccaaggaagcctaatgagttattcctcacccaatacctggagaccatgacctgggggtgaggggcttccccagccccatgtgactgggctgttctttcctcagccctgctcttaaggggsttaacagctcttgctggcagtccaaatggctgcatagctgtcagtccaaaagtcccattatcatatcccgttcctgtatgaagg

SEQ ID NO: 450710 - DNA, 263 bp, Homo sapiens
aactgaaaatgtgccgtgatgtgaagaccaaacgcagagaagtgagagggacaaggctgtgctcagtgacccatatccagatgagaaayccatctgctcacttgggagcaaaaatgccccaagaccctgctatctctgggcttgcacgaggctttaaatgaatcaccattatgatgtcttatattcagagggaaataccaatattcatatattcaggtactgaaacttttaagggaatttttcttttttctttcttttttttt

SEQ ID NO: 450711 - DNA, 314 bp, Homo sapiens
aagtaacaaaagcacatcttggcatgatcaaattcccatatatgcaaattagggacagtgctttaccacagagtgttttaattaatatttataaatcacaaagcgcctttgaaagggccagtaagctgtttatattattatcatgtcacacaaataacaaaccctttggagattgctggctactttgcattttggtctgagaagtaagtragcatgttgtgtgtgtttctctccctcgtaggtgtggtgtcagcacagcggcaggtcaccgttcaggaaggacccttgtaccgcacggagggctcccacatcac

SEQ ID NO: 450712 - DNA, 314 bp, Homo sapiens
aagtaacaaaagcacatcttggcatgatcaaattcccatatatgcaaattagggacagtgctttaccacagagtgttttaattaatatttataaatcacaaagcgcctttgaaagggccagtaagctgtttatattattatcatgtcacacaaataacaaaccctttggagattgctggctactttgcattttggtctgagaagtaagtaagcatgttgygtgtgtttctctccctcgtaggtgtggtgtcagcacagcggcaggtcaccgttcaggaaggacccttgtaccgcacggagggctcccacatcac

SEQ ID NO: 450713 - DNA, 566 bp, Homo sapiens
cccaacaggcactcagtaaaacttgctgaaaagaatggatagattccgagatttgttcatacaaaattatgtaaacacatgtaaatgtttattcattatctacatgctcagtgatttacatgaaccaataattagtccgttttgtttttggacttgaaattctctttatgttctcaaataacacagctgattttaagccattaaatttcttctctaacactttcattaaagtcacaattttctgagtattacaaaattcccataaagaggaatcccttaaagttagtgtgtgtgaagttgacctggaaaagggaaaatgggtcttgaaattgaggaaccacagttataactaccttaactaatttacaaaacactstccatgaaagaggatgtaaaaaaatgtaaacgtggtgtgcacaacacaaacggtttctttcatttgacaaaagatacctcttgttcctctctatagtcggcatgttttatctttagcatttacaaagcattggcattttcaagaatattattcagatcaccttgatgctttccctcctgggatcttcctt

SEQ ID NO: 450714 - DNA, 628 bp, Homo sapiens
ggaaactcactttagatttaaagacatatgcaggctgaaagaaaaggatagaagaaatatattccatgaaaatggtaaccaaaatatagcagaggtagctatatttataacagaaaaaataagctttaagtcaaaaactgacacagtagacaaaagaggacatcatataattataaaaaggggccaattcaccagaaagataaatcaactataaatgtatatgcacccaacatcagagcacccaaaaacatgaagcaaatattaatagaactgaaggagaaacagacagcaatgcaatcatagtagaagatttgaatacctcactttcaattatggctagaacatccagaccgaaaatcaataagaaaagagtaaacttgaacaaccctataaatcagatagatccaatagacagataaagaacattccacccaatagcagcagaattcacatgcttctcaagttcacatggacattctccagtatagatcacatattaggctaccaaacaagtattaacacatttgaaaagactgaaatcataccaatttccaaccacaatggaatgaaaactagagatcaataacagaaggamaactgggaaattcacaagtacatgaagttaatc

SEQ ID NO: 450715 - DNA, 558 bp, Homo sapiens
aaagaatttctaaatggaaatgaggcacaagatctgccgccaagaagaaaactgattctttgcaggacattgtgggtgagtttctgccaaaaataaattatcaatattttccttgcacaatacagatagattgattgagcaataaatatatatccrtatctacatatatgtatatataccagatcaaaaatctgagcaatctctgggcaaattaataaaatagatggggctgtctggaccctctggcattttcttcaattctgcccttttcagctttgcagcattcacttctgccatacggtgagaaaagcatgccaggtgacctggaatgctggtttctttaagtcaccacactcacacccagtaatgacatgtacctgtgcagaggattttgctgccttcatcaaaaaaggataaatctcccaccagagaccttcacactttagagctttagaggaactagactttctatccttttgtgttgattcttctttttatcccaacacttaacgtgtgaatacatcctgactcgaaggtttagatggtgatggcctgaac

SEQ ID NO: 450716 - DNA, 570 bp, Homo sapiens
acttaaaatatgctctgaatgagtttatctaaatattattcagtccaaaatatgaccagaaccaaaaatccactggataattaggcagtaaatgcacaactttttaaataatcacagttcaacagccctgagaaatagtgatggacaattctcccatattctggagtacayatattgaaggcccatagcggagaaaactgtaggttcttggagatcaaaggatcgcttatattcagaaaaaattaggatgtgtttggtgcacatccacgaaaattaggacatgtttggtaccctgataaaggtatttctacagttcctagtgtcacacaatttgaaagaatataacgaatacaagtcattctctctgcttctttctccctcttagtcctaagtaacattacttgaaatgcagcaactgtctggactttttctcactttaaaaaaaattatttttacaaccattcttattggtaggtccatattgtggtttacttttccatactaaagagaggatgtgtggttaaaaacccctgtgaagaagatggctaggttatagtaaggaaatcagaa

SEQ ID NO: 450717 - DNA, 570 bp, Homo sapiens
acttaaaatatgctctgaatgagtttatctaaatattattcagtccaaaatatgaccagaaccaaaaatccactggataattaggcagtaaatgcacaactttttaaataatcacagttcaacagccctgagaaatagtgatggacaattctcccatattctggagtacacatattgaaggcccatagcggagaaaactgtaggttcttggagatcaaaggatcgcttatattcagaaaaaattaggatgtgtttggtgcacatccacgaaaattaggacrtgtttggtaccctgataaaggtatttctacagttcctagtgtcacacaatttgaaagaatataacgaatacaagtcattctctctgcttctttctccctcttagtcctaagtaacattacttgaaatgcagcaactgtctggactttttctcactttaaaaaaaattatttttacaaccattcttattggtaggtccatattgtggtttacttttccatactaaagagaggatgtgtggttaaaaacccctgtgaagaagatggctaggttatagtaaggaaatcagaa

SEQ ID NO: 450718 - DNA, 578 bp, Homo sapiens
tatatatcgggttagggtgtgtgaagaaggaagaactcatgggagctattttggtcctgtagtgtggaacagatgagagtcctggttgtctgagagtaatgataatcagtggatcctaccctctggggtcttagaaggaggcccacccagggtggggagtggagagagagtgcccaggctaggagtctcagctcccccctctcatgtgactattgtcaagtcattcagcttctcaagtccctctgctgtaaagagtatcaacagggactaccaaactgggtccttgggaaaatttagcaggttatcatgaaagtkcattgttaactacaaactgctacacgaatatacagtttacaatgataaggctctggactcaaccttggctctgacgctttctacttaggtgaccctatgcaccacctgtgacttctctgagcctcagtttctttgaaggaaaggaagggcagcagcacaaactctgctgagttgttgtgaggatcagaagagcaatgttggcaagtgtgtttcataaatggtagagtaccataaatgaaaaagtctcctgcaactgcttttac

SEQ ID NO: 450719 - DNA, 615 bp, Homo sapiens
taggttaggcgctgtgatcccaattctcaggggaggcccagacttgagtacagtaaatattttataataattccctggctaaacaaaacagatgcagagccctgagactcaaggtctggattgtagctccctcagtgaatcaagccactcgcctctggctyggtcattctggcttgggtgctacggatctgaacttctaaaggctgcaggacagaaggctctgcaaacccccaaattcaacatatcccaaatcaaacaaaggatctattccgtagatgtgacacaaccagctttctagtttctaaaattcaagatttcagtgtcacaactgacacaagcttctcacttattaaggcccatcaggactggactgtgtctagccaggcagatcacctagtcagcatttgccatttgtcatgtccttccatttttgcacccactgtcccatgtcaagccctcattattctcaggtgaaccatggacattttgcttgcttttaaaaatctcatctggatctcattgttctagctaactttagtgtatcctttgtacaaacactctccactcatgtgccatgctgggtttctaaagcacaggtatgagcatcccattacc

SEQ ID NO: 450720 - DNA, 466 bp, Homo sapiens
gcaggcagatcccagtcttgacctcagtagcagcatcactttgagcacattattttatctctctgacatgattcccatctgtaaaatggcgactcaaattacctttctcatcgactattgagaagattaaaagagacgcaggtcrcaaagtgcctggcatatttggagctccaaaggattagttcccttccccgtgattataagacactcaacgacttaatgatagttttttgcagttaatgccatgaatagaatcattatgtttgcttcctgaagtgaaaagccacaataacactcctccttgcccccaggacccctttgatgtggcagggagtgggaaaggatgttacttctgcttggcataaccaagtcagaaaggctacccagtttctgcccacagagaagtggagtgaagtcactgcctcagagaggcctgaggacgaaattcacagtgaccttggtatct

SEQ ID NO: 450721 - DNA, 466 bp, Homo sapiens
gcaggcagatcccagtcttgacctcagtagcagcatcactttgagcacattattttatctctctgacatgattcccatctgtaaaatggcgactcaaattacctttctcatcgactattgagaagattaaaagagacgcaggtcacaaagtgcctggcatatttggagctccaaaggattagttcccttccccgtgattataagacactcaacgacttaatgatagttttttgcagttaatgccatgaatagaatcattatgtttgcttcctgaagtgaaaagccacaataacactcctccttgcccccaggacccctttgatgtggcagggrgtgggaaaggatgttacttctgcttggcataaccaagtcagaaaggctacccagtttctgcccacagagaagtggagtgaagtcactgcctcagagaggcctgaggacgaaattcacagtgaccttggtatct

SEQ ID NO: 450722 - DNA, 487 bp, Homo sapiens
ataaatttacagattcaagagctcaatcaactcaaagcagaataaatatgaagaaaatctcacctaagcatatcatagttaaactactaataaccaaaggcaagacaatcttgaaagcagctagagaaaaaggacacatagcatataagcaaaaatgattcagatgtttgctaacttctcactagaaataatggaagccagtagagagtgtatcagtgtctttaaagtgctgaaaaaaaataaatgycaacccagaatcctaacctagcaagaatatccttcaagaatgagggcagaataaagacatttttagatagaaaactaagataatttgtcattttaaaagaaattctcaaaaagctttttagactgagggctatcaataacatgaaaactcagatcttcaggaaggaatgaagatcattggaagtactaaatgcctgggtaaatatcaaagattgtttttcctcttaattgttttatatgt

SEQ ID NO: 450723 - DNA, 541 bp, Homo sapiens
tcctgatacccaaactccaggttctatcatgtatggccatcatgcaatgcctgtgaagatgcagggttctcaaaaacacatccttcccctgcctcccaatccccttcactaattcctcagccactgaccccacaggaagaaggaaagacagatggcaatcaaaactctttctccctttccaggacccacagaaggagaaggctgccccagctctgtgcctagcaagggccaagcttccatagatatttgacctttgtaaattaggcattcagaagtcaaagaatgcctgtatttaaaatttccattgtagatttctggcaaatccatgagtrtgagctctttgaaaatgccacaggcctgtggaaatccttgtgggtgtaattagctagagaaagtgaaggtgactgaccatttacagtcacatcataatgaaatgaagtattacagaaaccatgaagccaaaacactgggagggctgagacccacaaagtaatctggacatagagatgttttccagaaaccaactgtgaaagaactaaga

SEQ ID NO: 450724 - DNA, 535 bp, Homo sapiens
gccagcctatcatctcttttggcctagggaagatttgcagcaaagagaagggagacagaggcaggaagtaagactcactctcaaccatctcttccaggcaaaagtcttgccagcagggtggtgcattagatatactggggaacctgaaagaagagagtctttgcattgctccctctgtggaattctgggaggacaagtggggtgagaagcccaacagtggcacttggtggagagagttgtgtagaccaaagagtctgctctcctggcctgcttgtggtgagcaggggatccagaagtgcctgtgtatcctgctggggaaagtagagttccagaaggaccaatggactaacaaggtcctgaagagagacaaataggcaaatagtccaatggtaggtatttacaaaactcgcagggcaaatgggactatcagccaccacagtcacaagtccagggaccagaccagccactcaactgmagagaccagggagaggccaccgaggtcaccatctgaatccaaaactcctttttgctacca

SEQ ID NO: 450725 - DNA, 609 bp, Homo sapiens
gtgggcgaaggtgcttcaggccaaagaaacagcataagcaaaggcctcaaaccagagagacttgcatttgtcaccagactcagacaaatgggtaaccagtgcacagtgaacatgcttcacacagcataagaacaattatacacatatagtagtcctttatatttcaggcaaagaagggccaaataccttgaaaaaagagagtatgtcrtggaaattcagaggaaagaaacagttctgtgagttatgaaaaagcctagaaagaattctgatggaaaaatttgggctttagacttaagattttcattatttaatggaaaataatcctatagagatcaaaaagttatctctacatgatccttcaaactttgctgtgtggctctattgtgagaatgtgtatatgtcatgctttttaatttgtaatagtattagttcttaagttccttgttaccagtttcaaaaaatcacaaccaaaacttggtacaagattatgtatctccagataatgtatttaaaaatgagtgctactaataaaataaaagattctgtaatcaaataacaactttttataactcttaataatgttacactttaaatctgaggggggaaatg

SEQ ID NO: 450726 - DNA, 431 bp, Homo sapiens
atcgtcagggtccattatacataaagtgtgcacacctaacctactgtttatgtaaacaatkgttataattcccaggaaaaaaagatggcctccagctcacttactctgtaacccgtatcttgatgattagttcctttgtctctactagaatttccaatccatcattaaccctcagtcaaaatgctgaaaatggtgacatcacttaatatcctaattctagtaaaacagggctagaaaataccttcataaaattaagtttaaataataaatctcaagtattagtgctcttaatatgccatctgtcttcttaaactgggagtacctttggatttccttaattcctcttgacccaccctttcgtaagtgagtacgaaatgggtgagaataagactttggcatctatagcatctgattaaatctttactagtagt

SEQ ID NO: 450727 - DNA, 431 bp, Homo sapiens
atcgtcagggtccattatacataaagtgtgcacacctaacctactgtttatgtaaacaatggttataattcccaggaaaaaaagatggcctccagctcacttactctgtaacccgtatcttgatgattagttcctttgwctctactagaatttccaatccatcattaaccctcagtcaaaatgctgaaaatggtgacatcacttaatatcctaattctagtaaaacagggctagaaaataccttcataaaattaagtttaaataataaatctcaagtattagtgctcttaatatgccatctgtcttcttaaactgggagtacctttggatttccttaattcctcttgacccaccctttcgtaagtgagtacgaaatgggtgagaataagactttggcatctatagcatctgattaaatctttactagtagt

SEQ ID NO: 450728 - DNA, 598 bp, Homo sapiens
tatgcttttctacttatttttaaccactacttgtaccctgatgtacaagtacttggccccatttcccccctaagtttcaggaccatatataacttctttctggaaatctccaaatagattacctacaggttcctctcttcaacatgttcagaaccgaattcttcatctttaccatgcccaaacctggttctccttctgcctttcccatatcagcaattgatgacatcacttgtctaggccagaaatctatgggttactctagatttatcatattcttgcatcactaagtctaatcagttgctaatttttgcctatcttacatcctatatttctcgaatgtgctcctcctytcaacccatactaacactgccccagtccaggcactaacctctttttgattggtttctattagtaacccctgagccaggctccctgtttcttcttttgtctcacatcattgccaaatgggctcatttaagttgcaaatctgacagttttactccagcaattaaaatacttcagtatattgaaatactttgcttctataataaagttcaaattcatcagcatggcaaaaacattccttctttgaacccgg

SEQ ID NO: 450729 - DNA, 555 bp, Homo sapiens
acattttttttatcagcctctggcatggaacagggcctcaaagaagctcgattgcaaccacacacatatttgtggacagtaacaagcaggaaaggagtttggcaggagttcccttatctctgcccagagccatccctcgtgtctcatttcaccgtctgcttcctcaaaaaagagctcacgttctcactactcaacacacccatgtgaatgtttattccactagtaatggatctataaatttataaaatgaagtttattaacctcaaaataaaaatgagagggttcaaactttttttctctckcttttgtgggataaggtctttttgtaatttttttgttaattttaaaacagatattgtatagccgacctttttttaaaaaaatggaagatttctattgaaatcctatttgaaaggagatgtctagcttatttgccttttataaacatgttacagtaaacttcctttatctagaaatgttgggaaccgaagtattcagattaatcgaataccctaattaatccaaaaatatttcctaaatatttctcaacactat

SEQ ID NO: 450730 - DNA, 555 bp, Homo sapiens
acattttttttatcagcctctggcatggaacagggcctcaaagaagctcgattgcaaccacacacatatttgtggacagtaacaagcaggaaaggagtttggcaggagttcccttatctctgcccagagccatccctcgtgtctcatttcaccgtctgcttcctcaaaaaagagctcacgttctcactactcaacacacccatgtgaatgtttattccactagtaatggatctataaatttataaaatgaagtttattaacctcaaaataaaaatgagagggttcaaactttttttctctctcttttgtgggataaggtctttttgtaatttttttgttaattttaaaacagatattgtatagccgacctttttttaaaaaaatggaagatttctattgaaatcytatttgaaaggagatgtctagcttatttgccttttataaacatgttacagtaaacttcctttatctagaaatgttgggaaccgaagtattcagattaatcgaataccctaattaatccaaaaatatttcctaaatatttctcaacactat

SEQ ID NO: 450731 - DNA, 605 bp, Homo sapiens
acaaattgccataaacttagtgacttaaaccagtggtccccaactgtttaggcatcagggattggttttgtggaagacaatcttttcacggactcaagggtgggatgggagatggtttcaagatgaaactgttccacctcagatcatcaggcattagattctcataaggagcatgcaacctagatccctcacatatgcagttcacmatagggcttatgctcctatgagaatctaatgtcatcactcatctgacaggaggtggagctcaggcagtaatgcccacctgccactcagctcctgctgtgcagcccagttcctaacagataacagatgaatgaacagataacaggccatggacccatggcccgaggattggggactcctggcttaaacaacaaaaatttattatctttcagttttatagactagaagtttgacatggacctcactgggctaagattaggtgttagctgggctgagttactttctggagatcctaggagaaaatctatatccttgcattttccagtttctaaagggcaactacattccttggctaatggttccctttcttcctcctcaaagccagcagtggtgagttgagt

SEQ ID NO: 450732 - DNA, 436 bp, Homo sapiens
aagtttgacatggacctcactgggctaagattaggtgttagctgggctgagttactttctggagatcctaggagaaaatctatatccttgcattttccagtttctaaagggcaactacattccttggctaatggttccctttcttcctcctcaaagccagcagtggtgrgttgagtccttttcacatggaatctctgaccctcatcttagctcccttcttaccatagcttggaaaaaattatctgcttttaagaatgtatgtgattagattgggcctacagggataatcctggataatctgcctgtctaaaggtccttgccttaatcacatatgcaaaatcctttttcctatgaaaggtaatatatttacagaaacattctagtattaggatgttttgggggaaaattattctacctaccacagctaattacactt

SEQ ID NO: 450733 - DNA, 460 bp, Homo sapiens
caactgagcgtggttaaacgtggggagggaggagggtgaggttaccaacctgatggttgagaaagggcctccgcccagcgcgcccttcctccacccccacccgagagacagctgaactccggccgggacgcgcgtgttgccagtccagccctgcaccgcgtcccctgagggcgggctgcaggcggccgggaagccttgcacaaccggcccaaaagaggaagcccagaaagtgctgaagtaaacacttwgggagaccgttgcaacataaagcggcctctcagtctttggtggaaccatcactaggccccaatcccttagtccctcttgcgtcgaggctgcaaaatggttccattcgccaggagacgctcctgagagaagggcgcgcgcggcacaggtagggggaggcgcaacgtttcccagaattaaaataaaataaaataaaataaaataaaaatccctt

SEQ ID NO: 450734 - DNA, 598 bp, Homo sapiens
ttcttctctgtcaactcagttttctctttgatcatcacatagtaatagcaaataataattattataatgtttacttataaatactaccaggccctgtactaatttagatgtgtcatcttgttaatcatcacatcaagatgaaagcacagagagggtaagaaacttacgcaggaagtaagaaacagagctgttgtttgaactgggccatctgatggtggcacccatgaaaaaacctggggcctttccacaatgagtttatagtctagaagaggagatgtaactagatgtaagaggagatgtagaattccatgcggaaccagagttgagtgctgtgggactacatatcagggtccctggtctccccaaccagggtcacgggagaaggttgaatagaaggaaaccaagcaaagaacttatcgtgttatcatgggaagacaagttaatataatcaactttgaagttattatctttacgtgtgccttgaaaaaagaatctgctttgttagcaatcgtgtgttttcatttttgtgtttattttattctaatcccacatgacagcyggctaggttgattaaatcaacaagcaagcagtgagttta

SEQ ID NO: 450735 - DNA, 541 bp, Homo sapiens
cccacatgcattaggtatttgtcctaatgttccccgccacttgcccccaaccccggacaggccctggtgtgtgatattcccttccctgtgtctatgtgttctcattattcaactcccacttatgagtgagaacaggaccataacattttaaatagtgattcctctggttggttgtccctggattcccatccttgctgacctggagcttgggtgtctgtcttggctctgtcttcagcagccctcctctagatccatactggactccacattttttgctttagttactcagtatctacagtcccttctctgtagcatcttccagaagtttctcaacattttgatctactcataccatccttccatgctttccagactgttayaaagtcatttcattggaattttaggagacagtatatagtcacccccactatttggaactagttttcagtacattttaaatgtattaatacccacctatatgcaaacaccgctatgtaccagttgctgtgcccaggcctgactgtgctcatttagtcctcgt

SEQ ID NO: 450736 - DNA, 478 bp, Homo sapiens
cggggctaattctgcaagataattttggggaggaatcttaactattactttttgttttatgttaatgaatgaatcattctgaatgtgggaggtaaagactcagttcctttcttgcttccaaataacagagtgaaaaatattgtcagtagcatctttgaggaggaagggagaatatttactaagaaatgcrggaaaagaattaaaactggattgtcactgaaaaatcatatggtagctcagattcttctgatataaagttttttctatggtatggatcacccaatgtattgtggacatacagacagtcacagaaatgaccgtaaatccttccttccaaacagagagaggtaaaaggcaccttgggacctgcactgtttaagctttttttgtttttttttgtgagacagagtcttgctctgtcgccaggctggaggtcagtggcgcaatctcggctcactgcaacctccgcctcctgggt

SEQ ID NO: 450737 - DNA, 609 bp, Homo sapiens
gatgaggaggaacccacagagaaggctggaaggagaagctggtaaggtagatagggatggagccagaatctctggggcctgaatcttacacaattttgggaggctcccttttaaaaagaagggatttttttctacttggggtgggagatgaagtctccctttaaaaaaatacaaaattgtcaatgaaaaattaaggacaagagggaatatttatttagagccaaaaaggaaatcacaatgaatgaccaatttttaaaaattgacatatataacaaacatgtacatgtaccsctgaacctaaaataattttttaaataaaataaagaaaaatatttaaaatcatggctgggataggagacagcaataatttataaagtgtataatttataaagtgtatttgttattaatcactagagatcactgaacccaaaaggacttaactgtgatactttactgtgaaaaaatagttttcactgcctaaaatgaaactctttattttacagcattattagaatatgcaaacatttgaaaaaaaacaataaaaataaaaattgacacgtaagtgtatatatctaaaaagcaacattgtaatctttatgatgattaaat

SEQ ID NO: 450738 - DNA, 592 bp, Homo sapiens
gctacacagaagcctcggcttcccctttctcctccctcaaacgttgcaagaacctttaaccatatgctgtgttattctgtgaaccacttcctcttgataaaacgctttcattgcattttgaaaaaatacaacactgaaggaatcaggtaaaattcaatattctaagttattttcaatcacactgtacacaggtgacttcacagtttccaccagcakttgcgagcatccgaattctgtagtgcgtatttcatcctaagggcaatcccattcataagctttttaaaatttttttctcctcttttgtatctgtagttgtaatatgtctactgatttatttcctagaaaaaaatgttgccagatggtttctaattaaaaaataataaaaatatcaaagcaaattgatacttggagagcctcagatttttgaaacttatttctcatcaattccagttctattttagttttggcaatctagtaataaactcaaaacactgtagggtaaaaaaacaacagtccctgtaactccagcactttgggaggctgaggcgggctgatcacctgaggtcaggtgtttgagaccagcctggccaac

SEQ ID NO: 450739 - DNA, 481 bp, Homo sapiens
caagacctgggctgcagatgttgagtgaccctcagccaggtcttcttctgcttaaacctatcctgggctaaaactcaaagtaaaaggagaggaagctggttctgtagcatccagtgaggatggcattcaggcaatgctgtttactatgggctgacctcaattatgctgtaaaacacaactgcagaaactctctctagttctccttaaattcaaattacagtgcggaagtatctgagctcagtggagctgggawtgagccccctaggaggaggtactcttggagcactggtgtcagcagcttgcccaagtgaggcctggtcatgtcctcaaagtaagcctcagaagtcctcatcagctttgcagccaaagcaaagactaccattggtatgatcttcacatacctattcagcttgttttggatgtctcatgacatagagcagtggccacgaatgcacagatttcaacagcaatgcagtgtcag

SEQ ID NO: 450740 - DNA, 575 bp, Homo sapiens
attttaattcttcttcttatttattccctgggatgagtccagtgctctgcatacattcttaatgctttaggtgaaagaaggatcaggccaagagaaacattcctccccatggaacaaggggtgggaagggatataagaactcaatgtagagtcagaagatctcaatgctggaatcatccacgttcatttttagagaaggaaattaggttcagaatgagaagtgaaggtgaagtctacctgttgaccttgtctttggtaactaacaaatgattggacccaatgggaacattgctattttatgcattggatactttgaagatgaaaacttcattataaaccaatgattatttaagagttgatatttataagtcacatgttcataacagcattccatttgaattgaactgtctatttaagataaatccagctgtgatagaaggcatggtctccattttgaaccgggtttctgaccatatgaaactcaaagaagtctaaaagtttctctgatgtctatctaccatttgcagmaatgaagatcagatattatatatttacaaactccagtggtaaatata

SEQ ID NO: 450741 - DNA, 514 bp, Homo sapiens
tataaaaatgatttttactcatgttttctattagtacttctgtgattgtatttcttacatttaagtcttcactgtagccaaaaattgttctgagctataatrtaatgtaagtgtgttaataaagtgcaatgtaagtaatataagaatccatgtttaatggctaaccacttggtcccacattattagtaattcacctttcctactgatttgaaatgctacttttatttatatactgtaatcctattagttcttgcatttttttctgaattctctattcctttccattgattacaccatctattacaatgcaaatatcctatgttattaattaaggtcactccataatggcaatggttaagttttgttgaatgcttattatatacaggcactattttacatgttttacaagtagaacataggcatggagaatttcagtaatttacctaagtgcacacacatattaagtggaatagtaaagatctgaacctagattgtctggccctcgtgactatcc

SEQ ID NO: 450742 - DNA, 514 bp, Homo sapiens
tataaaaatgatttttactcatgttttctattagtacttctgtgattgtatttcttacatttaagtcttcactgtagccaaaaattgttctgagctataatataatgtaagtgtgttaataaagtgcaatgtaagtaatataagaatccatgtttaatggctaaccacttggtcccacattattagtaattcacctttcctactgatttgaaatgytacttttatttatatactgtaatcctattagttcttgcatttttttctgaattctctattcctttccattgattacaccatctattacaatgcaaatatcctatgttattaattaaggtcactccataatggcaatggttaagttttgttgaatgcttattatatacaggcactattttacatgttttacaagtagaacataggcatggagaatttcagtaatttacctaagtgcacacacatattaagtggaatagtaaagatctgaacctagattgtctggccctcgtgactatcc

SEQ ID NO: 450743 - DNA, 596 bp, Homo sapiens
tgacagttcctagctccagttccttactaagtctgacttcacttctaatcctggggtataggagaccccttgtgtccacatagtaaattcccttctgctacctgtttacttttgctttcagtcaacctaaatggaattctgttgctcgacagagttgcaattaatatggttcttgggatggttctgcagacacaccctaatctgtaactgtaccatgtcrgggaggatttccaagaaggcttccaacagaggctaccttgttttaattaaaggtcaagatgcatttcagaagaatgccctgcataccactgagaagatcaagaagttagccactcctatcatcagtatatcaacagcataagaagcagtcaaatgggattgtcctctgaagacataaaacataaaatcagtacacagtggatcagaataaatacacaccaaagcatcatttataaaaaattggcctggttcgtatgccaacaatttgattataacatgactgaatgtattgaatgcaataacatctggagagaaactgtgtccatcagatttgggaactgcttggccctgggaatttagaaaaatgtaaattatac

SEQ ID NO: 450744 - DNA, 596 bp, Homo sapiens
tgacagttcctagctccagttccttactaagtctgacttcacttctaatcctggggtataggagaccccttgtgtccacatagtaaattcccttctgctacctgtttacttttgctttcagtcaacctaaatggaattctgttgctcgacagagttgcaattaatatggttcttgggatggttctgcagacacaccctaatctgtaactgtaccatgtcagggaggatttccaagaaggcttccaacagaggctaccttgttttaattaaaggtcaagatgcatttcagaagaatgccctgcataccactgagaagatcaagaagttagccactcctatcatcagtatatcaacagcataagaagcagtcaaatgggattgtcctctgaagacataaaacataaaatcartacacagtggatcagaataaatacacaccaaagcatcatttataaaaaattggcctggttcgtatgccaacaatttgattataacatgactgaatgtattgaatgcaataacatctggagagaaactgtgtccatcagatttgggaactgcttggccctgggaatttagaaaaatgtaaattatac

SEQ ID NO: 450745 - DNA, 528 bp, Homo sapiens
tgaccagaatatgcagaaataataagatccttagaattcaaaatagtatttttaaaacatccttctttccctgtgaacctgatagaaaaacatgagctaacaaaagcttccatagatatttatggggtcacacatcgtcagattccaagtgctgattggagaacaatagattgatatgcagactgcaaatgcaaatttaggaacattctccatttctgaatggaccaggtagttcagtactcagactgcaggtatacaagggaagagagaaggccctgcccttcaacgggtagaaatrccctacaatataacatagagaaatgccctataatataaccacaggatccagccatctgaaattttcataagcttccccctacattatttctcctaggctatatgcaaaaacagtgataacttgatatgaacatggctttgggccctttctgtctagaaaaacaaatgggttcactatgacaatcagaaataaactctttcatctgtcccgcagaatttcatgaaggagta

SEQ ID NO: 450746 - DNA, 521 bp, Homo sapiens
aacaacacacaccagcaccagtcaaggggtggggggcgaggggagggagagaaataggacaaatagctcaagcatgtggggcttaacacttagatgacaggttgataggtgcagcaaaccaccatggcacacgtatacctatgtaacaagcctgcatgttctgcacttgtatcccagaacttaaagtaaaaaaaaaaaaaaaaaaaaaaaattattctcctggtttaattttacttacttgacttctaraaagtttgagtgtctttttatatgtttattggatatttacattgtatcttctatgaatcacttttgccctttttcttatgtgttttctcttactgatttagagaaattatttctattgtgaatattaatagttttgtctgtcatatctgttgaaaatatatttcccatttcttagtatttttatttactgtttgttcatgtgtttgccatgaatttttaaaagtatttatgtaacaaaacaaatatatctttctgattactgagtttactgg

SEQ ID NO: 450747 - DNA, 560 bp, Homo sapiens
ggaggccaagcttagctgccttccatgctccctttacatcttccctctgtgtgcctgtccacagtgagtcacgcatgagaagacagactgaagagagcagagggcccaggcctggaggaatagagtctaaagggatcccatgatcagttagtcatcatcaaaggtccttgcaagtcaaacattctaattgatgtttttagtaatggctcactagcaacccttcccttgacaactagtaraaagcaaacaaaatatttttgaaacctcttacagacatagaaggcacagagaaggtacaaaagtaacaagcacttgagaatgcaagattgcagaaagaagggatgtatagaattccatattcaagcaattattcctcttgagggatttgctgattaacaaactgcaattaggtcagaaactgaggaactgacactcttactgagatgggagaccaaattaaagtgagaacccagcaaacaagagagatttaaagggatatttcagctttttcagtgggacccccccaagattcctaaaggactgcatccgggagtgggtta

SEQ ID NO: 450748 - DNA, 635 bp, Homo sapiens
attggcctgaagttactcacatctgttcctgtttacagctgtcaaagccatcttgaatatgttgccatctgcacaccaaccttgtgatgagggcaggaaggcattatgattggtgtcattttacagtccaggtgctggtaagaccataaagtgatcttctgacctctttcttctcatgtttcacagtctgatctgggtgtttaaactgactacttcacactacctctcttagaaaaggaagaaccaatttagaacaatgtgcttggagaaatgaagactccctacgttccctccgctctctacctcccacacacccactaacccctactacagctatgccccggtgtcttcagggagctcacccaacaggagcaagaggacttctttaagctgagactgcaaaggtcagagacaccactcagcaaagagccaggaggtgtgcattctaagcagcaaagmggttctcaatattcaggaaaagaccagatgtgggggctcatgcctgtaatcgaagcactctgggaggccaaggcgggaggatcccttgaggtcaggagtttgaggctgcagtgagctacaatggcacccctgcactccagcgtgggtaacagagcaagacttgtcattacataaat

SEQ ID NO: 450749 - DNA, 509 bp, Homo sapiens
aaagtgcaattgacttgtgtctggtgaaatgtaatggattatggtattggagatagaccagttttttaaatctgtttgtaaattcatttcaacatttctttatgcatataaacatgtgcttctttgaaacaactgtaacatcttaccrgttccctcattagttaatgaattaaataaaatatttgacaagcatggattttatatttgtatgagaattgtagttgatcattttaaaaatttatctgttaacaaggacattttccaatgaaaagaagatgaaggggaaaaaagtgcttcaaccaaacactacttagagctgtggactgtacgtaacttaataacccaaggaggaagaagccatcaaaaatatcatagagcctggacctataactagttagcctctggctttgaacctagacctcttcatggaaggggttgtgaatagcatctctcttccccacctgagttctgaatatattgaacaaaagacaagtgaatgattattggaa

SEQ ID NO: 450750 - DNA, 573 bp, Homo sapiens
tcacccgcttggccctcttccaagtataatttactttcttttgttactgccctacagttttctaataaactttcgctcctgctctaaagcttgccttagtctcttcttctgccttatgcccctcagttgaattctttcttctgaggaggcaagaatttaggtcgctacagacccatatggttttgccaaagctaacatattttggtgccgtgtctcagatatattctgctgctggcagttcaaaggccaattgtattttctttcccaacttagctcagaagtcttcstgcatctattcttttcttcatctgatccgttccccaaattatgccagagtgattttcctaaagcataaatcccatcatttgccagcttaaaatattatttaatatattctcattgctcttaggatgagaaaataattcttgacatagtccacatgaccctacatggtttgcccctactgaccttacctctaaccagaccttccataactccaatcatactggtttccattcagtttctaatccctctgccactcccttactcccatcccatttcccagcccaccca

SEQ ID NO: 450751 - DNA, 583 bp, Homo sapiens
gctgccctactctttcagaacattccaggcacactggcctgccttcttttgaactttctatgttcctatctcagcccctcttcttgttcttccttctcttggaatcctttcccaagtttctgaatggctgccccttctcattactttgtaaagaggtgatccttgaccactttccctgccccaagaaagtcactctcaytgtttgattttatattttatgtagcacttacaactctgctcagaaccttccactggctttccatctcactcacatcaaattctcttccacagctcccaaatagcacacaatctgggcaccatttccttttgatcccatctcatgtctgtccctcccatctcactctgctcagccgtactaatttccttggtgtttttccaatatcttaagtgctctcctaactcagggtctttgaatgtgctgttccttttgcctggaatattcccatctaaaaacccagtgtggattaatctctcatgccatttagatctagctcaagtgtcacttatcagacagaaataccagtttcaggtgtttctgtctattgggagactgcctttccct

SEQ ID NO: 450752 - DNA, 585 bp, Homo sapiens
aagcgattctcctgtctcaggctcctgagtagctgggattacaggtatgcgccaccacgcccrgctaatttatttttagtagagacagggtttctccatgttcgtcaagctagtctcgaactcccaacctcaggtgatctatccgccttggtctctcaatgtgctgggattacaggcatgagccaccgcacccagccagcacatttggtttttaaggaacagtgatggtcatgatcctatagaggaagaatatcagcttttaaacttcctctagcataaacttaaacctaataatctacttatgaggctataatagtgtagtgttttcaaattaggtggaaggtctgtggaaactttcagtaatgcatctcactgatactaaaattatattacctattacgaaataaccatacatagaagagctatagaggacacagttaatggaactgtatttctaaatgttgcacatatgtagaacattcaaccccttggaaccctggacaacacatgtatctaaaaacacttcttctagttaggagaagaagaaaaaagaaaacatatgaaataggatctgttccatatata

SEQ ID NO: 450753 - DNA, 521 bp, Homo sapiens
agcaactgtaattcaatctacagacatttgctatgggaacaaagagttcttttctgtttaataacttcacggcccattattgaatttcagcctagtgaagcaaaaatcatcaaaataatgatcctggttcatcataaagaaggcagagtgtattaaataaagctggtgaaaagataaaattttaatatragttttaaagtcctctctcaaagttgtgtgtgcatgtgctaataactgatgtgaaaataagtaaaatagtcactttaaaaattatctcataataccatctcattgcattatgataacatatgttatgaaacctagctatctctctattttgagtattctcttaacaaaatgttaggaatagtgtgtatctcttggaggcaataataaaaataatttcttttcctctgtctgtctaagaagacagagtggttatagaggaaaaaaaggctacacttgatattagaagtccttgatatgagactctgctccataatttacttatgctgtaatca

SEQ ID NO: 450754 - DNA, 512 bp, Homo sapiens
aaagagcataaataaaagaaaaaataacctgtgttcatgtaccgggagaagtaatattgtgaaaatgtccatactactcaaagcagtccatagagcatagtgtcaatgcaatccctaaatttcatttttcttcatataaatagaaaaaggaatcctaaaatatgtatagaaccacaaaatccatgaatagccaaggtagtcgtgaacaaaaagaacaaagctaaagatgtcacactatctgatttcragctacagacataacttgtttgtttgttttttatacttcactttattgcactttgcagatattgcattttttacagattgaaggtttgtggcaacattgcattgatcaagtctatcaacaccatttttccaacaacatgtgctcatttcaagtctctgtgtctgcattttttagcaataaagtattttttgtattgtacttttttaaagacataatgctgttgcatgcttaagagattatagtttaaatataacttttataggca

SEQ ID NO: 450755 - DNA, 571 bp, Homo sapiens
cacttcacaggggattctaacccatcttaacctatgctaatccctaaaccagttttcattatgtatttataatttgtccattttatttagactgtgtctgtatataattatgaaaaatgactgagatggctggtggattttttaggactttcaaagtcctggaaaaaataaagcataagctagtttggtttggaagtggaattgatgggggaaaatctgggtgacccattagaaaagtaggattagactcacaatcgcctcttccccaaacctaagttagctttacctgttgactccatgttyacctccactaattcgtgttcccattagcaatatcgatatatttatctattcccttgcccaactgacaaacgctttagctcaagctctgctggcaaacttgttttacaagagatcttagtcatttgtctaagttctgcctgctgcatgaccctggctttccagacaaaatttggttccctattaacataattccctaatctgacacacagtcatttaatgaaaggaaaatatcttaattaaaacgtatgattagctttatcaattcaaa

SEQ ID NO: 450756 - DNA, 571 bp, Homo sapiens
cacttcacaggggattctaacccatcttaacctatgctaatccctaaaccagttttcattatgtatttataatttgtccattttatttagactgtgtctgtatataattatgaaaaatgactgagatggctggtggattttttaggactttcaaagtcctggaaaaaataaagcataagctagtttggtttggaagtggaattgatgggggaaaatctgggtgacccattagaaaagtaggattagactcacaatcgcctcttccccaaacctaagttagctttacctgttgactccatgttcacctccactaattcgtgttcccattagcaatatygatatatttatctattcccttgcccaactgacaaacgctttagctcaagctctgctggcaaacttgttttacaagagatcttagtcatttgtctaagttctgcctgctgcatgaccctggctttccagacaaaatttggttccctattaacataattccctaatctgacacacagtcatttaatgaaaggaaaatatcttaattaaaacgtatgattagctttatcaattcaaa

SEQ ID NO: 450757 - DNA, 571 bp, Homo sapiens
cacttcacaggggattctaacccatcttaacctatgctaatccctaaaccagttttcattatgtatttataatttgtccattttatttagactgtgtctgtatataattatgaaaaatgactgagatggctggtggattttttaggactttcaaagtcctggaaaaaataaagcataagctagtttggtttggaagtggaattgatgggggaaaatctgggtgacccattagaaaagtaggattagactcacaatcgcctcttccccaaacctaagttagctttacctgttgactccatgttcacctccactaattcgtgttcccattagcaatatcgatatatttatctattcccttgcccaamtgacaaacgctttagctcaagctctgctggcaaacttgttttacaagagatcttagtcatttgtctaagttctgcctgctgcatgaccctggctttccagacaaaatttggttccctattaacataattccctaatctgacacacagtcatttaatgaaaggaaaatatcttaattaaaacgtatgattagctttatcaattcaaa

SEQ ID NO: 450758 - DNA, 428 bp, Homo sapiens
tccaggtgctcttcaggagaatatattgtctgcagttttggggtagagtgttctgtgtatgtctgttagattcatctggtctatggtgttgttcaggtcctctactacttgattgatctcatgattggaagtgatctattgaagtatcctacaattatcgggctgctattttttccttcagttctgtcaaatttttcttcaaatacaatgttaaaatttttgttaaatggtattttaacctatatataaatggtatttctgcatttggggttatgatagtttttttatcataatgatgaagcaggatattttcctgacttctttatgggacttgtgacatgagtgccccatttaytcagcttaccactctcaactccttgcaggagggagtttgcgagtcgacaaggcagaaactggagtacacgagt

SEQ ID NO: 450759 - DNA, 492 bp, Homo sapiens
aggagtgatttatctgactgttgaatttggaaaagtgggctttgggggttagtccttctccctacttccttttacaaatgaatgtatccaccccctggagcaaatattctttttytgcatgccgtaatttttacaaggtaggtaccaacaaggtaagataccagaagtacttcagtcctttctaattttggacaacgcaacttgagttcatggagctttatgaagaactccttcatatagaagaactggaatttgaacccactcgtgtggccttacagcttggcatcttagccattaggctacacagcatctgtgtttgtgtcaggaagttgtaaggaagaccctatatgataatgtaacaaggaagaatttttcccccttgtatttaatgttaagagtgtaagaggtctctgtggtgtaattcattgtattttttgtttattttagctctaatttgtatgtaattatgctgtaacacttcttaccacacca

SEQ ID NO: 450760 - DNA, 631 bp, Homo sapiens
taaatacttgcaaatattgcacatatgcagggtttctttcttttgttgacattaacaagaaaaatctctttataaagttcattttcatttacaattgtagattagtcctgaacgtttttcctcattacatgcaaatcattaatcacacaaaatgaatgcagcatcactttctgttctccagaatgatgggctttgtgatgaatacgtattatcataaatctttctaaaagaggtcctaatagcatctgataacttgcaacatcagtgagtaaaatgtaaagtacactctcttccactagcttttgtatctgaagccatcatcatcaattttcacaaggacaacttaaaacacaagtacgtaaatacaaagatccatataaccagtaatgcaaaacacattttctcattttctaccttttttctcatgaacaagatttccaatgccctttgtttctctgttgttcycctcctgttctaatatcattagaccctgatgctcaataattagttccttatgccttggtaaaacaaattttcagtatttttttgttcagatacagagtattttcaaacattaaatcaaagaaaagatgaaaaataatttattttgaacactaagatatttttatca

SEQ ID NO: 450761 - DNA, 625 bp, Homo sapiens
attagcattttgttttggagtaatggggcgaatgatgtgatattattttcattttagaaaagttagtaacagttgaaaataggttaagaaagaagcaggagccaataagaccaatccaaagtctgttatatatcaagtagaaatggcaaggacctgaatcaagaagtgatactgggaaagaagggtgctgagratatattctagaagaagactggatggcctgttgaggcagggaagaagagtgaataaagaatgtagggtgtgcttcattctggcttgactaacggggcacatggtggttgcctccactgaactgggataaaaacacattgagggtcttgtaagattgcaaatgatgagcttcatttcagtcacgttgaactggaggtatttgtagaatatgcaagtgtttggagaagcccaacaagaggctggatgcattgttgtaaaatcaagaaaaaagatatgtcctggtggtataaatttggtggtcataacggtgacaactgtagccagtgacatcgctgagatatacaagagatattatcaaatgggaaaaaaatgagggcagaaggcagaaccttagatgacactacatttaagctcccgataaaaaagaatcaac

SEQ ID NO: 450762 - DNA, 514 bp, Homo sapiens
tagaccaatgacttctagagatcagctgcgacattaagttgtaatactgttaatattaactaaacatgcttgtgaaaagtctagccaagcaaaactcacttacctaagagctggagtaagttcccagtttatacttgttaaagtcaagtggctattaagaaatcaggagttaatccaaatgactatgtcatcattttaggacctactggctcctcagttgccaaatatattcatgttctttctattgagagacacattacttcatcaacataattcccatgtcttgttccaggcttaggaccaagcctgactttagttaagagggatttaagatgctccaacaatcaggagactcaggagtaagttagtctttccactacactaattccaactctgtctccagttttacatctcttgtgacctttactcrgactaagttctccttccacatcctctttccgttattttgagtgtccaaactcctgcttttgctatctaattagtaccagagtct

SEQ ID NO: 450763 - DNA, 322 bp, Homo sapiens
atttattatatcatcattatcttgttttcctgttttcttcaattatatgtacttctctcaaaacacccattgcccaggtcccgccacatacatatatatttttattttatttatttatttatttatttatttatttayttatttatttatttattgagacagagtctcactctgtcacccagtttggactgcagtggtgcaatctcggctcactgcaacctctgcctcccaggttcaggtgattctccagcctcagcctcccaagtagctactactacaggcacacaccaccatgcctggcttttttgtgttttcggtagag

SEQ ID NO: 450764 - DNA, 525 bp, Homo sapiens
aggctgaaaaatgcaatttgtggagagatgtggaaaatctttgaaaaataggactctagattaaactgaaaaattttggaataatgtggctgaataagctaccttgctaaacaattctttatctactctgtgtctcagtggacaatgcaatcccttttctgtacactaacttatttgttagtgtaccttatatagatgcagaataagttcttaaaaaagtttataaaccttatattttaaagggataacagttattgcgtccattttcaacatacttattccacaaaaacaaagatataattagataattatatcttatatttataatactttattctggcttactactgggtcaaattgcagatacttttcataatacaatgctcaaataaacttcaygtataatcttattagtgtgctgttttgaaaatggtattaaatctttagaaggaaggtcaaaattcaaatacaagtcattactgattattgcacttgaatagctaaattaatatgctgcaggcatta

SEQ ID NO: 450765 - DNA, 391 bp, Homo sapiens
ggtgtgatccagagcttaaataaargtgataatattgcaaatgttacaataatttacaattgtaagacaacaatctttaaagaactatccaaaaagaatttttgatacgtatactatataaaaaatcatgtttaaattatcttcccaatttttcccattagaaaacattcctgatattccttttaatgtattgtaattttcaacattttgacacctgattgtaattaagagtataacaataaatatttatgtagtgatttctggcaaataaaatgttttcttatattttattttatttaactttagcgattgaatacaggatagactaggatagacaaggttattctcaggtaactaataccacacaaaccttactgactcagagaacaaa

SEQ ID NO: 450766 - DNA, 570 bp, Homo sapiens
ttttgttgtttgggcatgaatctatttgacagagaagccctgaaatttttttctgctaaaattcaaagctttataaccaatattgacctgaaacaagcccagggggtcaggggagagagagttcatatatttcaagaaaaagtattttatatacaggaaaggcggcaacaaggagtagaaaatacctttgaatttggatggagaaggctgtaagtccgagtcccacggctgattccgactaattgtactaaytgtgtagaaaatccctaatgttttttctacttctaaaacttcacaactctcatttggttttagaaccctcttaattcggttttaatttccttttctcttttagcctcacctttctctttgctctcaaggtgttccctgcaattatttattgtttattttaatagccctctctaacctttccctttgtgcatttaaacttagctcttgaatgtgtaacccataaagtgacctacttgcttttagttgtaattttatacataatcagttaataatagggttttagtatctaacacacttccttttttgacattttattca

SEQ ID NO: 450767 - DNA, 614 bp, Homo sapiens
tctcctattctgcaggttgtctctttgctctgttgtttcctttaccatttaaaagcttttttgtttgacgtaatgtcatttatctatatttactttggttgcctgtgctttyaaggttttatctaaaaaaaaaatccttatgtagaccaatgtcatgaagcttttcgctatgttttcttctagtgatttcatagttttgggtctcacatttaagtcttcaatccattatgagttactttttgcatacagtaggagataggatagggtctagttttcttgttctgcctgtgtatatccagttttctcagcaccatttattgaagagattgccctttctgcatcgtgtgtacttggcacacttgtcaaatatccactggttgtagatgtattggtttatttctggatttcctattttgttccactggcctatatgtctactttttatgccagtagcatgctgttttggttactaaaactttgtagtatgttttgaagtcagaagtatgatgccaccaccttttttcttttgctcaggatttctttgtctattcatgggctttgtggttccatatgagttttaggatttttttttatgtctatcaagaatgccattg

SEQ ID NO: 450768 - DNA, 636 bp, Homo sapiens
tataatttgtaattcatttctgataaagttcatctgaagataaattacccttgaacaacatgggtttgatcagcatgggtccacttatatgcagttttttcaataaatatattggaaattttttggagatttgtgacaatttgagaaaacacgcagatgaactgcataacytaaaaagtcagaaaattaagagaaagttaggtatgtcattaatgcataaaatatacgtagatactagtttatttgttaaattgactatgtatttgttaaattgaccagtaaatcttctggtcaacagtgggctattagttctaagttttggggaactcagaagatatatacagattttttactgcataagagtggcaccccaatccctgcattgttcaatggtcaactgtattgctattttactattaaaattatctcataaatattgatgaaatcattgatttaactgataattcattgtacatggcatcagagtcagtccacaagggggctcccttgctctaattttcagaattttcccttaaaatggattatgacactttggaagattttttatctttgcaaaagaatttaataaaccaattttaaatgcaccagaaactctgaaatatattaatgggtcac

SEQ ID NO: 450769 - DNA, 660 bp, Homo sapiens
ctgtgttgattccatgtctttgctactgtgaatagtgatgtgataaacatatgagtacaggtgtctttttggtagaatgatttattttcctttgtgcatataaccagtagtaatttatttttagctctttgaraaatctccaaagtgcttttgccataacgtggatgtagctagaggccattatcctaaatgaattaaggcagaagcagaaaagcaaatactgcatgtttcaggtataagtgagagctaaacattgggtacagatggacacaaagatgggaacaataaacgttggggattccaaaaagggagagcaagaggaaggggaaagggttaaaaaattacctatcaggtactgtattcactacttgggcaatggtatcattaggtgcccaacctcagcatcatgcaatgtatccatgtaacaaaacctgcatatgtactccctgaatctaaatttaaacataaataaataaataaagttcattgtttgtgagtcaatccccagaaaaagtaaataattacttccttgttgtaatatttatttattagagcaatgtgttcctcgataaatttactccaagttgttcctcaaagtacaagatctttatcaataatggttttaaggacatgtactttcctttttatacaatgtctccc

SEQ ID NO: 450770 - DNA, 660 bp, Homo sapiens
ctgtgttgattccatgtctttgctactgtgaatagtgatgtgataaacatatgagtacaggtgtctttttggtagaatgatttattttcctttgtgcatataaccagtagtaatttatttttagctctttgaaaaatctccaaagtgcttttgccataacgtggatgtagctagaggccattatcctaaatgaattaaggcagaagcagaaaagcaaatactgcatgtttcaggtataagtgagagctaaacattgggtacagatggacacaaagatgggaacaataaacgttggggattccaaaaagggagagcaagaggaaggggaaagggttaaaaaattacctatcaggtactgtattcactacttgggcaatggyatcattaggtgcccaacctcagcatcatgcaatgtatccatgtaacaaaacctgcatatgtactccctgaatctaaatttaaacataaataaataaataaagttcattgtttgtgagtcaatccccagaaaaagtaaataattacttccttgttgtaatatttatttattagagcaatgtgttcctcgataaatttactccaagttgttcctcaaagtacaagatctttatcaataatggttttaaggacatgtactttcctttttatacaatgtctccc

SEQ ID NO: 450771 - DNA, 430 bp, Homo sapiens
actacctctctctttcaaattttttctgcctataattgtaggtcaaaaaattttgacytacaatagcttctgacaaattccattctattttctcttttatctaaaatgaaaattattttgcacccaattcaacagaattgcattttcttggcttagtctgtagaaatccaacttgctaattgttttatatatatttctaaaaacaattttgaggaacagatggctacaactgcccaggttcagcagccaaaaccactactcaaccagcaacaatctttggcacctatatagttccttgttatgagatccctgggaacaggttgatagaattaggacaattcctgtatattatagtcttttaagtctggtgttttctaaaataaaacatacctacactgtccatagtcacagttataatttgaacaccatc

SEQ ID NO: 450772 - DNA, 430 bp, Homo sapiens
actacctctctctttcaaattttttctgcctataattgtaggtcaaaaaattttgacctacaatagcttctgacaaattccattctattttctcttttatctaaaatgaaaattattttgcacccaattcaacagaattgcattttcttggcttagtctgtagaaatccaamttgctaattgttttatatatatttctaaaaacaattttgaggaacagatggctacaactgcccaggttcagcagccaaaaccactactcaaccagcaacaatctttggcacctatatagttccttgttatgagatccctgggaacaggttgatagaattaggacaattcctgtatattatagtcttttaagtctggtgttttctaaaataaaacatacctacactgtccatagtcacagttataatttgaacaccatc

SEQ ID NO: 450773 - DNA, 580 bp, Homo sapiens
tatagttccttgttatgagatccctgggaacaggttgatagaattaggacaattcctgtatattatagtcttttaagtctggtgttttctaaaataaaacatacctacactgtccatagtcacagttataatttgaacaccatcatggccattcccaatgggagaactgtcaacatgaatccttgataagaacatgaggacttttattgttgctttcctaatyggagataattactgcagcaaatcaatgttcacagggaattacaacctaggttataccagacttcctttggtttaatgtgatatgcttccagcagaataaattacatttcacactaggaaatgtagcagaatttctacagatatacctgccacccattttattatcagattctatttttcaattgctctgtctatattgagagccaaattaaataaattctccttacaaaacacatttattgagtgcctgttttaagaaatataatgacacgtgatctactataatttaaaaaaaagcccacagtgctgttaaaacattttttgggcattatttcctttatattgatgcaatacctgt

SEQ ID NO: 450774 - DNA, 702 bp, Homo sapiens
atagctgaagtatttttggttattggcttagyaggaacaaacaatgattataatgacaaaaatgctaagagaaaatggaacagagctgacttatttataagattgttgatttgaattcagactgattccaaattgttaaagttactaaaagcaatgtcaaggttctgtaatcctcagtggttgttaattatataattgaccttattctcctaacatgcatagaaatgctattttatatacttactaaatttaattggaaagaggaattaaaaagaaaacaaggtcgccatagctcagctacttaaaggaaagcctctgtttacatagatctgatttacatattcatcctagtggttctatcatgatcacatttatttttggtgactttcattctttccatcaacaatggttatacttggaagagtgaagacacagaataaaatcagatgctcactaagagtaaatagaaactagaagaaataactatttgaacttaaactcttcatatatctgttcaatcataatgacccagatatcataaattacttatgctagtttaataactgggacaagttaatgttaagaaacttggaattcagtaagtaactcagtaagttgaactttttctttgtttataaggctgaatctataatgaataaatgtattttctgtttcctaaggatggcaaatgcatatatttat

SEQ ID NO: 450775 - DNA, 702 bp, Homo sapiens
atagctgaagtatttttggttattggcttagcaggaacaaacaatgattayaatgacaaaaatgctaagagaaaatggaacagagctgacttatttataagattgttgatttgaattcagactgattccaaattgttaaagttactaaaagcaatgtcaaggttctgtaatcctcagtggttgttaattatataattgaccttattctcctaacatgcatagaaatgctattttatatacttactaaatttaattggaaagaggaattaaaaagaaaacaaggtcgccatagctcagctacttaaaggaaagcctctgtttacatagatctgatttacatattcatcctagtggttctatcatgatcacatttatttttggtgactttcattctttccatcaacaatggttatacttggaagagtgaagacacagaataaaatcagatgctcactaagagtaaatagaaactagaagaaataactatttgaacttaaactcttcatatatctgttcaatcataatgacccagatatcataaattacttatgctagtttaataactgggacaagttaatgttaagaaacttggaattcagtaagtaactcagtaagttgaactttttctttgtttataaggctgaatctataatgaataaatgtattttctgtttcctaaggatggcaaatgcatatatttat

SEQ ID NO: 450776 - DNA, 702 bp, Homo sapiens
atagctgaagtatttttggttattggcttagcaggaacaaacaatgattataatgacaaaaatgctamgagaaaatggaacagagctgacttatttataagattgttgatttgaattcagactgattccaaattgttaaagttactaaaagcaatgtcaaggttctgtaatcctcagtggttgttaattatataattgaccttattctcctaacatgcatagaaatgctattttatatacttactaaatttaattggaaagaggaattaaaaagaaaacaaggtcgccatagctcagctacttaaaggaaagcctctgtttacatagatctgatttacatattcatcctagtggttctatcatgatcacatttatttttggtgactttcattctttccatcaacaatggttatacttggaagagtgaagacacagaataaaatcagatgctcactaagagtaaatagaaactagaagaaataactatttgaacttaaactcttcatatatctgttcaatcataatgacccagatatcataaattacttatgctagtttaataactgggacaagttaatgttaagaaacttggaattcagtaagtaactcagtaagttgaactttttctttgtttataaggctgaatctataatgaataaatgtattttctgtttcctaaggatggcaaatgcatatatttat

SEQ ID NO: 450777 - DNA, 478 bp, Homo sapiens
taaaaagcaagcataattgccatgctcatggggtggctgtgaattaatagatgggaaatcacttttaaaaacagttttataagttatgcaaattcaaggtgttaagagattgttgtataaaagtgaaagattggcctaccataccacagaaatgacaaattttaatgtaagttttatgttaatgatctttagatgtttagcaggcaaaggcctaatctttttgacctattaatacctcccttcatgccagcttaaaataaatttaagaaggcttatgaattaaaaaaaaagtacacctgacsttgccttaccttgctttcttgaactttaatgttatcacactacatgcctttctagagcacagccaattgaaatttttttgaaataatcaggacatagatcatattttctaagaaatggcaatattggcatctctcatttcaatagtttaagccacttgttaaagaagaaacagcca

SEQ ID NO: 450778 - DNA, 599 bp, Homo sapiens
cgttgctgttactggtcatggtcttggaccatgaagatgagggctatagccttttggatagcaaagcagagagctagaaggagacataggtttcctgatgattttgtagagtggacattgtatcattcttggaccagaaaagctatggattttatgttagagaaataatcctctatcttgttaaattaccagatgatttmgtagttatttctgtttttctcttaggtacaatgaaatccacttttaactagtaaaggaaatatgagtggattcctcccacattcttcaatgtatggggttgtggttatttggcctaatctcttcgagcaatttattgagaattttgtcaagattcacttgttggggttcaacaccatagatgcatttaaagttgtcatgcatcttgggatggtgatgaaaaccaggctgatctaacctgtgtaactcttaatccatatcctgacagtatcttacaatatgtgtaatatatgatagatattagtaggactacacacattgatacagtttggctctgcgtccccacccaaatctcatctcaaattataatcctcccatgtcgagggagggacctggtggaa

SEQ ID NO: 450779 - DNA, 475 bp, Homo sapiens
agtctatggtactttgtatggtagcccaaggaaactaagacaattctccagccgttgctgttactggtcatggtcttggaccatgaagatgagggctatagccttttggatagcaaagcagagagctagaaggagacataggtttcctgatgattttgtagagtggacattgtatcattcttggaccagaaaagctatggattttatgttagagaaataatcctctatcttgttaaattaccagatgatttcgtagttatttctgtttttctcttaggtacaatgaaatccacttttaactagtaaaggaaatatgagtggattcctcccacattcttcaatgtatggggttgtggttatttggcctaatctcttcgagcaatttattgagaattttgtcaagattcacttgttggggttcaacaccatagatgcrtttaaagttgtcatgcatcttgggatggtgatgaaaacc

SEQ ID NO: 450780 - DNA, 612 bp, Homo sapiens
tcccataaagctttagaaagtttagactatctaacttggttttaaactagtaaatattttatgcttcctctggggttatttttcaagcattacattaccagacctaagcttagattgtttcttatttcctaatatatttttgtttatttgtagactcaccaaagaatgggtatttaataaatatttaatacatattttaaaatgaagaaacaaactataaagtgtttgcaacaaaaattttgacgtgtgtaattgatatccacattatgctaatagcaaagtgtaatgttgcatttcacttttgcccctggcttcttcgcttttattgttatttcaaactgaaagtgatgccagtttgaagagtcttagcaaagagatagaaaaaaaaagatgcagtgacttctttggggatcagtttttgaatatcacttgtctaggttttataaggagagatraaaagcaatgccaatatatacttaataaaaatctactcaattcttcctattgactcaggcttcaaaagagatacaaaaggaaccttgatcactacacatgaggagctctcttattaagatgcggtgcgtctaggctaaggcaaatgaagcgcttatg

SEQ ID NO: 450781 - DNA, 633 bp, Homo sapiens
tttggtaggagtaaaatactttgtatgcctttgataatcactataaatattttcagaaggataaaaaagtaaagtaaaatrtgtcctgtttctcatgtagattttattacctttttcttacttattctgcttgtgtaaggtgttattactttttaagaacaatttttactattgcttaccatctacatggcatgtatatataaaatgggaagaaaacaaagggaaattgtcatgacgtaaatattcatttgtgtctaaaataagttgtgtcctatcataatataaaaaatatgatagaggaattatcttgtagatcaatcaagagaactttaatatcaccaatccccaactctaagaaatacagagtaagctgaaatggcaaccattccacagttttattgaaaagaatggagtaatgtatacatttcattcatttatctgaccataagaagaatgcatgagttctatgcagaagacgacagagaaaaacactccatttagaatgaaaaatgtaacctttcctgtcattctgtgtgactcttcctacgggttatattatgctatgcatgatacagcataatagtaatattccgtaagtgcagccattggcaactaacaagaattgtacaaaac

SEQ ID NO: 450782 - DNA, 453 bp, Homo sapiens
agctgttcacaattgctcagttacctggggcatggtgggccttggtcttcttcctcttcytggtcctttttaattcctgcaatacattcagacagggacagacaaaataagccaattcacctacacccgtaacagtccactgtctaatccccacacagggatctcaggctcctcagcaagagaacaggacaatgtgagagatatacttcaggaggcctgaaagctggtcatgatattctttggtttgcatctcagaaccaagggtgaaatatccctattctggtagatcgttatcccaaaatcatttatcccaagtttgtgcaaacagttatgccttattgttcccatcagttcaaagacaatgccccagatgatttctaggaggaaaactgcagtattcagccctgtctcatcaaatgcccagctcgttcatggatgcaagaattttagaca

SEQ ID NO: 450783 - DNA, 513 bp, Homo sapiens
ggagaaaaactgcaatattcagccctgtctcatcaaatactcagattcttcatggtagcgaggattttagaygctgaaattagagtgaaggatgaaatctacaagatctacaaaattgagacaaaatcagagttgtgtgaattcgtcacatctgcccagatccaacatcttgagagtaggattagggtgccacaggcatggcctgagactaggaagagagccctgctcactgacccatcccttgcctgggcttccaagtggaactagagtttcattcaacctacatgtgcctataggtcctccctgtggcaatgacatctctcagctcagtaagggccatttgcagtaggaatatgaccctaaccagaagactcagtggatccttatcaccttcatagaaaggtactcaccatccatgtcaagagcccagccaacacgctgttgctccaatatgtaaaaggcacttctgtagggctggcatgagtcagtcagttcaagataacctgaaggagt

SEQ ID NO: 450784 - DNA, 351 bp, Homo sapiens
ttagagtgaaggatgaaatctacaagatctacaaaattgagacaaaatcagagttgtgtgaattygtcacatctgcccagatccaacatcttgagagtaggattagggtgccacaggcatggcctgagactaggaagagagccctgctcactgacccatcccttgcctgggcttccaagtggaactagagtttcattcaacctacatgtgcctataggtcctccctgtggcaatgacatctctcagctcagtaagggccatttgcagtaggaatatgaccctaaccagaagactcagtggatccttatcaccttcatagaaaggtactcaccatccatgtcaagagcccag

SEQ ID NO: 450785 - DNA, 513 bp, Homo sapiens
ggagaaaaactgcaatattcagccctgtctcatcaaatactcagattcttcatggtagcgaggattttagacgctgaaattagagtgaaggatgaaatctacaagatctacaaaattgagacaaaatcagagttgtgtgaattcgtcacatctgcccagatccaacatcttgagagtrggattagggtgccacaggcatggcctgagactaggaagagagccctgctcactgacccatcccttgcctgggcttccaagtggaactagagtttcattcaacctacatgtgcctataggtcctccctgtggcaatgacatctctcagctcagtaagggccatttgcagtaggaatatgaccctaaccagaagactcagtggatccttatcaccttcatagaaaggtactcaccatccatgtcaagagcccagccaacacgctgttgctccaatatgtaaaaggcacttctgtagggctggcatgagtcagtcagttcaagataacctgaaggagt

SEQ ID NO: 450786 - DNA, 439 bp, Homo sapiens
agcttttgaggtatggtcaaccttcactaggttagtaaatgataagggkaggaagaaatggaaacctaaacatttactctaatgagaaccaaaaagcaatgtagtaggcataatttagacttgtctgacaagacaaaatcattattttcagcatgtactgttttccctggacttggcatctccaggtgtcaacatcaaattaactgtccacaatttctcagactcacctgggacctgttgcctcttggtcctcctttttcacttgatcccaccgatgtcctgcaaataaattcagatggggcctcttacattaagcagttcttccttgcacacagaaacattcctctgtccaatcctaacacaggtacatcagtctggtcagtgtgagaacaggagactttgagagaaatattccagtaggcctgaggtcaagtcttga

SEQ ID NO: 450787 - DNA, 617 bp, Homo sapiens
ggggtctacctgggccatgaactggagctttatcaccttcacaatggagtactcaccgcctatgtcaacagccatgcagacttgctgttcctctaatgagtgaaatgtgccgctgtaagactggtacgaggccaacatttcaggaggaattgagagagtcgaataaccttcatcccaggactcctgggggacttcctcctcttcagactcctgcagattcctgatgagccaggcaggacagggatgatagaagatttaaccaacagacattagacaacaaaacctcccrgatgatctgatgggagacagaatggagtggtcacagaaaccaaaggcatttttccttcaagagaaataaaactagccttctaaatacagggtggagggtgactgctctggggacagagcaaaaatgggcagcatgtgctcagtacatttgccacagatgagccaactcagggcacccagactctccctgtaaactaccatcatgacttgcagcacagagaactgacacagggcttcaactactttgcataaattgggttgaattttacatgcagcattcaagtgaagagagttcttgacacagtgcagacacagatcttgtgtattaa

SEQ ID NO: 450788 - DNA, 617 bp, Homo sapiens
ggggtctacctgggccatgaactggagctttatcaccttcacaatggagtactcaccgcctatgtcaacagccatgcagacttgctgttcctctaatgagtgaaatgtgccgctgtaagactggtacgaggccaacatttcaggaggaattgagagagtcgaataaccttcatcccaggactcctgggggacttcctcctcttcagactcctgcagattcctgatgagccaggcaggacagggatgatagaagatttaaccaacagacattagacaacaaaacctcccagatgatctgatgggagacagaatggagtggtcacagaaaccaaaggcatttttccttcaagagaaataaaactakccttctaaatacagggtggagggtgactgctctggggacagagcaaaaatgggcagcatgtgctcagtacatttgccacagatgagccaactcagggcacccagactctccctgtaaactaccatcatgacttgcagcacagagaactgacacagggcttcaactactttgcataaattgggttgaattttacatgcagcattcaagtgaagagagttcttgacacagtgcagacacagatcttgtgtattaa

SEQ ID NO: 450789 - DNA, 617 bp, Homo sapiens
ggggtctacctgggccatgaactggagctttatcaccttcacaatggagtactcaccgcctatgtcaacagccatgcagacttgctgttcctctaatgagtgaaatgtgccgctgtaagactggtacgaggccaacatttcaggaggaattgagagagtcgaataaccttcatcccaggactcctgggggacttcctcctcttcagactcctgcagattcctgatgagccaggcaggacagggatgatagaagatttaaccaacagacattagacaacaaaacctcccagatgatctgatgggagacagaatggagtggtcacagaaaccaaaggcatttttccttcaagagaaataaaactagccttctaaatacagggtggagggtgactgctctggggacagagcaaaaatgggcagcatgtgctcagtacatttgccacagatgagccaactcagggcacccagactctccctgtaaactaccatcatgacttgcagcacagagaactgacacagggcttcaactactttgcataaattgggttgarttttacatgcagcattcaagtgaagagagttcttgacacagtgcagacacagatcttgtgtattaa

SEQ ID NO: 450790 - DNA, 617 bp, Homo sapiens
ggggtctacctgggccatgaactggagctttatcaccttcacaatggagtactcaccgcctatgtcaacagccatgcagacttgctgttcctctaatgagtgaaatgtgccgctgtaagactggtacgaggccaacatttcaggaggaattgagagagtcgaataaccttcatcccaggactcctgggggacttcctcctcttcagactcctgcagattcctgatgagccaggcaggacagggatgatagaagatttaaccaacagacattagacaacaaaacctcccagatgatctgatgggagacagaatggagtggtcacagaaaccaaaggcatttttccttcaagagaaataaaactagccttctaaatacagggtggagggtgactgctctggggacagagcaaaaatgggcagcatgtgctcagtacatttgccacagatgagccaactcagggcacccagactctccctgtaaactaccatcatgacttgcagcacagagaactgacacagggcttcaactactttgcataaattgggttgaattttacatgcagcattcaagtgaagagagttcttgacrcagtgcagacacagatcttgtgtattaa

SEQ ID NO: 450791 - DNA, 543 bp, Homo sapiens
aattggtccattttctaagagtgttgctgcaatacggacttatatcaccagataacatggacattaaatgtttagaggcatctatacatgaaacacacatgatagataaatttgaacaactcttgctttaaaaagaatctgtgatttgggaggccaagacaggtgaatcatttgaggtcatgagttcaggactaccctggccaatatggggaaaccctgtctctactaaaaatacaaaaattagccagatgtgatgttgtgcacctgtggtccyagcaactcaggaggctgaggcaggagaatcacttgaatctgggaggcagaggttgcaccaagccaagatggtgcaactgcactctagcctgggtgacagagcaagactccatcgcaaaaaaaaaaaaaaaaaaaaaaaaaaaaaaaaaaatccacgatgctacaaagaaacattggatcagccattgcattgacagggtggagaaccagggtccagccttgctttatggaaatatatcagcaaagtaaagaagaaaagtttccgtcctg

SEQ ID NO: 450792 - DNA, 598 bp, Homo sapiens
tattcagggacattctatccatggggagtgctccagtctgaagcacttcctaccacgaaacgccaccacataaagtgccttctccaacatcacacggcgagsggcttcatctcattttggaaagcagttttaagtgttcccacatttgaatgcttcagacccttgcaagagacaatttgccatggagagagagaaactcaggaaagacaagtcattcactcactgacagttactaagaacattgccgaaaagacaccctgggaaccttcattcttagtacagagctcttttcactctaacaagcctgctcctatcgcagcctccttcctgtcctttaaaactagacagatgctgcctcttactccaaagaccaccttccatcaagggaggagggacaattgcaatactgtgacctccaaccccatgggtttcccaactccgttcttacccaggaagtcctggtcatgtcatggccacataagcttagtggaaaaaaacaccattgatacaactgtcattgtgaaagtatggaggtctggagtctctcataagcctggggttttgggtcatcagggcctatggccaccttacctgggct

SEQ ID NO: 450793 - DNA, 598 bp, Homo sapiens
tattcagggacattctatccatggggagtgctccagtctgaagcacttcctaccacgaaacgccaccacataaagtgccttctccaacatcacacggcgagcggcttcatcycattttggaaagcagttttaagtgttcccacatttgaatgcttcagacccttgcaagagacaatttgccatggagagagagaaactcaggaaagacaagtcattcactcactgacagttactaagaacattgccgaaaagacaccctgggaaccttcattcttagtacagagctcttttcactctaacaagcctgctcctatcgcagcctccttcctgtcctttaaaactagacagatgctgcctcttactccaaagaccaccttccatcaagggaggagggacaattgcaatactgtgacctccaaccccatgggtttcccaactccgttcttacccaggaagtcctggtcatgtcatggccacataagcttagtggaaaaaaacaccattgatacaactgtcattgtgaaagtatggaggtctggagtctctcataagcctggggttttgggtcatcagggcctatggccaccttacctgggct

SEQ ID NO: 450794 - DNA, 598 bp, Homo sapiens
tattcagggacattctatccatggggagtgctccagtctgaagcacttcctaccacgaaacgccaccacataaagtgccttctccaacatcacacggcgagcggcttcatctcattttggaaagcagttttaagtgttcccacatttgaatgcttcagacccttgcaagagacaatttgccatggagagagagaaactcaggaaagacaagtcattcactcactgacagttactaagaacattgccgaaaagacaccctgggaaccttcattcttagtmcagagctcttttcactctaacaagcctgctcctatcgcagcctccttcctgtcctttaaaactagacagatgctgcctcttactccaaagaccaccttccatcaagggaggagggacaattgcaatactgtgacctccaaccccatgggtttcccaactccgttcttacccaggaagtcctggtcatgtcatggccacataagcttagtggaaaaaaacaccattgatacaactgtcattgtgaaagtatggaggtctggagtctctcataagcctggggttttgggtcatcagggcctatggccaccttacctgggct

SEQ ID NO: 450795 - DNA, 564 bp, Homo sapiens
cattcttagtacagagctcttttcactctaacaagcctgctcctatcgcagcctccttcctgtcctttaaaactagacagatgctgcctcttactccaaagaccaccttccatcaagggaggagggacaattgcaatactgtgacctccaaccccatgggtttcccaactccgttcttacccaggaagtcctggtcatgtcatggccacataagcttagtggaaaaaaacaccattgatacaactgtcattgtgaaagtatggaggtctggagtctctcataagcctggggttttgggtcatcagggcctatggccaccttacctgggctgagcttttggacaaggtgctgtgccagtctacacccctcagccagctgttcttggaggtcctgcccctgggacttgtctggctcatccggagtgaggagggcctggagatgctgattcaatgagcgggaggcatctctcccttcccgtaacttctcccttaactgggtcagctcycgttcctgagagtgaaccaggactttatattgcctaagttgagacggtagagaaaattt

SEQ ID NO: 450796 - DNA, 556 bp, Homo sapiens
tctatgcatcatgagactgcacaggccctccatgtggcttctgctgtgttattcagggacattctatccacggggagtgctccagtctgaagcacttcctaccaccaaatgcccctacaccaagtgccttctccaacaccaaacggagaggggcttcatctcattttaaaaagcattcgtaagtgttcccatatttggatgcttcagacccttgcaagagacaatttgtytgcctttgcagatggagagagagaaactctggaaagataaatcactcactcaccgacagttactaagaacattgtcaaaaagacagcctgggaaccttcattcttagcccagagctcttttcactccaacaagcgccctcccatcacagcctccttcctgtcctttaaaactagacagatgctgcctcttgctccaaagaccaccttccatcaaggaaggagggacacttgcaatactgtgacctccaaccccatgggtttcccatctctgttcttacccaggaagtcctggtcatgtcatggccacatatgtatagcagaaaaaa

SEQ ID NO: 450797 - DNA, 413 bp, Homo sapiens
ggggtcccctcacctgagctcctcagcttgcttgagctgctctgcaagcttctcctccttgaactgtcgctcattcctcagcataaattttatgaggtctttacactcttcatactctgagaaaagacagacacgcctgcctcagtggaaggctggacatgctgctgtggtcactgcctacagggcagragccaggtccatcccaaggacaaaactgtccccagtaccaggctctaggcagggatttccacatctttactcttcagtctcctgactttctggcatcttatcctccaaaatttaaagacgaagaaagagaaattcaaggcacatcaaggaagttgacaagatgattcaaccacaacgaagtggagtcagaactcacagcccctgaggtctgactctgaatgcgg

SEQ ID NO: 450798 - DNA, 413 bp, Homo sapiens
ggggtcccctcacctgagctcctcagcttgcttgagctgctctgcaagcttctcctccttgaactgtcgctcattcctcagcataaattttatgaggtctttacactcttcatactctgagaaaagacagacacgcctgcctcagtggaaggctggacatgctgctgtggtcactgcctacagggcagaagccaggtccatcccaaggacaaaactgtccccagtaccaggctctaggcagggatttccacatctttactcttcagtctcctgactttctggcatcttatcctccaaaatttaaagacgaagaaagagaaaytcaaggcacatcaaggaagttgacaagatgattcaaccacaacgaagtggagtcagaactcacagcccctgaggtctgactctgaatgcgg

SEQ ID NO: 450799 - DNA, 577 bp, Homo sapiens
agttgagggtgcggtgggttgaccctgggctgcccagcattcatgtggtagtgaaggaaggaggactggatcaatcccatttcaaagcatgtctctctgcactccacactgtcctccaatgacactgtaaggaaaccgctttaagacgtatcaacggctttaagtaaatgtattttctggcatctggragacctgacattctgtgtcataatgaaaatctgtcatgtttctttattttaaaaatgataaaactgcaggttcacagagttacatggcttacttgaggtcacacggggatgagttttcagcactgccaataaaagcaatcacatgaattattcagtaattattcataggatccatataattcagtaaatattcacataattatttactagttgttcattgaccaattcgtacaaggcattttgctcaaaactgtgcttatatttggacattgtatcttcatcataatcctgtggtaatgctgttatccgtaagtaacaggtaagaaacctgaagaggagggatagcaaatcatgtatttggacatatttcctttttttttttttggttt

SEQ ID NO: 450800 - DNA, 580 bp, Homo sapiens
cttgaggtcacacggggatgagttttcagcactgccaataaaagcaatcacatgaattattcagtaattattcataggatccatataattcagtaaatattcacataattatttactagttgttcattgaccaattcgtacaaggcattttgctcaaaactgwgcttatatttggacattgtatcttcatcataatcctgtggtaatgctgttatccgtaagtaacaggtaagaaacctgaagaggagggatagcaaatcatgtatttggacatatttcctttttttttttttggtttttgtgatgctggaagaatgaccagaatgagtcataggaagagtatacattcctgtagtattttccaggacagaggtgtgacctcctagagtactgggaccaaaattcccaagtgtctgcaaccttgctttaacagtatgggagatcacctctatcacctggaattcccctggaactctggaatatacaagagaagtatgagacttgggtcttcccttggctgtgtttaattcactcttctatggaataccaatgattctcactaagactggccttttcataa

SEQ ID NO: 450801 - DNA, 580 bp, Homo sapiens
cttgaggtcacacggggatgagttttcagcactgccaataaaagcaatcacatgaattattcagtaattattcataggatccatataattcagtaaatattcacataattatttactagttgttcattgaccaattcgtacaaggcattttgctcaaaactgtgcttatatttggacattgtatcttcatcataatcctgtggtaatgctrttatccgtaagtaacaggtaagaaacctgaagaggagggatagcaaatcatgtatttggacatatttcctttttttttttttggtttttgtgatgctggaagaatgaccagaatgagtcataggaagagtatacattcctgtagtattttccaggacagaggtgtgacctcctagagtactgggaccaaaattcccaagtgtctgcaaccttgctttaacagtatgggagatcacctctatcacctggaattcccctggaactctggaatatacaagagaagtatgagacttgggtcttcccttggctgtgtttaattcactcttctatggaataccaatgattctcactaagactggccttttcataa

SEQ ID NO: 450802 - DNA, 577 bp, Homo sapiens
agttgagggtgcggtgggttgaccctgggctgcccagcattcatgtggtagtgaaggaaggaggactggatcaatcccatttcaaagcatgtctctctgcactccacactgtcctccaatgacactgtaaggaaaccgctttaagacgtatcaacggctttaagtaaatgtattttctggcatctgggagacctgacattctgtgtcataatgaaaatctgtcatgtttctttattttaaaaatgataaaactgcaggttcacagagttacatggcttacttgaggtcacacggggatgagttttcagcactgccaataaaagcaatcacatgaattattcagtaattattcataggatccatataattcagtaaatattcacataattatttactagttgttcattgaccaattcgtacaaggcattttgctcaaaactgtgcttatatttggacattgtatcttcatcataatcctgtggtaatgctgttatccgtaagtaacaggtaagaaacstgaagaggagggatagcaaatcatgtatttggacatatttcctttttttttttttggttt

SEQ ID NO: 450803 - DNA, 580 bp, Homo sapiens
cttgaggtcacacggggatgagttttcagcactgccaataaaagcaatcacatgaattattcagtaattattcataggatccatataattcagtaaatattcacataattatttactagttgttcattgaccaattcgtacaaggcattttgctcaaaactgtgcttatatttggacattgtatcttcatcataatcctgtggtaatgctgttatccgtaagtaacaggtaagaaacctgaagaggagggatagcaaatcatgtatttggacatatttcctttttttttttttggtttttgtgatgctggaagaatgaccagaatgagtcataggaagagtatacattcctgtagtattttscaggacagaggtgtgacctcctagagtactgggaccaaaattcccaagtgtctgcaaccttgctttaacagtatgggagatcacctctatcacctggaattcccctggaactctggaatatacaagagaagtatgagacttgggtcttcccttggctgtgtttaattcactcttctatggaataccaatgattctcactaagactggccttttcataa

SEQ ID NO: 450804 - DNA, 476 bp, Homo sapiens
ctggctaattttatatttttcatagagacaaggtcttgctatgttgctcaggctggttttgaacttctggcctcaagcgatcctcccacctaggcctccaaaagtgctgggattacagaagttagccactgaacctggccctgaaatgcttttatttctttcttttttttaatgaaaatactggacatggagatgtggaaagacaccttgctttattacttttgttgttattattatttctacagtagaatttatacawcacaaaattcaccatttttaagcatacatttcagtgtcttttaccatattccaaaactttcgcaaccatcgccactacctaattccagaatattttcataatgccaaaaagcatgcctgtacctatgggcagacactctccaattccccccttcttgcgctctctgacaaccactaatctaccttctctatatattgatgtacttgttctgggcact

SEQ ID NO: 450805 - DNA, 476 bp, Homo sapiens
ctggctaattttatatttttcatagagacaaggtcttgctatgttgctcaggctggttttgaacttctggcctcaagcgatcctcccacctaggcctccaaaagtgctgggattacagaagttagccactgaacctggccctgaaatgcttttatttctttcttttttttaatgaaaatactggacatggagatgtggaaagacaccttgctttattacttttgttgttattattatttctacagtagaatttatacatcacaaaattcaccatttttaagcatacatttcagtgtcttttaccatattccaaaactttcrcaaccatcgccactacctaattccagaatattttcataatgccaaaaagcatgcctgtacctatgggcagacactctccaattccccccttcttgcgctctctgacaaccactaatctaccttctctatatattgatgtacttgttctgggcact

SEQ ID NO: 450806 - DNA, 476 bp, Homo sapiens
ctggctaattttatatttttcatagagacaaggtcttgctatgttgctcaggctggttttgaacttctggcctcaagcgatcctcccacctaggcctccaaaagtgctgggattacagaagttagccactgaacctggccctgaaatgcttttatttctttcttttttttaatgaaaatactggacatggagatgtggaaagacaccttgctttattacttttgttgttattattatttctacagtagaatttatacatcacaaaattcaccatttttaagcatacatttcagtgtcttttaccatattccaaaactttcgcaaccatcgccactacctaattccagaatattttcataatgccaaaaagcatgcctgtacctatgggcagacactctccaattccccccytcttgcgctctctgacaaccactaatctaccttctctatatattgatgtacttgttctgggcact

SEQ ID NO: 450807 - DNA, 562 bp, Homo sapiens
tttcctgggttttagaggagggtggacattgtttattgatgcctcctgtccattaccgatgtttctcytgattgttattcatatgctcaccacccctccatggagcatccatggcctgtgacagagctctggggactgatatccttccactgactttggcgctggtgagagccctggtcatgtgattcagcttggccttaacccgacccagttgcacatattcctcaggccctttagagttgaagtcgagacctctctgagaacgcttgccagcccatgctcttctaaggctggagcaaacttcctccatctattccagacagaggggactgcaggggttggactcactcaagatatctctggtgttagaaagaagacctgtttcaggctttggggaagattgttcaatatgaactaggtcctctctaattatttttaccgtatgtgtgacttctttctagaaacaagggaagaatatttatgttagaacattttgtctattctttgtcaattgttgtttatctacaattttaacatggataaaggagagttcagtgtcaat

SEQ ID NO: 450808 - DNA, 628 bp, Homo sapiens
ctgaatgctctatgtgagtttgagaagagttatttgttagctgttcttagatgtattttgcttaaatatcgacctggctaacatgtgtcattgattgtgtgaattaattttgttctagtgggcagtaaaattactgtctgatcactttggacttatgtggactggtttatgttttattacaacggattcatggaaagcccacagcatttcccaagaccctctaatttggcaggactcaatcaccaatccacccctttgtgaatttgtcagggtttgcttttaggctttagcaggttggtctacaataggccttattgaaaagtgtgacacttattcctaaagcacatccattctagtgtctcagttggatacctgggtgctaatgaggtgtgcatcagttcttcccaccatggatggcagaaactccatcatacattccccaaccctcctccacctcaagtacctctggtccaaactcaatttcatagcagccacccytctgttaaatctgttagtcttttccttgtgcaggtagagtccactccttaataagtatgcacatggaaccccacatagactttgagagctgcacctttgatcagctgtctcctcactggtgccctgccct

SEQ ID NO: 450809 - DNA, 628 bp, Homo sapiens
ctgaatgctctatgtgagtttgagaagagttatttgttagctgttcttagatgtattttgcttaaatatcgacctggctaacatgtgtcattgattgtgtgaattaattttgttctagtgggcagtaaaattactgtctgatcactttggacttatgtggactggtttatgttttattacaacggattcatggaaagcccacagcatttcccaagaccctctaatttggcaggactcaatcaccaatccacccctttgtgaatttgtcagggtttgcttttaggctttagcaggttggtctacaataggccttattgaaaagtgtgacacttattcctaaagcacatccattctagtgtctcagttggatacctgggtgctaatgaggtgtgcatcagttcttcccaccatggatggcagaaactccatcatacattccccaaccctcctccacctcaagtacctctggtccaaactcaatttcatagcagccacccttctgttaaatctgttagtcttttccttgtgcaggtagagtccactccttrataagtatgcacatggaaccccacatagactttgagagctgcacctttgatcagctgtctcctcactggtgccctgccct

SEQ ID NO: 450810 - DNA, 606 bp, Homo sapiens
ttgtttatggaggcagggttagtctgatatgatttattctaacagacagaagcagaaatctgttatactcttttaattactgtgtctttataatattatggtagacagaatcctaagatgacccccagtgatctttgctcttatataatcacttcctcctgagtgtagacaaagctactgaggagatgtcactcctgtgattgtgttacaatttatggcaaaaacaagttaacagatgtaatcgagatcccaaatcggtcmaatttaagatagacagattatctgatgagcttgacctagtgaaggtgagttccttggagggactgaggacttcctggagagatgtgaagtgcaggagggtttccatgcagggcgatcctcctctgctggctggaggaagcatgcagtgggaacatgggaggcctctaggagcagcgagaggcccctggctgacagccagcaagaaaacagagatctcagtcctacagtcacaaggaactgaactcagctgacaacctgaggaaacttgagaggaagttcttccccagaacctccagaaagaaacccagcctaatttcagcctgtgaggccctgagaagaagaccc

SEQ ID NO: 450811 - DNA, 509 bp, Homo sapiens
tgacacacagaacaacatggatgaatctcaaaaacatttggagtgcgatagaagccatacccaaaaaagtgtgagaaaaaaagataaataataatggttccaagaaatgcacagcagacagcccagaggcaaagacccacaggacggcgggccggtcccaggctgtcgatcctaattaagaaacttctgctggattttgcccagctccatttccaaactattttgggtcagtgacttctttatcccttccatgttgcctcattttgaactagaatcactgtaagtgttattctatgtctgtcacatcattccacagtaggggcagataagctgtwtagaatggctaaaattcaaaaaggtgaacacaccaaatgctgtcaaagatgaggagcaaccagaactttccatcgctagtggaaatcaaaagggtacagtcactttggaaaacttaagttcactcaaaatcctgcacagaagtacttacagcaattttattcatcattgccaaa

SEQ ID NO: 450812 - DNA, 509 bp, Homo sapiens
tgacacacagaacaacatggatgaatctcaaaaacatttggagtgcgatagaagccatacccaaaaaagtgtgagaaaaaaagataaataataatggttccaagaaatgcacagcagacagcccagaggcaaagacccacaggacggcgggccggtcccaggctgtcgatcctaattaagaaacttctgctggattttgcccagctccatttccaaactattttgggtcagtgacttctttatcccttccatgttgcctcattttgaactagaatcactgtaagtgttattctatgtctgtcacatcattccacagtaggggcagataagctgtttagaatggctaaaattcaaaaaggtgaacacaccaaatgctgtcaaagatgaggagcaascagaactttccatcgctagtggaaatcaaaagggtacagtcactttggaaaacttaagttcactcaaaatcctgcacagaagtacttacagcaattttattcatcattgccaaa

SEQ ID NO: 450813 - DNA, 566 bp, Homo sapiens
acattgtttgtttttttgagacagagtcttgctctgtcgcccagtctggagtacagtggtgcgatcctggctgactgcaacctctgcctcccaggttcaagcaattctcctgcctcagcctccctagtagctgggattacaggtgctcaccaccacacctgactaatttttgyagttttagtagagacggggtttccccatgttggtcaggctggtcttgaactcctgacctcaggcgattcgcctgcctcggcctcccaaagtgctgggattacaggcgtgagccaccgtgcccagcctgttttaaggatacaaacttcacatgtgcttaaaatagtgcctgacacatctccccaaggaccttcagaaacaagaataacatgctccaccacagtctactaaacatcatcagcgatcacgtccctgagaggtaagcagcgcagtggtgaagaggttaactctgaaggcagaatgtctgggttcaaatcctggctcttctgctaactgtgtgacctggggcaagtgacatggcttctctgtgcctcagtttaccatccacaaaatgg

SEQ ID NO: 450814 - DNA, 566 bp, Homo sapiens
acattgtttgtttttttgagacagagtcttgctctgtcgcccagtctggagtacagtggtgcgatcctggctgactgcaacctctgcctcccaggttcaagcaattctcctgcctcagcctccctagtagctgggattacaggtgctcaccaccacacctgactaatttttgcagttttagtagagacggggtttccccatgttggtcaggctggtcttgaactcctgacctcaggcgattcgcctgcctsggcctcccaaagtgctgggattacaggcgtgagccaccgtgcccagcctgttttaaggatacaaacttcacatgtgcttaaaatagtgcctgacacatctccccaaggaccttcagaaacaagaataacatgctccaccacagtctactaaacatcatcagcgatcacgtccctgagaggtaagcagcgcagtggtgaagaggttaactctgaaggcagaatgtctgggttcaaatcctggctcttctgctaactgtgtgacctggggcaagtgacatggcttctctgtgcctcagtttaccatccacaaaatgg

SEQ ID NO: 450815 - DNA, 424 bp, Homo sapiens
ggtcttggtcttcttccacttcttggtacttttcaatttctgcaataagttcagacatggacagacatattaagctggttctcctacacacataacaatccactgtctaatcctcacacagggacttcaggctcctcagcatgagaataggacacggtgagagatcttcttcaggaggcctgaaggctgatcatgatagagattcctgggtttttgtcccagaaactgtgggtaaaattccctattctggtagatcgttatcccaakatcatttgtcccaagtttgtgcaaatggttatgccatatttttccaatcgatttaaagcaaatgcccccaaatggttgctgggagaaaaactgcaatattcagccctgtctcatcaaatactcagattcttcatggtagcgaggattttagatgctg

SEQ ID NO: 450816 - DNA, 617 bp, Homo sapiens
gtggaactagagtttcattcaacctacatgtgcctataggtcctccctgtggcaatgacatctctcagctcagtaagggccatttgcagtaggaatatgaccctaaccagaagactcagtggatccttatcaccttcatagaaaggtactcaccatccatgtcaagagcccagccaacacgctgttgctccaatatgtaaaaggcacttctgtagggctggcatgagtcagtcagttcaagataacctgaaggagttgaataacatctatccagtgagtcctgcaagacttcaggccctttctcatccagcagctccctgytgagcctggaacagtgggaaaaagtaaagaataagccaggggaaatcagaaaccacacagccccagctagatttcatggctaacataaggaagagtttgaaaagaaaaaggacagatccattaatgaggtaacaaattattgtctttatgttgggatagaacagggccaggtagaaaacaatgaaagagaaagacagagagacagagacagagacagagacagagagaaagtgagctagtgaattggccaggtgacatactggtaagggagtaaaaggacactctgagttagtgcc

SEQ ID NO: 450817 - DNA, 620 bp, Homo sapiens
agataacctgaaggagttgaataacatctatccagtgagtcctgcaagacttcaggccctttctcatccagcagctccctgttgagcctggaacagtgggaaaaagtaaagaataagccaggggaaatcagaaaccacacagccccagctagatttcatggctaacataaggaagagtttgaaaagaaaaaggacagatccattaatgaggtaacaaattattgtctttatgttgggatagaacagggccaggtagaaaacaatgaaagagaaagacagagagacagagacagagacagagacagagagaaagtgagctagtgaattggccaggtgacatactggtaagggagtaaaaggacactctgagttagtgccctcatgacacacagcaaactgcgatcatgaaaagagtgagctcaatagttttccataaaatatgctcaaaattcgatgcagtggccaygagagtacagcttttgaagtatggtcatcctatggtacgttagtaaatgataaggggaggaagaaatggaaacctaagcatctactgcaatgaaaaccaacagcaatgacagtaggagtaattcagccttcgttgaaaacatgaaatcaaacac

SEQ ID NO: 450818 - DNA, 579 bp, Homo sapiens
ggtcatcctatggtacgttagtaaatgataaggggaggaagaaatggaaacctaagcatctactgcaatgaaaaccaacagcaatgacagtaggagtaattcagccttcgttgaaaacatgaaatcaaacacactctggtttccctgaatctgttgcctccaggtgttaacacagaattaagcatccacaattgctgaaagttacctggggcatggtgggttttgatcttcttccccttcttttcttccccttctccttcttttcttcattgatcttcttccccttcttttcttccccttccccttcttttcaatttctgcaataaattcagacatggacagacacattaagctgattcccctacacacataacaatccactgtctaaycctcacacagggacctcaggctcctcagcataagaataggagactgtgagagatatatttcaggaggcctgaaggctggtcatgatagaaattcctcggtttttctcccagaaactgtgggtaaaatgtccctattctagtagatcgttatcccaatatcatttgtcccgagtttgtgcaaacagttatg

SEQ ID NO: 450819 - DNA, 569 bp, Homo sapiens
tacctggggcatggtgggttttgatcttcttccccttcttttcttccccttctccttcttttcttcattgatcttcttccccttcttttcttccccttccccttcttttcaatttctgcaataaattcagacatggacagacacattaagctgattcccctacacacataacaatccactgtctaaccctcacacagggacctcaggctcctcagcataagaataggasactgtgagagatatatttcaggaggcctgaaggctggtcatgatagaaattcctcggtttttctcccagaaactgtgggtaaaatgtccctattctagtagatcgttatcccaatatcatttgtcccgagtttgtgcaaacagttatgccatatttttccaatcaatttaaagcaaataccctcaaatgatttctaggagaaaaactgcaatatttagccctgtctcatcaaatactcagattgttcatggttgtgaggactttagacactgaaattagagtgaaaaaggaaatctacaaacccttgagtcaaaatcatagttctctgaatttgtcacat

SEQ ID NO: 450820 - DNA, 569 bp, Homo sapiens
tacctggggcatggtgggttttgatcttcttccccttcttttcttccccttctccttcttttcttcattgatcttcttccccttcttttcttccccttccccttcttttcaatttctgcaataaattcagacatggacagacacattaagctgattcccctacacacataacaatccactgtctaaccctcacacagggacctcaggctcctcagcataagaataggagactgtgagagatatatttcaggaggcctgaaggctggtcatgatagaaattcctcggtttttctcccagaaactgtgggtaaaatgtccctattctagtagatcgttatcccaatatcatttgtcccragtttgtgcaaacagttatgccatatttttccaatcaatttaaagcaaataccctcaaatgatttctaggagaaaaactgcaatatttagccctgtctcatcaaatactcagattgttcatggttgtgaggactttagacactgaaattagagtgaaaaaggaaatctacaaacccttgagtcaaaatcatagttctctgaatttgtcacat

SEQ ID NO: 450821 - DNA, 620 bp, Homo sapiens
gtgtgtaggggaatcagcttaatgtgtctgtccatgtctgaatttattgcagaaattgaaaagaaggggaaggggaagaaaagaaggggaagaagatcaaygaagaaaagaaggagaaggggaagaaaagaaggggaagaagatcaaaacccaccatgccccaggtaactttcagcaattgtggatgcttaattctgtgttaacacctggaggcaacagattcagggaaaccagagtgtgtttgatttcatgttttcaacgaaggctgaattactcctactgtcattgctgttggttttcattgcagtagatgtttaggtttccatttcttcctccccttatcatttactaacgtaccataggatgaccatacttcaaaagctgtactctcatggccactgcatcgaattttgagcatattttatggaaaactattgagctcactcttttcatgatcgcagtgtgctgtgtgtcatgagggcactaactcagagtgtccttttactcccttaccagtatgtcacctggccaattcactagctcactttctctctgtctctgtctctgtctctgtctctctgtctttctctttcattgttttctacctggcccttttctat

SEQ ID NO: 450822 - DNA, 620 bp, Homo sapiens
gtgtgtaggggaatcagcttaatgtgtctgtccatgtctgaatttattgcagaaattgaaaagaaggggaaggggaagaaaagaaggggaagaagatcaatgaagaaaagaaggagaaggggaagaaaagaaggggaagaagatcaaaacccaccatgccccaggtaactttcagcaattgtggatgcttaattctgtgttaacacctggaggcaacagattcagggaaaccagagtgtgtttgatttcatgttttcaacgaaggctgaattactcctactgtcattgctgttggttttcattgcagkagatgtttaggtttccatttcttcctccccttatcatttactaacgtaccataggatgaccatacttcaaaagctgtactctcatggccactgcatcgaattttgagcatattttatggaaaactattgagctcactcttttcatgatcgcagtgtgctgtgtgtcatgagggcactaactcagagtgtccttttactcccttaccagtatgtcacctggccaattcactagctcactttctctctgtctctgtctctgtctctgtctctctgtctttctctttcattgttttctacctggcccttttctat

SEQ ID NO: 450823 - DNA, 620 bp, Homo sapiens
gtgtgtaggggaatcagcttaatgtgtctgtccatgtctgaatttattgcagaaattgaaaagaaggggaaggggaagaaaagaaggggaagaagatcaatgaagaaaagaaggagaaggggaagaaaagaaggggaagaagatcaaaacccaccatgccccaggtaactttcagcaattgtggatgcttaattctgtgttaacacctggaggcaacagattcagggaaaccagagtgtgtttgatttcatgttttcaacgaaggctgaattactcctactgtcattgctgttggttttcattgcagtagatgtttaggtttccatttcttcctccccttatcatttactaacgtaccataggatgaccatacttcaaaagctgtactctcrtggccactgcatcgaattttgagcatattttatggaaaactattgagctcactcttttcatgatcgcagtgtgctgtgtgtcatgagggcactaactcagagtgtccttttactcccttaccagtatgtcacctggccaattcactagctcactttctctctgtctctgtctctgtctctgtctctctgtctttctctttcattgttttctacctggcccttttctat

SEQ ID NO: 450824 - DNA, 620 bp, Homo sapiens
gtgtgtaggggaatcagcttaatgtgtctgtccatgtctgaatttattgcagaaattgaaaagaaggggaaggggaagaaaagaaggggaagaagatcaatgaagaaaagaaggagaaggggaagaaaagaaggggaagaagatcaaaacccaccatgccccaggtaactttcagcaattgtggatgcttaattctgtgttaacacctggaggcaacagattcagggaaaccagagtgtgtttgatttcatgttttcaacgaaggctgaattactcctactgtcattgctgttggttttcattgcagtagatgtttaggtttccatttcttcctccccttatcatttactaacgtaccataggatgaccatacttcaaaagctgtactctcatggccactgcatcgaattttgagcatattttatggaaaactattgagctcactcttttcatgatcgcagtktgctgtgtgtcatgagggcactaactcagagtgtccttttactcccttaccagtatgtcacctggccaattcactagctcactttctctctgtctctgtctctgtctctgtctctctgtctttctctttcattgttttctacctggcccttttctat

SEQ ID NO: 450825 - DNA, 555 bp, Homo sapiens
gttgtcattgatggtggtgacatggacttgtttatagaggacaggtcagctgtctggctcaatgatctacattctgaagttgtctgaaaatgtcttcatgattaaattcagcctaaacgttttgccgggaacactgcagagacaatgctgtgagtttccaaccttagcccatctgcgggcagagaaggtctagtttgtccatcagcattatcatgatatcaggactggttacttggttaaggaggggtctaggagatctgtcccttttagagacaccttacttataatgaagtatttgggagggtggttttcaaaaktagaaatgtcctgtattccgatgatcatcctgtaaacattttatcatttattaatcatccctgcctgtgtctattattatattcatatctctacgctggaaactttctgcctcaatgtttactgtgcctttgtttttgctagtgtgtgttgttgaaaaaaaaaacattctctgcctgagttttaatttttgtccaaagttattttaatctatacaattaaaagcttttgcctatcact

SEQ ID NO: 450826 - DNA, 555 bp, Homo sapiens
gttgtcattgatggtggtgacatggacttgtttatagaggacaggtcagctgtctggctcaatgatctacattctgaagttgtctgaaaatgtcttcatgattaaattcagcctaaacgttttgccgggaacactgcagagacaatgctgtgagtttccaaccttagcccatctgcgggcagagaaggtctagtttgtccatcagcattatcatgatatcaggactggttacttggttaaggaggggtctaggagatctgtcccttttagagacaccttacttataatgaagtatttgggagggtggttttcaaaagtagaaatgtcctgtattccgatgatcatcctgtaaacattttatcatttattaatcatccctgcctgtgtctattattatattcatatctctacgctggaaactttctgcctcaatgtttactgtgcctttgtttttgctagtrtgtgttgttgaaaaaaaaaacattctctgcctgagttttaatttttgtccaaagttattttaatctatacaattaaaagcttttgcctatcact

SEQ ID NO: 450827 - DNA, 587 bp, Homo sapiens
tgaattaataaaaacatttccatttccctgtttattttctaatctcttccaccttgtaggctatgtttaccatatgtagcagaatgcatttactccatttcttggttctagatatttatattctttgtgagwgtgtgtgtgtgtgtgtctgtgtgtgcctctggcatttaggaagggttgtgtagctcatgtttgatattgattaaaaatgtttcatagttttcccccctttgaactagacacacttctaatatttggtttatacattttaaattatgactttcagcgtcaaatatttccatatgacagtcagttacatgatgtgttttctttttcctacctcctttacctgccacttctcataatggtatttgaacctaaacatatgccagtgacattctgtggttgtcatcttgcccacaccttggtttttggtttagatccacaattaaatatattaatgctcatgagctgttcaaaagtgaatgtcacagtcatcacttgctgagtggtactcatccttaacagagtcctcatgagggaatcaggtctcgctgagtttagcatgtttaataatcttcctcgtg

SEQ ID NO: 450828 - DNA, 563 bp, Homo sapiens
tccctgtttattttctaatctcttccaccttgtaggctatgtttaccatatgtagcagaatgcatttactccatttcttggttctagatatttatattctttgtgagagtgtgtgtgtgtgtgtctgtgtgtgcctctggcatttaggaagggttgtgtagctcatgtttgatattgattaaaaatgtttcatagttttcccccctttgaactagacacacttctaatatttggtttatacattttaaattatgactttcarcgtcaaatatttccatatgacagtcagttacatgatgtgttttctttttcctacctcctttacctgccacttctcataatggtatttgaacctaaacatatgccagtgacattctgtggttgtcatcttgcccacaccttggtttttggtttagatccacaattaaatatattaatgctcatgagctgttcaaaagtgaatgtcacagtcatcacttgctgagtggtactcatccttaacagagtcctcatgagggaatcaggtctcgctgagtttagcatgtttaataatcttcctcgtg

SEQ ID NO: 450829 - DNA, 563 bp, Homo sapiens
tccctgtttattttctaatctcttccaccttgtaggctatgtttaccatatgtagcagaatgcatttactccatttcttggttctagatatttatattctttgtgagagtgtgtgtgtgtgtgtctgtgtgtgcctctggcatttaggaagggttgtgtagctcatgtttgatattgattaaaaatgtttcatagttttcccccctttgaactagacacacttctaatatttggtttatacattttaaattatgactttcagcgtcaaatatttccatatgacagtcagttacatgatgtgttttctttttcctacctcctttacctgccacttctcataatggtatttgaacctaaacatatgccagtgamattctgtggttgtcatcttgcccacaccttggtttttggtttagatccacaattaaatatattaatgctcatgagctgttcaaaagtgaatgtcacagtcatcacttgctgagtggtactcatccttaacagagtcctcatgagggaatcaggtctcgctgagtttagcatgtttaataatcttcctcgtg

SEQ ID NO: 450830 - DNA, 525 bp, Homo sapiens
tgtggttgtcatcttgcccacmccttggtttttggtttagatccacaattaaatatattaatgctcatgagctgttcaaaagtgaatgtcacagtcatcacttgctgagtggtactcatccttaacagagtcctcatgagggaatcaggtctcgctgagtttagcatgtttaataatcttcctcgtggtcttgatacatggatcgcattactggatataaggtgtttgcccaaaatgatttttcttgcatttttaggagctattgtcttccttgcgggacatacatgctgtatgttctcattgtgggattctattttgttctaccaggacctataatttctgccagttacttcatttgttctcttcaccatgagtctccagaggatgcttcctttgtccatgcctccccatctcccagcaattctgcgtttccaagactggcacctctggtcctctgcatggtgaagccccttcctttcaattccccagtagccagtgctctaatccaccaggtctcaggcatga

SEQ ID NO: 450831 - DNA, 522 bp, Homo sapiens
ctaaaaaacagcaagtgtccccccaaaacaaaagcaatcttgaaatgcaagaaggaacgttctctattccaaaggtctttaactgctctcagtaatacgtggtaatcttcaatatataggctttcacacctttttttttttcttcttttgtttctagacacgatctcactctttcactcaggctggagtacagtggcaagatcacacagctcactgcagcatggaattctcaggccgatgacatcctagggcctcatccactgagtacctgggactacaggctcacaccaccacagccggataatttttctgattttcagtagagatgaggtctcactatgttgcctaagctagtttcaagcttctgagctcaagcgaccctcctgccacrgccttcctaagcgctaggatttgaagctgagcctggctggctttcacatctttgctatgtagtttatatttcttggtgttattgtaaatgtttatgaaaggaatcttttaaaaattttgtattaaaattat

SEQ ID NO: 450832 - DNA, 591 bp, Homo sapiens
aacaaatattttatataaattcttttttattcttgaaaaaattatcaytgaaaaaatttttcattttcatccaaattttatgatgtgatagagagctaaagaataaactaaagagaactaaagggatttattttaaagagtttgttgaaagaaacaagctaatacttgggaaacactgtcatataacacatgcctagctacaaattctgctataagtggatgactcaggaagttacagatggcgcacacactgatactgcacacaacattccaaaaggacttgctaattcagcttcccagcagtcctaatagactcactgtggagacggctttcagttgatacgtctgggatttaccctacagagcaactgctgatagaacaggttgctatgtgattgtgttctgttgtgtccaaatgtaactactaagggtactgaatatcctgctttccttttttcttcttgtatggcaagcagcaaatattgcttctcatcgtgttcatgtgaccaaatttattttctttttagatagtgtttactgaggaataaattgcatgcagtgaaattcacccttttaagtgtatagtttgaa

SEQ ID NO: 450833 - DNA, 591 bp, Homo sapiens
aacaaatattttatataaattcttttttattcttgaaaaaattatcactgaaaaaatttttcattttcatccaaattttatgatgtgatagagagctaaagaataaactaaagagaactaaagggatttattttaaagagtttgttgaaagaaacaagctaatacttgggaaacactgtcatataacacatgcctagctacaaattctgctataagtggatgactcaggaagttacagatggcgcacacactgatactgcacacaacattccaaaaggacttgctaattcagcttcccagcagtcctaatagactcactgtggagayggctttcagttgatacgtctgggatttaccctacagagcaactgctgatagaacaggttgctatgtgattgtgttctgttgtgtccaaatgtaactactaagggtactgaatatcctgctttccttttttcttcttgtatggcaagcagcaaatattgcttctcatcgtgttcatgtgaccaaatttattttctttttagatagtgtttactgaggaataaattgcatgcagtgaaattcacccttttaagtgtatagtttgaa

SEQ ID NO: 450834 - DNA, 520 bp, Homo sapiens
caactctgggacactctctgcacctctgaaaagaaactcccagcccttcttgtgcctctcccttcctctgggcaccccttgttccttatccatcctggctggcctgtggcctgtacttctgatctgcacacaggtatcacagaggacagagaccccagggccccagcccctggtgggggcggggagtgcaagggggcagtcgtctttgttctcgaccagctcccagctccctaggtaatgctttaagagttaccgtgctaggggatctttgtggctgaaaacattcagatgaaccagatatttaaaagcatccctcatgcaaagtccctccactggttgggccggcctggggagggtcaaggctgggtctctagtctggttttccgggggcgtctgtgtgcactccttccccagaaccttgcgcttgtccatcccagggagaaatcaggtggggagcggcctcactgctggctccttgatrgtgacttgctccagaggtccgtgctgataccccagaccc

SEQ ID NO: 450835 - DNA, 561 bp, Homo sapiens
gattactatagctttatactcaaatactacactgtctgattactacagctttatactcaaataccacactatcttgattactacagctttatactcaaatactacactgtctgattactacagctttatactcaaataccacaccgtcttgattaccacagctttatactcaaatactacactgtcttgattactacagctttatactcaaataccacaccgtcttgattaccacagctgtatactcaaatactacaccgtcttgattaccacagctttatactcaaatactacaccgtcttgattaccacagctttatactcaaataccacactgtcttgattactatagctttatactcaaatactacactgtctgattactacagctttatactcaaataccacactgtcttgattaccacagctttatactcaaatactacactgtctgattactayagctttatactcaaataccacactgtcttgattactacagctttatactcaaatactacactgtcttgattaacacagctttatactcaaatactacact

SEQ ID NO: 450836 - DNA, 502 bp, Homo sapiens
gtccaacaaagataagcagttttattccattttaatactcctggatattaaatacwccttcatatgtttggggaatacagcaattccagcatttctaaaatgattgcctcattccttctaacagatatcaaaaagtactactgttagaaatgtgaaattatatcattcacatctgacaggcctgggacaaggtatatcatctatcccatccccctaaaagtatatcagttttctattgctgctgttacaaattaccagaaacttagtggcttccaacaacacacagttattatcttactgtaagttctgtaggtcagacatttgaaatgggtttcactgggaaaaatcatggagttgacagcattgtgtttttctctggatctaggggaaaatctattgcctttccttttccagcttttagacgctgtctgcattccttggctcctgacttgttcctgcatcatcatctttttcatgagtcacaccttcctctgacttttat

SEQ ID NO: 450837 - DNA, 606 bp, Homo sapiens
ctaggcatcctgcaccaccatcatgacaaactcctacagcctaggctactgaggcaataacagacatcactaattcggattacaactgaaaaagcacagggatcacactaatgaatctactcagaaaaaaaagccaacgtcccatacccaaacaacaccctagggagtcatctacaggcaaaagtctctctctataaaagttactctataaaattagaaaaagctactattccactagatgtgcagagatcaatgtagggacataaagacatgaagcaagaaaacatgacaccccgaaatgaatacaattagtctctagtgacaraccccaaaggaaaggacatatataaaatgcctgaaaggatcaattcaacaagaggatataacaattgtaaatacatatgtgcccaacaatgaagcacccaaatatataaagcaaataatattattagacataaagggagagacagatgcaaaacaataaaagtagggcacttcaacacccctctttcaacaatgggctgatcatctagataaaaaaattaacacaaacagcagacttaaactgcaccacagaccaaatggccctaacaaacatttacaaaa

SEQ ID NO: 450838 - DNA, 588 bp, Homo sapiens
gtcatacctaaaaagcctgggaacatgataatctagttgaaaagcataaagactggaatcagatacacctgggtttaatctgccattcacaggctatgtaactctagasgagttgcttagcctctgagactcatttcctgatttgtaaattgggatgttacaggattttattggattgaagtaaaatattccgagcctagtgcctattacatagtaggcttgaaatagttgttcacctgccctctcagcactcccagaaaacattcttctgttatagagtatgagtgagggagctgaatgtaaaagtagagagttgatataaactcttggacactctggttcagtgtgttatgttcccttaaactcttaattatgtctttccctttagagctttaactttgttgtatatatataaaaaaaaactctgttgcattgcattcatattttgtgacttattttgactgctattaacctgtcaagtatttgttcttctttaaatttatattttaaagggtatgttacattctttctcatgattttatcagagcttgaaagcaaaatcttattttgaagaagacattgtcaatg

SEQ ID NO: 450839 - DNA, 555 bp, Homo sapiens
ggcagaagcatgaagttattatttatatgataaaggttaacattgagagagataagactttttacttctcagcacagtggctctctatggcgcctatagcaacaaataaactaatattacagaaagttacctctggtggggcctacaaccagggcttcaagatcctctctctgagaagagtccttttgtaattaaactgttgtttcccaatattgcctgttattaaaatcactacattgctgttgaatagaacattccaagatgatggaaacacattataatctgtgctatctagtatagtacccactagccacatgtggctattgagcacttgaaatgtgactaatgccacagagaaatataatttaattttaattaacttaaatttaaatagccacaagtagttaatgactactactatattagacagtgcagaacgtttgccaaaaatycacatccctgggccctatatatatagatctaatgacccgtagaatcagaataattagtgcagtgtcatttcaatctgcattattaacattaagttagtcaatg

SEQ ID NO: 450840 - DNA, 419 bp, Homo sapiens
cccgggggccatggtttgctgaacttctgttctaaaagatgaagcaaatataattggagtcattatccacaaaagtctatgtctttataaagatgcacatcaayataaatacaaaaaccaatagatgtatttttcatgtgttttcaaagacatatttttctctaaaatatttaaaattaactagtaaactgaaccacttatcagtaattacctatctaattatcagtaattccatttttttcaagaaaactttgctcacttttttttttttgagccctcaccaaaatctcctttaatatccatgtttctaccaagtcctttcaaggcactctaggttttctcccgtcattcacctagaaactcttccaacctctacaaattacccaattcaaagccacttccatattttaggcatttgt

SEQ ID NO: 450841 - DNA, 562 bp, Homo sapiens
ttaacatgtttaagggtcactgtcatgactttggggacaaaatcaatggccatgcttttgggattaatccatcaagaataatttaccttcacatttgaggcataaaaattttttttttcttcattggaagacctagaaacctttagaccttcaaaggtawgtcccttagactgaggagtgagaggggaattaggaatcttctgttttaggaatcaggttttaagtgtgtaatttgaaagaccaataatatgggctaaggtgaatgaggataaactgttcttattgcttgtaacagttaggtatgcatgttgagctctttaaggacctagatttaattcctaattatatacttaagggagtttagagccaaagtaattctgagtttaaacaaaagcaaactgctttggtggggcatgaaacccggcttgtcacaaaggcttacagaataaagatttcctgggaagtgacttaataggtactaatccttgattgaacctcagcccagtaaatcaagcatctcgtcactctttgactgctaaaccaagggcggtttaaaacaata

SEQ ID NO: 450842 - DNA, 522 bp, Homo sapiens
tgtgactaatcctggtaactactaagcaacttgaataaacagagacaggaagaaggaagaaagaaagacaagcttatggggtacatatcctgagcctgagaatctacctatttagttcaccagcactcactgttttccaagagatgatctgatcagaaaggattacatttactcaagtttcaggaaaatgcttactcatttcttgtccacacatctcagatattatcttaaaagaaataattggtgaaatagactctagaacaacgtaaggggacatttgtccatagtgattaggctttactacactttgagcaagcagaagcactgactacttttgcgctgggtgatctttttaaaagtatgtggatagcyggaggagccaagacggctgaataggaacagctctggtctacagcccccagcgtgagcgacgcagaagatgggtgatttctgcatttccatctgaggtaccgggttcatctcactagggagcgccagacagtgggtgcaggtcagtgggtg

SEQ ID NO: 450843 - DNA, 610 bp, Homo sapiens
gctgtagttataatttctttcagttattagtgatttcttttcaatcatgtttttttttctattgccccccacacctccccaactggcttctatccccaaattgtgggaaaaaaaaggcataggaaaacttctaaatacatcttaatagtaaaaactaaaatagtttcacagggatactacattactactaaatttgttagatttcattgttttggtttctgcctttaatgtctcttttaaaaatttccattatttctgaaaagcagagagggtaagacctgggtttttctcaacattcaagcctaatttttttcaaaagggaacaatgacaaattacaatctgtccatctgtagaagattatggactctcaaatttgaagtggaaattgtagctcagatgatcaggtattatatatatactttatagtaatttcattctacataaggaatgaaggggacaggggttgaggtagatgagaaaaggaaaaaagcggggaggasggaaaaaagaccatttagcaacctatcagagcttgatgaagcctgatataattaacaaacttgtgatatctctagcaattgtaattccaattatttgctagctaaaggc

SEQ ID NO: 450844 - DNA, 609 bp, Homo sapiens
aggagaaggaagagttaaagaggacctcaaggcttttagctatgactagaagtaatggtacaactgagataaaattatgtgatgagttctgatttatacatggaattgaaccataagtaggacaatattttataagtattttggagagtcattagcacagaactgattgaagcaggacatttagaccaccactattttgatatagatgtcaaaatagcattttcttgaatacaaaagccatgaaagttaatgtggtgaagactgccagactccatttacctttccttccatggaaatagacctgtagcctgacatatatatggctggtgtggtaaacagaataatggccccccaatgatgcccccatcctaatctccagaatttgtgaatatgtaggctccatggcaagaggagattarggctgcaaatggaattaaggttgttaatcagttgactttaaaacaggaaaattatcttggattgtctgggtgagcccagtgtaatcagaatgtcctgtaaaatggaagagggcagcagaagaggtcagtcagagacatttgaaaatgctatgctgccagctttgaagatagaggaagaggccataagtca

SEQ ID NO: 450845 - DNA, 506 bp, Homo sapiens
agtcaatacagaaagttttacaataaagaggatgaagccaagccaatgcacaaccaagatagtagtagcctttggtttaaatgaaattgtgttcatggtcctgcaagtgctttggaatggatgtgatatcatttgtctgtgtccccatccaaatctcatcttgaattgtagctcccacaattcccatgtgttgtaggagggacctggtgggagataattgaatcatgggggcagtttcccccatactgttcttgtggtagtgaataagtctcatgggatctgatggttttataaggccctttctcttggtcttcattttctctcgtctgctgccgtgtaagacgtgcytttcgccttccaccatgactgtgaggcctccccagccatggggaaccgtgagtccgttaaatctctttttctttgtaaatcacccagtctccagtatgtctttatcagcaggatgagaacagactaataatacaggaagtagctatgaaatgcaagac

SEQ ID NO: 450846 - DNA, 589 bp, Homo sapiens
ttggtatcttcttaaagatacccagccttcattcagttcatcatccttcaacaaatctttgggatagaggatgaaagacaaaaaagcaagagctccaattctgctaagtaagaaactcatacrgttcagctggccctttatttataaaatagtagaggtgtatctaagctctaaatatcagctccttgagtaaaatcttgaaaattccaaggatgatgtgaaatctactcattccacaaagtctgtaatttctacctctccttccacccattaacccatggatttatctacacaataaactttgtacaacatctactacatgcttaacagagatttactcccagaaaagttctgtgtaaaggaattcttcataaacgcattttatccttaggcagcctgaagcttctgcatttgaacttggaaaaggaaagggagtgaggaagtttaggattattacagaagcaatgcgaagaaagaaagagttaatattcggctttgggaattcaaaagaggattgtacagtgagacaatatacttgagagccaagagaaaggattgtctaaattcctctggtagctaccatttattc

SEQ ID NO: 450847 - DNA, 589 bp, Homo sapiens
ttggtatcttcttaaagatacccagccttcattcagttcatcatccttcaacaaatctttgggatagaggatgaaagacaaaaaagcaagagctccaattctgctaagtaagaaactcatacggttcagctggccctttatttataaaatagtagaggtgtatctaagctctaaatatcagctccttgagtaaaatcttgaaaattccaaggatgatgtgaaatctactcattccacaaagtctgtaatttctacctctccttccwcccattaacccatggatttatctacacaataaactttgtacaacatctactacatgcttaacagagatttactcccagaaaagttctgtgtaaaggaattcttcataaacgcattttatccttaggcagcctgaagcttctgcatttgaacttggaaaaggaaagggagtgaggaagtttaggattattacagaagcaatgcgaagaaagaaagagttaatattcggctttgggaattcaaaagaggattgtacagtgagacaatatacttgagagccaagagaaaggattgtctaaattcctctggtagctaccatttattc

SEQ ID NO: 450848 - DNA, 558 bp, Homo sapiens
tggtagaattgctctggggagtattagcaagcaggaagaggaagggaacatcgactattgatggtttctcagacggagagaaagccttaagctcattggctggcaaggagggtagaaacctcagatcttttgcagttcttcacaaygctgtcttgtcacccatgtgttcctagcaccaaatacagtgcatggcatacactgaagcaatcaataaagattgaataagacaataaatgttttatccatttcaatacagattgaataagataatgaatgttttattcattattactcccctaaatcctccaggcggagttagccacaacctgtttagggtccccagggcaaataaacacccttctctccaacatttcatcacattctactctatagattgatttatttacatcttctgctagattatgagttcttcaagaacatgcacatccagtccacagtagggactcaggaagtgttcataaaataggttaaaaaaattccatttacatgcacacttctactacaggaatcttcatcattctgattgtcaaagccaaa

SEQ ID NO: 450849 - DNA, 558 bp, Homo sapiens
tggtagaattgctctggggagtattagcaagcaggaagaggaagggaacatcgactattgatggtttctcagacggagagaaagccttaagctcattggctggcaaggagggtagaaacctcagatcttttgcagttcttcacaatgctgtcttgtcacccatgtgttcctagcaccaaatacagtgcatggcatacactgaagcaatcaataaagattgaataagacaataaatgttttatccatttcaatacagattgaataagataatgaatgttttattcattattactcccctaaatcctccaggcggagttagccacaacctgtttagggtccccagggcaaataaacacccttctctccaacatttcatcacattctactctatagattkatttatttacatcttctgctagattatgagttcttcaagaacatgcacatccagtccacagtagggactcaggaagtgttcataaaataggttaaaaaaattccatttacatgcacacttctactacaggaatcttcatcattctgattgtcaaagccaaa

SEQ ID NO: 450850 - DNA, 542 bp, Homo sapiens
acccttctctccaacatttcatcacattctactctatagattgatttatttacatcttctgctagattatgagttcttcaagaacatgcacatccagtccacagtagggactcaggaagtgttcataaaataggttaaaaaaattccatttacatgcacacttctactacaggaatcttcatcattctgattgtcaaagccaaatgacaaggagagaagcacaaatatcctttgagacaatgccactgacgatccatctaacagcagagaaatctcattcaaatacattttcattgtgtgaatgcactcactgttaatkttggccttttgtaaaggtctcagctttaaatgtttataataaataagtagggaggcttgagagatggtaacagcttaaagcacaacacgaacacccaaaacgcctcagtattaaacacttcctggagagatgacctgctgaatgttctattttgcccttcccttcttccacttaggtagaattatccctaattgtacaaaaaggctgtgtgatgctggttttt

SEQ ID NO: 450851 - DNA, 563 bp, Homo sapiens
acagcacttgcttcaaattttgtgtgagtttgaacaaaccactatcagattaatgccattttattgggtacacataaaataagttcccaagagcactgcgtttgaattagagggaggaaattgttggagggcacaatctgtagatggagaggcataatggaaaaacactaaggaacaatccaatacatcttgcctcattctctcttgtctccaagggaatgactgatrtagaaagaaacatcctaaatctttctttttttcttcctggaacgaggcacatgagaatttaggggaaaagggcctctggcattcttactggtaacatttcctttgcattatgtttggataatgtataatcattgtagaagcaaagactgtggtttactcatatctctcataattgccaaacaaggcattaaatattcagagttagcaataaaagtaatttaattagtaaatgtatgaaccagcctacctgtccccaagtaaacagagcaaccatataactagcagtttttgagaataaatttgcaggccaggagaataaaattaatttagaatgt

SEQ ID NO: 450852 - DNA, 613 bp, Homo sapiens
aagtgaataaataaatgaaggactaggcaccaagataatgatctcttttgaagaaagagagtgagaacaaacttaggatgggacacagggctccagcatggccacagactaatttcttagcctgagtagtaaatgtaagaattcaaccttctgataacttattatatcacacatggtcctatgtggtttccttaatgtgtgttttatttaacgaagcaaatgttttaaattggaaaataaaaaataataatgtgcataaaattaaagacttaaggtttaagctatcaaagagcattagttgttttttttaagtgtgtacttatatctatgatatccattaatccctaaattagggtgtctgcttgggggccaatacacattcttattttttgttttgtttgtatcccactttctttcaacgatgaggctcacccaaaaatgccctttcaggtgagagggaagcctctggggaaaaggaactggcttacattcaacsttctggtccccaatttctccatctttgtgataaaggattcccaaaaattcaaccatgagccacttcaggaagctggttagggagcacatgttatacctgtcctagtctgctcaccac

SEQ ID NO: 450853 - DNA, 621 bp, Homo sapiens
tttaaaaaaattgtcattattatttcatttactgtcaggaggaagcaggaagagcaattaggttagatgaactgtgagtacattcagctaggtaatgaagttgggataggattccaagtttaatttgcttttgtcctgaaatggttcaaaggcaccctcagactggatgttgcagtagactctgatatttcatctagactcaagcctcacaraggacttacatgtgtatccaaatagttttcattgttattatatttagaaaaacagtctgcttaaaggctgtaaaatgctacttcccaccaggatgcccttctgcatctatgactgacttacatgaaagtgcaggaaaaatgcaactgaatggttactaaccaacccaatatcagagaaggggcagtttcctttaccaatgggtaaatctgctcgagttctttctttttctgagaaattcaggaggattcattagtaaatgatttttaaattcatgtaatttgaaagaataataatctctgaagaattttgtagcagttggttaatattcagaaagaacatttcgctcctgagaagaaaggattcacacagatataataatatagcataatgaacctcattgacaaagag

SEQ ID NO: 450854 - DNA, 565 bp, Homo sapiens
ccacatcctggatctgttatcgaaagcatcttccagtcctttctgtgagagctcagtagcatttatagatacaaatctgaagagggtttgggctctatcaaattgtgcagcacccgggatttcatgttcattcaggagggcatacttggcctctaccaactttcccaccacccttctcagcacctaattatgtctacccagctaagcccgagctcatttctctcccttcatctgcctatctatctccagatttggggccagttgcttttcctgtgacttcagatcttggatgaattcagaaacacatggggatttttaattcgtcccacttttcttcagtgtaagaatgggaatcacactttgtaactttctacatccctaagtggaaaccaaaatcttacagacactttgcaaataagttcatcaagggtaaagaataactatagctcccatccccaaaacytgtgatgctacacagccctgcatttacatgtatattggaaataaacaattatagctcagagattgtaaatacaaaaaaaggataatttgagcccacttgtat

SEQ ID NO: 450855 - DNA, 472 bp, Homo sapiens
aatgttttgaaggctaatgaggacatacttattcaacatcatcctctattttattttcacactaaaataggaagctttggttccctggtggtttcataattagacattatcatggccgtgttttgagattgatttctggtcagggaatggaaaatttttagttcctaatataaaaatatttgactgtctccctaaaaatatccattgcatcaaagggaccattattcatacaaagcacttaaaacttgaacaactgaatttgtgaattaattggtagttaattcattaagcaaatactgatttagctcctaactgggttaaaaaaaacaaaagtacaagacacagaaaaaaagactatatgtgaagmcttataaggccctctttttcagagcctcaaaatctaaataagaagatatattaccataaaagacagtattgaaccaagatgaggccaaattaatcctttggaaaa

SEQ ID NO: 450856 - DNA, 501 bp, Homo sapiens
cactggacttgaagatttttgtattactctccaggccaaaccacaatcctgacaagagcagactgcattatcatcacattcactcacataactgagcaaggctaggacaaaaatgtacatatctcgctttaacttcatgatcaattctttccagtgggttcttytttaatattttattttaagttccgggatacatgtgcaggacgtgcaggtttgttacctaggtgaacgtgtgccatggtggtttgctgcacctatcaacccatcacctaggtattaagtcccatttgcattagctatttatcctgatgctctccttcgtgggttcttaatatttctagcaatcacccacagtccaatccagcttctcctccattcttctagttgactaatgcataactttctttttccccaacctccaacacatcttttttcaatcttcaccttcacttaatgagtttcttcctattttactgacataaaataaaatcaaattagaag

SEQ ID NO: 450857 - DNA, 501 bp, Homo sapiens
cactggacttgaagatttttgtattactctccaggccaaaccacaatcctgacaagagcagactgcattatcatcacattcactcacataactgagcaaggctaggacaaaaatgtacatatctcgctttaacttcatgatcaattctttccagtgggttcttctttaatattttattttaagttccgggatacatgtgcaggacgtgcaggtttgttacctaggtgaacgtgtgccatggtggtttgctgcacctatcaacccatcacctaggtattaagtcccatktgcattagctatttatcctgatgctctccttcgtgggttcttaatatttctagcaatcacccacagtccaatccagcttctcctccattcttctagttgactaatgcataactttctttttccccaacctccaacacatcttttttcaatcttcaccttcacttaatgagtttcttcctattttactgacataaaataaaatcaaattagaag

SEQ ID NO: 450858 - DNA, 501 bp, Homo sapiens
cactggacttgaagatttttgtattactctccaggccaaaccacaatcctgacaagagcagactgcattatcatcacattcactcacataactgagcaaggctaggacaaaaatgtacatatctcgctttaacttcatgatcaattctttccagtgggttcttctttaatattttattttaagttccgggatacatgtgcaggacgtgcaggtttgttacctaggtgaacgtgtgccatggtggtttgctgcacctatcaacccatcacctaggtattaagtcccatttgcattagctatttatcctgatgctctccttcgtggkttcttaatatttctagcaatcacccacagtccaatccagcttctcctccattcttctagttgactaatgcataactttctttttccccaacctccaacacatcttttttcaatcttcaccttcacttaatgagtttcttcctattttactgacataaaataaaatcaaattagaag

SEQ ID NO: 450859 - DNA, 568 bp, Homo sapiens
caaagtaattcaaatgcttaataaaatgccactcaaaatcttgagtcatctcaaaaattccctctaaatacacactagtagacgctgcmgacactccaaagcctatagatttgtcagtatcaggttatttttctcctataggcaatttgacttctccaaatttatattcaacagcaataaagaaatagatgttgaattctactattttctagtcctgttctaggttctagggatacagaaatgaacaaaatacgtctcatgtatgcgctaaaagagctgacataagttgaaaacttttttgacctagtgctgtttacttctgacaattttcatatataacaggattgaaatctctcaggaaatttcttctgtggaagtgattcaccataactcactctgtggtactcattggttgaaattataatggatatgaagctggttaatatggtttctgccaatcattccacatccccaggttcatgcaaacctcaggcaagcctatggtctgggaaatagtttttcattagaggtagaccaatgttaaaaccattcaagagaaaagaaagtg

SEQ ID NO: 450860 - DNA, 568 bp, Homo sapiens
caaagtaattcaaatgcttaataaaatgccactcaaaatcttgagtcatctcaaaaattccctctaaatacacactagtagacgctgccgacactccaaagcctatagatttgtcagtatcaggttatttttctcctataggcaatttgacttctccaaatttatattcaacagcaataaagaaatagatgttgaattctactattttctagtcctgttctaggttctagggatacagaaatgaacaaaatacgtctcatgtatgcgctaaaagagctgacataagttgaaaacttttttgacctagtgctgtttacttctgacaattttyatatataacaggattgaaatctctcaggaaatttcttctgtggaagtgattcaccataactcactctgtggtactcattggttgaaattataatggatatgaagctggttaatatggtttctgccaatcattccacatccccaggttcatgcaaacctcaggcaagcctatggtctgggaaatagtttttcattagaggtagaccaatgttaaaaccattcaagagaaaagaaagtg

SEQ ID NO: 450861 - DNA, 568 bp, Homo sapiens
caaagtaattcaaatgcttaataaaatgccactcaaaatcttgagtcatctcaaaaattccctctaaatacacactagtagacgctgccgacactccaaagcctatagatttgtcagtatcaggttatttttctcctataggcaatttgacttctccaaatttatattcaacagcaataaagaaatagatgttgaattctactattttctagtcctgttctaggttctagggatacagaaatgaacaaaatacgtctcatgtatgcgctaaaagagctgacataagttgaaaacttttttgacctagtgctgtttacttctgacaattttcatatataacaggattgaaatctctcaggaaatttcttctgtggaartgattcaccataactcactctgtggtactcattggttgaaattataatggatatgaagctggttaatatggtttctgccaatcattccacatccccaggttcatgcaaacctcaggcaagcctatggtctgggaaatagtttttcattagaggtagaccaatgttaaaaccattcaagagaaaagaaagtg

SEQ ID NO: 450862 - DNA, 438 bp, Homo sapiens
gttgtagaagagagtgtaccttgcactggaagaagaaagcataaacagtacaaagcatattatttcagagsatttgttctctactcccatagttttactttttaaaatttaaaatatatgctctttgagagtagggatttctgtcagtttaggtcactgctatattctctccctcaaaagagatcttgtatatgctgtgtgcaatagttactttttgaatatgtgatattatgaatattgacattgacattattgttgagtaaattaaattatacatatgattatgacatgaatatagccatagcttactcagcaagtcttttagtgagatggtcaatagaaacccatgattcaactggatatcttgataggccacctggaattaagtcttcaatgaacaatgtttatagaaaagcggattttggtgtcaaagcaaaa

SEQ ID NO: 450863 - DNA, 438 bp, Homo sapiens
gttgtagaagagagtgtaccttgcactggaagaagaaagcataaacagtacaaagcatattatttcagaggatttgttctctactcccatagttttactttttaaaatttaaaatatatgctctttgagagtagggatttctgtcagtttaggtcactgctatattctctccctcaaaagagatcttgtatatgctgtgtgcaatagttactttttgaatatgtgatattatgaatattgacattgayattattgttgagtaaattaaattatacatatgattatgacatgaatatagccatagcttactcagcaagtcttttagtgagatggtcaatagaaacccatgattcaactggatatcttgataggccacctggaattaagtcttcaatgaacaatgtttatagaaaagcggattttggtgtcaaagcaaaa

SEQ ID NO: 450864 - DNA, 393 bp, Homo sapiens
tagaaggaaattttaggaaaaaattctaggagtcattttcattgactttaggggaaaagaaacttatcacataaatattattcttatgccaatgaatagayttttaattcttaaagtggtatttagctgttaataagcaggaggatgtaactaggcacacacgtaactaggcacacaagtggcatggagacttaaccgttcagagatgaattgtgctgctgcctttgtaatccaatagctgaagaccttggccaggtttcttaacctcctaaattctgtttccacaagggcatgcttgaagggaatatcagttttctctaatgctgaacttctatgattatattatgtatttgtccacagtgtcttctagtaatagatgaagaacagaatccc

SEQ ID NO: 450865 - DNA, 393 bp, Homo sapiens
tagaaggaaattttaggaaaaaattctaggagtcattttcattgactttaggggaaaagaaacttatcacataaatattattcttatgccaatgaatagatttttaattcttaaagtggtatttagctgttaataagcaggaggatgtaactaggcacacacgtaactaggcacacaagtggcatggagacttaaccgttcagagatgaattgtgctgctgcctttgtaatccaatagctgaagaccttggccaggtttcttaacctcctaaattctgtttccacaagggcatgcttgaagggaatatcagttttctctaatgctgaacttctatgattatrttatgtatttgtccacagtgtcttctagtaatagatgaagaacagaatccc

SEQ ID NO: 450866 - DNA, 655 bp, Homo sapiens
catggagagagatttcttttgcttgaagaaaggagaaagaaaagtaaaggggactttgtcttacagcttgggcaacagcttggcccagtgggttagaggatcaagtgaatccctggggtccccagttctacagttctaggccttgactcctggatggcatttctggacccacactgggccagagggaagcccactgccctgaagggagagaccaaggcctggtagcattcaccacaagctgagccttgagtgaacattggtaccaagcctggggtggtaatggccatggatagacactctttctgactgaggaaaggagagggaagggtgggaagaactttgttttgcagcttgggtgccaactcaagtcacagcagaacagtgcactaagtagattattaagtttcctgactccacgcactggctcatggacagcatttctgggccagccttgagccagggagtagcttgctgccctraagggaggaacacaatcctggctcagtttgcaacctgctgactgaagagcccctgggccttgaacaaaattggcagtagccaggcagtgtggttgctatgagccttgggtgagacctagtaccatgctggctttgggactgacccagagtagtcccagtagtagttgcaacagggg

SEQ ID NO: 450867 - DNA, 594 bp, Homo sapiens
aacgtgcaagtttgttacataggtatacacatgtcgtggtggtttgctgcacccatcaayccgtcatctacattaggtatttcttctaatgctatcccttccctagccccccaccccctgacaggccccggtgtgtgatgttctcctccccatgtccatgtattctcattgttcaactcccacttatgtttattgcagcactattcacaatagcaaagacttggagtcaacccaaatgcccatcaatgatagactggataaagaaaatgtggcacagatacaccatagaatagtatgcagccataaaaaaggatgagttcatgtccttttcagggacatggatgaagctggaaaccattattctcagcaaactaacacaggaatagaaagccaaaggctagtttctaggcgctcttttggtttgattttgaaatctgaaaaatcagcattgaagttatatgtgtgtgtgtgtgtgtgtgtgtgtgtatgtaagaaaagttcagtaaacacctttagcacccaaattaaacactagttagcatttttctataatatatttttatgtttattcatctataatgccatcatagattt

SEQ ID NO: 450868 - DNA, 631 bp, Homo sapiens
taggcaaccactgagctactttctgttgttaaaagttagtttgcatttcctataatgtaatataaaaggaatgttgtacattgtactcttctgtgtccaacatcttttgctctgcatgcttttgagattcatccatgctgttgcatatagtagtacatgtatggatatatcactatttccttcaccattcaactatggatggtcatttgagttgtttccatttgaggctatcatgaataaaactatgatgtatattcattcctaagttttcatgtaggcatgtgttttgtttctcttgagtaaatgcaataatacatttaattttagaagaaactgcgaaacagttttaataatcctcaacaatgtctgggagttctggttactctgtatctgtcaagacttgtttttttcagagttttaatttagccattctaataatgtgctcaactttcactgatatcaaatttcagttaaattttactagtatcaaatttcactgataagtatgttttgaatattttcatatggttattggccatttatayacattcatttggaaagtgaatgttcaaattttatcgtatttatttaggaatttgtcttctcattactcagaagaacatttatatat

SEQ ID NO: 450869 - DNA, 473 bp, Homo sapiens
tcacagttctggaggctgggaagtctagaatcaaggtgccaacagattcagtgtatggtgagggctcattttcagcttcctggatggcaactgtatcctcacatgttggaaggggtaaacaggctcccccaagcctcttttataagggcactaatcccactaatgagcctggagtgctcatgacctaatcacctcctgcaggcccacccaccttcttaatactgtcacgttggggattaggttccaaaatatgggtcaatatttatatcatagcagccggtctactagctgaccttggcaaagggaaacctcacatcagtgggacggggatattgaagcctttgtcctttgggaaatytagcttccaaacctggtctgagatttaaaggcaagagtcacatctaagaaggtggaaaagtctggtacagctagactgagagtatcaggggaatttaccagggcgtttttgggac

SEQ ID NO: 450870 - DNA, 583 bp, Homo sapiens
acatgcatatatattttcttgtgtgcgttgtctgtgtattattttaagattcctaaacgccaccccttcccatatccatattataccttgacatcagctgcctttggaaaagcaayagaaacataaccaacagcaaaaattaatttttctgtgtttttcatcttcagagcaaaggtcctgatacacactggtggtttccaaaatatagggccctcgttgagggagtacaaaaaaaaatatttgggatacaagaagaaaacactagaattaatacatatccttatttttgttttatctttaaaaatggttattttgtacattttatgtgcacaacatattgacgtaaaatatgcctatataaattataaatgaatatgcatgtatgtgtaagtttcacttttgatgtgtaatcaaaaaagttttgaattgatgtaagcttagatttgcaaagctataagaaaaattctattttttaagctgggtgatgaacacacaatattaatattgtcactttttatactttatgataatatttcactcaaaaatttaaaaaggaaaaacatatgtcagaaacagtctttct

SEQ ID NO: 450871 - DNA, 534 bp, Homo sapiens
atttatttagtttttgaaatgctatttgattttttatgtggctagctgtttttttatttcctacagatatttttaggttgctctttattgacttrtgctctaaacataatacagttattttatattatatgtctggcaatttcaaagtctaaatattttctggatctgtttttgcagtctaattttttctgaagattcttcatcatggtgtctaattttctctctctgttgcttattttttcaacaagtggtctcgaaaaatcttttacaaaattttttgagacttaagatgaaaatggtttcactagggaggatttgttttagcttttgtcagacacctaaagacaccaacagtccatagtacaaggatgaccaaaattcatggcatgtgattttttttatcacctgtgggaaggcattttgtctaaaaatctgtgctagtgcttgctcttaggtataaatcccttggggacaatgcttccttatgctcagcttcaaggcaaatcttgtcctctgtccttctcaagtctatgg

SEQ ID NO: 450872 - DNA, 579 bp, Homo sapiens
tcaacagattattagataaagaaaatactaatactattcagccataaaaaataatgaaaccatttcttttttttttttttttttttttgagacggagtctcgctctgtcgcccaggctggagttcagtggcgcgatctcggctcactgcaagctccgcctcctgggttcacgccattctcctgcctcagcctcccaagtagctgggactacaggcgcccgccactacgcccggctaattttttgtatttttagtagagtcggggtttcaccgttttagccgggatggtctcgatctcctgacctcgtgatccgcccgcctcggcctcccaaagtgctgggattacaggcgtgagccaccgcgcccggcccgaaaccatttcttttgcagcaacatgaatggaagtagaggccattatcctaagtgaaataactcataaacagatcaaatactgcataatgtcacttacaagtgggcactaaataatgtgtagacatggacagagtgtgaaatcatacacattggagactctgaagggtsggaaggtgggaagtgggtgaaggatgagaaattgaataat

SEQ ID NO: 450873 - DNA, 493 bp, Homo sapiens
ggggtgggtttgcaggaaagttgcctctgagcagatggcagtgctgtttgatggagggatttcacgttcagaacaccaatgaatcgaggtttgtatgttcacactgtgcactgcttcgtacctggcacaaattgcatatttttacagtattgcctgtggatatggcccacttaaattgcctgtgtagaaatcakggctcaatttatgtcctgttccaaatctgctgcagaagagtccatcatgcaagagactaatttttaattggcagaaggtaaggaaatcgttttttacagaattttttttaaatagctgtaacatttattgaaataaaatattggatgaaattcaccatatatgtcaactcaatgaaaagattcaggaagctgaggttaaagtcataagctgagagaagagattataaaaggtacagaggaagaatgttcacccttgaatggctgagtctctcagagttctgctccaaactttcttctca

SEQ ID NO: 450874 - DNA, 493 bp, Homo sapiens
ggggtgggtttgcaggaaagttgcctctgagcagatggcagtgctgtttgatggagggatttcacgttcagaacaccaatgaatcgaggtttgtatgttcacactgtgcactgcttcgtacctggcacaaattgcatatttttacagtattgcctgtggatatggcccacttaaattgcctgtgtagaaatcatggctcaatttatgtcctgttccaaatctgctgcagaagagtccaycatgcaagagactaatttttaattggcagaaggtaaggaaatcgttttttacagaattttttttaaatagctgtaacatttattgaaataaaatattggatgaaattcaccatatatgtcaactcaatgaaaagattcaggaagctgaggttaaagtcataagctgagagaagagattataaaaggtacagaggaagaatgttcacccttgaatggctgagtctctcagagttctgctccaaactttcttctca

SEQ ID NO: 450875 - DNA, 493 bp, Homo sapiens
ggggtgggtttgcaggaaagttgcctctgagcagatggcagtgctgtttgatggagggatttcacgttcagaacaccaatgaatcgaggtttgtatgttcacactgtgcactgcttcgtacctggcacaaattgcatatttttacagtattgcctgtggatatggcccacttaaattgcctgtgtagaaatcatggctcaatttatgtcctgttccaaatctgctgcagaagagtccatcatgcaagagactratttttaattggcagaaggtaaggaaatcgttttttacagaattttttttaaatagctgtaacatttattgaaataaaatattggatgaaattcaccatatatgtcaactcaatgaaaagattcaggaagctgaggttaaagtcataagctgagagaagagattataaaaggtacagaggaagaatgttcacccttgaatggctgagtctctcagagttctgctccaaactttcttctca

SEQ ID NO: 450876 - DNA, 593 bp, Homo sapiens
aaaataaataaacaattgaaaaatagaaaaaaaagccttgtagaataagaatataaataaagaaaatatttttgtaaagctgtataatgtgtttgtgttttaagctaagtgttactacaaaagagataaaaagtttaaaaaagtaaagtttttaaagtaaaaatgttacagtaagctaagattaatttattactgaagaaagtaacgtatttataaatgttgtgcagcctaagtgtacagtattcataaagtctacagaaatatacagtaatgtcctacaccttcacatccactcaccactcactcactgactcacccagsgtaatttccagtcctgcaaacttcattcatattaaatgccctatacatgcgtaacttttttaccctttatattttgtgtttttcctatgtttacatatgtctagataaacaaacacttatcactgtgttacaattgcctacagtattcagtatagtaacatactctacaggtttattgcccaggagcaataggctatcctttatagcctaggtatgtagtaggctttactatctaggtttgtgtaagtacactctgtgatgttggcacaatg

SEQ ID NO: 450877 - DNA, 559 bp, Homo sapiens
ccagagacatgaagcggctcttccagaatgacacagcagttagtgctcaggctagggcctctgcatggggccatttacatgaggatctgaattccaaccctaaccacaatctgtgattcttttccctctgggctttattttcccttgctgttgaaaggacagttccccggatggtggacagactaacccttcagcaggccaagtttgtggcatctagcagggcttgagatcccagtaggtgcttatgggtgctgggagtgtgggtgatagcggggtggggtgggtgtggcattggcttgaaccacagtctcccctggacctgagaatctggggtttatgaagaacgggggagggggatgggggctgccattgtccagatggggtaagaagaggagattctcgctgcccttcatgcttcttaaggcaaaggtgtcacagtcctgcctagcctgttagaacgggaccctcctccccttacttgcttgggctaatcaactctctgagcctcacyctccccctatgtgaatcataactgtaaggcatgtgtcacattaaacac

SEQ ID NO: 450878 - DNA, 589 bp, Homo sapiens
gtaagccctgaataaacatgatttaaatgaatgaatagtactaacctcctgaagtttttataagatttaaagtggataatgcatatgaagcacttggcacagtgcctgacagagtaagctcccaagaaatggtagccagcagcaagcagcagcaggagttagtaatagcagaaacaatagtagttgagcaagaaatgtattagaagggtttctttatactgtaaaaaaatgtgaaaaatatagaaaagacataagattcaaaaaatgcagataaagtttccattatagagatgaagatttaatcaaataaagcctttttagaaaagtctatatttttactgagttttaaaataatacatgtgtgtcagaaagaaatgataagtacagactagcactgatgaaaagcagttcgggctcacacatagagtagtagatgaggcagctgggagttcttacaggagakgaaagagtagtagctgacatttgaatattaactatgcacccaacactggtctaagaccttaagtataataaatcatttaatcttcacataactttatgtcatagtactattacttttcccattata

SEQ ID NO: 450879 - DNA, 590 bp, Homo sapiens
aatattagtgatatggacaggaggcatggaaatactgactagaaaagggcagtccccagtgagggccacaccctgaagcctgggactgtggcccaaagtgagaacatgcattactattttcctgctcaaatgttgtttttggcccacccgcccccccaatcctgtacccataagaaccccagtctcccctggcagaggggtggcagagaagcagagcagctgagtggcagagcagagcaacagagaaggagagaagagaagaagcaacyggacatcagagagaagcagcttgacttcagagggacggcttgatagcaggactttggagaacagtttggctaaggatggccaaactccaggtaaagatcatcttcccactccagcccctttctagctccccaccccactgagagccacttccactgctcaataaaatcctccacattcaccacccttccattcattcctgtgacctgattcttcctagatgctggacaagaacttgggtaccaagagggcagctgcattccttttttataaattaaaaaaacatagtttattctcctcacagaagataggtgggtaacatg

SEQ ID NO: 450880 - DNA, 577 bp, Homo sapiens
atacaccagtattaaattataaataawtaacaaggtatctttaaaccttcaaaatgcttgcaaattaaaataacccatggattaaaaaaatcacaagagaaaacaaaatgtttctcataaacagaaatgaaaacataacatcaacaattttttgagcaagatcttttgtacattatgatagtgtgtataattactttccagaacttttatttgcagtttattttggagttaaacatacatgactttactcaaaaaccacactctagatatttaaacaaggtaaatgaaaatatattctgtcaagaagttgttcataagaatattcatagcattcatccgtgttagctataaattgtaaacaatccaaacaatcattaacaaattaatggatttatgctatagaaagattctaggaagatggcagagtaggaatcaccaggaatttctacccccaactagagaacaattgcactgacaaaatctgtctgatgtaactattttggaactctggaatctattgaagtctttcaacttctagggaaagccttgaatagtaaatggtggttaatttcagtta

SEQ ID NO: 450881 - DNA, 586 bp, Homo sapiens
ctacactttggaatttttgctaggtgtatggaatatgtttccatatttgacatatacgtttcctaacttacctgcaataacagagtcagagctagtaaccaggactggaaaactgaactctcctagatttcatagtcaatgttgtttccattgcagttttcttttctgtggaaggaacctcagtcaattgactatggttcttgaagtttttacaagccacttcagagttttcttcttctcactttgaaatctttatctgagttttctactaaagacctcaacacatggacatgtaaacacagttgaggtattacacgtttggtcagtgttcaattccccaatttcatctctttttaaaaaatactgtaattaattgtattcatgtgccatggcacagccggcaagcattttaaccatcaccaagtatttagagatgcctgtgaattaaattcatyctcagatgagattccatgtactcataatccagacttccctatgaactttgttgttggcctttctggttgaaaaatagaaaatagagggacctttgtaaaggcagcataaattacataaagttcaaatcagc

SEQ ID NO: 450882 - DNA, 561 bp, Homo sapiens
acagactttaattgatgtatcatgatccacaaaatatttctatttagttctctagtacccattattatcattcccattttacagttgaggaaaataagagtattatatccaatgctagtttcaggaagaggcagtatcagacatttactttcaaaacatcatcactgttatgtgtatagattaaatttagaaagtccacttttctctaccacttcctgggctaaagtttttattggattctgtattagtttcgtattgctgctgtaacaaattactgcaaactcaatggcttacttaatacaacaaatttgtattatcttacaattctggaggtcagaagtctcaaatgagtcaccagggctgtgttcattctggagactctaggagaaaatcttagaggctgcctgcattccttgcttgtggctccttcctccatttcaaagtcagtagcatagcatcttatctcctttctgacctcctgctttcctcttataaagattctygtattgtgcctaccagatagttcaggataataccccatctcaagatcctgaactcaca

SEQ ID NO: 450883 - DNA, 568 bp, Homo sapiens
caatggaaatgtttatctacttatagtatccccatattttattttcatgtatatgtcctgcagctcattttgcttcctctgcctggaatgcctttgttcacttctgcctgctgaaccccaattcatgctttatgacttacatcaataattcacttgtggtttcttatctaataacttataacattgatacaaytttaatatctatatttattttatcctgtgagcaagcattaagtttgtggatcaaagaccaggcttattactacttacagaaacaactgtactagttccctatgacatgctgccccttagagcaaagtgatgagggcagatgtcatgctgtatgtacagagagaggaatttcaaaattcaaaattatgaatctgggaatttatggaaccactggagagctgcccctctttttttgagagagagagtcataagcctatcttatttaaaatcatcaaatcctctctggaaatgacatctaagttattagaaccttttgggatgtatacaaatgactccttgttttatcctcctttgagactcgaatccttacctctag

SEQ ID NO: 450884 - DNA, 572 bp, Homo sapiens
tttttaaaactttattctgatcctgtcacctcatgctgacaactcttccttcaggttccccactgcactcaggataaaatccagactatccacacagcctggctggtcattgtcagtacaatggtttacattctggctgcttctccagccccatttcatgtcatctccatttcattytctccagtccagccacacttgtcttcttccccatactccaaccattccttctccctgtaccacttttcctttcaatctttgataaattcaataaattcaccccctaccttcatatgccacttcctcagggaggcttttaatgaactcccaaaattgtttaggtgctctaaacaattctcacagaaaccgtgtttctttcttagaatttatcagtttgttgtttcagactagcacaatcttctgatgaatgctttatttctatcactggactgtacacttcagcagagcaggaatcatatttcttgtgactactttcatattgccagcacctatagtacctagcacacagtaggcattattgaatggatgaatgaacatacttccccattccatct

SEQ ID NO: 450885 - DNA, 631 bp, Homo sapiens
tgtggaaacttccaggaacttcctttggctccacattcagattttcactagcgtcctgcctagcctctctggcaagtccatccttcgtgagtgtgggataatgcccccatggtatgcagaggagatatcactgagttcagtccccctgttctgtggatggtgtactacgtgaccctgggcaagtcccttgctctctcaaggcctacgtttccccagctacaagtagagaaggagcttctacaaatggaccacaagcttttcaagagcctctttcatcatggactgcactctccctaccccacatcctcagtggagaggaccacacaaagaaatgtcctctctggtccaagatttccawaagagcagtgatgcctagataccaaccattctctgtgctctaaacagaggggatcactgatgctcaccttctaggccagcaagttacctcctgaccttgaacttgcaaaggagtcccttcttcatttgccattacaacatgagcatgtttctttgttagaaaactctttgtaactaacattgtaatagtgttataacatgacatatcatcccattatatgaacccccataattcatttagcatttccccactgtggcacatttattttgtttt

SEQ ID NO: 450886 - DNA, 626 bp, Homo sapiens
ccttcttcatttgccattacaacatgagcatgtttctttgttagaaaactctttgtaactaacattgtaatagtgttataacatgacatatcatcccattatatgaacccccataattcatttagcatttccccactgtggcacatttattttgttttcagtgctgcactattttcaaaatgaactgatgaatactataatccctaaagttttctccacatttcagaatttttttcttagaacagttcccagaagtagaattgcttggtaagaggattgactgactgtaaaatcactattaaaaatgaaaaatggtcctcaatatagaaagcaaaaaagaaaaaaggaacatcaccttcctatcactcagatataactcctgttagcctttgatgtagttcctgccatcttttctttctgagcttatagtggtaagtgcagcagtagctaacatttaagaagtgcttactagtacctttacaygaattatcgcatttcattttcgcttttatgccatacaagccctgtattaacattttacagaggagaaaacaaaggcttagaaaatgtaaataactttctctaaggtcactgagctactatgtaatggagttagaatttgagct

SEQ ID NO: 450887 - DNA, 507 bp, Homo sapiens
catcttttctttctgagcttatagtggtaagtgcagcagtagctaacatttaagaagtgcttactagtacctttacatgaattatcrcatttcattttcgcttttatgccatacaagccctgtattaacattttacagaggagaaaacaaaggcttagaaaatgtaaataactttctctaaggtcactgagctactatgtaatggagttagaatttgagctcaggtcaacctgattctcagagtccaaaatcttaccaattgctctccttactctgctctcctctgactacattaaattgtctttcagaaaggaaacattcaatgctgtgactagtgccttgatctacagacatattcatgcagttcttaaatattcttatctgacgtattgctactcatgaaagtgattaaggacagagagagagccccacagccacactcatctgaaacctgctcagggtaattcggccagcatatggtggagcaggcttcaaacccaggactat

SEQ ID NO: 450888 - DNA, 626 bp, Homo sapiens
ccttcttcatttgccattacaacatgagcatgtttctttgttagaaaactctttgtaactaacattgtaatagtgttataacatgacatatcatcccattatatgaacccccataattcatttagcatttccccactgtggcacatttattttgttttcagtgctgcactattttcaaaatgaactgatgaatactataatccctaaagttttctccacatttcagaatttttttcttagaacagttcccagaagtagaattgcttggtaagaggattgactgactgtaaaatcactattaaaaatgaaaaatggtcctcaatatagaaagcaaaaaagaaaaaaggaacatcaccttcctatcactcagatataactcctgttagcctttgatgtagttcctgccatcttttctttctgagcttatagtggtaagtgcagcagtagctaacatttaagaagtgcttactagtacctttacatgaattatcgcatttcattttcgcttttatgccayacaagccctgtattaacattttacagaggagaaaacaaaggcttagaaaatgtaaataactttctctaaggtcactgagctactatgtaatggagttagaatttgagct

SEQ ID NO: 450889 - DNA, 575 bp, Homo sapiens
ctctcacctacctgcaccgagcctgagaatggctctgagtcaagtgtgggctctggagccacacggcctggataaaaccctggcttggccaacacatttttgtctttgtggctgaacctctctgtgccttagctctaatctgaaaagtgggaattttgtctacctcagagggttgttttgaggactcaatgaaatcatacaggtaaaatgccraggacaccatctagattgagataagtgctacacatgttagctgttcttgtggtttgctcttggtatgatgttcaggatccttcacaatctggtccccagttattcctacacttcttacactatgttgtcaatctgtaaaccatacaagggtagcacatgatagggcctgtgagctaataacaaaaaggtgccccctctgtgggctgacgcatttctgccaagtctcaaggcttgtcaagcctgtgctgcactctaccctccacctacccacttagctggcacctttgtgtggtgcacagactgtaccctatgtaggatgcagcctagaccacatgcaacagccacaccagagcacttggcat

SEQ ID NO: 450890 - DNA, 575 bp, Homo sapiens
ctctcacctacctgcaccgagcctgagaatggctctgagtcaagtgtgggctctggagccacacggcctggataaaaccctggcttggccaacacatttttgtctttgtggctgaacctctctgtgccttagctctaatctgaaaagtgggaattttgtctacctcagagggttgttttgaggactcaatgaaatcatacaggtaaaatgccaaggacaccatctagattgagataagtgctacacatgttagctgttcttgtggtttgctcttggtatgatgttcaggatccttcacaatctggtccccagttattcctacacttcttacactatgttgtcaatctgtaaaccatacaagggtagcacatgatagggcctgtgagctaataacaaaaaggtgccccctctgtgggctgacgcatttctgccaagtctcaaggcttgtcaagcctgtgctgcactctaccctccacctacccacttagctggcacctttgtgtggtgcacagactgtaccctatgtaggatgcagcctasaccacatgcaacagccacaccagagcacttggcat

SEQ ID NO: 450891 - DNA, 594 bp, Homo sapiens
acattcccttttgttggtacaactgatcatattatattaatatgtagtatttataatcatccaaggaagccatatgagtgaatttgaatcccaaatccaytgactgtgactttaggcaacttgtgtatcctttccaagtttccattttctaatctataaacaaggatgacaatatatccttgtttataggttataaacaaggattttaataggtttgttgtgatgattaaacaggcttacacattgcatagtacacagtaaacattcagtaaatgatggagtagagaaggtagctatttatatattagtaatagtagcatctgccatttaattagctccttttgtgtcaggcacattatacacatacataatccttacaggaacatgctgttaatgtgtttttttaatagaggcagaagtgaggctcatggaggttatataacttgttcaaggtcacacagctgaaaagtggtggtaggagctgagattagatcccaatcccttgtctggccttcatttcccttttatcttaaacaactaaaaaactggacaaaatattcaaaacaagtattttcagacattgaacaagagcca

SEQ ID NO: 450892 - DNA, 594 bp, Homo sapiens
acattcccttttgttggtacaactgatcatattatattaatatgtagtatttataatcatccaaggaagccatatgagtgaatttgaatcccaaatccactgactgtgactttaggcaacttgtgtatcctttccaagtttccattttctaatctataaacaaggatgacaatatatccttgtttataggttataaacaaggattttaataggtttgttgtgatgattaaacaggcttacacattgcatagtacacagtaaacattcagtaaatgatggagtagagaaggtagctatttatatattagtaatagtagcatctgccatttaattagctccttttgtgtcaggcacattatayacatacataatccttacaggaacatgctgttaatgtgtttttttaatagaggcagaagtgaggctcatggaggttatataacttgttcaaggtcacacagctgaaaagtggtggtaggagctgagattagatcccaatcccttgtctggccttcatttcccttttatcttaaacaactaaaaaactggacaaaatattcaaaacaagtattttcagacattgaacaagagcca

SEQ ID NO: 450893 - DNA, 595 bp, Homo sapiens
  misc_feature (1)...(595): n = A,T,C or G
gagnttgaattgcaactctgccatttattagctgtgcaacagtaagaggttaattgacttctctgagtgcaactcgtctcagtaaaaatgggaattactatcacttcttgctgatttggagaagaggatcataagagaaagaccgccccacaagcattcagaaagtatccatttccttgatcttctgtgcgtagttacctcattcccatggacaatgaagagtgctctgcagttttactttttgggttgttttattaaacactggcctgcctaaatctctggtcaaataaaaactgactcgaattttccggctcaggaatgtgtggctgcaacacctgagctgactgatgtatttctatgccccygtgggatgcgggctggcggaaggggcattctcaccttgagccgggcagcctgatcggtggacttgggaagcaggctcacctgctccttcctcctctgtgctcacctgggggttcctgagcccaggccatctgccagcctgggcctctgcaccgggcttcccttttcccttttcctgtcttgagtttcacatctgtcagctggggtgggcactgggctgccccatgctctc

SEQ ID NO: 450894 - DNA, 595 bp, Homo sapiens
  misc_feature (1)...(595): n = A,T,C or G
gagnttgaattgcaactctgccatttattagctgtgcaacagtaagaggttaattgacttctctgagtgcaactcgtctcagtaaaaatgggaattactatcacttcttgctgatttggagaagaggatcataagagaaagaccgccccacaagcattcagaaagtatccatttccttgatcttctgtgcgtagttacctcattcccatggacaatgaagagtgctctgcagttttactttttgggttgttttattaaacactggcctgcctaaatctctggtcaaataaaaactgactcgaattttccggctcaggaatgtgtggctgcaacacctgagctgactgatgtatttctatgcccctgtgggatgcgggctggcggaaggggcattctcaccttgagccgggcagcctgatcggtggacttgggaagcaggctcacctgctccttcytcctctgtgctcacctgggggttcctgagcccaggccatctgccagcctgggcctctgcaccgggcttcccttttcccttttcctgtcttgagtttcacatctgtcagctggggtgggcactgggctgccccatgctctc

SEQ ID NO: 450895 - DNA, 638 bp, Homo sapiens
tattcactcaagcggtccgggttatttttatttttattttttttgtctcaatggatctgaaccagagcttcatgtttgtcagtgggtctctggcctccttatgagagggaattactcgttacaccaccatcccccacccctacaagtatgctgttcacagtgaagtccatcatcagtgtagggagtgggaccsggccggggtcattggctgaaatcctgctgccactagaaatcaagaaaaacacacaagagaaatagagaatgatgagtggctgaaatatctactgggaagatatttaaaatcctcggaaatgtcgagagtagggctgtgaaccctatgttaggacaaagtaattcacatcgcataatcataaagagatcatctggtccattgtttttaaaattatttcttagcagattctgttctcaagcaaaatcttaggcaggcttctaataccacaaaaggaatagtgaagataaaggaagagctgctcatactgggaatatcccagcatagattattctacatggttctaagacatttctaattcaaaacggcaagactaaagagcaaagagtttgcaagaatgtgaatttgctgttcagtaattgagctcactgaaaacaaaagtgcagct

SEQ ID NO: 450896 - DNA, 638 bp, Homo sapiens
tattcactcaagcggtccgggttatttttatttttattttttttgtctcaatggatctgaaccagagcttcatgtttgtcagtgggtctctggcctccttatgagagggaattactcgttacaccaccatcccccacccctacaagtatgctgttcacagtgaagtccatcatcagtgtagggagtgggacccggccggggtcattggctgaaatcctgctgccactagaaatcaagaaaaacacacaagagaaatagagaatgatgagtggctgaaatatctactgggaagatatttaaaatcctcggaaatgtcgagagtagggctgtgaaccctatgttaggacaaagtaattcacatcgcataatcataargagatcatctggtccattgtttttaaaattatttcttagcagattctgttctcaagcaaaatcttaggcaggcttctaataccacaaaaggaatagtgaagataaaggaagagctgctcatactgggaatatcccagcatagattattctacatggttctaagacatttctaattcaaaacggcaagactaaagagcaaagagtttgcaagaatgtgaatttgctgttcagtaattgagctcactgaaaacaaaagtgcagct

SEQ ID NO: 450897 - DNA, 638 bp, Homo sapiens
tattcactcaagcggtccgggttatttttatttttattttttttgtctcaatggatctgaaccagagcttcatgtttgtcagtgggtctctggcctccttatgagagggaattactcgttacaccaccatcccccacccctacaagtatgctgttcacagtgaagtccatcatcagtgtagggagtgggacccggccggggtcattggctgaaatcctgctgccactagaaatcaagaaaaacacacaagagaaatagagaatgatgagtggctgaaatatctactgggaagatatttaaaatcctcggaaatgtcgagagtagggctgtgaaccctatgttaggacaaagtaattcacatcgcataatcataaagagatcatctggtccattgtttttaaaattatttcttagcagattctgttctcaagcaawatcttaggcaggcttctaataccacaaaaggaatagtgaagataaaggaagagctgctcatactgggaatatcccagcatagattattctacatggttctaagacatttctaattcaaaacggcaagactaaagagcaaagagtttgcaagaatgtgaatttgctgttcagtaattgagctcactgaaaacaaaagtgcagct

SEQ ID NO: 450898 - DNA, 567 bp, Homo sapiens
taagtttattagtttattaagtattaactcacaggatcacaaggtcccacaataggtcacctgcaagctgaggagcaaggagagccagtctgagttccaaaactgaagaacttggagtctgatrtttgagggcaagaagcatccagcacacgagaaagatgtaggctgggaggctaggccagtctaaccttttcacatttttctgcctgcttcgtattcactgggagctgatgagatgatgccctcccagattaagggtgggcctgccttccccagcccactggctcaaatggtaatctcctttggcaacaccctcacagacacacccaggatcaatactttgcatccttcaattccatcaagttgacactcagtattaaccatcacacccatgcacccctgatgttagatgtggccatgtgacaagttttgggaaggaactgtgagtagctataagctgtgtccattctaaggaaatggatttaaggtctggagcagagttctccatttggtgtcttctactgccgtgccagtgggtttcgggtggtgcaggagaagatgctggtg

SEQ ID NO: 450899 - DNA, 571 bp, Homo sapiens
tgaatatccagttgactcagcatcatttattggaaagattattcttgcctaccgaattacaatggcgtcattctcataagtcaggttaccttatatatgttgtttctcctgggctataagttctgttctattgatctaatattctgtccttgtactagtattacaatgtcctaattactatagctttatactaagtcttctaatctagttgagtaagtctgtcagctgtgttcttcttcaaaattttctgggctagcctaaggccttttcattttcatataaaactaaaattagcttgtcaacccccaaaacaaaatatgytattgttttaaaattggtattgcattaaatctataagtcagctaagtgaggatttgtcttaacaatactatggcttccaatccatgtacgtatgcatatgtacatgtaaataatctactatttatttaggccttctttaatactctgttatgttttatttaatttagaggtcttgcacatctttgttagatttatcgttaggtacttgatttcctaggatgctattgtaaatatttctagttgcttgctg

SEQ ID NO: 450900 - DNA, 594 bp, Homo sapiens
atttttgtgtgtatggcaagaacagctacaatccactcatttagcatgaatcccatacatagtataattttattacctatcgtccacatgttgtacattagatctctagacttgttcagcctacatatctactactttgtactctgacctgtgtctccccatcacccaactcccactgttttattctctatctctgtatatttcaatttttctttagtttccacatagaagtgagatcatacaaaatgcttctttctgtgtctggcttatttcatttagcatgtcttccaggctaatccatgttgtagcaaatggcatgatctcattctgttttagggctgaacagtatwccattgtgtatacatatgtgccaccgcttatttatttattcattcattcatggattcttagattgtttccatatcttagctattgtgaataatgctgcaatgagcatgggagagcacatatctttacaatgtgacgatctcattcctatttctaatatttctaaaatattaattttgaagaacctccatactgttttccatgatggctgtactaatctacatccccacaagcagtgtacaagtg

SEQ ID NO: 450901 - DNA, 635 bp, Homo sapiens
tttaacaatattaattctttatgtatatataatagttgtacatatttttctttatgtatatataatagttgtacatattttgtcacatacttgtgacattttgattcttgtgtagaatgtgtaatgagcaaatcagggtaactgggatatccaccacctcacatttatatttgttttggcgacgttacaattcttctcatctagctattttaaaatatacaataggttattgttaactatagtctcccaactgaactatcaaatactagaatgtattccatctatctaactgtatctttgaacttcttaaccaacttctcgtcatctccctcaactcccctacccttctaagcttctggtaacctgtcttactatgcctggcttatctcatttcacataattacctctaggtctactcatgctactgmaaatgacaggatttcattcttcttatggctgaataatattccaattgttgtatatatcacattttctttttccattcatctgttgatggacacttaggtagatttcatatgttggctattataaataatgctacaataaacatgagagtgcagatatctcttcaatatatattaattttcttactttgagatacgtacccagcaatg

SEQ ID NO: 450902 - DNA, 531 bp, Homo sapiens
ggtgaaatctaaataagttatgtagactgtaccaatgttgggtttttttgttttattgttatattatggttatgcaggatgttgtcattagaggaaactggatgaagaatgctcaggacctcttttgcattattttggaaatttttgtgaatctttatttaaaaaagagttgcattttgtattagtcagggctgtctagagagacagaactatgtatatatatatatatatatagaacaatatagaactatatgtatatgtatatagaactatatagagagacagaaatatatatatatcatagaaatacatatatatcatagaaatatatatatatrtatcatataaatatatataggagtttactaaggagtatgaaactcccacaataggccgtctgcaagctgaggatcaaggaaaagagtccatgtcccaaagtggaagaacttgaagtccgatgttcaagggcaggaggtatccagcatgggagaaagatgtaggctgggaagttaagccagtctagcctttcat

SEQ ID NO: 450903 - DNA, 628 bp, Homo sapiens
aacttcctgcagacagagaactgggtggacagctcatgcaagcacgcccatacttccctcagacctgtactgagatggaaggtatcatactggctgtgcactcatggtgggccactgctctgccccgggattctctgcccttgaatcaccayaccaccagatcgcctacaaatatgccccacaagccagtctgactctggcaagcacaggggaccaacagttccctgaggagttgcaggtccccctggagatctagttttaggtaggggccacccataagggagagtagcacagcccaccaaagtcccccttgggacaaaggaaacacaggtgtggcaccagtctcaagaggagaggaatttacccaacttacaagtatttgaggataaaaacccatggctgggctcggctttaaaaaagtcttatttgagattccttttacagaacaaagttccatcaaagtcaattttaaaaagcctatatgaaggctgggcatggtggctcatgtctataatcccagcactttgggaggtcaaggtgagcagatcacctgaggtcaggagttagagaccaggctggccaatatggtgaaaccatgactctactaaaaacacaaaattaacagggc

SEQ ID NO: 450904 - DNA, 534 bp, Homo sapiens
gccactgccattctgtgtagggagggtgagttgggccccatccttcatgcaagcccaagttgtttgggctccttttcagtggggatggggctaccatgtgaatacaaaaagcactttcttcaagtgcatatgcactggcgcccagttcagagaacctctgttgtgtccaaaacagtggactgggggagtgagagttgacccctctctccaaatccattcctggctgctttgtgcagggcccaactatatccrgatttggtgctacttgattccattttattggggcaattctgattggggcttctaggtttatggtagagaggccagaattcctttaattagtagggcttgttgtgcatgcactaaacaagggaattggaagagtagtttgccaagatgcatgcagcctcccaggatgaggttgcctaccatatctctacctcaccttgacctctccacatcacattcctccgtccttccctacacccttcaactcactaagaacaactttagcaagatctagtttgacagcaa

SEQ ID NO: 450905 - DNA, 534 bp, Homo sapiens
gccactgccattctgtgtagggagggtgagttgggccccatccttcatgcaagcccaagttgtttgggctccttttcagtggggatggggctaccatgtgaatacaaaaagcactttcttcaagtgcatatgcactggcgcccagttcagagaacctctgttgtgtccaaaacagtggactgggggagtgagagttgacccctctctccaaatccattcctggctgctttgtgcagggcccaactatatccagatttggtgctacttgattccattttrttggggcaattctgattggggcttctaggtttatggtagagaggccagaattcctttaattagtagggcttgttgtgcatgcactaaacaagggaattggaagagtagtttgccaagatgcatgcagcctcccaggatgaggttgcctaccatatctctacctcaccttgacctctccacatcacattcctccgtccttccctacacccttcaactcactaagaacaactttagcaagatctagtttgacagcaa

SEQ ID NO: 450906 - DNA, 534 bp, Homo sapiens
gccactgccattctgtgtagggagggtgagttgggccccatccttcatgcaagcccaagttgtttgggctccttttcagtggggatggggctaccatgtgaatacaaaaagcactttcttcaagtgcatatgcactggcgcccagttcagagaacctctgttgtgtccaaaacagtggactgggggagtgagagttgacccctctctccaaatccattcctggctgctttgtgcagggcccaactatatccagatttggtgctacttgattccattttattggggcaattctgattggggcttctaggtttatggtagagaggccagaattcctttaattagtagggcttgttgtgcatgcactaaacaagggaattggaagagtagkttgccaagatgcatgcagcctcccaggatgaggttgcctaccatatctctacctcaccttgacctctccacatcacattcctccgtccttccctacacccttcaactcactaagaacaactttagcaagatctagtttgacagcaa

SEQ ID NO: 450907 - DNA, 577 bp, Homo sapiens
aatcagtgtttttcaaattgaaagtgcaaatgaatcatctgggaatgttcttaaaatgcaaattgctaactgagtaggtcggggttggagcagttctaataagctcccaggtgatggccactctactatgaatagtattgaatagaaactagtccaaacggaagcttggctcttgattgtaatctacaatcctgattggagtccattattccctaagttttaaaggaattatcgacacctaggttgtgacataccctgaaggttgattgtccttttagaaagcttcttactaatttcagakgtttgtaccttttggtccgtgaaccaaaaacacacaccatcagaaagtatagggaaactctcaagttttactgtgtagtttgtgacttccaattttttcaaatatgattcctaatcatcttactacttttagctttttaagcactgcattcttcacacatttttcttcatgaaatgcaaagaatatacttaggactatgaatgtatttaaaattcttgcttcctaatacttttcacaggttacttttaaagcaaaacgattttttttttttgagac

SEQ ID NO: 450908 - DNA, 510 bp, Homo sapiens
ttgctataaagaaatacccaagactgggtaatctataaagaaaagaggtttaattgcttcacagttccacatggctgggaaagcctcaggaaacttacattcatggcagaagacacctcttcacagggcagcagaaagaagaatgaaagcagtaggagctaccaaacacttataaaaccatcagctctcatgagaattcacacactatcataagaacagcatgggggaaactgcctccatgatccaattaaccccacctggtctctcccttgacacatggggattatggggattattaagattacaatttaagatgagattttgggtggggacacagccaaaccctatcagagggccaggcctctacacctccactgtccccaaaagaaataygtgatcttatgccaagcctctttcttcaacaaaggcaactcccaaagaggacttatagctgagagctatcagctcacaacatctgagcacctgggaataaacacctctttcctgaag

SEQ ID NO: 450909 - DNA, 521 bp, Homo sapiens
caagaaattatccacttctctgcagacaccagttgggtgtcctacaatttactccagtgctgacagtgttcagagttagcacagaccccaygggttaagagctcagtcccacaagactgctcctcactccagatgccagttgcaaatattgagtgcccaggatacccactcttctgtccgacttggtcacaaattggaggttcccacaactctctccttaggtttgataatttgctatactggctcactgaactcagggaaacactttccttacatttaccagtttattaaaaagaaaggataccaatgaatagccagatgaagaggaacagaggacagggtcgagaatggtcccgagtataggggcttctgtctccacggagttagagtgcactgcactcccaataaatggatgagttcgccaacccagaaggtctctaaaccccatagtttagtgatttttatggtggcctcttcatgtaggcatgatcgattattaactcaattcccaattttactcc

SEQ ID NO: 450910 - DNA, 521 bp, Homo sapiens
caagaaattatccacttctctgcagacaccagttgggtgtcctacaatttactccagtgctgacagtgttcagagttagcacagaccccacgggttaagagctcagtcccacaagactgctcctcactccagatgccagttgcaaatattgagtgcccaggatacccactcttctgtccgacttggtcacaaattggaggttcccacaactctctccttaggtttgataatttgctatactggctcactgaactcagggaaacactttccttacatttaccagtttattaaaaagaaaggataccaatgaatagccagatgaagaggaacagaggacagggtcgagaatggtcccgagtataggggcttctgtctccacggagttagagtgcactgcactcccaayaaatggatgagttcgccaacccagaaggtctctaaaccccatagtttagtgatttttatggtggcctcttcatgtaggcatgatcgattattaactcaattcccaattttactcc

SEQ ID NO: 450911 - DNA, 464 bp, Homo sapiens
tggctcactgcagcctcaatctcccaggatcaggtgattttcctacctcagcttcccgaataactgggactataggtgtgcgcctccacacccagctaattttgtactttttgtggagatggggtttcacccattgcccaggctgctctcaaactcctgggctcatgtgatctgcctgcctcagcctctgaaagtgctgtgattacaggtgtgagccaccgcacctggcctatttcgatgtttaatattagaagtgtttgagatctttatttagaagtttggtgatgtttatttgcgaccagaaacatgccataggaaattaactcttgtttatatcaattagcctatggtaaatctggtttctttacacatcatttyacttaaagttgccatttccaagaacctatggatgacattaaatgaggacttactctagtagttcattaatttattattttattatg

SEQ ID NO: 450912 - DNA, 579 bp, Homo sapiens
ggccctgcccctgcagcaggcttctgcctggacatccaggcttttccatacatcttctgaaatctaggcaggggttctcaagcctcaacttttgcactctacctgcccacaggcttaacaccatgtggaagctgccaaggtttacagcttacaccctctgaaacagtggctagagctatatgtgtgcccctttgagcaagggctggagctggagtggttgggatgcaggaagcagtgacccaaggctgcacagggcagcagggccctgggcctggccaacaaaaccattctgtcctcctaggcctccaggcctgtgatggaaggggctgccacagagttctctgaaatgtcttcaaggccttttcctccttgtcttagctattagcactcagcttccttttagtcatgtgaatttctgcagcctgcttgaattcctcccctgaaaatgcacytttcttttctaccacacggtcaggctgcaaattttctaaacctttatgctccacttttgtttcaaatataagttccagtttcaggtcgtttctttttttttttttttttaatcacaatgacacattt

SEQ ID NO: 450913 - DNA, 647 bp, Homo sapiens
aaaaagccctgggactgtctaactccttaccatattcaccgcccccagctcttggtggttttaggacctctgaccaaaaacttctttcctccaaagaacttgacagactgaggaaaaggcagaaaagagaggagaaaggggtgcttgaaaaagccgagacagtaaaggagggaggaacttggatgatgtctcatttggccattttgggtcgctcaaaggacttctacctaatgggagtcccaaaacctataaccagaagaaagtcaaaagggctgagaggttcagtgcaaggttcctggatgccctgctaggatgtggcttggaaacctgagaagttcaaggaaaatccaagaacaaactggcaaagacaactgtttaaagtcctggaaggaggtgctgactcccttacaatatatataagttccagtttcaggtcgtttcttcttcttttttttttttttttcactttgcttacatatatgagcatagtttgttagaagcagcctggccacatcttgaatactttgctgcttagaaatttcttcttccagataccctaaatcatttctctcaagttsaaagtttcacagattcctaaggcaggggcagaattcaaccaagctttttgctaagacgtaacagaagtg

SEQ ID NO: 450914 - DNA, 620 bp, Homo sapiens
gagggaattcctcaaccccttgggcttcccaggtgaggtgatggcccaccctgcttctgctcacccttcatgggttgcacctactgtctaaccagtcccaatgagatgagccaggtacctcaggtagaaatgcaggaatctcccaccctctgcgttgatgtcactgggagctgcagactggagctgttcctattcaaccatcttgccagccgcctcgtcttataatttttattgcatgtccaacattgttaatcaaaggaccatagaaagtccacatgatgctgtcttgtatcatagatggttctccctttcatctattaagctaatgggatgtgggatgagagtagggaagtgataatgtcaatctaataagggattgatctgatttttgctcagtttcagtttctataaggcatattctattttatatcactaayattcctatgtcatatccatctattgttttcaactaaaacattaatggagctttgtctcctcagcctgaaaaattgttggagattcagttctgccatttagaaatgctcaacttgaaaatttgacaaatgtcttgagtaaggtatggttatgtttttgaagcccttcaaattttaagttttgtc

SEQ ID NO: 450915 - DNA, 525 bp, Homo sapiens
gtccaacattgttaatcaaaggaccatagaaagtccacatgatgctgtcttgtatcatagatggttctccctttcatctattaagctaatgggatgtgggatgagagtagggaagtgataatgtcaatctaataagggattgatctgatttttgctcagtttcagtttctataaggcatattctattttatatcactaatattcctatgtcatatccatctattgttttcaactaaaacattaatggagctttgtctcctcagcctgaaaaattgttggagattcagttctgccatttagaaatgctcaacttgaaaatttgacaaatgtcttgagtaaggtatggttatgtttttgaagcccttcaaattttaagttttgtcatcccaaccttayaagaatgctaaaatctctgctgatctgtttgtccctgtagaagaggaaagatttcttttcctcacccattgttaagttcatgtctgaggcccttataacaaatgacagactaatatgagaaaagtatac

SEQ ID NO: 450916 - DNA, 624 bp, Homo sapiens
accctctgcgttgatgtcactgggagctgcagactggagctgttcctattcaaccatcttgccagccgcctcgtcttataatttttattgcatgtccaacattgttaatcaaaggaccatagaaagtccacatgatgctgtcttgtatcatagatggttctccctttcatctattaagctaatgggatgtgggatgagagtagggaagtgataatgtcaatctaataagggattgatctgatttttgctcagtttcagtttctataaggcatattctattttatatcactaatattcctatgtcatatccatctattgttttcaactaaaacattaatggagctttgtctcctcagcctgaaaaattgttggagattcagttctgccatttagaaatgctcaacttgaaaatttgacaaatgtcttgagtaaggtatggttatgtttttgaagcccttcaaattttaagttttgtcatcccaaccttacaagaatgctaaaatctctgctgatctgtttgtccctgtagaagaggaaagatttcttttcctcacccattgttaagttcrtgtctgaggcccttataacaaatgacagactaatatgagaaaagtatacaaattt

SEQ ID NO: 450917 - DNA, 613 bp, Homo sapiens
tgcaaatcacaaatctgatagaggacttgtttccagaatatataaagaaccctcaaactttaacaataagaaaataactccattttgaaaagataaaatattttaacagaccttattttaagaagatatacacatggcaaataggcactagtgtaatgaaagttaaaaccacaatacaatagaccctagacagctattcagatggataaaactgaaaagactaatcccaccgagttttggcaaggctgtgcagcaattggaaccctcatacactattgattggtatacaaaatgatccaaatactatggaaaacggtttggcattttctcaaaaagttaaacatatgtccaccrtatgatcaagccactccactccaagagaaatgaaagcatatgtccatacaaagacttgtgcacaagtttttatagcagctttatttgtcatagccaaaacctgaaaataatccaaaagtatatcaagtgggtggatgaacaaagtatgacataaccatacagtggagtgaaagctagcaataaaaataatgaactttttatcatgctatgacattcatatgtcattaatatgattccataaatggaattatgcactgtg

SEQ ID NO: 450918 - DNA, 449 bp, Homo sapiens
aaaagagagctagatctctgctcttgcttattgctcttcacaaagttgtaaaaagctcttcacatcagtatacgtaaataaataccattatttttaaggtcctcacgatattccatggtatgaataagccataatttatttaagcatttctcaactgataagcatttaagttgtttattaayttttctgttaatataattatttaatatttatacttctacatgtatcatcataacttttgtgggcattttgtatgacttccacaaccatttaggcagaattttcattattaacaattatcttgagagaaaaatttttcgttattttttgtagcattaaccaagagacaaaatatctgactatatcatattccaaccaggaacaagagaccactctgggtctttcaaacaaagggaatttaatactggcctttgttagtcagaagatga

SEQ ID NO: 450919 - DNA, 602 bp, Homo sapiens
actgcatgatatatacaagaaattcactttaaatataaaagtataggctacaaaatggaaaacatatattatgaaaaaagtgatcataataaagtgggagaggctatattaatatcagacaaaggaaacatcaaaacagaatattaccagagatttaaaaagacattttatagtgataaaggagtcaatttatcaggaagacagaacaccagyaaaaaatgtgtacacaactaacagcagcgtttcaaaataccaaaagcaaaacctgatagaactgaaaagaaaaacagactaatctataattacagttggagattacaatatttttctttctataattgatataataatgtagaacaaaatcggtatgtatatagacaagttaaacaacactaacaaccagagttacctaactgacatttgtagaacattcagacaaccatagcggactttaaatccttttcaagtgtacatgaaactttcagtgacagactacatgttcagccataaaatgtgtctgaactaatttttaagattgaaatacaatggagtatattctctaaccactatagaactaaatttgaaatccataacaaaaggat

SEQ ID NO: 450920 - DNA, 572 bp, Homo sapiens
ggtttacttttatgtttctttgtgtatcccataatttttattgaaagctgaacaatttaagtaacgtaatgtgacagctctgaaaatcagattcacctccacttgccaaagctcttatttgattactgatgtttattgctgttttttttttgktttttttttcatttttggtaactttcctggaataattctgtaaagtctgtattccttatcatgtgcagccactgacatctcttttccattaacttagtggtccactgatttctacagagattgccttaaatatcttcatcaagtagaactctcttcctttgccaaatattcacatttgtgctggggcaagccttcagtgctccagcagtttacaactctgtaattaccttcacttcttggtttttcaggattcaagatcagacagaggtgagagagtagggcctgctgggatctttcctacccttgtgcacaactctgttcatgcgtataacattgtgaatccctgggaatatgtagagattttcaaagcccagtaggaaatattattccccatattttcatcttaagctttttgacaa

SEQ ID NO: 450921 - DNA, 536 bp, Homo sapiens
cattcaaaatggcaaccaaagttacaactactgtgaaatgaaactaactaatggtgcaaaggattcttttggagagaattataaaatttcatgaaggagctctaaaagaagatttctataaatggagaaatatggaggcatatcattttcttgaatagaaagaaaagcattgtaaaatgtcatttatttcaaatttatttacaaattaaatgcaatttccatgtgtgtgtctatgtgtctgcaggtgtgtgtgatccaaaaacaagttagartacaaaagtatgagagtgctgtgaaagtaaataaaactttacagacatacacaatggggatccaagaggattttccctataagacataaagaatggcagtaaagatggtgtaaaattgatcatatgataaacagaccaatagtagagaacagaggaaatcaaatcgtcatatgtgggaattagtataatacttaagtagcattggaagaagtcagaggggaaaggaaaacccatacacaaaggatcataggaccaccaatcata

SEQ ID NO: 450922 - DNA, 541 bp, Homo sapiens
taagaaagaaaaagaggaagagagtgagcgagagagagagagagaaagacaaaagaaggaaggaagggttaagaaaggaaggagaagaaaggaaggagaccaagaaaaaayagataaaataacaacaaaaaaaatggcagaaacagtggagtctgaacatagtattattatacatataccatttttcttaacttttttctcggttatcataatttaagaatttgactacagcactttcaaagcatgtttatcacatttatgtacatctgatacaaagatattgtcccttattatttactcagaaaattccctcttccaaaacatccccagctcagtacatctggatcactcaaggaatcatcaaaggactcgtgtgtcccttcagttttcaagtcggagatgagaaaaaacaacaacaacacttgtgccagttggaattcactgcttcctgatagtttcaacacctgattctgttctggactgcgttcccttccagtcgcactgtatctgcctcactccaacttctcacccctagcctgac

SEQ ID NO: 450923 - DNA, 541 bp, Homo sapiens
taagaaagaaaaagaggaagagagtgagcgagagagagagagagaaagacaaaagaaggaaggaagggttaagaaaggaaggagaagaaaggaaggagaccaagaaaaaacagataaaataacaacaaaaaaaatggcagaaacagtggagtctgaacatagtattattatacatataccatttttcttaacttttttctcggttatcataatttaagaatttgactacagcactttcaaagcatgtttatcacatttatgtacatctgatacaaagatattgtcccttattatttactcagaaaattccctcttccaaaacatccccagctcagtacatctggatcactcaaggaatcatcaaaggactcgtgtgtcccttcagttytcaagtcggagatgagaaaaaacaacaacaacacttgtgccagttggaattcactgcttcctgatagtttcaacacctgattctgttctggactgcgttcccttccagtcgcactgtatctgcctcactccaacttctcacccctagcctgac

SEQ ID NO: 450924 - DNA, 518 bp, Homo sapiens
ggtgctttccaaacttccacatcaaactcttttaatatgtccaagtctcctcgagtgacaagacttacattattttcaagctggttttctcgggcggaaattttcaatggatttctcagtctaccatgtaacytagatgaatccatatttagtgtgcgatctaacttaagactttgatcaaaataattttcacttgcaatgtctgtcaagcgctgaaagtaagttcacatgggctgcatcctgctggaccaccacacgtgaaataccatatccctaattgtacttaccctgttgaatttcttcttgaggatggtcaaagtgtgatggcttatcttgcttcatcttgaatacctttctttttcctgaattattattttgtatctgagtcaatgcatagaccaagttatgcactcatagtgtatgttagaaatcatgctgtgtgctttgaatgcacacacacacacacacacacacagatcatccatatatgcacaaatgttttgaaaatcagaaaatgt

SEQ ID NO: 450925 - DNA, 617 bp, Homo sapiens
atgccaaccaccagtggcaacccactcgggtctccttccacactgagggagctttgttstttcactcttcacaataaatctagctgctgctcactttttgggtctgcaccacctttaaagctgtaacactcgattcaaagttccacagcttcattcttgaagtcagtgaacccaccagaaggaacaaactccggatgcaccacctttaagagctgtaacactcactgcaaggtccgtggcttcattcttgaagtcagcgagaccaagaacccaccagaaggaataaattctggacacaattttatttgcatctaaccataattatataatagagggattattattatctttgttttgtaggagaaaacctaagcacggagtgatttagtaactcacacacagtcacaccgctggtaagacatggagccacgatgtgtaccagggcaggctagctccagtgccagtgctcttcaggtagaaataattatgacatatttaaaataaaatctagtattgttggaaaacaggcaatacctaatgattcctttgctcttttaaaaaatgcaattatcatcatcgtccattcattaaataaaatactttattcaagtctagca

SEQ ID NO: 450926 - DNA, 522 bp, Homo sapiens
aaatagaaaaagatctgatgggaagcattatccatgtagctagttacaccaaaactaatatgaattttaccaatcaccaaacactattctaagccctttacttatattaacatcatataactgttaataccaccctatgaaataggtactattgttgcaatcatagtattttagatgaggacattgaggaatggaagacatatatcttgagcaatgcctcacatctaataactgctaaggtgaaatttgaaccccaacaggctggttggggtcttcaaggtactttatgttagtctcttgactgtgatgaatgaaatgtgccattgttttaattttatccactgctaaatcaccaataatcagcagaatgcctgamacattaaataaccaatcaatgtttgatgaagtaatgaatgcactgagtcctttgaaaattaaaattttaatcatgcaagtaatacatggacacatgcttcttctaaaatgctaataaaatagtctaaagaaatcaaaccataaatg

SEQ ID NO: 450927 - DNA, 521 bp, Homo sapiens
tggtatacccagaaaacagaaacctctttaagtatctgaaatgagaaaatttaataaaggcaaytgactacacagctgaagaagtggcaaaaagctaagcaggggatgataaagtaacagggactggcaacagcatgaagccattctcatacctaggctgaagggagaaaggaagacgtctgagtcacagagactaaagtcaaaccaatggggtctatcagacaggagcttaaaccctagatgaacctagctgctgttggaagtgaaccagaaaaacagacaaaacagaaagatagagagccttcacatttagtgcttcctactggccaactcccctcaaagccgttggtcaagagagcctaagaaatgtggtgctctgaaatagggaacagaatagaagaagggccaggacatggatctaagagcacacaggtttacagatcagctggcttgaccatatattctatatagcatacattaaggtatgtatctttatctatagaacataaacactcatgcat

SEQ ID NO: 450928 - DNA, 642 bp, Homo sapiens
agtgtgatatatccctggcatgcaaagccagtttaatatatgcaaatcagtcactgtgatatatcacattaacagaatgaaaaataaaagcatgatcagctcaacagctgcagaaaaaaagtgtcacaaagttcagtatcttttcttgataaaaacacataacagttttggtacagaagaaaagtttctccatataataaaagctattaatgaaaatctcacagctaacattataatcaatagggaacaactgtaaacttttctatcaagatctggtacaaggcagagatgcccactcttgccacttctattcaacatagtactggaagtgctagcaagagatataagataagaaaattaattarttgataataatgatgataaaataataacaataagcatccaaattggaaaggaaaaagtaaatttcaagctacaaaaacaaaaataaataaatggatctatattaaactaaaaatcttctacacagcaaatgaaacaatcaacaaaatgaaaaggcaatctacaaatgtggaaaaaatatttgcaagctatatatctgataagggattaatatccaaaatttattaagatcatttacaacccgatagctgaaaatcaaatgacccaaggaaaaaaggg

SEQ ID NO: 450929 - DNA, 642 bp, Homo sapiens
agtgtgatatatccctggcatgcaaagccagtttaatatatgcaaatcagtcactgtgatatatcacattaacagaatgaaaaataaaagcatgatcagctcaacagctgcagaaaaaaagtgtcacaaagttcagtatcttttcttgataaaaacacataacagttttggtacagaagaaaagtttctccatataataaaagctattaatgaaaatctcacagctaacattataatcaatagggaacaactgtaaacttttctatcaagatctggtacaaggcagagatgcccactcttgccacttctattcaacatagtactggaagtgctagcaagagatataagataagaaaattaattaattgataataatgatgataaaataataacaataagcatccaaattggaaaggaaaaagtaaatttcaagctacaaaaacaaaaataaataaatggatctatattaaactaaaaakcttctacacagcaaatgaaacaatcaacaaaatgaaaaggcaatctacaaatgtggaaaaaatatttgcaagctatatatctgataagggattaatatccaaaatttattaagatcatttacaacccgatagctgaaaatcaaatgacccaaggaaaaaaggg

SEQ ID NO: 450930 - DNA, 547 bp, Homo sapiens
cattctgacattttgtgtgtatgttttattttgttttgagcatatcaggtttatcccaggcttaaggtcttttccatggatgttttctccctatggaatgctccttccccgaagaattttctttcttgttattcagatctcagtttaaatatttcttctctagtgaaactcagaataaagtagcaatctaatcattctctactgaattaccttatcactgtctgataagtttattcagtaatttccatatttattttcartctgtcactctccaacccaacacgtgtacaaaaagtggtaaagtgtctcactacttagaacagtggttggggcttcataaactctccagtacatagaaagattgaagtatctttgcagattttcatcagataatctcttcctgaagaggactatcgttttttgctcattttatgtgagtataaacataagtctaagacacacttttcatactccagagcaaatcctgtgcatcacaaacttttcatgtaattaacgctattttcagctccggatgccattgtttctg

SEQ ID NO: 450931 - DNA, 597 bp, Homo sapiens
taagagtcagaaaatactttgtgtactttgtactgagtcatatttgtcataaaaaaaataaattcttgttttctgaaagctgccctaatgtaattagcttgttcttattcagaattatcgtaccatggtgctttcattttcatttcccaataataatgaattacgtcctacgtatgtgctattgtatgyattcactttttgaagattttatttccaatctttgtgagagattttaagtacactttactctttgtatccttatttaataaaagaggaatatcctaaggagatggtggcttttaaggataagtgtctttttgtttttgttttgctttttaagtgttctttgttacttaaaatgcattattctatttgtgtgtgggaaagaaaataaggaaagatgtttgaaattttcccatcttaaactgattttccatgagtgctaacccaccttgaggtgctcaggcctcatggggtatcaggaaaattgcatagtgagtactttcctcctgcctccataactctgtgctgtaactaataaagtgtgatgatgttgcagcagcctagcccaggctaggaagccccccaggggctgtg

SEQ ID NO: 450932 - DNA, 597 bp, Homo sapiens
taagagtcagaaaatactttgtgtactttgtactgagtcatatttgtcataaaaaaaataaattcttgttttctgaaagctgccctaatgtaattagcttgttcttattcagaattatcgtaccatggtgctttcattttcatttcccaataataatgaattacgtcctacgtatgtgctattgtatgcattcactttttgaagattttatttccaatctttgtgagagattttaagtacactttactctttgtatccttatttaatawaagaggaatatcctaaggagatggtggcttttaaggataagtgtctttttgtttttgttttgctttttaagtgttctttgttacttaaaatgcattattctatttgtgtgtgggaaagaaaataaggaaagatgtttgaaattttcccatcttaaactgattttccatgagtgctaacccaccttgaggtgctcaggcctcatggggtatcaggaaaattgcatagtgagtactttcctcctgcctccataactctgtgctgtaactaataaagtgtgatgatgttgcagcagcctagcccaggctaggaagccccccaggggctgtg

SEQ ID NO: 450933 - DNA, 591 bp, Homo sapiens
acctcacctagtggtgagtgatttaaataaacaaatatttctgttttcctcatgcaacaagagctccagaagtaagcagtctagggctggaattgcagcacaacaataccgtcaaacactaagacttcttataacttcctgttttcctatgcttcttctgtatctatcagcctcatgaccacaattctgctggtacaggtgaggtgcggtggctcacacctgtaatcctagcactttgggaggctgaggcaggtggatgacctgaggtcaagagttcaagatcatcctggccaatgtggcgaaagcctgtctctatgaaaaatacataaattagccaggtgtggtggtgggtgcctgttattccggctactcgggaggctgaggcaggagaatcgcttgaacctgggaggcagaggttgcagtgagctgagatctcrccactgcactccagtctgggtgacagagggagacttcctctaaaaaaaaaaaaaaaattgctggtacacctccaggtattgcatctgcattgcaggaggaaagaagggagatcaaaagctttatctttttgcaattgtaccttttgatttgaga

SEQ ID NO: 450934 - DNA, 565 bp, Homo sapiens
tgctttttaattatttgagaatatatttctattattttttaaaaggttccagaggatgcaaaaagataagaaatatctctttgtatttcaaagatggcaaaaccttgctaccttacaaaacttgctcaaagaaaaataaaacacaggccaaacttgtttattcatagagataaaaatgctacataaataaaagtaaatacatctcagcatgaaaattaacaataacaagctgtgattaagggtttatttctggaattaaggaatggttaaataattggatatctatttatataattcatctcatcagcagataaaatatgaaaaatgattttttccwcaaaaactcctagtgactcctaattaaagattcttctttaatattataaagcatgtccaaaaccagcaatggccatcattatagtcaatgacatttctattaaagtcaggaacaagacaacaaggcccacactatcaccaatgttcttttatccttaaaataaatgagtttgaggacagaggcaaaatattatcacttgtcaatgataggcttaggtatctgaaaact

SEQ ID NO: 450935 - DNA, 645 bp, Homo sapiens
acaaaatttttatgtgcactaataaattgaaatattgtaataaatggaatagctgtcaaaaatatatttatatgtaaatatattgtatatatttccttgattcaaaataatggaagatttgctttttaattatttgagaatatatttctattattttttaaaaggttccagaggatgcaaaaagataagaaatatctctttgtatttcaaagatggcaaaaccttgctaccttacaaaacttgctcaaagaaaaataaaacacaggccaaacttgtttattcatagagataaaaatgctacataaataaaagtaaatacatctcagcatgaaaattaacaataacaagctgtgattaagggtttatttctggaattaaggaatggttaaataattggatatctatttatataattcatctcatcagcagataaaatatgaaaaatgattttttccacaaaaactcctagtgactcctaattaaagattcttctttaatattataaagcatgtccaaaaccagcaatggccatcattatagtcaatgacatttctattaaagtcaggaacaagacaayaaggcccacactatcaccaatgttcttttatccttaaaataaatgagtttgaggacagaggcaaaata

SEQ ID NO: 450936 - DNA, 523 bp, Homo sapiens
gctaattttggtgatagctgtgtcagggtcatcagagaaactgaaaagtccctcattattaggaatgttttaaattactttataaaatgttatgaggacttgtatatgtttgattccttattattatcccttgaatacccaatgcaagtttttcttgtaaattttaaatccttcatttgcttctttgggagtttttaaatttaatttttgaaaagtaaatatgaaacagagggattcaaattttggttgttctttgcattcagatattctgcaatcagtaagttgagttcctttagttgatttatatttcttatcaatatttcaaagcacttgtttccacaaattttctwtttaaaacaatttcttattcttgcattataacttcaaaaaccttgcttttggctttgttttttggctcttacatcacttacaaatttttaaaattgattaccttgttttaaaggttgatgactgcctgtccaactccattcccatctggcctagaatgtttaaattggctgtc

SEQ ID NO: 450937 - DNA, 639 bp, Homo sapiens
tgatcctgtagtgaaaatataatggttttcctcttcatctttgctttagtgaaatgcttgaaggcctactctctctctgagctgaaagtatgatttgttattccaaaactattttagtctcagcagagatggagtttgcacatgcattttygataactaaggctgactcccattagggtggaaaataaagcctataattcataataagagattgctgcctttgaaatcacttcctaccataatactggccacttcattacagtggtaattagaaagaaaaaaaccagaagtggccatttgaaggggaaattagtgcttaatttccaagactgttttattttaatggatgcaactctggcaagattttatacttcaattgcaaacccaagaatgataaggctggtgtttcagatctgtcttctaaatggaaaacacttcatgcagcatgtgatgaaagagcatctaatgactgaatatatcccttaaagtcagatatactgtctttaaaggagggtttaaaaaataagtatgtatgtgaaggtgggcatgtgtgggtgtaagttacatccatttaatcagctgctactgtcattaaccaagtacacaacttgagcgtgttaaaattactccaattaaaag

SEQ ID NO: 450938 - DNA, 524 bp, Homo sapiens
tattgtaatgactcaatacaattataggtaatagtataagaaagcagtatagcataatgctttccccatgctttggaattttgacagatatgagttcaagatctggctttactacttattagctgaggagccttgggcaaatcgtttaacttttctgagctttaggttctgyaccttcaaaagtgggaggagttaaaaatgtgcctatcacaggattttggttaggactatatgaaataaatgtaaaattgcctggcatatgacagtccataagtgtgttagctgtcatccttcaactttttagaaatattgctagggtgatatggtgtgctcaagctgactcacccctttgatgtgcagctggaaatacagacctgaatttccaacgctgccttctctcctgagatccagagctctacgtctaaatgcttctttgatacctctactcataagctctgctggcacttcatatttaaaatggccaaagctgattattttcccctcaaaacaaatctactgtttgt

SEQ ID NO: 450939 - DNA, 631 bp, Homo sapiens
aatgctttaagatattcttttcttcttcctaaatgttcatagaacatgcagtaatatccttttttcatttcaggtatactacacatttttatcttcttaatttcatgatcagacaacccagaagtttattaattttaattcttaaaaaaaaaatcaacttttcttttttttttttttttttgtttgagacagagtctcgttctatcacccaggctggagtgcagtggcacaatcacagcttattktagtcttgatctcctgggctcaaatgatgctcctgcctcagcattccatggagctgggactacaggcatacaccattgtgccctgctgatttaaaaaaaaaaattcttattttttctagacatggggtctcattatgctgcccaggctggtctcaaactcctggtctcaagcaatcctcccaccttggcctctcaaaagtatgaggtcacaggggtgagccactgggcctggccttaatttttttaattgtatatttttatttactatttaatttctgctcttattacatacttctttctgctttctttgggcttcatttgctgaatattttcctcacttcttaaaatagatgcttaaaacataataaatgtttataaaaaatagg

SEQ ID NO: 450940 - DNA, 545 bp, Homo sapiens
gtcccgtttgaggaggtggtgtctgatttagtggggcttacagattggttcaatcaggtatgatgtttacatagcacaaggggaagactggttgccccaccgtaatcttatgcaaatgaactctccccttggccagtgccatcttgtctgctccttactgtacacgtaaggyagagaagggtagatggagccgccatcttgaacatggtactagtccctagttcctgccgtcattcacccagggacgctcccagcttgcttatctattctgtgtctatggcttgactttacaggctgctctttgctaggaaatgatttggggctgcttttcattaaaaagaaaagccttactgaggattcccatacctttactatctgcctaagtgatatcttcttaactcctatatcactttctaggggctctaggggagagttcatattctttctttctccatcttctagaggttatccctattccttggcttgttgtccccttccattttcaaagccagcaaagccatttgagtctttctcacatggcttca

SEQ ID NO: 450941 - DNA, 545 bp, Homo sapiens
gtcccgtttgaggaggtggtgtctgatttagtggggcttacagattggttcaatcaggtatgatgtttacatagcacaaggggaagactggttgccccaccgtaatcttatgcaaatgaactctccccttggccagtgccatcttgtctgctccttactgtacacgtaaggtagagaagggtagatggagccgccatcttgaacatggtactagtccctarttcctgccgtcattcacccagggacgctcccagcttgcttatctattctgtgtctatggcttgactttacaggctgctctttgctaggaaatgatttggggctgcttttcattaaaaagaaaagccttactgaggattcccatacctttactatctgcctaagtgatatcttcttaactcctatatcactttctaggggctctaggggagagttcatattctttctttctccatcttctagaggttatccctattccttggcttgttgtccccttccattttcaaagccagcaaagccatttgagtctttctcacatggcttca

SEQ ID NO: 450942 - DNA, 545 bp, Homo sapiens
gtcccgtttgaggaggtggtgtctgatttagtggggcttacagattggttcaatcaggtatgatgtttacatagcacaaggggaagactggttgccccaccgtaatcttatgcaaatgaactctccccttggccagtgccatcttgtctgctccttactgtacacgtaaggtagagaagggtagatggagccgccatcttgaacatggtactagtccctagttcctgccgtcattcacccagggamgctcccagcttgcttatctattctgtgtctatggcttgactttacaggctgctctttgctaggaaatgatttggggctgcttttcattaaaaagaaaagccttactgaggattcccatacctttactatctgcctaagtgatatcttcttaactcctatatcactttctaggggctctaggggagagttcatattctttctttctccatcttctagaggttatccctattccttggcttgttgtccccttccattttcaaagccagcaaagccatttgagtctttctcacatggcttca

SEQ ID NO: 450943 - DNA, 545 bp, Homo sapiens
gtcccgtttgaggaggtggtgtctgatttagtggggcttacagattggttcaatcaggtatgatgtttacatagcacaaggggaagactggttgccccaccgtaatcttatgcaaatgaactctccccttggccagtgccatcttgtctgctccttactgtacacgtaaggtagagaagggtagatggagccgccatcttgaacatggtactagtccctagttcctgccgtcattcacccagggacgctcccagcttgcttatctattctgtgtctatggcttgactttacaggctgctctttgytaggaaatgatttggggctgcttttcattaaaaagaaaagccttactgaggattcccatacctttactatctgcctaagtgatatcttcttaactcctatatcactttctaggggctctaggggagagttcatattctttctttctccatcttctagaggttatccctattccttggcttgttgtccccttccattttcaaagccagcaaagccatttgagtctttctcacatggcttca

SEQ ID NO: 450944 - DNA, 573 bp, Homo sapiens
cttaatgatgttggaaaaatcccttttgccatatgatatcacattttaaactcagattatttcaagagtcattcaygtttttgcattcatcaataaagcatttattgttattgctgaagtaaaattccatttcatgaaatattatttatcatttcactgttaatgaaaatttaggccatttccaggttttggctgttacttgtcaggatgctgttgagcattcatgttacaagtgtttgtgtggacctatgttgccatttctcttgggtaaatattaatacctagaagtggactagttttgtcacatagctgtgtatttaactttttaagaaactgctggccaggcacggtgactcacgcctgtaatcccaccactttgggaggccgaggtgggtggatcacctgaggtcaggagttcgagaccagcctggccaacgtggtgaaaacccgtctgtactaaaaataccaaaattagccgggcatggtggcaggtgcctgtaatcccagctactagggaggctgaggcaggagaatcgcttgaacccaggtagcagaggttgcagtgagccgaga

SEQ ID NO: 450945 - DNA, 573 bp, Homo sapiens
cttaatgatgttggaaaaatcccttttgccatatgatatcacattttaaactcagattatttcaagagtcattcacgtttttgcattcatcaataaagcatttattgttattgctgaagtaaaattccatttcatgaaatattatttatcatttcactgttaatgaaaatttaggccatttccaggttttggctgttacttgtcaggatgctgttgagcattcatgttacaagtgtttgtgtggacctatgttgccatttctcttgggtaaatattaatacctagaagtggactagttttgtcacatagctgtgtatttaactttttaagaaactgctggccaggcacggtgactcacgcctgtaatcccaccactttgggaggccgaggtgggtggatcacctgaggtcaggagttcgagaccagcctggccaacrtggtgaaaacccgtctgtactaaaaataccaaaattagccgggcatggtggcaggtgcctgtaatcccagctactagggaggctgaggcaggagaatcgcttgaacccaggtagcagaggttgcagtgagccgaga

SEQ ID NO: 450946 - DNA, 573 bp, Homo sapiens
cttaatgatgttggaaaaatcccttttgccatatgatatcacattttaaactcagattatttcaagagtcattcacgtttttgcattcatcaataaagcatttattgttattgctgaagtaaaattccatttcatgaaatattatttatcatttcactgttaatgaaaatttaggccatttccaggttttggctgttacttgtcaggatgctgttgagcattcatgttacaagtgtttgtgtggacctatgttgccatttctcttgggtaaatattaatacctagaagtggactagttttgtcacatagctgtgtatttaactttttaagaaactgctggccaggcacggtgactcacgcctgtaatcccaccactttgggaggccgaggtgggtggatcacctgaggtcaggagttcgagaccagcctggccaacgtggtgaaaacccgtctgtactaaaaataccaaaattagccgggcatggtggcaggtgcctgtaatcccagctactagggaggctgaggcaggagaatcrcttgaacccaggtagcagaggttgcagtgagccgaga

SEQ ID NO: 450947 - DNA, 335 bp, Homo sapiens
ctttaattccagaagttcagtttggttctttcttaaaartgactattttacctctcaggtcttgaatcattttactggattccttggattgtttttcaactttctcctgggtctcgattagcttccttgccatccagattctgaattctatctctgtcattacaataattttagtctggttaagaactattgcctggggactagtgcatttgtttggaggtaaggggacactctggctttttcagttgccggaaaaagccagagtgtcttgcatttgttctttctcatctgagagagctggtgttcctttaactgtgatgtaagataaatatagt

SEQ ID NO: 450948 - DNA, 335 bp, Homo sapiens
ctttaattccagaagttcagtttggttctttcttaaaaatgactattttacctctcaggtcttgaatcattttactggattccttggattgtttttcaactttctcctgggtctcgattagcttccttgccatccagattctgaattctatctctgtcattacaataattttagtctggttaagaactattgcctggggactagtgcatttgtttggaggtaaggggacactctggctttttcagttgccggaaaaagccagagtgtcttgcatttrttctttctcatctgagagagctggtgttcctttaactgtgatgtaagataaatatagt

SEQ ID NO: 450949 - DNA, 545 bp, Homo sapiens
atggtttgaatgttttgtcccacccaggatttctgtgttgaaactgaatccccaatatgacagtattaaaagatgagagtctttgggaagtgattaattcacaaaggtgtagcctttatgaatggattaatgccgttgtaaaagaggcttcagagagctacctgactgcctttcccttccatcttcccccatgtgagaatgcagtagcaaagtgtcatcaatgaggaatggtgcctcaccagaaactgattttgcgactgccttgatcttggacttctcagcctctagaactatgataaaataaaattctattattataaattacccagtctttagcattctgttataaaaccacaaatgaaytgagataaatgtatattttgttaaggcttgtattacagaatcctagaatgcaaaaaaaaaaaaaaaaaaaaaagggagggtctgagggccatctggtccatttggtatccaatatctgaatttcttctctgacatgatatgcaggtggtcttataatatatgtttggacatttccaatgata

SEQ ID NO: 450950 - DNA, 545 bp, Homo sapiens
atggtttgaatgttttgtcccacccaggatttctgtgttgaaactgaatccccaatatgacagtattaaaagatgagagtctttgggaagtgattaattcacaaaggtgtagcctttatgaatggattaatgccgttgtaaaagaggcttcagagagctacctgactgcctttcccttccatcttcccccatgtgagaatgcagtagcaaagtgtcatcaatgaggaatggtgcctcaccagaaactgattttgcgactgccttgatcttggacttctcagcctctagaactatgataaaataaaattctattattataaattacccagtctttagcattctgttataaaaccacaaatgaactgagataaatgtatattttgttaaggcttgtattacagaatcytagaatgcaaaaaaaaaaaaaaaaaaaaaagggagggtctgagggccatctggtccatttggtatccaatatctgaatttcttctctgacatgatatgcaggtggtcttataatatatgtttggacatttccaatgata

SEQ ID NO: 450951 - DNA, 545 bp, Homo sapiens
atggtttgaatgttttgtcccacccaggatttctgtgttgaaactgaatccccaatatgacagtattaaaagatgagagtctttgggaagtgattaattcacaaaggtgtagcctttatgaatggattaatgccgttgtaaaagaggcttcagagagctacctgactgcctttcccttccatcttcccccatgtgagaatgcagtagcaaagtgtcatcaatgaggaatggtgcctcaccagaaactgattttgcgactgccttgatcttggacttctcagcctctagaactatgataaaataaaattctattattataaattacccagtctttagcattctgttataaaaccacaaatgaactgagataaatgtatattttgttaaggcttgtattacagaatcctagaatgcaaaaaaaaaaaaaaaaaaaaaagggagggtcygagggccatctggtccatttggtatccaatatctgaatttcttctctgacatgatatgcaggtggtcttataatatatgtttggacatttccaatgata

SEQ ID NO: 450952 - DNA, 545 bp, Homo sapiens
atggtttgaatgttttgtcccacccaggatttctgtgttgaaactgaatccccaatatgacagtattaaaagatgagagtctttgggaagtgattaattcacaaaggtgtagcctttatgaatggattaatgccgttgtaaaagaggcttcagagagctacctgactgcctttcccttccatcttcccccatgtgagaatgcagtagcaaagtgtcatcaatgaggaatggtgcctcaccagaaactgattttgcgactgccttgatcttggacttctcagcctctagaactatgataaaataaaattctattattataaattacccagtctttagcattctgttataaaaccacaaatgaactgagataaatgtatattttgttaaggcttgtattacagaatcctagaatgcaaaaaaaaaaaaaaaaaaaaaagggagggtctgagggccatctggtccatttggtatccaatatctgaatttcttctctgacatgrtatgcaggtggtcttataatatatgtttggacatttccaatgata

SEQ ID NO: 450953 - DNA, 583 bp, Homo sapiens
ggcacaatattggttcaagcgattcttgtgcctcaacctcccgagtagctgggactacagacacatgcccctgcacctggctaaktttttgtatttttggcagagatgagatttcaccatgttggccaggctggtctggaactcctgacctcaagtgattcgcctgcctcggcctcccaaaatgctgggattacaggtgtgaaccaccacacctggcctccattgatgatatttacataacgaaaacaaattgcacaaattttctctaacttattttgttcaatgttatgtttttgattcatctatgttggtgtaaatatatgtaactaatttattttcactgctgcgtactatttcattgtgtgaatataataaattatttttccattgtactgttgattggtattatagccatttcaggttttacagttatgagcaaggctgctatgactatgtttgtatgaatactctagtatgcatgtgcaagagtttctaagtatactcttaggggttgactcactgaatcgtaaggtaggcacattcaaatttattaggtaatgtcaaactgttttccaaagatgtt

SEQ ID NO: 450954 - DNA, 583 bp, Homo sapiens
ggcacaatattggttcaagcgattcttgtgcctcaacctcccgagtagctgggactacagacacatgcccctgcacctggctaattttttgtatttttggcagagatgagatttcaccatgttggccaggctggtctggaactcctgacctcaagtgattcgcctgcctcggcctcccaaaatgctgggattacaggtgtgaaccaccacrcctggcctccattgatgatatttacataacgaaaacaaattgcacaaattttctctaacttattttgttcaatgttatgtttttgattcatctatgttggtgtaaatatatgtaactaatttattttcactgctgcgtactatttcattgtgtgaatataataaattatttttccattgtactgttgattggtattatagccatttcaggttttacagttatgagcaaggctgctatgactatgtttgtatgaatactctagtatgcatgtgcaagagtttctaagtatactcttaggggttgactcactgaatcgtaaggtaggcacattcaaatttattaggtaatgtcaaactgttttccaaagatgtt

SEQ ID NO: 450955 - DNA, 585 bp, Homo sapiens
agccatgaaagtgtgaaaatcaatggtaatggcaggtatctttagattacttttaacattttattattaaatataatgcttactctctgatttttaaaatatacctttatcaggtttagaaagttctattctgtccctcattgactaagttttctctttcttttttatttactttagtagtcacaagtggatgttgaattttattactttttctgcatacacaaagatttatctcctttaatttattaatatgaatgatttataataatcaattttctgatatgaaacttgctttgtagtcctaggataaactctgttagatatatgaattgcaaatattttctcccgttctgtggcttttttcatttcttgatctygtctttaaaatttaaaagcagttttaaattttgataaagttcaatgtgttaattttaatttttatttttttgagacagagtctctatgttcccctagtctggagttcagtggcaaaatcttggctcactgcaacctctgcctcctggtttgaagcgattctcatgcctcagcctcctgagtagtaggaactacaggcatcaccatgct

SEQ ID NO: 450956 - DNA, 517 bp, Homo sapiens
tcatttaaaaatatatttatcttatggccattttcacatcctatgaaatgtatcttctttatgcattattgttctttcaattacttgttatcttttattatgagatcatcttcagtaggatttgtttgttatgtggagtctactgtacctggggttgtttgtgtgttccttcagaatagattttttgcataagtttcagagcatgcagtttagtgggactttcagttattaatttattcagtttaaatttattgtctacttcacctgtaacttcttgttggtctcttgtccctctgtattttattctgaatgatccttcttccccagttttgtaatttattgtaggttgagaaatcagataatcaagcctatgagaagtctatttaaaaggcaatttcttttgggaaatacttcarctagctatagggcattctttatctatttacaggccaatatgttccaaacagttaaaattgcctgaaatctgaattttagttcactgatatgttaattattt

SEQ ID NO: 450957 - DNA, 638 bp, Homo sapiens
tgattacaaatctattatcaaaaactaaagtgaaaaaatgtaaaaaatgacaatattaatgcctgaatacaggaaatagacacatattctgaaagcttgacatttgcagattagcagataaaacatgttaagtgtttaaaaagttaaataaaaatacaatctaaattaggttatggatatgataaagcaagtagaatatggattattgttagtttatgtgtatcttagtccattcataattgaccttgtattatttgtactctccgggctttgatcatcacaaaaggaaatatttcaaatatttgttttccaagttgtgattctactctgtgaactactacccattaaaacaaatcctataggctttcaggtggagaaaaagaaaataaaagtgctctatactagactgtatctaagtgctttgcaaatttaaatacaggtttgcttttagatctcagccacaatgctatacagaatcttggtatacttaaaaacaagctcaaaaaaaaaaatacccmaaacaaaacacaaacccctcaacaaaatactagccaccagcacctaacagcctatacgaagaaatatataccatgaccatgtgagatttatcccaggaatgcaaagttggcacaacccat

SEQ ID NO: 450958 - DNA, 557 bp, Homo sapiens
tgatagaaaacacagaggaagccatttcttatatatagaaaaccattaaaaatttcatggaaagctattaggwttaataaatgaaggtagcaaattgcaggatacaagaccaatttacaaaagcacttgtaattaagttcactagcaataaacaacccacaaataaaattaagaaaacaaaatcatttgcaatagcatcaaaaaaaaaagcctaggatacgtaggaataaatcaagatttgtatactgaaaagtacaaaaagtcattgttgaaagacattaaataaatgtcttttatttaaaaagtgaatggaaacacattctatgtttgtgaatgaaaagactttgtattgttaagatggtaaaagactccaagttgatctgtaaattcgatgcagtatttattaaaatgtcaattgccttttttaacagaaatgggaaaactgatccaaaacttcatatgagatagtaaacatacctgaatagtcaaaatgatcttgaaaaaaagaacaaagttgtaggactcacatttactgatttcaaacctgttaaaaagtg

SEQ ID NO: 450959 - DNA, 557 bp, Homo sapiens
tgatagaaaacacagaggaagccatttcttatatatagaaaaccattaaaaatttcatggaaagctattaggtttaataaatgaaggtagcaaattgcaggatacaagaccaatttacaaaagcacttgtaattaagttcactagcaataaacaacccacaaataaaattaagaaaacaaaatcatttgcaatagcatcaaaaaaaaaagcctaggatacgtaggaataaatcaagatttgtatactgaaaagtacaaaaagtcattgttgaaagacattaaataaatgtcttttatttaaaaagtgaatggaaacacattctatgtttgtgaatgaaaagactttgtattgttaagatggtaaaagactccaagttgatctrtaaattcgatgcagtatttattaaaatgtcaattgccttttttaacagaaatgggaaaactgatccaaaacttcatatgagatagtaaacatacctgaatagtcaaaatgatcttgaaaaaaagaacaaagttgtaggactcacatttactgatttcaaacctgttaaaaagtg

SEQ ID NO: 450960 - DNA, 588 bp, Homo sapiens
ccacgtatcgtatgatttcatttgtatacaatgtttagcaaaagcaagtgcatagagacagaaggtatattaatgatttccaggggatgaggaaaagggggagtagggagtggggtttctttttgaaggtgatgaaaggatttggcattagatagtggttattgttgcacattcttttgaatatactaaagaccactgagatgtagactttcaatggtgaactgtgtgtatataaattacatctcaaaaaatgaataacctaggaaaattagctcagaccaatttgactcaaatttctctcctattgtattaaaagtattaatgttgaggtgaaaaagttgtcaacttagcatgttttatagakgtccactctatttcaagtgtaatggtaatttacagctttgcagatccattcttgccagtcgaagatgataaaaattcagaggtcagtaacatgactataatatggaaacacagtctgtgggcagtggagccagttaaaaacacagtctgtgggcagtggatccagttaaaatagtgtaagattgtaaatttaaaaaggcacatgtaaaaatttattattaaaag

SEQ ID NO: 450961 - DNA, 588 bp, Homo sapiens
ccacgtatcgtatgatttcatttgtatacaatgtttagcaaaagcaagtgcatagagacagaaggtatattaatgatttccaggggatgaggaaaagggggagtagggagtggggtttctttttgaaggtgatgaaaggatttggcattagatagtggttattgttgcacattcttttgaatatactaaagaccactgagatgtagactttcaatggtgaactgtgtgtatataaattacatctcaaaaaatgaataacctaggaaaattagctcagaccaatttgactcaaatttctctcctattgtattaaaagtattaatgttgaggtgaaaaagttgtcaacttagcatgttttatagaggtccactctatttcaagtgtaatggtaatttacagctttgcagatccattcttgccagtcgaagatgataaaaattcagaggtcagtaacatgaytataatatggaaacacagtctgtgggcagtggagccagttaaaaacacagtctgtgggcagtggatccagttaaaatagtgtaagattgtaaatttaaaaaggcacatgtaaaaatttattattaaaag

SEQ ID NO: 450962 - DNA, 588 bp, Homo sapiens
ccacgtatcgtatgatttcatttgtatacaatgtttagcaaaagcaagtgcatagagacagaaggtatattaatgatttccaggggatgaggaaaagggggagtagggagtggggtttctttttgaaggtgatgaaaggatttggcattagatagtggttattgttgcacattcttttgaatatactaaagaccactgagatgtagactttcaatggtgaactgtgtgtatataaattacatctcaaaaaatgaataacctaggaaaattagctcagaccaatttgactcaaatttctctcctattgtattaaaagtattaatgttgaggtgaaaaagttgtcaacttagcatgttttatagaggtccactctatttcaagtgtaatggtaatttacagctttgcagatccattcttgccagtcgaagatgataaaaattcagaggtcagtaacatgactataatatggaaacacagtctgtgggcagtggagccagttaaaaacacagtctgtgggcagtggakccagttaaaatagtgtaagattgtaaatttaaaaaggcacatgtaaaaatttattattaaaag

SEQ ID NO: 450963 - DNA, 588 bp, Homo sapiens
ccacgtatcgtatgatttcatttgtatacaatgtttagcaaaagcaagtgcatagagacagaaggtatattaatgatttccaggggatgaggaaaagggggagtagggagtggggtttctttttgaaggtgatgaaaggatttggcattagatagtggttattgttgcacattcttttgaatatactaaagaccactgagatgtagactttcaatggtgaactgtgtgtatataaattacatctcaaaaaatgaataacctaggaaaattagctcagaccaatttgactcaaatttctctcctattgtattaaaagtattaatgttgaggtgaaaaagttgtcaacttagcatgttttatagaggtccactctatttcaagtgtaatggtaatttacagctttgcagatccattcttgccagtcgaagatgataaaaattcagaggtcagtaacatgactataatatggaaacacagtctgtgggcagtggagccagttaaaaacacagtctgtgggcagtggatccagttaaaatagtgtaagrttgtaaatttaaaaaggcacatgtaaaaatttattattaaaag

SEQ ID NO: 450964 - DNA, 552 bp, Homo sapiens
ttatcataagtatatatgtatgtatagggaaaaacagtatatagagggtttagtactatctgtagtttcaaataatccgctggaggtcttggaatatatccctactgataagcggacactgctgtaggcttgtggagggattataagagaatttggaatgtgtgttcatccctaactgtaatgctgaagtgacagaagacaatcataccatcaaaatataccttgcctccattgtcagatacaatagcttgattgaacagataaggcatttctcttcaatkccatcaacatttttgagttgaatatttaacttttaaagtaagaggtcttaagctaacaaaattggcagatactgtgaaccgatagtgaaaaatctgtttcctttttgtcctgggtatactgcaagactatatttcctagcctcatgtgcagttagatgtagatgcaaaactgaattttagaaagtggagtggatgtatttgctatttttatattaaggttttgagaattcataatgttttctcccagttttttctctttgtaccaattgga

SEQ ID NO: 450965 - DNA, 552 bp, Homo sapiens
ttatcataagtatatatgtatgtatagggaaaaacagtatatagagggtttagtactatctgtagtttcaaataatccgctggaggtcttggaatatatccctactgataagcggacactgctgtaggcttgtggagggattataagagaatttggaatgtgtgttcatccctaactgtaatgctgaagtgacagaagacaatcataccatcaaaatataccttgcctccattgtcagatacaatagcttgattgaacagataaggcatttctcttcaattccatcaacatttttgagttgaatatttaacttttaaagtaagaggtcttaagctaacaaaattggcagatactgtgaaccratagtgaaaaatctgtttcctttttgtcctgggtatactgcaagactatatttcctagcctcatgtgcagttagatgtagatgcaaaactgaattttagaaagtggagtggatgtatttgctatttttatattaaggttttgagaattcataatgttttctcccagttttttctctttgtaccaattgga

SEQ ID NO: 450966 - DNA, 624 bp, Homo sapiens
tctctaactcctgagcagtgcataaggtaagcttacacaatacacaacctgttgtgtgaaattccagaatttccatccccgccatgtctaagggtgccaagttttgatctgcactgattcagcagtatgtttacagtcttttcacaggtaattggctacctaaagaaaaatactcatggctacactagcagaaaggaagggcaaattataaagaacaaggaaagaaaggaagaaaaaaaagaaaaagaaaactaataggatcacaggattaagttcagcattatttaacaagtgatacatagagcaagtttacaaaaacaaaagccttttcagcagacttggaagcaaaaacagggctgtgtaacacaacttagatttagcgttttgctgaagtgaaataytgcactccttaaaagaggaaatcactttcttcccccttaaaaaaacacacacacacaacataaaaatcagcaaaagcttggtattttataggttatttttctagccccttaaaaataaacacagcatgaccctcaaaaagaacatcagcacctttaaccagcttaaaaaacaaatctaaagcctagaaaacaaagaaattgtgcaataaaatgtaattggtgt

SEQ ID NO: 450967 - DNA, 583 bp, Homo sapiens
atgagtttttgctttgtggttataaggctttaaaaaagtgttttataataagttactttaaactgattacaccttaactttggtcagtacaaggaaatactaaaaaactctaagctctaagtttattacccctactyttagactttttgttgtctctgtatctttttatattgcctatttcttaagcaatattacttttggtaggtttatgttttagttttcatgctaaactttctagcatcttatacacaattacagcattagagtgctctgaatgttgtgtgcttagatttaccagtgagttttccatcttcagatgatttcttgttgcacattagagcccttttctttcagagtaaaaaaatctttaggttgtcttgtaagataggtctagtggtgacaaatatctttcagcttctgtttgtctggaaagtctagttctttatgattgaaggatatctttgctggatacagtattctcagtggaagtttttttgttgtccttcagcactttaaatatgtcttcccacttcctcctgattgataaggtttctgttgagaagtctgcttccagatgtatagg

SEQ ID NO: 450968 - DNA, 400 bp, Homo sapiens
gttgtacaagaagcatgatgccagcatctggttatgatgaggacttcaagaagcttacacatgatggaaagcaaagcaggagctggtgtgtgcagagctcacatggcaagggaggaagcaagggggtggtggtgccagtctctttttaacaaccagctctcacaggaatgaatagagtgagaactcattcaccacccccaaccccccacatcagtctattcatgagggatccacccctgtgacccagacacctgccattaggccccatttccaacattgrggatcaaattgcaacttgagatttggaggggtcaaatagtcaaaaccatagcactgacctaataggattcttggtgaaggcaggccagggtgattagacatcacttgagggatggtagag

SEQ ID NO: 450969 - DNA, 639 bp, Homo sapiens
accttccccagtggtggaggtggggccttgtgggaagtgttgggccatgggggaagatcccttgtgcacggatttgtgccattgttgtggtagtggaggatcttatygttaaaaagagcctggcaccatttcttcaccctgtcactccctctcttgccctgtaaaatgtgtgtttttccatcaccatctactgttagtggaagctttttgaggtcctgacaggaagcagttgctggtgctgcacttgtatagcctgcagaactgtgagccaaatatacctctttataaattacccagtctcatgtgtttcttcctggcagtccaaaatggacttatgtggaaaattggtcccaaagcatgggacattattataaagatacctgaaaatgtggaaactgctttggatctgggtaatggacagaggttggaagagtttggagggctcagaagaagacaggaaaacgacagaaagtctagaatttcttagagactggttaaatgtaactacaatgctaatagaaatatgcaaagtgaaggccatgctgatgaggtctcagatggaaattaagaacttactgggaactgaaatgaaggtcacccttgttacccattagccaagaacttggctgcattatgtcc

SEQ ID NO: 450970 - DNA, 670 bp, Homo sapiens
ggttctctttcaaacaaaagaacagcctgaaaaatgaagctgcaggcacagataaaggaatttgcacaggggggcttgcctaagacatgcccacagccacacagataagaaaggctatacaggtggcttgcccagacatgcccacaacggacaattccatcccctgacacatgcacagtaaggggaacaaagcaatacggagtaactcaagctaagggcccacatgtgcattagaagaacaaggtagagctaccagaaattcgtacctatgcaaatgagatccccagcccttattggtttcctgtaaaaacctttgcattcaactgtaaaaatggtaacccttttctgggtcccctctccgcagccaagagctttctcctttcttttattaaactttcgctccaacttcaccctttgtgctcactctccctaattctcttagttgtgagaaaaagaactccaggtgataactcacagtgagagactgctactttgtggtgcattggtgagactgtaacatcagtgctgaggctggccctstcccctagtccgtatgtaataccaagagtgcaagctcaacaagggaaccaagtttgattggctctgttcagcagagatcagtttggggacagatgttaatttagtacatacagttaaatagacatgtggg

SEQ ID NO: 450971 - DNA, 592 bp, Homo sapiens
ggatgttgaggatttggaacctgtgtgcactgttcatggaatgcaaactggtactgtcactatgaaaacagtatgatggtcccttggaaaaccaaacatacaattaacatttgatcaagctattctacttctacatatacactccaaaaaattaaaggcagggactcacacagatatttgtacatcaatgtttatggcagcattatgcacaatagccaaaagatgaaaacagctcaaatgactctaaacagatgaatagatgaacaaaatgttgtatatacctacaatcagctattattcagccataaaaatgtaggaaattatgacacatgctacaacatggatcaccttgaagacattatgccaagtgaaatatgccaggcgcaaaagaacaaataytgtatgaggtactagaataatcagatacattgagacagaaagtagaagtgtagctaccatgggctgggggaggagggaatgcagaatcattgtttaaaggtagagagtctcagtttacaatgatgaagttctggagatagctgcacaactaatgtcaccgaagtattttcttaattagtaaaatagtaatttt

SEQ ID NO: 450972 - DNA, 567 bp, Homo sapiens
tctggattcaaaaatgtttaatattttcaaaagcaatattaaaaattgactaatttgtcatgaatgatcttaaagaccaaattccaagggaaggtgaacgcccaaagagttaagtggagtattgaagctgttttttttctaatagcatttgccaaccaagggaatgtgaccttcagtttggaaggcatttatgaagaggccaaaagtcaaagaccagagcttgtctaaagtaaagagtctagtaggaggcctcctttagatgttataagactaaaccagtgattcttaatacttgctgcacataaacatcaattgaggttctccttaaaaacttgagctctgatccatcaccagagactctgatttagtaagtctagagttgagggtgagtgtgagtgtttttttaaagcctcgccccacctccaggtggttccaattgcagtcaagsaggcaaagaactggagtaaatgtcgagagcaactgtgaactagaactagcagggcaagcaggtttaggactggctagctggaataatttcagtgggctctggggcagagggattgttct

SEQ ID NO: 450973 - DNA, 593 bp, Homo sapiens
gcagctctttccattccaaagtgagctatcaactatctacatggagaagcttcatgcactttaatgaagaaattgcttttgctttctcctttgactccagaccttggtactgagacaagaacataaggaagaactactcatgtactaccagcacccccaggagacgagctgagtctatcaaattaagccaaagacctggaaaagctgtgactgtgggtcaaagtcctggctgcagcaccaggagcccattggtgggagacaggtgataattccaccaattcccccatttggccttcagtttcgaggacatcgtgcttctcagcagatgtccacgtgagggcagcagagggattttaagagttgaagcgctctctacagaactaacagagagaaacacagagagggagacagagacagagagagggaggaagacagaaaaagagaaagaattaataaacagctatgtttacatattctcgttttgggacaaggctggatttccaagaggcaamacacagtgagtgcttccagaggtgagtgaaagttatttagggaaaaaaagtttataaacgtgaaagtttacaggaagagat

SEQ ID NO: 450974 - DNA, 583 bp, Homo sapiens
aatgagaaatgtgttgcctccaaaatccaaataggcccactaagcgttacatctctttcttggttgtaggaggggccaaatgcagaaacttatcattcaccttggaagaaatatctcaacagacttcagtaagttcagtgtgattgctacttcttgctcactggatccaatcagcataatgtcatcagtgtaatggaccagtgtcatatcttgtagaagacaaaagcaatcaaaatcactccaaacaagattatgacacaaagccagagagttgatatactgctgaggtaggacagtraaggtatattgctggccttgtcaactgaaggcaaattgcttctggtgggccttatggacaggaatggagaaaaaggcatttgccaaatcaatggttacataccaggtaccaggagatgtgttaatttgctcaaacaatgaaaccacatctggtacagcagctgcaattggagtcaccacttggttaagcttacaataatccagtgtcattctccaagatccatctgtcttctgcacaggccaagtggagagttgaatggggatgtggtgggaatcaccacccctg

SEQ ID NO: 450975 - DNA, 598 bp, Homo sapiens
ctggggttccattgcctgacaatttggagtttgatagcctctaggtgagaggaaaaaaaagtaagtttttataaggttaagtatgcatgggttaaacatgtgtattatacaaggaaggaatctactgccaaatattacagcaataagaagtgaaatatactaatcattctgaaaaaaatattgtgcctcactgtatagaacagaacaaaggtaagaacagcaagcatgggaaagactataaagaggatatccatggaaggttaattattaacacttatcttttgtgatttttagcttgaggtccccaatctcttcacattggtactttgagtgctcttttgggttgacagagtcacctcaggtgactccattggctttccaggccattaatctagtataatgaatccaagactctattccagtgaccttcactgccataggagtagaaagaagtacagtgaaaggtctctcccaacctggacctatagagggagagagggaaggaagtacctttactagcactaggacccctgggtttaatagaagtggccttkgttcatgggattaggcctctgacagttgtttcagttgctgttgg

SEQ ID NO: 450976 - DNA, 598 bp, Homo sapiens
ctggggttccattgcctgacaatttggagtttgatagcctctaggtgagaggaaaaaaaagtaagtttttataaggttaagtatgcatgggttaaacatgtgtattatacaaggaaggaatctactgccaaatattacagcaataagaagtgaaatatactaatcattctgaaaaaaatattgtgcctcactgtatagaacagaacaaaggtaagaacagcaagcatgggaaagactataaagaggatatccatggaaggttaattattaacacttatcttttgtgatttttagcttgaggtccccaatctcttcacattggtactttgagtgctcttttgggttgacagagtcacctcaggtgactccattggctttccaggccattaatctagtataatgaatccaagactctattccagtgaccttcactgccataggagtagaaagaagtacagtgaaaggtctctcccaacctggacctatagagggagagagggaaggaagtacctttactagcactaggacccctgggtttaatagaagtggcctttgttcatgggattrggcctctgacagttgtttcagttgctgttgg

SEQ ID NO: 450977 - DNA, 408 bp, Homo sapiens
atctcattgattagtacttttgtcaccttagaggctttgtctgtttggcatggaaatgtttctacccagttagtgaattatctatccatactaggaggtactggatgccctttgcttttggcatatgagtgaaatcyatttgccagtcttcccctgggtagcctcctatactttgggttcctgagggaagaagctgtcaattaagaggattgtttctaaggcaggtctcacaagcattaacaacctgtttaaccatttctatcagttttttacctgagaacaatctctgggccagttgatagattttatccttttaagaactttccactggttggcagtcagtagatgaagcttgccatcctccagttgtagccatgctgaggattgaaagatgtatccctgagaggt

SEQ ID NO: 450978 - DNA, 545 bp, Homo sapiens
tgtggccaatccccagtgctgtcacaacccagctaggtgtgcacacactcaggacatcaccaacatgccagctctgagctgtctcggccccctctggactttgggcaccaacgaacatgggacagaggccaagtcaggactaagggtggctcagtgtrggcccacagacaccccttggcacaaacagtctggacactgtgggcaccatggatggcaggttaatggcagcaggaggcagatgggcttctgggcagaaaggggtgggtccctagtgaaaccccaccctcatgtcagggatagcccaaggcctgggggcccaggctgccagttctgtggactggagtgagaacttacggtgctttctttgggcctgtccatggccacccatggacaaatcagcatggaatttctcccctctgaagcccataaaatccctggactcaaccagactggggcaggtgacaggatgacctgcctgtggagtggagctacccactgtgggcctcctctttgctgagaactgaacagatgatggatgccctgcc

SEQ ID NO: 450979 - DNA, 545 bp, Homo sapiens
tgtggccaatccccagtgctgtcacaacccagctaggtgtgcacacactcaggacatcaccaacatgccagctctgagctgtctcggccccctctggactttgggcaccaacgaacatgggacagaggccaagtcaggactaagggtggctcagtgtgggcccacagacaccccttggcacaaacagtctggacactgtgggcaccatggatggcaggttaatggcagcaggaggcagatgggctyctgggcagaaaggggtgggtccctagtgaaaccccaccctcatgtcagggatagcccaaggcctgggggcccaggctgccagttctgtggactggagtgagaacttacggtgctttctttgggcctgtccatggccacccatggacaaatcagcatggaatttctcccctctgaagcccataaaatccctggactcaaccagactggggcaggtgacaggatgacctgcctgtggagtggagctacccactgtgggcctcctctttgctgagaactgaacagatgatggatgccctgcc

SEQ ID NO: 450980 - DNA, 558 bp, Homo sapiens
tgtggccaatccccagtgctgtcacaacccagctaggtgtgcacacactcaggacatcaccaacatgccagctctgagctgtctcggccccctctggactttgggcaccaacgaacatgggacagaggccaagtcaggactaagggtggctcagtgtgggcccacagacaccccttggcacaaacagtctggacactgtgggcaccatggatggcaggttaatggcagcaggaggcagatgggcttctgggcagaaaggggtgggtccctagtgaaaccccaccctcatgtcagggatagcccaaggcctgggggcccaggctgccagttctgtggactggagtgagaacttacggtgctttctttgggcctgtccatggccacccatggacaaatcagcatggaatttctcccctctgaagcccataaaatccctggactcaaccagactggggcaggtgacaggatgacctgcctgtggagtggagctacccactgtgggcctcctctttkctgagaactgaacagatgatggatgccctgcctgtggagagctac

SEQ ID NO: 450981 - DNA, 592 bp, Homo sapiens
gcagcctcccagaagctggggcccaggcatcagtgagcagcaggctttgctcagcttccttcacaagactggctccttgtcagcctaccctgggcagcagagcacacccagttcctgcctcctgtaggagcctgcctgcagcctgggagcctggtgagctgaaggctcaagcccttccctgtctttgtgttctcttccaattctgattctcaactctttcttcatttgcaagaggaccatggtttcttctatttatatttttaatccgttactggcatatgtcagagcagaggatatacatcatagtgtgatcatattttgccctttcaacccatcctcaaatctgatttaaaaaaataatttccaaagttaygcagtgttattgtaagattttcctatcacaacggggcaattgtgtacatttcaaccccctgcttctgtctctctttacacaatcatagaattgagggtgacattcttttggtaaatcatatcatgatccaccagctgaaagattaatttaagaaagatgattagaaagagacatctgaatagtttatctgagccataagcatggacatcagtgacagga

SEQ ID NO: 450982 - DNA, 592 bp, Homo sapiens
gcagcctcccagaagctggggcccaggcatcagtgagcagcaggctttgctcagcttccttcacaagactggctccttgtcagcctaccctgggcagcagagcacacccagttcctgcctcctgtaggagcctgcctgcagcctgggagcctggtgagctgaaggctcaagcccttccctgtctttgtgttctcttccaattctgattctcaactctttcttcatttgcaagaggaccatggtttcttctatttatatttttaatccgttactggcatatgtcagagcagaggatatacatcatagtgtgatcatattttgccctttcaacccatcctcaaatctgatttaaaaaaataatttccaaagttacgcagtgttattgtaagattttcctatcacaacggggcaattgtgtacatttcaaccccctgcttctgtctctctttacacartcatagaattgagggtgacattcttttggtaaatcatatcatgatccaccagctgaaagattaatttaagaaagatgattagaaagagacatctgaatagtttatctgagccataagcatggacatcagtgacagga

SEQ ID NO: 450983 - DNA, 592 bp, Homo sapiens
gcagcctcccagaagctggggcccaggcatcagtgagcagcaggctttgctcagcttccttcacaagactggctccttgtcagcctaccctgggcagcagagcacacccagttcctgcctcctgtaggagcctgcctgcagcctgggagcctggtgagctgaaggctcaagcccttccctgtctttgtgttctcttccaattctgattctcaactctttcttcatttgcaagaggaccatggtttcttctatttatatttttaatccgttactggcatatgtcagagcagaggatatacatcatagtgtgatcatattttgccctttcaacccatcctcaaatctgatttaaaaaaataatttccaaagttacgcagtgttattgtaagattttcctatcacaacggggcaattgtgtacatttcaaccccctgcttctgtctctctttacacaatcatagaattgagggtgacattcttttggtaaatcatatcatgatccaccagctgaaagattaattyaagaaagatgattagaaagagacatctgaatagtttatctgagccataagcatggacatcagtgacagga

SEQ ID NO: 450984 - DNA, 511 bp, Homo sapiens
cttggaaatagttcattgtaggtttcaccaaataatatttgacatgtacagtgaaatttaactgctaaacttaggtggcttttcatattctcatttatactatcaagagaaggggatgacagcatttgacttaaaatattaaaatatcaaagcttttcacttaaaatattaaaatatcaaagcttttcagatgaagaattcagagagctaggcaccttccctcrgtcagaggccaccatcacttgatacttcaaggaaacttcatttgcactcccaaaacaggacctgtatttgttgttttgatattttaaaattttaaatattagataaatattaatttttttctccaaagcttttaagactataaaatttagtagggttcatcagaattctaaaatgtggaaataaattccttaaaacttgaattacctttatttatacttgaagtctctttaatattaaaatttttactgaggaaaaggaatctatgcctttgaatagccaaaggaaa

SEQ ID NO: 450985 - DNA, 511 bp, Homo sapiens
cttggaaatagttcattgtaggtttcaccaaataatatttgacatgtacagtgaaatttaactgctaaacttaggtggcttttcatattctcatttatactatcaagagaaggggatgacagcatttgacttaaaatattaaaatatcaaagcttttcacttaaaatattaaaatatcaaagcttttcagatgaagaattcagagagctaggcaccttccctcagtcagaggccaccatcacttgatacttcaaggaaacttyatttgcactcccaaaacaggacctgtatttgttgttttgatattttaaaattttaaatattagataaatattaatttttttctccaaagcttttaagactataaaatttagtagggttcatcagaattctaaaatgtggaaataaattccttaaaacttgaattacctttatttatacttgaagtctctttaatattaaaatttttactgaggaaaaggaatctatgcctttgaatagccaaaggaaa

SEQ ID NO: 450986 - DNA, 477 bp, Homo sapiens
cccatacacctcagatccactaaaccaaatgaaattgttcatgcctctgaatcccatagccctttggctgtgatactatttttccctatgtttatattatctaaagcaggacagtgcatcagaatctcctacagaggctacaaaaatatagatatgccctatttagtagtaaagtgacataatgtctggaatttgctttaatacactacaccaagggcaataggtacatacaggctcattatactattctactcttatgcacgtttgaaatttcctattaaaatacatttttttttaaatactccaggcaaaagaaatgttgggaggataggtgaaataaaatcagctaaatgttgaygccatttaaactgggtgatgcatacaaggagtttactttactattctgtttattcttttatatctttgaaatcttccataataaaatgttaaaaatatacattaatatacacataccca

SEQ ID NO: 450987 - DNA, 477 bp, Homo sapiens
cccatacacctcagatccactaaaccaaatgaaattgttcatgcctctgaatcccatagccctttggctgtgatactatttttccctatgtttatattatctaaagcaggacagtgcatcagaatctcctacagaggctacaaaaatatagatatgccctatttagtagtaaagtgacataatgtctggaatttgctttaatacactacaccaagggcaataggtacatacaggctcattatactattctactcttatgcacgtttgaaatttcctattaaaatacatttttttttaaatactccaggcaaaagaaatgttgggaggataggtgaaataaaatcagctaaatgttgacgccatttaaactgggtgatgcatacaaggrgtttactttactattctgtttattcttttatatctttgaaatcttccataataaaatgttaaaaatatacattaatatacacataccca

SEQ ID NO: 450988 - DNA, 606 bp, Homo sapiens
ttcaatatcttcaatatctctatcacacattttcaccatgtcatctatacctttacactacagtccartttctccaacagcttgactttctgtgttataagtatttctacttttccttatcgttgctgctcgtagggatatctacaggtcttattgacattttcagtatgttaacatcacagagcagagaataagcaaaaatacacaatgggtaatgcacttaggtcccgtctgtggggatcctgcctttggcgtgtccagcttgcacatgtgccattctgtgaccctttttgggtgtacttacatggggaaatctgagcatgtgtacaaaagttatactgcagctgaagggggctgagagggtcttttttcactagagaacatcaaataaactgtgtgttgttcacctgcattttgactcggacatcaaaatccacatgtagtgtcatgtcagtgctcaaaaagtttcagattttgaagcatttcaaatttcagattttcagattagggatgctcaacctctaaatttaagttaaggtaataggttgcttggtcgccatgacattaaaaaatgtgtcttctgcaactgtaaagtttgagaagaca

SEQ ID NO: 450989 - DNA, 545 bp, Homo sapiens
ttctggggtacatgtgcagaacgtgcaggtttgttacataagtatacacgtgtcatggtggtttgctgcacccatcaactcgtcatctacattaggtatttctcctaatgctctccctcccctagttccccaccccctgacaggccccggtgtgtgataggcatcagatttaaggaatgaatgagtagcaagaatgaggaagggacaataagctctttgaargtttttgtgaaatagaaaagagaatgttttttgagatggacagcggatttgaggaagaggccttttgagaaaatagataaaggatgctcagctcagttttaggagggagtcaagggacagggagagactgagggtcaagccgtgtccctccaatgactcccgttttactctgtgtgtgtgaaagtcgagtcttcacgatgctcccgagtccctccaagtcctcctcatcaccattcagatcaaatgctctgctttctcctcctcctgtctgtggcagccatgctcgtccctttgctggcccgagccctgccctcattcttctc

SEQ ID NO: 450990 - DNA, 334 bp, Homo sapiens
agacaatctattcatgggtgtatgaaggctggaaattttaggaaatccacataaaatcaacattgcctgtgctaaaacaaaacctgacaactctccataatcttaggagcaaaattgcaaaaagtgacattatcatttttgctagagaatgatacacacatcacctttactgtatgagtaaatgatttgtttttctttgaaagagcatccaagtttattgtgttcattttcacactgatcaaagagaacacccttctgttaacaggtaccttcagttttcaggaccrggcagaaattctgtcttctacctttaaaggtcaatcacaaaattaaa

SEQ ID NO: 450991 - DNA, 310 bp, Homo sapiens
cctttaattggagaatggtgttctcattgttactgggatgatgttgtttctaggcccttttgttagaggagttggaaaatatatgtatgtatactcacacatttatacacatctgtacttatttatacaattatccatctgtaygtatactaaaaacaatgatttcataaaacttttgatcccaatacaacactagataaagactatataggcccatttatttgcaaatcagcacataaacatagaaggattattaacaatataagctgtagcttatgctaaatgttggttggaacggacaataaattat

SEQ ID NO: 450992 - DNA, 310 bp, Homo sapiens
cctttaattggagaatggtgttctcattgttactgggatgatgttgtttctaggcccttttgttagaggagttggaaaatatatgtatgtatactcacacatttatacacatctgtacttatttatacaattatccatctgtatgtatactaaaaacaatgatttcatraaacttttgatcccaatacaacactagataaagactatataggcccatttatttgcaaatcagcacataaacatagaaggattattaacaatataagctgtagcttatgctaaatgttggttggaacggacaataaattat

SEQ ID NO: 450993 - DNA, 310 bp, Homo sapiens
cctttaattggagaatggtgttctcattgttactgggatgatgttgtttctaggcccttttgttagaggagttggaaaatatatgtatgtatactcacacatttatacacatctgtacttatttatacaattatccatctgtatgtatactaaaaacaatgatttcataaaacttttgatcccaatmcaacactagataaagactatataggcccatttatttgcaaatcagcacataaacatagaaggattattaacaatataagctgtagcttatgctaaatgttggttggaacggacaataaattat

SEQ ID NO: 450994 - DNA, 310 bp, Homo sapiens
cctttaattggagaatggtgttctcattgttactgggatgatgttgtttctaggcccttttgttagaggagttggaaaatatatgtatgtatactcacacatttatacacatctgtacttatttatacaattatccatctgtatgtatactaaaaacaatgatttcataaaacttttgatcccaatacaacactagataaagactatataggcccatttatttgcaaatcagcacataaacatagaagrattattaacaatataagctgtagcttatgctaaatgttggttggaacggacaataaattat

SEQ ID NO: 450995 - DNA, 538 bp, Homo sapiens
ccttgacaactcaattccattttctgtgggtttttaggcaatgtgtgtggcctcctatctgagctgggaaacaaaatgaaggcctctccctcatggatcttagtctcctgataatgaaaaaagraggacaagacatattctaaacgagcgagccctacgacctcaaccatctcatgaggtcagcaggaccgaggctgatggaggtgatcacctgtgagctcagctcaaaggctggaaaaggcagagccaccaggggttgctggacacctgcaatgttcccagggagccacagctgagggtctgcccagtggctggcatggggttctctgctgtgtaaacaaatgtttgtttaaaacaccctagtacctcccctctgagtcaatgatgcaaaaatgtatacaacgttttatgccttttgaaaacaaaaatggaggcttaagacaccattgaaattagtttcttggtagatttgggccaagactcaggaactgtccatggcgtgtctcactggctctccagtggctggggctgcccctca

SEQ ID NO: 450996 - DNA, 513 bp, Homo sapiens
acaacatgtagagtctgaaagtcagaaatgatgagaatgggaagcaccagtgactgggataagaagtagatcagcggtgaccctggggaagctcctctgtgtccagcagggcagagctcaggaattagtgttcctagaattgccagagaccctcacagaagcytaagttacttgtctgttttgtaaaatatatgttgatctcatccctagaaggtgtggcacacaggaggagagggaagagaatattcaggactttcacaaacattaggttcaggaattcacacttgtgaacttttagaaagtatcttcaggggatagaaaaccaaaattaatttcctttgttgtggacatcttttttattcctaaagaagaggcagttataatgtttaatatttatcttacatcatggagtgatatgctcccatgcattcttacaacagctcttcgtgttatcctcacagtattagggctgtaaagctatctttgctttagttaagctgttaaaactggtaa

SEQ ID NO: 450997 - DNA, 603 bp, Homo sapiens
taataaattgtagctgaaagattcaaatgccatgtgatatccattcattcatttgttgattcaataattaacccatagatgttaaatacctactgtgagtcagtcactgtggcaggcaatgaggatgctgtgttaaaacagacacagtcaccacccccagaagcttaccttcccctgaggaagaacaaaactaaatgagccaatttaagtcttaacaaagggaactgcaaggtgctgctagagcaagaggttccagctagtctagtggtcagggagatgcaaagtaaaagaactttgggataatacttcactcccatcaagcagaccaaaattctagaaagggataacacctattcctagcagggatatgggtggagcctctctgaaaggcaatctatccatatctattaatgcatcaaacaaagcaacaccactccagggaactaatcccatagaaacaatgscacccactcaaggctgtttattgcagcattgtttgttgtggcaaatactggttgcaaaatgaatacccactagtgaaggaatgattgaataaatcatggcatatccacagcatgcagccactgaaaagaatgagcccta

SEQ ID NO: 450998 - DNA, 653 bp, Homo sapiens
acacatacacacacacacacaaaacatgctattcagtgctgtgtaaaagaaaggctctcaagtattcctgaaacttagttttagtcatgtagtggttcttcctctcaaaatttttatgaaaagtttttctgctgttcatatgtcaaatacaaaatctcttcagtgcattgatccatataattttacactaatagtgrggctgtacctgttgacttttctaactggcttgcactgttgtagcaaataggaaaatacttgcagctgcaaatattgatttgaagatgaattcttgtcaatatgccctctgattctgtcatattggtatgatgcgttgtagaaaataaaattcctttattcagactaaggtacagaaggatttctagtagttgtataaaaaatgagtaactgatacattattatttgagttcctctctacctaaggaaaaacattccctgggaataggctgctactcagtaggctaaagaaactctacttgtgtcataaaaattaattttgcttcttgaaaaataaattgttattgatttcacacatttagggatttctggtcatactgtaatttgataatataagtagcttgttaacatcatcaaaatgtgtttgttgagcactttgatgatgtgtacatgtgcca

SEQ ID NO: 450999 - DNA, 614 bp, Homo sapiens
aaaaacattccctgggaataggctgctactcagtaggctaaagaaactctacttgtgtcataaaaattaattttgcttcttgaaaaataaattgttattgatttcacacatttagggatttctggtcatactgtaatttgataatataagtagcttgttaacatcatcaaaatgtgtttgttgagcactttgatgatgtgtacatgtgccagacagagctgttctaccatgttctccctgccttcstccagtcctctcaagtatcattttctctttctgtgcacatctttagtgaagaaaatgaggaagaccttgctaaaataaaatattcagtcttaggaaaaaacaaagtaagaaatagggtcacttgatggctactggaattgtggtcctaggtgatttgtgagcttattcttactgtagcatatgatatgcattcctttaatgtaaataactctaaaagcatgttattttccagtaatgaaagaatcatggtgcctcataagctcttgttcacttgggagtgttcaggaatctcccagatttgacaccagaagaggcaaggtcaaagcaattaggctgcactggtatcttcagtgaagatgcccttactg

SEQ ID NO: 451000 - DNA, 614 bp, Homo sapiens
aaaaacattccctgggaataggctgctactcagtaggctaaagaaactctacttgtgtcataaaaattaattttgcttcttgaaaaataaattgttattgatttcacacatttagggatttctggtcatactgtaatttgataatataagtagcttgttaacatcatcaaaatgtgtttgttgagcactttgatgatgtgtacatgtgccagacagagctgttctaccatgttctccctgccttcctccagtcctctcaagtatcattttctctttctgtgcacatctttagtgaagaaaatgaggaagaccttgctaaaataaaatattcagtcttaggaaaaaacaaagtaagaaatagggtcacttgatggctactggaattgtggtcctaggtgatttgtgagcttattcttactgtagcatatgatatgcattcctttaatgtaaataactctaaaagcatgttattttccagtaatgaaagaatcatggtgcctcataagctcttgttcrcttgggagtgttcaggaatctcccagatttgacaccagaagaggcaaggtcaaagcaattaggctgcactggtatcttcagtgaagatgcccttactg

SEQ ID NO: 451001 - DNA, 214 bp, Homo sapiens
acatggcaccaatccaaaccttaaggatatctacsgcaacactgctctccattatgctgtgtatagtgagagcacctcactggcagaaaaactgcatttccatggtgcaaatattgaagcactggacaaggtatagatcaatcaactttctttccaaaatatttgttttaacattgacacaggtaagggtcaattttttatatttggaagctca

SEQ ID NO: 451002 - DNA, 214 bp, Homo sapiens
acatggcaccaatccaaaccttaaggatatctaccgcaacactgctctccattatgctgtgtatagtgagagcacctcactggcagaaaaactgcwtttccatggtgcaaatattgaagcactggacaaggtatagatcaatcaactttctttccaaaatatttgttttaacattgacacaggtaagggtcaattttttatatttggaagctca

SEQ ID NO: 451003 - DNA, 622 bp, Homo sapiens
tgccatgtgtccttaacaaatggaattttctagggaaaaagcacaggaagtcaatatatttcttaaacaaattaaaaacaaactttgaaaatttggtgatttttatttttatttgaaaaatctgaaaatacatttggtgtgcaacattattctggtaggtacactgttgcctaaaattgtacttatactttgtascagctcatatatgttttcagattttctggttatctcacttggtctataaaaacagctgaactctttcattttaaaatatctgaaggaattttttccttagaggagaaattttaaggatgggttataaataaactctttaagaactagtaacagttgttgtgttcttaggcaccaattctgtgtacgcatttgaggtggacaaaacttatccagaaatcagaacataaactgtgttaggtgaagcgaaagctttctcactgctaaatttggttaactactttgtctttggctggttttcaaaaaaagatgttctttaagaaaagtgatttttaatgactttgaatatttccctgtaaaaccctcttctaaggggttgaataatttatgcatctttaatgttagagagggaaggtattccttgaaggcc

SEQ ID NO: 451004 - DNA, 622 bp, Homo sapiens
tgccatgtgtccttaacaaatggaattttctagggaaaaagcacaggaagtcaatatatttcttaaacaaattaaaaacaaactttgaaaatttggtgatttttatttttatttgaaaaatctgaaaatacatttggtgtgcaacattattctggtaggtacactgttgcctaaaattgtacttatactttgtaccagctcatatatgttttcagattttctggttatctcacttggtctataaaaacagctgaactctttcattttaaaatatctgaaggaattttttccttagaggagaaattttaaggatgggttataaataaactctttaagaactagtaacagttgttgtgttcttaggcaccaattctgtgtacgcatttgaggtggacaaaacttayccagaaatcagaacataaactgtgttaggtgaagcgaaagctttctcactgctaaatttggttaactactttgtctttggctggttttcaaaaaaagatgttctttaagaaaagtgatttttaatgactttgaatatttccctgtaaaaccctcttctaaggggttgaataatttatgcatctttaatgttagagagggaaggtattccttgaaggcc

SEQ ID NO: 451005 - DNA, 547 bp, Homo sapiens
ccagggtgctggtaccatccaaacagataattcagaggagacaggggacaccaaaataataaggtatacagtgtttttgaaatatttattaccaaayaattggttttaaattataatatagttctattagctggatagatacaaggtagtatatccataaattggaatactactcacaataaaaaaggaatgaacgaatgatacctgctacaagacagatgagcctcagaagcattagtgaaagatgccagacaaaagagaccacatattgcatggttccatttagatgaaattcctagaaaaggcaaattgatagacagtagattactagctggggatagaaatagggattaaccataaatgggcatgagggcttttactgagatgatgaaaatattctcaactagatatggttatggttgaaccactcagtaaattgacaaaaagtcactgaagtgtacttctgaaactggtgaattttatgatatgtaaaatatatctagttatgcataaagaaaatgataatacagccctatgaaattacttt

SEQ ID NO: 451006 - DNA, 611 bp, Homo sapiens
cacagctcccctgcccacccagaaatgggcaaggctttctaaggtggattggacagactgccagaacgtaagtcaattcacctagtgtgctagcccaacctccaccatcataatgtttttcattcacttaaaaatcaggtatctactgtagacagtgcactatcctagatgctcagtacacagagataaactaagacggggttcttgtccaagaaacccttgatgaacttgcaagaacamaaagacttaaacagaacaaatgcaatcaaatgtagcatgtgatttttgagaaatctgtactgggtaggcaggggtttgaagagagactgaaatgtcaattccacctgggggagggcggccgctctgaaaaagcttcccaggagaggtgacttgagaaggatgagagagtcagtatagtgtgctggcgttgtgctagatgctgggaatgtgagaccccgtcccaacaaagcaaaaaggtactacgcaagtaaataaatgaatacctccttataaataatataattactgagaaagggaaagactaagatgtttgtgtatggaggggtgctatattgtgacaggcatttgattttcacttaaagtctccatga

SEQ ID NO: 451007 - DNA, 611 bp, Homo sapiens
cacagctcccctgcccacccagaaatgggcaaggctttctaaggtggattggacagactgccagaacgtaagtcaattcacctagtgtgctagcccaacctccaccatcataatgtttttcattcacttaaaaatcaggtatctactgtagacagtgcactatcctagatgctcagtacacagagataaactaagacggggttcttgtccaagaaacccttgatgaacttgcaagaacaaaaagacttaaacagaacaaatgcaatcaaatgtagcatgtgatttttgagaaatctgtactgggtaggcaggggtttgaagagagactgaaatgtcaattccacctgggggagggcggccgctctgaaaaagcttcccaggagakgtgacttgagaaggatgagagagtcagtatagtgtgctggcgttgtgctagatgctgggaatgtgagaccccgtcccaacaaagcaaaaaggtactacgcaagtaaataaatgaatacctccttataaataatataattactgagaaagggaaagactaagatgtttgtgtatggaggggtgctatattgtgacaggcatttgattttcacttaaagtctccatga

SEQ ID NO: 451008 - DNA, 611 bp, Homo sapiens
cacagctcccctgcccacccagaaatgggcaaggctttctaaggtggattggacagactgccagaacgtaagtcaattcacctagtgtgctagcccaacctccaccatcataatgtttttcattcacttaaaaatcaggtatctactgtagacagtgcactatcctagatgctcagtacacagagataaactaagacggggttcttgtccaagaaacccttgatgaacttgcaagaacaaaaagacttaaacagaacaaatgcaatcaaatgtagcatgtgatttttgagaaatctgtactgggtaggcaggggtttgaagagagactgaaatgtcaattccacctgggggagggcggccgctctgaaaaagcttcccaggagaggtgacttgagaaggatgagagagtcagtatagtgtgctggcgttgtgctagatgctgggaatgtgagaccccgtcccaacaaagcaaaaaggtactacgcaagtaaataaatgaatacctccttataaataatataattactgagaaagggaaagactaagatgtttgtgtatggaggggtgctatattgtgayaggcatttgattttcacttaaagtctccatga

SEQ ID NO: 451009 - DNA, 319 bp, Homo sapiens
agtgtagaatatggcactgttaactatagtcaccatgctgtacgttagatctccagaacttattcatcctgcataaccgaaacttcgtatccttggaccaagatctccccatttaccccaccctccatcccctgacaatcactattccactctctgcttccatgagtttgactttgatggatttcayatgtaagtgaaatcatacagcatttgtcacatgtgtctggcttattttacctatagcataatgtaatccaggttcatccaccgtgatggttaatactgagtgtcaacttgattggattgaaggatgcaaagt

SEQ ID NO: 451010 - DNA, 575 bp, Homo sapiens
aactatcattctttgaactctttctgctttgattttcaacttttcagatcaaaaatattttctgtaaaacagattaaaacccgtagtgtcctgaactcggagtcggagtccagagtctggtcttactcttyccccccaatggctatttattttacatatactctaaagttccatccagctctcacattcttggaatttatgattacataaaactgaggttttaaactgacacaagcccaatcagcacaatatacatgtgtgtgcccatatgtgtatgtgtgcgtgtgtgtgtgtgtgcgcgcgcgcgcgtgtgtgtgtgtgtgtgtgtatgtatgtatattctgtttggcctacacattgtttttggaaatcatgttattaattaacaacattcaaacttgaggaatttcctacaaaaatctgaatttctggcttttattaataaaagcagaagatctggaaatactaaatgatacctagctgcagtgaggtagagactttgcacctttagacagggcatgtattcctttgccacagtctccactgcctatacaactgttaggaccaaatgtaaa

SEQ ID NO: 451011 - DNA, 571 bp, Homo sapiens
caagaaaaaaaaaaaaagaaaaaaaagaccattaccagcattttaaaactaagagaatgaagtaaacaaaaaagggaaagaaaaagcttcaaaagttcatttttctcctaatttcttgaactctctattccagaagtacctaatgtttttcttaaaagagaggctttcaatttttccctatgtctaaaggctgctttaagtagcttaagaccaaggacaggagagtgaaaacgaagagggttttggctctccaggtgggggtggaattgcagctactgcttagggatattttccagtggtcatctcttcaaactccagtgagtctcacaaacagggtgcaccagccaatccaagtatccagtatctacaatgcaaactgtagatactatccaaattgacagtagatagctcagtaaatagctgagcaaactgcaatgatagctcagtcttsaactctggaaataaatttccaaaagccttccccagtggcaattcaaactcaaaaacgtttacaaaactattcatattttccaaacctgcttccaccactacccgacctgttgctcctcct

SEQ ID NO: 451012 - DNA, 571 bp, Homo sapiens
caagaaaaaaaaaaaaagaaaaaaaagaccattaccagcattttaaaactaagagaatgaagtaaacaaaaaagggaaagaaaaagcttcaaaagttcatttttctcctaatttcttgaactctctattccagaagtacctaatgtttttcttaaaagagaggctttcaatttttccctatgtctaaaggctgctttaagtagcttaagaccaaggacaggagagtgaaaacgaagagggttttggctctccaggtgggggtggaattgcagctactgcttagggatattttccagtggtcatctcttcaaactccagtgagtctcacaaacagggtgcaccagccaatccaagtatccagtatctacaatgcaaactgtagatactatccaaattgacagtagatagctcagtaaatagctgagcaaactgcaatgatagctcagtcttgaactctggaaataaatttccaaaagccttccccagtggcaattcaaactcaaaaacgtttacaaaactawtcatattttccaaacctgcttccaccactacccgacctgttgctcctcct

SEQ ID NO: 451013 - DNA, 571 bp, Homo sapiens
caagaaaaaaaaaaaaagaaaaaaaagaccattaccagcattttaaaactaagagaatgaagtaaacaaaaaagggaaagaaaaagcttcaaaagttcatttttctcctaatttcttgaactctctattccagaagtacctaatgtttttcttaaaagagaggctttcaatttttccctatgtctaaaggctgctttaagtagcttaagaccaaggacaggagagtgaaaacgaagagggttttggctctccaggtgggggtggaattgcagctactgcttagggatattttccagtggtcatctcttcaaactccagtgagtctcacaaacagggtgcaccagccaatccaagtatccagtatctacaatgcaaactgtagatactatccaaattgacagtagatagctcagtaaatagctgagcaaactgcaatgatagctcagtcttgaactctggaaataaatttccaaaagccttccccagtggcaattcaaactcaaaaacgtttacaaaactattcayattttccaaacctgcttccaccactacccgacctgttgctcctcct

SEQ ID NO: 451014 - DNA, 622 bp, Homo sapiens
tttacaaaactattcatattttccaaacctgcttccaccactacccgacctgttgctcctccttcctgtatttcctatacctcggagattagcctcacattgaatctacctcccaagagtcatgttgcytttaaaatccttcactaactccttgctccctacagaagaaaatccaaactatgtatcatggcattcaagaccctttgtggtaagttctctatctcttcagtcataccactttttctgtgctacataataccaagttttctagccattctaaaatattcaaaggtccctggaatacaaaatcttccttatacctggaaagttatccctaccctactccatctgtaaaaaccttattcattctttaagactcaggtcaatgactgccttctcggtcaatattttcctgactctttttcaagaaaagttgagcaatcattccctctattttcctattattatagaactctgtgcttttaaaattcttgtattaatattaatatctattatgttgcctttttgtttgtttgcttctgtttccccccaatgactgatctccttaaaggcagagttttcgccttatccattgcttatatagtccttaaattgctatgaa

SEQ ID NO: 451015 - DNA, 597 bp, Homo sapiens
attaataggaatagcttttttaaagtaccttgatctttgtgtttctaagatttgtcctagtccatttatggatctgaaataaataataaatgaggaagacaaagtttaaaagtaaaaattaactttttaaaaaagtatacaaagtatattgtttctaaaacaggaaataagcatacccaaatacatctggaaccagaaaaaaattaaaaacagaaaaacaaaacttgctttaaaaaataattatgattttccttcaaacaataaatcacatatattccactcatacatcaataaaacatatatgcaaaaattcgcacaactgtcagattaagggctactttgtggttaataaaaagacgcttcactttagaaaaaatcattcataaatagtcagttatcctagtgatcttaaaaatgagtagatactcaaaatttttacggtggtcacttttttcctcaggcatacatggtagaaatggctatatacacactaaaaataaaaacctagttgtaagttgctttgcccccagyctgtccttagtattcacagtaattctaagtcacacatcccaggttcctttatagaataacctcctc

SEQ ID NO: 451016 - DNA, 595 bp, Homo sapiens
cagtcacaagtctgatataaagggagggtaaaagccaaaagggtgtgtaatttatcaaactgcttcttccaaattcatttctagtactgttaacaagctggctaatagtcaatattgtcagtgtcagagatttagcttaggtctctataaggatataaaagtcaagtaataattatcattccttttatgccaaaaacgtttgctaaatagattgtgttcttcttagcaatcacaatggtgcacaagatttatgaaggaaacaagattagaagaccagtgtcaaaaaatgtaaaagcaatcttcattcatcactttctccttttcaaaatcagccatctttttctttcttcccttttttactataccttgaacttactatgtaagctaagaaaaaaattacataataatagctaacagagcacttamtatgtgtcagcactgtgcaaagtttaccaacattgtctcatgtaatactcaaagcaaacttatgataggcattatgccttttacagaggaggctttaaaagggtaaataagctccctaagaagacaatgagaaacagaccaaggattagaacccaagcagattccaagg

SEQ ID NO: 451017 - DNA, 480 bp, Homo sapiens
ataataatagctaccgaatgtctctctgtatagggcttttattagttcaggtcttacaaaataattcaaaacaaagtccctgaactataacttcatttgaaaagtccatctttgttttcaaaaggaatgggagtctccagaacagtcagcaaaatgactgttagcacatatttgagcatcattcatatygtcctgattgtcctatgctgatcagccttggctatggacaaagaagatattaaagcaagctggaagacaaggcatggttgacagttaaggaagatgaagtcaacaagagttcagggaaaactgagaccacttgagtcagggaagacttcacataggaaggggggagagacagaataggctctatagaataaattaaaaaaaaacagaacaagaaagaactgagggattggcagagtgagaatacattatgagtaaagacaggaactgagaggatgcatccatgggaaagtg

SEQ ID NO: 451018 - DNA, 554 bp, Homo sapiens
gttttattaatgagaacgatatctgccaaagcaacttgcctaaaatagcaaacaaaaagaaatgttaagaaattttaaataatatacaygcatgcagattaatacatcaaaagagaaatgttaacaaattaaaaataaataaaaacacctcatgtaaatcaatatatcagttaagaattatatagtgctctataggagtgattcagtttactcctaatccgctaatttttcaatgtgaatgaattgtattcattactatgcaagttcagatttcacattacccatttgcaaagtatttactaagttctgttacttgctactcttgtgctacaaagataagtctcaaaaagtttacaatcaaaaggatgattttaaactcataattttctttgtgaagaaaagcataaaattcagatatccaatatggtaaaaagaagagtttacctactaaaatactgtaatatttaccaaaattttcaaagaaatagaataacttcacttaatactaaaaactgtattaaacagggtttttttaaaactatacttcagagctg

SEQ ID NO: 451019 - DNA, 603 bp, Homo sapiens
agcaaattctattttgaggaaaacaaaactgaaataaaatcatggcaaygatacttctacttcaggcaaaatcttgttcaattcaactgcagacccactctgcaattatggaagtcacagaacttgacaagtattgtatcaaaaatcattccatgccaaaagatcaagtttaatatttttttcataattcatcttggcctgaggctacaacaagtcctattgttatatactctgcctctagagaatgaggctgctaacagaccttggaatggtgcctggcacaaaggctcaagaaatatttgttgaatgaattgtaattaacacctcctgttgtggggatacataaaagatgttacatgaaaaatgccatctaacatgcagcaacaaatctcttcccattaagcagtaaatctacttaacaatgatatatttttggcaaggcatcggcctctgaatgatcctatagtactgaaaattctttttaaactgaaatatttttcaagatatattattgaccttatgaaagcttttttaacatatgaaattggggttatctggctatgagtttgtgaggcataaaaatgatatgacagaagaattaca

SEQ ID NO: 451020 - DNA, 480 bp, Homo sapiens
tcctattgttatatactctgcctctagagaatgaggctgctaacagaccttggaatggtgcctggcacaaaggctcaagaaatatttgttgaatgaattgtaattaacacctcctgttgtggggatacataaaagatgttacatgaaaaatgccatctaacatgcagcaacaaatctcttcccattaagcagtaaatctacttaacaatgatatatttttggcaaggcatckgcctctgaatgatcctatagtactgaaaattctttttaaactgaaatatttttcaagatatattattgaccttatgaaagcttttttaacatatgaaattggggttatctggctatgagtttgtgaggcataaaaatgatatgacagaagaattacagatttgtttttgcatttccatgcctaaatgtaactaatacaatgttagtttcacaaggtaatgtgcaatgttttaaatgcatttacctctc

SEQ ID NO: 451021 - DNA, 480 bp, Homo sapiens
tcctattgttatatactctgcctctagagaatgaggctgctaacagaccttggaatggtgcctggcacaaaggctcaagaaatatttgttgaatgaattgtaattaacacctcctgttgtggggatacataaaagatgttacatgaaaaatgccatctaacatgcagcaacaaatctcttcccattaagcagtaaatctacttaacaatgatatatttttggcaaggcatcggcctctgaatgatcctatagtactgaaaattctttttaaactgaaatatttttcaagatatattattgaccttatgaaagcttttttaacatatgaaattggggttatytggctatgagtttgtgaggcataaaaatgatatgacagaagaattacagatttgtttttgcatttccatgcctaaatgtaactaatacaatgttagtttcacaaggtaatgtgcaatgttttaaatgcatttacctctc

SEQ ID NO: 451022 - DNA, 587 bp, Homo sapiens
tctattcaaaagaacattctccaataatacattatataccatttggtcattaagtcagatgactttcatttataaaataaaacaaaatggaaagtttggcattstattccacctgtataagtaaatgaagaaaaaaaatttgcaaaatattttttaaatattttatattacatagatgtccaaagtattccttatctctgcttaacaactatggcttttgcttatatatcaaaaaagacaaaaataattttgatactaattaatccaacatattcaaaaggctaaggatcaaaaccccaatttaacttaccacaagaaacaaaggaaattaaaggggagtggtgtgagatgttggtcaaagaatacaaagtttgttatacaagatgcataagtcatggagagctaattacagcatgatgactgtagttaattctattgtatacttgaatctgctaaaacatagatcttaattgttcttaccaccccctctcaaaaaaatagcaatgtgaggtgatggataggttaactagctcgattgtttgataatgtaattcacacactgtataccttaaatatatatagttttt

SEQ ID NO: 451023 - DNA, 587 bp, Homo sapiens
tctattcaaaagaacattctccaataatacattatataccatttggtcattaagtcagatgactttcatttataaaataaaacaaaatggaaagtttggcattgtattccacctgtataagtaaatgaagaaaaaaawtttgcaaaatattttttaaatattttatattacatagatgtccaaagtattccttatctctgcttaacaactatggcttttgcttatatatcaaaaaagacaaaaataattttgatactaattaatccaacatattcaaaaggctaaggatcaaaaccccaatttaacttaccacaagaaacaaaggaaattaaaggggagtggtgtgagatgttggtcaaagaatacaaagtttgttatacaagatgcataagtcatggagagctaattacagcatgatgactgtagttaattctattgtatacttgaatctgctaaaacatagatcttaattgttcttaccaccccctctcaaaaaaatagcaatgtgaggtgatggataggttaactagctcgattgtttgataatgtaattcacacactgtataccttaaatatatatagttttt

SEQ ID NO: 451024 - DNA, 561 bp, Homo sapiens
aatttaaagtttccattatcctgacagtgtgtcagttttgtgtaggtatattgatttaataatttaagaggttttatcaaggtagcagaaggttaaacgtttactgtgtttgcattattcagaatgttgctttgtttttttggcctccrtcatgctgataatagattctatttaactcttctccatacccaactatacatataaaatttttcctataatcataaaatacataaacagtttgacttttagcatggcattttcagtttatcaaaataaaaaaaaaaacaaaatgtcttagcagttatctgtcacataggtatatcaaattttgtaattaatttatggaagaggtagattcaaacatgcctataataaacattcaaaatgaataatttggggcttttttgctacctccataagcattttgcaagaaatatgatttccaacagtcattggaatttttctgcgtgaaactgtaatactgtatttgggatcattctttgattcttaaattatattcataaattcataaattgagattttaaactctaaaaaaggagt

SEQ ID NO: 451025 - DNA, 561 bp, Homo sapiens
aatttaaagtttccattatcctgacagtgtgtcagttttgtgtaggtatattgatttaataatttaagaggttttatcaaggtagcagaaggttaaacgtttactgtgtttgcattattcagaatgttgctttgtttttttggcctccatcatgctgataatagattctatttaactcttctccatacccaactatacatataaaatttttcctataatcataaaatacataaacagtttgacttttagcatggcattttcagtytatcaaaataaaaaaaaaaacaaaatgtcttagcagttatctgtcacataggtatatcaaattttgtaattaatttatggaagaggtagattcaaacatgcctataataaacattcaaaatgaataatttggggcttttttgctacctccataagcattttgcaagaaatatgatttccaacagtcattggaatttttctgcgtgaaactgtaatactgtatttgggatcattctttgattcttaaattatattcataaattcataaattgagattttaaactctaaaaaaggagt

SEQ ID NO: 451026 - DNA, 561 bp, Homo sapiens
aatttaaagtttccattatcctgacagtgtgtcagttttgtgtaggtatattgatttaataatttaagaggttttatcaaggtagcagaaggttaaacgtttactgtgtttgcattattcagaatgttgctttgtttttttggcctccatcatgctgataatagattctatttaactcttctccatacccaactatacatataaaatttttcctataatcataaaatacataaacagtttgacttttagcatggcattttcagtttatcaaaataaaaaaaaaaacaaaatgtcttagcagttatctgtcacataggtatatcaaattttgtaatwaatttatggaagaggtagattcaaacatgcctataataaacattcaaaatgaataatttggggcttttttgctacctccataagcattttgcaagaaatatgatttccaacagtcattggaatttttctgcgtgaaactgtaatactgtatttgggatcattctttgattcttaaattatattcataaattcataaattgagattttaaactctaaaaaaggagt

SEQ ID NO: 451027 - DNA, 576 bp, Homo sapiens
gatggatctaggcaaagtaaattcatcattctagatgtcattaagaacattcgtgattcatgggagatcaaagtatcaacatgaataggagtttgaaagatgattccagccctcacagatgactttgagggatttcagacttcaayggaggaaataactgcagatatggtggaaacagtaagagaactagaattagaaggggagtctgaagatgtgactcaattcctgcaatctcataagaaaactttaactaatgagaagttgtttcttatggacgggaaaagaacgtggtttcttgagatggaatctactcctggtgaagatgctatgaacactgtcaaaatgacaacaaaggatttaaaatatgacagaagcttaattgataaagcagggtttgagaggactgactccaattttgaaagaagtcatactgtgagtaaaatgctatcaaatagcatcatgtgctatagagacatcttttatgaaagggagagtcaactaatgcagcaaacttcattattatcttatgaaattgcgatagccaccccaaccttcagtaactactaccctgattgg

SEQ ID NO: 451028 - DNA, 576 bp, Homo sapiens
gatggatctaggcaaagtaaattcatcattctagatgtcattaagaacattcgtgattcatgggagatcaaagtatcaacatgaataggagtttgaaagatgattccagccctcacagatgactttgagggatttcagacttcaatggaggaaataactgcagatatggtggaaacagtaagagaactagaattagaaggggagtctgaagatgtgactcaattcctgcaatctcataagaaaactttaactaatgagaagttgtttcttatggacgggaaaagaacgtggtttcttgagatggaatctactcctggtgaagatgctatgaacactgtcaaaatgacaacaaaggatttaaaatatgacagaagcttaattgataaagcagggtttgagaggactgactccaattttgaaagaagtcatactgtgrgtaaaatgctatcaaatagcatcatgtgctatagagacatcttttatgaaagggagagtcaactaatgcagcaaacttcattattatcttatgaaattgcgatagccaccccaaccttcagtaactactaccctgattgg

SEQ ID NO: 451029 - DNA, 301 bp, Homo sapiens
agtttgaatgaaacaatgtttactgaaatatttacttctgtaagaaatacttctaattatccaaaacttcarcaaaccacttggggagacactagatatcaccagattcaagccatgcaaaatcacagggtcactcacaaattgttccacccaacataagtcaacaaaactgttggaaacaaaacagaaatttgaaatacagtcaaaatatacaatgtaatgctttactatacttcataacagtatctttttaacaagacactgagttggcagttactaataatttgcaaaattattgttc

SEQ ID NO: 451030 - DNA, 425 bp, Homo sapiens
ttattttcatcttttaagactcagaaagtaggctgggcataatagctcacatctgtaatcccagcactttgaaaggccaaaatgggagaattgctcaaggccaagagtttaagacmagcctgggaaccataggtaaccttgactctacaaaaaattagacaggtatggtgatatgttcctgttgtcccagctactcaagaagcttaggtgagaagatccctcaagcccaggagtctgaggtttcagtgagtctcaatcatgccattgcactccatcctgggtgatagagtaagaacttgtctccaaaaagaggaaaaaaataaaggctcagaatgctatgtgaaatcttccttgattctagctatctttctccacacacacaggtgtctgcttcgttggggtcccttagtaccttgtcaattttt

SEQ ID NO: 451031 - DNA, 425 bp, Homo sapiens
ttattttcatcttttaagactcagaaagtaggctgggcataatagctcacatctgtaatcccagcactttgaaaggccaaaatgggagaattgctcaaggccaagagtttaagacaagcctgggaaccataggtaaccttgactctacaaaaaattagacaggtatggtgatatgttcctgttgtcccmgctactcaagaagcttaggtgagaagatccctcaagcccaggagtctgaggtttcagtgagtctcaatcatgccattgcactccatcctgggtgatagagtaagaacttgtctccaaaaagaggaaaaaaataaaggctcagaatgctatgtgaaatcttccttgattctagctatctttctccacacacacaggtgtctgcttcgttggggtcccttagtaccttgtcaattttt

SEQ ID NO: 451032 - DNA, 425 bp, Homo sapiens
ttattttcatcttttaagactcagaaagtaggctgggcataatagctcacatctgtaatcccagcactttgaaaggccaaaatgggagaattgctcaaggccaagagtttaagacaagcctgggaaccataggtaaccttgactctacaaaaaattagacaggtatggtgatatgttcctgttgtcccagctactcaagaagcttaggtgagaagatccctcragcccaggagtctgaggtttcagtgagtctcaatcatgccattgcactccatcctgggtgatagagtaagaacttgtctccaaaaagaggaaaaaaataaaggctcagaatgctatgtgaaatcttccttgattctagctatctttctccacacacacaggtgtctgcttcgttggggtcccttagtaccttgtcaattttt

SEQ ID NO: 451033 - DNA, 537 bp, Homo sapiens
ggcctgaagagatgttttcagaaatatttaggatataggtatcagtggccattataagaatgaatttctattgaatraataaatgtatatatctgggtccctggagaaatacactctgctcattactttacaaattttatcaaatgagaagtaaaataatatacataaactctttcagttacttgtatttactttacactttttctgtttcagttttactgtgccaaggaaatgcatttgggttttgtggtggttgtggtggttgtggtggttgttgttgtttgagatggagtctcactcttcctgcccagtctgaagtgcagtggtgtgatctcagctcatggcaacctctgcctcctgggttcaagcgattctactgcctcagcctcccaagtagctggaattacaggcatgtgccaccatgaacagctaattttgtgtttttagtagagatgggtttctccatgtggtcaggctggtctcaaactcccaacctcaggttatctgcccgcctcagcctcccaaagtgctgggatt

SEQ ID NO: 451034 - DNA, 537 bp, Homo sapiens
ggcctgaagagatgttttcagaaatatttaggatataggtatcagtggccattataagaatgaatttctattgaatgaataaatgtatatatctgggtccctggagaaatacactctgctcattactttacaaattttatcaaatgagaagtaaaataatatacataaactctttcagttacttgtatttactttacmctttttctgtttcagttttactgtgccaaggaaatgcatttgggttttgtggtggttgtggtggttgtggtggttgttgttgtttgagatggagtctcactcttcctgcccagtctgaagtgcagtggtgtgatctcagctcatggcaacctctgcctcctgggttcaagcgattctactgcctcagcctcccaagtagctggaattacaggcatgtgccaccatgaacagctaattttgtgtttttagtagagatgggtttctccatgtggtcaggctggtctcaaactcccaacctcaggttatctgcccgcctcagcctcccaaagtgctgggatt

SEQ ID NO: 451035 - DNA, 568 bp, Homo sapiens
tggcctagcctcaatttcttccctattatgtacctgaatttaatactacattataagccataatgtttctaatgaacttttaatcaggcaatactttctttaattaatttattctccataaatcacccaaaactattcttttcaattatgttaatatgatactatcctatgcagttacattttctataataacaaattatagccatccatggctgaccatttacagtgatgttcatctatggtagaaaacacacaggtctgtgtggtaaattacctcaatccttaatgcctccccagtagtgaggatgacagcaagagaaggaaaatgttactgtaattatatgacacattttggtactggaagctcattttatcttccttcctatttcttttttttttttttttggaattttttttttattgatcattcttggatgtttctcgcagagggggatttggcagggtcataggacaatagtggagggaaggtcagcagataaacawgtgaacaaatgtctctggttttcctaggcagaggaccctgcagccttccgcagtgtttgtgtcc

SEQ ID NO: 451036 - DNA, 568 bp, Homo sapiens
tggcctagcctcaatttcttccctattatgtacctgaatttaatactacattataagccataatgtttctaatgaacttttaatcaggcaatactttctttaattaatttattctccataaatcacccaaaactattcttttcaattatgttaatatgatactatcctatgcagttacattttctataataacaaattatagccatccatggctgaccatttacagtgatgttcatctatggtagaaaacacacaggtctgtgtggtaaattacctcaatccttaatgcctccccagtagtgaggatgacagcaagagaaggaaaatgttactgtaattatatgacacattttggtactggaagctcattttatcttccttcctatttcttttttttttttttttggaattttttttttattgatcattcttggatgtttctcgcagagggggatttggcagggtcataggacaatagtggagggaaggtcagcagataaacaartgaacaaatgtctctggttttcctaggcagaggaccctgcagccttccgcagtgtttgtgtcc

SEQ ID NO: 451037 - DNA, 427 bp, Homo sapiens
ccttgcaaagactttccagccaccagtggagaagatctcgagggagatcagtgtgttactctggctaatactcttctggggaagttgctgggtggtttccttagttgtagatatttgctctggcctaagtataacaaggcccaaattcacctgccattttacctcccacagaaagaaccactggaaagatcactcctttaagagcttatccacattcagagagaagctgaataaacactggggaggtatggcagggtgccgggcartattatctgatgtgaaaaaatatatagaaagaaaactatcaatgcccttttactaccagaatgttctaatgcttgcccttctccctagtaggaaaaaaaatttttttcacctcgcataaagcaaaactcccttgtcatcccttatgacagaatctagttgt

SEQ ID NO: 451038 - DNA, 557 bp, Homo sapiens
ttggacttaaaaaaccccttagcttcttggaaaattcaaagaaggaagacacaggaaagagccccaggggaaaatacaagattttctgctaaattggacattacaagactcaataactaattagaaaagttagaccaggcatggtggctagcactttcagaggccgagccagggggattacttgagctcaggagttcaagaccagccatgacaacagagtgagaccttgtctctaaaaaaaaaaaaaaaaaaaaaaaaaaaaaagaaaggaaaggaaaagaaatcaaagatgtggctctttttatcccccccatggggattatacttagaataaaatgaacaacattgagatccctagggataaagktctcaaaaatccagaaaaaatcttgcactctacttctaactaatctagacttctgcttgatctctggctaaaagggagactaactcatggctatttcaaactatctgaaccaaactatgaactctcacctaatgtgtaagatggagtagttgcaattattttaaacttcaatttagtatcaactggcctt

SEQ ID NO: 451039 - DNA, 557 bp, Homo sapiens
ttggacttaaaaaaccccttagcttcttggaaaattcaaagaaggaagacacaggaaagagccccaggggaaaatacaagattttctgctaaattggacattacaagactcaataactaattagaaaagttagaccaggcatggtggctagcactttcagaggccgagccagggggattacttgagctcaggagttcaagaccagccatgacaacagagtgagaccttgtctctaaaaaaaaaaaaaaaaaaaaaaaaaaaaaagaaaggaaaggaaaagaaatcaaagatgtggctctttttatcccccccatggggattatacttagaataaaatgaacaacattgagatccctagggataaaggtctcaaaaatccagaaaaaatcttgcactctacttctaactaatctagacttctgcttgatctctggctaaaaggkagactaactcatggctatttcaaactatctgaaccaaactatgaactctcacctaatgtgtaagatggagtagttgcaattattttaaacttcaatttagtatcaactggcctt

SEQ ID NO: 451040 - DNA, 597 bp, Homo sapiens
aaaggttatttttggccaggtgcagtggctcacacctgtaatcccaacactttgggagactgaggtgagttaatcacctgaggtcaggagttcaagaccagcctgaccaatatgatgaaaccccatctctactaaaaatacaaaaattagccagccgtggtggcatgtgcctgtaatcccagctacttgggaggctgacaagagaatcgcttgaacccaggaggcagaggttgcagtgagccgagatcgcaccattgcactccagcctgggcaacaagagtgaaaccccgtctcaaaaaaataaataaaaaattaaaaaataaaggtttttttaaatatgtgcatttcacttcaataaaagaaatctttttaaaaatggtaacrtaggataatagtgaataaaacatgcaaatgcttacaatatattgctagctgtaaaacagggactataaaagagtattccaatacagtcctacttcctagctctaaatgaaagataggaagggaatatgctagaatgttgaagcagtaagcattggttcagtttgggttttttactaagcgtgtgtgagggtgctggcccaccctgcctgcagc

SEQ ID NO: 451041 - DNA, 549 bp, Homo sapiens
attttaataaaatataatgcaatatgttttattttcagctaaaggacttttatcctttgaagagtgagaaacagagaaactcccaaaaacctgcaccccaaaattataagaatgagaacattttaagataaaaattcctttaatgtttttctctttcaccagtacaaaaagtgatattttaataaagcagcatcaattagagaaactgctaatgtttatacagagttacattcttacattcaaaattactcaggcccratcttactttctccctaataacaatagtttaatcaaggaggtaatatttaatgcaatctaatatctatcctttctttaaaaattgccacaaacttctcacttaatcaactagcattcacagtacaaaactgagaactaaaaataaaatcctaagcccccaaccaactgaatggacgcccctcttggccaagaggacccagagaaaccttaaaaatggagttcctggccacgacaggacaggaggttggacacacattggtatatctcctctttgtgtggtttagacacaac

SEQ ID NO: 451042 - DNA, 613 bp, Homo sapiens
gatgaaaactccaaggtgacctaggtatagaaattatcaaagactttaaagcagccattatattctccatgaagtgaagaaaaacacacatgaaatgaatgaaaatttatatgaaactttatatgaagctttaacagataaacagaaaaatcaaaagtattttctaagtaaagaaaatagaaaccataaaacaaagctctaaaatggaaatcaaatatacaaaaaccacaaaatacaaactttaaaatggaaaaatataatatctgaaaaattccttggatacactgaatagcaggatagaggtgatagaggaaagagtaaacttgaatatagataacagaaattattcaatctaaagaatgtggagaaaaaatttcttaaagaatgaagcctcagcgaattgtggaataatatccaaaaatctaacatatgtgtaagtagagycaggtcttagaagcaggataacaaggtgaccatggggttctcaccagataccatggaggccacagtcaatggaacaacatcttttaaatgctgggggtagggggcagtggtggatctttcaacccagaattctatatccagcaaaaatctcatcaactggaagatggaa

SEQ ID NO: 451043 - DNA, 613 bp, Homo sapiens
gatgaaaactccaaggtgacctaggtatagaaattatcaaagactttaaagcagccattatattctccatgaagtgaagaaaaacacacatgaaatgaatgaaaatttatatgaaactttatatgaagctttaacagataaacagaaaaatcaaaagtattttctaagtaaagaaaatagaaaccataaaacaaagctctaaaatggaaatcaaatatacaaaaaccacaaaatacaaactttaaaatggaaaaatataatatctgaaaaattccttggatacactgaatagcaggatagaggtgatagaggaaagagtaaacttgaatatagataacagaaattattcaatctaaagaatgtggagaaaaaatttcttaaagaatgaagcctcagcgaattgtggaataatatccaaaaatctaacatatgtgtaagtagagtcaggtcttagaagcaggataacaaggygaccatggggttctcaccagataccatggaggccacagtcaatggaacaacatcttttaaatgctgggggtagggggcagtggtggatctttcaacccagaattctatatccagcaaaaatctcatcaactggaagatggaa

SEQ ID NO: 451044 - DNA, 433 bp, Homo sapiens
gtaatgtgctttgcttcctctctaatagttgttctcattcctttttatttcctccttagctctatgaaagtttttctgttactagggatagttaggagaaaagggcaaggtaggaggagcatgtgaggcttaaggcttttaagtttgawgactcagtgttacaggttttaaaaggtagcagttctcagtatattccattttttaaaaaaaatgtacaaatatggtctttttagatggatgcatgcagttcgtcagaacttaaatactgaggaagaagtggaaaatgtagcagacattggttttgattgtaacatgtgcagaccctatatgcctgcatctaatggtaacagaataatttaaactgtgagtctgcactcttgtacactctcttgcaccttactgttcataaccaatgaattagcttagctctact

SEQ ID NO: 451045 - DNA, 433 bp, Homo sapiens
gtaatgtgctttgcttcctctctaatagttgttctcattcctttttatttcctccttagctctatgaaagtttttctgttactagggatagttaggagaaaagggcaaggtaggaggagcatgtgaggcttaaggcttttaagtttgaagactcagtgttacaggttttaaaaggtagcagttctcagtatattccattttttaaaaaaaatgtacaaatatggtctttttagatggatgcatgcagttcgtcagaacttaaatactgaggaagaagtggaaaatgtagcagacattggttttgattgyaacatgtgcagaccctatatgcctgcatctaatggtaacagaataatttaaactgtgagtctgcactcttgtacactctcttgcaccttactgttcataaccaatgaattagcttagctctact

SEQ ID NO: 451046 - DNA, 433 bp, Homo sapiens
gtaatgtgctttgcttcctctctaatagttgttctcattcctttttatttcctccttagctctatgaaagtttttctgttactagggatagttaggagaaaagggcaaggtaggaggagcatgtgaggcttaaggcttttaagtttgaagactcagtgttacaggttttaaaaggtagcagttctcagtatattccattttttaaaaaaaatgtacaaatatggtctttttagatggatgcatgcagttcgtcagaacttaaatactgaggaagaagtggaaaatgtagcagacattggttttgattgtaacatgtgcagaccctatatgcctgcrtctaatggtaacagaataatttaaactgtgagtctgcactcttgtacactctcttgcaccttactgttcataaccaatgaattagcttagctctact

SEQ ID NO: 451047 - DNA, 433 bp, Homo sapiens
gtaatgtgctttgcttcctctctaatagttgttctcattcctttttatttcctccttagctctatgaaagtttttctgttactagggatagttaggagaaaagggcaaggtaggaggagcatgtgaggcttaaggcttttaagtttgaagactcagtgttacaggttttaaaaggtagcagttctcagtatattccattttttaaaaaaaatgtacaaatatggtctttttagatggatgcatgcagttcgtcagaacttaaatactgaggaagaagtggaaaatgtagcagacattggttttgattgtaacatgtgcagaccctatatgcctgcatctaatggtaamagaataatttaaactgtgagtctgcactcttgtacactctcttgcaccttactgttcataaccaatgaattagcttagctctact

SEQ ID NO: 451048 - DNA, 552 bp, Homo sapiens
gctaccgttgtcatatatatttcatcattgtaagttataaacccaacaatccagggtatcccccccatacaaattctcagaaaactatttatagaagggaacttcctcactctgatgaacagcatttacaaaaaaaatacagctaacacggtggctaatggtgaaaggatacccatgctcaccatttctagccaacagtatactggaattctagccagtttaataaggcaaggaaaagaaataaaagtcataaagatcagaaaggaagaagaaagaaaactggtgaatgtggttttattcttatttcagccaagctaatttctctaaacacaatattaaatcttttgaaaccttttttttttttttttttttttttacagacaattgtcttgctatgttgtcccggctagtctcaacatcgtggcctcaagtggacctctcayctcagccttctgagtggctgggattacaggaacaagccactgtgcctggctaaatcttttgaaaacttttaaaaggagccagtcacacagatgtttagtgcacatcctg

SEQ ID NO: 451049 - DNA, 586 bp, Homo sapiens
cttttattctgtgtttatacaaaatggttaaatgtaaactatatttaaaaatagaacaaagataatatgtccttcatattatttccaatatactttgagttttagttggcatttgcaaaactgatcatttaaattaacaatgcatctgactctcatccaataatagtttacttttatttagtcttaatgtttgctgaaagatttactggaatttggaatgagtactccactgcaaggaaaatagacttcttgtgggtgaaacttagagatcttttaatccactagttatttgactatcaaacattttgatatatgtcatttgaagattaagttaccctatgcagcattattattgtacatagaaaactggtctaagattgggtcttagttctaatgccattttttcttgctttcagtatgaaggaaagcaggggagtgagttttaggtttttttttttttttttttttgratcactgacccttttgagtatctgctatctatgaactgtttccccagaaaaacacacaaactcacattgccttagagcaaaatacaatccaatgtcaaaaatggttggggggttag

SEQ ID NO: 451050 - DNA, 561 bp, Homo sapiens
atcactaggggtgatggtgagtggtgccgcttccacttccacccttgatttcaggacccatgaaacagtaccatatattggacactgattcagagcatacatggccttctggagaactttgctccagccctgcaaagaattgtcacctagttggcattgtaattgtgacttcaaaaagccattccaccattctattaatacagctgcttcagaaagatggggaacatggtaagaccggtgaatttcatgagaatgagcccaccgcagtgcttttttagctggaaagtgagtgccttggtcagaggcaatgctgtgtggaataccatgacagtggataaggcattctgtgagtccacagatggtagtcttggcagaagcattgtgtgcaggataggcaaacctctattccagtgaggacaaacctctgccctttccatgayggaagaagtccaatataatcaacctgccatcaggtagctggctgatcaccccgaggaattgtgtcatatggagggcaactattggtcactgctgctggcaaattgggcactaagcagtggc

SEQ ID NO: 451051 - DNA, 631 bp, Homo sapiens
ccagacttttaccagggtaactgtgcactggggaaagggaaatgatcagacattgtggggactactggacactggctctgagctgacattgattccaggggacccaaaatggcattgtggtcctccagttaaagtaggggcttatggaggtcaggtaattaatgggattttagctctggtccgatttacagtgggtacagtgkgtccccagacacatcctgtggtcatttccctagtaccagatacataattgacatagacatatgtagcagctggcagaacccccacattggctctctgactggtagggtgaaggctattgtgagaaaggccaaatggaagccattagaagtgcctctacctagaaaaatagtaaatcaaaaacaatatcgcatccctggagggattgcagagattagtgccatcatcaaggacttgaaagacgaaggggtggtgattcccaccacatccccattcaactctcccatttggcctgtgtagaagacagatgaatcttggagaatgacagtggattatcgtaaacttaagcaagtggtgactccaattgcagctgctttacaagatgtggtttcattgcttgagcaaattaacacatctcctagtacctggt

SEQ ID NO: 451052 - DNA, 533 bp, Homo sapiens
tctcacagctacctgatgttatttttgttactgattttacaaatcaccttattattaaaccattaataatatttaactctaaagcatayactttaaaaaatatcaccacacagatcgattcaccttcttttcctcatgtgtacacattcctgtgtattactgaatccagttaaggatacagaaggtgttatcttcctgccaaactggtattgttattcacacaacatattcagcccactagtcattcctcccctgatgaatctgcaatgcttaaaaacctgaagtctcaaaaataaatgagtatgtgggtgagaccgatggtagtaaattatacattgtggaatgatttccctctttctttttattagaaactcaaatcaacctcagagttcctcacgttaaatcatctgcttaaatccttccaatagatgtctatctcagaagaaaagtaaaattacagtggccttagatgctctaagtaacctgccctccacctcccaccctgactcagctgctatatctctcctccctac

SEQ ID NO: 451053 - DNA, 533 bp, Homo sapiens
tctcacagctacctgatgttatttttgttactgattttacaaatcaccttattattaaaccattaataatatttaactctaaagcatatactttraaaaatatcaccacacagatcgattcaccttcttttcctcatgtgtacacattcctgtgtattactgaatccagttaaggatacagaaggtgttatcttcctgccaaactggtattgttattcacacaacatattcagcccactagtcattcctcccctgatgaatctgcaatgcttaaaaacctgaagtctcaaaaataaatgagtatgtgggtgagaccgatggtagtaaattatacattgtggaatgatttccctctttctttttattagaaactcaaatcaacctcagagttcctcacgttaaatcatctgcttaaatccttccaatagatgtctatctcagaagaaaagtaaaattacagtggccttagatgctctaagtaacctgccctccacctcccaccctgactcagctgctatatctctcctccctac

SEQ ID NO: 451054 - DNA, 533 bp, Homo sapiens
tctcacagctacctgatgttatttttgttactgattttacaaatcaccttattattaaaccattaataatatttaactctaaagcatatactttaaaaaatatcaccacacagatcgattcaccttcttttcctcatgtgtacacattcctgtgtattactgaatccagttaaggatacagaaggtgttatcttcctgccaaactggtattgttattcacacaacatattcagcccactagtcattcctcccctgatgaatctgcaatgcttaaaaacctgaagtctcaaaaakaaatgagtatgtgggtgagaccgatggtagtaaattatacattgtggaatgatttccctctttctttttattagaaactcaaatcaacctcagagttcctcacgttaaatcatctgcttaaatccttccaatagatgtctatctcagaagaaaagtaaaattacagtggccttagatgctctaagtaacctgccctccacctcccaccctgactcagctgctatatctctcctccctac

SEQ ID NO: 451055 - DNA, 533 bp, Homo sapiens
tctcacagctacctgatgttatttttgttactgattttacaaatcaccttattattaaaccattaataatatttaactctaaagcatatactttaaaaaatatcaccacacagatcgattcaccttcttttcctcatgtgtacacattcctgtgtattactgaatccagttaaggatacagaaggtgttatcttcctgccaaactggtattgttattcacacaacatattcagcccactagtcattcctcccctgatgaatctgcaatgcttaaaaacctgaagtctcaaaaataaatgagtatgtggktgagaccgatggtagtaaattatacattgtggaatgatttccctctttctttttattagaaactcaaatcaacctcagagttcctcacgttaaatcatctgcttaaatccttccaatagatgtctatctcagaagaaaagtaaaattacagtggccttagatgctctaagtaacctgccctccacctcccaccctgactcagctgctatatctctcctccctac

SEQ ID NO: 451056 - DNA, 601 bp, Homo sapiens
ccatcaaagaaaagcccaggacctgatacattcactgctgaattctaccaaacatttaaagaaaaactaataccaattctactcaaactatttcaaaaaattgaagaggagggaacatttttttttttttttttttgagacagggtttcactctgtcgcccaggctggggtgcagttgtgcactcatggctcaatgcagcctctactttccaggctcaagcaatccttccacctcagcctccttaatagctgggactacaggcacatgccactacacctggctaatttttctactttctatagagatggggtttctccaggttgtctaggctggtcttgaactgagctcaggcaatctgcccacctcgacctcccaaagtgctgggattacaggcacgcaccaccgtgcctggcccacttctaaactcattctacaaggccagcattaccctgataccaaaaccggacaaggacataacagaaacagaaaacaacaggccaatatccctgatgaacacagaggcagaatccacaacaaaatactatcaactgaattcaaagayatttttaaaagatcattcaccataaccaagtggaattc

SEQ ID NO: 451057 - DNA, 641 bp, Homo sapiens
ctttattttctccatctcgttttaggtgcattatttccttttccattttagacagctcttctttgtactgatccatctcaatctttacttgcctaattaaaaacaaataataaaacaggtaatttagaaacttaaccaactaacttgtytctgactaaaaaaaagcctgcaagttatataaggacaaatatcagcaaaatatctagttggaattttaaatcacctatttttaaaaattctccaactaaaaactattcctttacacattacataccactaaatacaactttactactactacctggtaatatttaacaagcctagcattcttttcactctaaccacatttaactttagctttgcatgtattgaaaatatccaaggacctcattcatctaggaatttttgttattagcaacaaagaaaataaataagccaaacaatcaaattattcaccataaaaaccatattactcactggagagccaagtcaattgcttttactcagttttattattggttctatcctttttttagctttaaaaggaactagagattcctagactagtgcaacttccctgctttacagaggaggaaactgaagactaggtgagttgtctgagataatacaattagctgtta

SEQ ID NO: 451058 - DNA, 625 bp, Homo sapiens
aatatgtcttagggtgttattatttgggtttaatctggttagcgatctttgacctctttatacctgcatacttatatctttcctcaggtttggaaatttttcttttgtttctttaaaaaagctttctacccctttgtctttctcagttccctttttaactccaataattcaaagatttgctcttttgatgttgtcccaaagatcccataagctttgtttattcctttttattccttttttcctcctctcactgtgtagtctatttatctatctrtctgtctgtctatctatctatctatctatctatcaaactaattaactaactaacatggggtctttgttacccagaggtggagtgcagtggcacaatcatagctcaatgtagccttgaccacctgggctcaaagaatcctcccacttccgcattgtgagtagctgggattacaggtgcatgccgccacacctggctaattaaaaaaaaaattattttaagtgatggagtttcactatgtgactcagtctggtctcaaactcctgggctcaagtgatcctctcagcctactgagtatctgggattacaggtgtgagccaccatcctcagttctgattatatattttcaaatag

SEQ ID NO: 451059 - DNA, 625 bp, Homo sapiens
aatatgtcttagggtgttattatttgggtttaatctggttagcgatctttgacctctttatacctgcatacttatatctttcctcaggtttggaaatttttcttttgtttctttaaaaaagctttctacccctttgtctttctcagttccctttttaactccaataattcaaagatttgctcttttgatgttgtcccaaagatcccataagctttgtttattcctttttattccttttttcctcctctcactgtgtagtctatttatctatctatctgtctgtctatctatctatctatctatctatcaaactaattaactaactaacatggggtctttgttacccagaggtggagtgcagtggcacaatcatagctcaatgtagccttgaccacctgggctcaaagaatcctcccacttccgcattgtgagtagctgggattacaggtgcatgccgccacacctggctaattaaaaaaaaawttattttaagtgatggagtttcactatgtgactcagtctggtctcaaactcctgggctcaagtgatcctctcagcctactgagtatctgggattacaggtgtgagccaccatcctcagttctgattatatattttcaaatag

SEQ ID NO: 451060 - DNA, 599 bp, Homo sapiens
ttaatatacgatttgatcttttgaaaataatggatatataacttaaacggaaatgtatcattaaatatagcaacagcgtcttccaaaaaatttcaaaatcgggcttaatgccaattacacgatcataatccaaaaacccttaactgaagcaaagacagtgatttgtaacatctgaaytgtgtgaaaggggtgggggtgattcaaacaagtgtcatcaccttgtccaatgatgaaggagaacgtgtatcagttctgcattgtgaaattctcagtatgagagcgtgtagtggctaagaaaagcagtgggcgaattaggaaacaaagagaaaagccagcgacatcaccagttctggcctccttcccaccggaggaaaggggagaaggcgggtagtcatcaattccaggtccagcctaagttctgggtccccggccccagcgagagcctcgcctcgcctcgcgcgcctgcgcggagcgggctggcttcctgaacggccctcgcctcttcaccaccagggccgtccaccagaagtttctaaacgggtgagaggcgacaacgcagtgcagctgggttaaaggaaggaggctggtttatcctccgc

SEQ ID NO: 451061 - DNA, 589 bp, Homo sapiens
tgaaaacttcacaaatttgatgaaggaaataaatttacaaatttaaaaaaatcaaagagaactacttctagacacatcaaaatccttgccaaaaactaaaacaaaaaactttgaaagcacccagagataaatgacactgcatataagggaacaaatgttaaaattactgcagatttctcatcaaaaactatggacataagaagatggaacaacattttttaaatgctgaaagagaaaaaaactgtcattctattttatatccaacaaaaatactctctaggaatgaaggtaaaataaagacattcttagatgaaggaccgcatagagaatttgtcaccagcagacttgytctaaaagagaatgctaaagaaagttcctcatggaaaaaaaatacctgagagaaacttgggacctcaggaataaaggaagaacaacaaaaacagtaaatatttggtaaatataggatttttataatatctatggcagttgaaagaagaaattataacatttactgatgaggtatattgatataatacatgtgacaacgacagtgtaaagggggaggggtaaaggggtctatattcttagt

SEQ ID NO: 451062 - DNA, 631 bp, Homo sapiens
aaggaagctaagcagctgggtcccctgtatctcctgactctctattcaaagcttggttccctagtttcactatgccattttgatgaattagtaatttgctatctgaaaataaaatctgaaccaacattcaacaacagggtgatgaagtttcaggtcctgatgctgccatgtctttcctttctgagccactctaggcttggccagaagacagtgtggatggtctcatgttgattcctctctggctagctgaacctatggcaggcaccacacagatgaagttggtctacagcctcccagcaactttctcaggaatcagggagtgtcttccctgaagccttgggatggaatcccatagccctgcattgtagaagtgcctggctactgcctacctagcagtcagggcaaaattctgactttcttgttctcctagacctgcattgctctttctttctctggaactcagtttcctcatctatcagtaaaatgratgtggtatgtccttccctccctccctccttagccactaggtttactgtgaggaagcaaagagagaatgtgtagagaatcacatagaaaatataatgtgctcagaaaatgctagagaccataatattgaaaccgaacaactcca

SEQ ID NO: 451063 - DNA, 598 bp, Homo sapiens
tacaagaaggtcctgtggagggattaaaatttagtaaaatgaatttccctggatttaagtggatatctgtgctgttccagggtctgtttgcctccttccccagttctccacattatagggggtctgacccctacaggctgcatttcccaggcttccaagtcaactaccttctggctgggtttaaccaatagaaggcactggtgggaaggcagggaaaatggagaagccagggtacttagcctctgccttctctgcctygagtgctgcccctgctgtgtctcctctgtggttcctgctatcagcatacttccaattctgctgtgtgattccagctccggtttaggtcatactacctcctcccatggtccctccattcttcaccacctcaccctcactctgattgcaagggggttgacccctgtaagctgtgtttctcaggttctaatattaattgacttctggtttcctcaatgagagagacttcagaggcagattgaagggcaggaatgagggaaagaagaggctacctcttcccatcctctagctcaggcgcatttctcatctgtggctttagcccttgagggcaggcctgcgattt

SEQ ID NO: 451064 - DNA, 460 bp, Homo sapiens
atcactttggggatattgtcatcctyacagtattaggtgttcctatgcatgaacacaggatgaatttccatttgtttatgtctttaatttattttagcaatgttttacagttttcagggtactagactttcatctccctgattaaatttatcccaaaatattttattcttttagatcctattgtaaatggaattgttttcttaatttcctttccagatggctcgttgttagtgtaaagaaatgcaagtgatgtttattgatcattttgtaacctgcaagtttgccgaatttgtttactagctctaacagacttttgtagaatctttaggattttataaatatgacattatgtcatctcttaatagaaataactttattctccctttcaaaacttggatgccttgtatttctttatcttgcctaattgttctagctaaaattttcaaaattaagtttaata

SEQ ID NO: 451065 - DNA, 321 bp, Homo sapiens
atggtagctctttgtgttccttcttctttaagtgtttggtaaaattcgtgagtgaaaccatgtgatccagggcttctgttaggaggtttttgattactgattcaatctccttactagttacatgttaatacagagtatggattctgctgttgttaggyggagtttttttaatatatttcttttaggtgtaattggtttatagtgttgctgaagtcttttttttccttagtgatcttctgtctggttgttttatctattattacaagttgagatattggagtctgtattattgtgtaattgactatttgtcccaattaacaa

SEQ ID NO: 451066 - DNA, 546 bp, Homo sapiens
ctgttcctgacatttatatagcagtttaggcttttcaggaagctgggtaagtgaatgtcctcactttttccattgctttctgatcccagcaaggagaagctgtcctctaggtgaccattgccctgacagttggaggaggcagccttggctgaccaagacctgtagattccagacaagtggaatggaagcattttaagtctgaaaacctctggctcttctatctcactctctgacagagtaccatcagaaactctctctgggctgaaaaatacccccttccatcctatcttcctgctcctggttaccacagcctgagtgtttgtatgtatgtgtgcacacacatgcatgtgagttgggggagggtcagaatgaggctacagtggtcaatttgaactccatcagtgagagtttgtgtttgctctctgtttcctgctttttaatttctttggcactagatagccatccccaaatggccttaagttcagtgttggcactggagccaccttytacaccttaccttggcagcgagcatgtgtgtgtgggtta

SEQ ID NO: 451067 - DNA, 520 bp, Homo sapiens
gtgcccagcctgtgatttaagttactcagagtgagcagtttgttctcttctcacacttagaatctgaggttgggcccacagctcctccaaatctttcaggaataagcaaatctcagagcccaaaaccgaatttgacctccaaaccagctggcaaaatcatcaggtgtttagttcctacaactacagggttttttgtttgtttgtwtgtttttgtttgtttgtttgttttttggcattagctcttgagatgtaataaaggtccctcactatccatgacttcattccatttaggcccacatttcctctgagtgacattctcctatccacactaccccaattctgcagatgaagaaatgttggcccagaaagattacagaatatttttcagaagccattgtgtgacaaggactcatgaaggaagaagcctccactttgctgagtacaatatgaactgagcactataattgggtacattataattagtactcaccatgaatcagaatatgattatccataattc

SEQ ID NO: 451068 - DNA, 609 bp, Homo sapiens
catgagcagatttaaattatatataacattattttaaagaacatatcctaaataacaaaactggattaaataccattatcagtcatttcagtaaacggttaaaccaaactggatttgtgcaggagcctattgaagtgagaaggaatgaaagccagwaaaagttgtaattacgtataaaattatttgatggaagtttttagaaatcagttatataaaaccatccttgacatttaatttctggttctcttcatgagggacaagtaacctaaaaaccctcttgaggtgctggcaacccattattcatcttaaagtaaatattttgattaaaagcaggctggcctactttttctatatgttataatctgtattgaaatgaatttcagtggatgaaattgaaacaacctaagaaaatagtcaagtctgaaagaaatctagaatttttaccagttttatatttctcctgagaaagattcttttaaagaattttagtagacatgggaatactataggcttttatgtttaaactacaggtttatttttcttataaataattagaatataaaatgcataaccgtttttaattagttatatgaaataaagaaatagcaa

SEQ ID NO: 451069 - DNA, 609 bp, Homo sapiens
catgagcagatttaaattatatataacattattttaaagaacatatcctaaataacaaaactggattaaataccattatcagtcatttcagtaaacggttaaaccaaactggatttgtgcaggagcctattgaagtgagaaggaatgaaagccagtaaaagttgtaattacgtataaaattatttgatggaagtttttagaaatcagttatataaaaccatccttgacatttaatttctggttctcttcatgagggacaagtaacctaaaaaccctcttgaggtgctggcaacccattattcatcttaaagtaaatattttgattaaaagcaggctggcctactttttctatatgttataatctgtattgaaatgaatttcagtggatgaaattgaaacaacctaagaaaatagtcaagtctgaaagaaatctagaatttttaccagttttatatttctcctgagaaagattcttttaaagaattttagtagacatgggaatactataggcttttatgtttaaactayaggtttatttttcttataaataattagaatataaaatgcataaccgtttttaattagttatatgaaataaagaaatagcaa

SEQ ID NO: 451070 - DNA, 609 bp, Homo sapiens
  misc_feature (1)...(609): n = A,T,C or G
acattaccgataaaattttttctctgtcttcaaattatatgaataaattgtcaaatgagcagttacatatgattagaatnaacaaaagnccatatttggtaatgaattaggcagtaactatgatgtgcaataataatagtacatacttgacaactactttattcatcttagacccttaaaatgaatttttcaaatgctaatgtaactactaagttgtaatttctaaactattargaatattttatatttttctttttactattgatatatatgtttgatttatgtcatcatatttaattaacttataaactcatattttagtaatttacttttctaagaggtgaaactgcctccttcctttttaataaactccactatggatttttcagacgttaactgcacatccagggacatttctataatcacattttgtatgcacatatagaaactcacaatttgtaaaaaattatgaataatatgtgtaccgccaccaattacaaatatatctatattccacattgttcctaatttggtaaagaacatgtggttatgataatattttgatattatacttcatcaaaattctatcaacaaaaaaactaacgattg

SEQ ID NO: 451071 - DNA, 609 bp, Homo sapiens
  misc_feature (1)...(609): n = A,T,C or G
acattaccgataaaattttttctctgtcttcaaattatatgaataaattgtcaaatgagcagttacatatgattagaatnaacaaaagnccatatttggtaatgaattaggcagtaactatgatgtgcaataataatagtacatacttgacaactactttattcatcttagacccttaaaatgaatttttcaaatgctaatgtaactactaagttgtaatttctaaactattaggaatattttatatttttctttttactattgatatatatgtttgatttatgtcatcatatttaattaacttataaactcatattttagtaatttacttttctaagaggtgaaactgcctccttcctttttaataaactccactatrgatttttcagacgttaactgcacatccagggacatttctataatcacattttgtatgcacatatagaaactcacaatttgtaaaaaattatgaataatatgtgtaccgccaccaattacaaatatatctatattccacattgttcctaatttggtaaagaacatgtggttatgataatattttgatattatacttcatcaaaattctatcaacaaaaaaactaacgattg

SEQ ID NO: 451072 - DNA, 609 bp, Homo sapiens
  misc_feature (1)...(609): n = A,T,C or G
acattaccgataaaattttttctctgtcttcaaattatatgaataaattgtcaaatgagcagttacatatgattagaatnaacaaaagnccatatttggtaatgaattaggcagtaactatgatgtgcaataataatagtacatacttgacaactactttattcatcttagacccttaaaatgaatttttcaaatgctaatgtaactactaagttgtaatttctaaactattaggaatattttatatttttctttttactattgatatatatgtttgatttatgtcatcatatttaattaacttataaactcatattttagtaatttacttttctaagaggtgaaactgcctccttcctttttaataaactccactatggatttttcagacgttaactgcacatccagggacatttctataatcacattttgtatgcacatatagaaactcacaatttgtaaaaaattatgaataatatgygtaccgccaccaattacaaatatatctatattccacattgttcctaatttggtaaagaacatgtggttatgataatattttgatattatacttcatcaaaattctatcaacaaaaaaactaacgattg

SEQ ID NO: 451073 - DNA, 588 bp, Homo sapiens
gattgattctcagtaagatggatgggacccaaggcatttacttccccaagtgcatgttttataactgaactcagcatcttatagtacaaggagcttcccacaccacagtagttgaacatgagcatggtcctaacttcctttaggttttcggttgccatctggcagcaattcatagcagttgtataataagtggttaccactaaagcttagactctctggtacctaaacatttatttttgccccatgacctaaaattctattctcctattgtcatatagaggtcagtcaactggagcaaggcactctttgaatgggtggtggaaagcagaggatctcaagaagcacttggatccaacacgtataaagttgttcttgctaactgttgtagyagccacacccattgtcagacacaatcatttaaatgttctatcatttaaatgttccatgtacatctaaatgtacatggatattactgatgaagtgatttctcttaaaaatttagagttttttggatatattatctctataaaattaactttatgacattttctggcatacattgcttgttcaaaatcagtaattttcata

SEQ ID NO: 451074 - DNA, 451 bp, Homo sapiens
tattgcagttggaagcaaaattaactccttcaagtcattgtgttgccaaatgacatactcaagggatattgtctccagaaactattgcattttctttgaaccacactttgacccaaataaataaatacgtgtatttttgttttcatttgcaacaagtagatatccctggttagatatccaatagagcaactaaaatattcatattttggatagtggaagggataatatcttttcatatactacatgtactttcacattaamatgtttttatgcagagaatggtggctcatgtctgtaatcccagcattttgggaggctgaggcgggtggatcacctgagatcaggagtttgagaccagcctggccaacctggtgaaaccccgtctctactaaaaatacaaaaattagccgtgtttggtggtggactcctgtaatcccagctacttgggagg

SEQ ID NO: 451075 - DNA, 451 bp, Homo sapiens
tattgcagttggaagcaaaattaactccttcaagtcattgtgttgccaaatgacatactcaagggatattgtctccagaaactattgcattttctttgaaccacactttgacccaaataaataaatacgtgtatttttgttttcatttgcaacaagtagatatccctggttagatatccaatagagcaactaaaatattcatattttggatagtggaagggataatatcttttcatatactacatgtactttcacattaaaatgtttttatgcagagaayggtggctcatgtctgtaatcccagcattttgggaggctgaggcgggtggatcacctgagatcaggagtttgagaccagcctggccaacctggtgaaaccccgtctctactaaaaatacaaaaattagccgtgtttggtggtggactcctgtaatcccagctacttgggagg

SEQ ID NO: 451076 - DNA, 571 bp, Homo sapiens
gaactgtttttctccagtttgtcttcttgccactcttgatacccacatgagagaatgcaagatattactaaaagcctggaactcttgggggaaaacaggaggcaccatggaccccattctgcgaaaaacctgttttcccgtagaacctcaggaattgacatgaaataaacctttctcaaaatataaggctccagaatggagcatccagaatccctgggtgtcatcctggaggcagtctctttggttttgcaggaagctaagatcactagttgtagcctctatgaccctgtattttctattacttctacaaycttccaatggtaattgtctctaatcaccttattaaaactcattttatcataaaacaaataacagcaataaaaaacttgagagatgcactcggttggatagtgtcccctgcaaaatttatgttatttcatgaacctcagaatgagaccctgtttgtgtaacctctcaatggggtctctgggagttatctagaatctaatgctccacaattgttaaattgaacaattttcaaaagacaaagaaggcaaattttatatttgac

SEQ ID NO: 451077 - DNA, 575 bp, Homo sapiens
ttggatagtgtcccctgcaaaatttatgttatttcatgaacctcagaatgagaccctgtttgtgtaacctctcaatggggtctctgggagttatctagaatctaatgctccacaattgttaaattgaacaattttcaaaagacaaagaaggcaaattttatatttgaccttaatttagaccaaawgttcaaattttgaagacattttcattttaccaataatctttaaagttgtctttatttccgaaagattactaaagtcacatgaacaaaaaatcatcagtttctacttttctgacataatatgatttaagtgtttatttttctgatccaattaatcagatatcttttatataaacatcatacatacaactcatataagtatacagacagacagaagatccagtagttgttaagatttttcttttgctagtttcttaattagattactggtttcagggtggagcccttggaggaacagaaccaggaaagcttgcagtatctagagcctaataagcaggcacagctagaaggcaaaaaagagatcccccaaattaagagtgccattttatattg

SEQ ID NO: 451078 - DNA, 643 bp, Homo sapiens
aagtctctatattacagcatatgacagagattagcacaagacatccagtgcttgtagaattgcaagaacatacgtataagtagacatatgtttactcccttacaaacctaaggaagaggcctcgtatgctaatgtgttaaataaagggtatgatactttatatttttaatgggaatggtttattaaggccatataattattaaacttaataagaaattggaaatatggytttctgagtataagggagtttgtattaagttgagacaatggtaaaatttataggcaacctatataggcttacttttctcacactccaggtattggagaataaactgtatggcacattttttgaatctcctgacaatttggaggcatacagagaaagaagtaatctttctatcttctaggtactctattaaaaaatctcagtataaaaccaaaagctattcttagtcttacaatatgttttcaacatttccttaacagacattaagtgcaggtggttattatgggctgagtatttaacatgagcctggaacaggcgttcattttcatgcatagtatctttcatgtgaattctcatgcagctctgtaacacaccattgaattaactttaaagtcatacaccgaatatgagctaaaa

SEQ ID NO: 451079 - DNA, 616 bp, Homo sapiens
agaaaacatatgatctcaatttctaatatgaaagatgattaatgctactttatttagatagagcatatgtcaaaggaaggtaaaatagaaaggagatttgcagtagcagaaataagaaaatatgatctataaaagaagtcggcatgtaggtttttaaaaccctgggtatattaaggaacaatgtccagaaaaacctggtgatatattatctgttgtaatgtaaaaagtgatatatctacagataaattcactctttatttaaataaaagtataaaagtccaaaaatatgtcattcaatgaataattattgactgctaaccatggcccactgtagatcaggccccgttctaagacctgaggrtacagtggttagcaaaaccccaaggcctctgttgacatgcagactgataatatttttgaattgaaagacaacttaattattaagttgagagataatttaaaaaatacacttaaagtatattaggtggaaccaaatgatggtgtaggaagggttatttacagaggttcatcaggacaggacactgtgataagtgaatgggagactaagagtttatgaccaagaacccaaaagcaaatgcaacaaaaacaaagataa

SEQ ID NO: 451080 - DNA, 611 bp, Homo sapiens
agctaggaatagcacagtagggcaatagcatagcagggcatatgaaaaattatatttcataataatttatatcttaaaatagcttgaagagatttgaaatgtcctcaacacaaagaaatgacaaatgtttgaggtgatggatatcctaaataccctgatttgatcattacatattgtatgcacgtatcaaaatatctacaattaccccttaaatgtgtacaactattatgtatcaatttaaaaaagtaaagaaacacacacacacacacacacacacacactcaaataaccccaaacatttgtctrttagacaaggtgagttcatttatttgctaaattgaggactgaaaagggaaagatataaaagatacaattacgtgtagatcattacaagtaaaatatattttctatttgaacaaaaatacaagaaaatgactaccgtgagcaataagaaaagtagaataaagtcacaaattatcagagtatatcctgaggtggaagtgctcagaggccatagacagtttttataaaattgtcataatcatcagttactgaatgaattaattattgaaggctcagagaaatactgaaataaataaaataatttttta

SEQ ID NO: 451081 - DNA, 499 bp, Homo sapiens
taaaacacatactgagaaatattgtttcaaacattataagccctggaatagttaatggataaatatgaaattgttataaattaagtcattgtatagacttttattatattttctagtaaatgatgcctttagatggctaataaaatttatacccttttggagatatcttaattgataggaatttgaattaatttgggaataatataaattttattttctaagtctatgaagatgcatatatctgttcactatatcttatttcatttttgccttaatatccctgaaattgtccacaaacttatgagacttttamtgcagtttctatttccgtggccatagctaccctctcattcctgaaagaattgaaaatgtctttgctccttgaaagctttttgtaggtaattttccctcataaatttctaaatgagctcagtagtgggaatgataccaagagctaattagaatctttgacaccagatggattaatcttgtaagaaaa

SEQ ID NO: 451082 - DNA, 480 bp, Homo sapiens
tatgatatgttagtaactctccattaacatgaaacaaatgtgccagatggtaaatgccctacttataaaacttggggaattgactgatccccaagcagagatccctgggaaataatttgtgtcactcaaggcaacaaacatattgataaattgtgctccgtgttcatgaaaatgattggatttaactgaagaacttgaacatgtggcattatggagcagagagcttttagttgattaaagttytcttgcaaatatcctgtatcagagagccaaaatcaaaactgtggtaaatgactttatttatattgctataaatcaagtttttaaacttacattttggattatgaattttacatatatatattactttttcagttatcacagatgactagagtaaggaaagtttatgtgctcaaagtctccttgtacctttagatacagcattgcaataatataatttagaaggtaaggtgcattgtg

SEQ ID NO: 451083 - DNA, 600 bp, Homo sapiens
taacagaagttttccttgtaccaaattacatgaagcaattgcttttttgaaagctatttctgataattactagactttttatccccccccaagatggcagattagaggcttttagcaagactcagtcacttggaaatagcaagatgatgcataaagataaactctctgagctttaatcaagaaggaaaatggaaatccactggaaacmtgacagacaccccacattctgggaaggagagttcaggcaaacagccaccatgatggcgtctggctgataaaagtgagtgatgccctgttatgtgagaggggcagagagcctccctctgtgactcacctttccactagggatccaagtaacttaggccaagagagagcaccttgtttctcccaagccccagaactatcttggggagaggcttggagacactgagagggaaagacaccaggaacagctgcaggcattttcccagacctgggactgaaagcaggatgccagttttaatccaggttcatacaaatcagccatactttggcaaacggcaggcatttttgcctcaggctagagattggaacacctgctgtggagcagcataggagttt

SEQ ID NO: 451084 - DNA, 600 bp, Homo sapiens
taacagaagttttccttgtaccaaattacatgaagcaattgcttttttgaaagctatttctgataattactagactttttatccccccccaagatggcagattagaggcttttagcaagactcagtcacttggaaatagcaagatgatgcataaagataaactctctgagctttaatcaagaaggaaaatggaaatccactggaaacctgacagacaccccacattctgggaaggagagttcaggcaaacagccaccatgatggcgtctggctgataaaagtgagtgatgccctgttatgtgagaggggcagagagcctccctctgtgactcacctttccactagggatccaagtaacttaggccaagagagagcaccttgtttctcccaagccccagractatcttggggagaggcttggagacactgagagggaaagacaccaggaacagctgcaggcattttcccagacctgggactgaaagcaggatgccagttttaatccaggttcatacaaatcagccatactttggcaaacggcaggcatttttgcctcaggctagagattggaacacctgctgtggagcagcataggagttt

SEQ ID NO: 451085 - DNA, 611 bp, Homo sapiens
gggaaaacatggttttctgggccgtgtccagggcccccaagctccgtgaatcctaaggacttgatgccctgtgtctcaacctctgcagctgtagctaaaaaggaccaatgcacaactcagatcattgctttaaagagtacaagccccaagctttggcagcttccatgtggtgttgggactgccgrtgtacagaagtcaagaattgagttttgggaacctccccctagattttagacatacggaaacttttggatgtccaggccgaagtttgctgcaggggcagggccctcatggagaccctctgctagggtagtacagaaaggaaatgtgaagtaggagcccccctacagagtcatcaatggggcagtgcctagtggagctgtgagaagagggccaccatcctccaaggccaagaatggtagatccaccaacagcttgcaccatccacttggaaaagccacaggtactcaacaccagcccatgaaagcagcctcaagggaggctgtatgctgcaaagccacaggtatggagctgccccaagttgtgggagcccacctcttgcatcagcatgacctgattgtgagacatggagtcaaaggacatcatttcag

SEQ ID NO: 451086 - DNA, 611 bp, Homo sapiens
gggaaaacatggttttctgggccgtgtccagggcccccaagctccgtgaatcctaaggacttgatgccctgtgtctcaacctctgcagctgtagctaaaaaggaccaatgcacaactcagatcattgctttaaagagtacaagccccaagctttggcagcttccatgtggtgttgggactgccggtgtacagaagtcaagaattgagttttgggaacctccccctagattttagacatacggaaacttttggatgtccaggccgaagtttgctgcaggggcagggccctcatggagaccctctgctagggtagtacagaaaggaaatgtgaagtaggagcccccctacagagtcatcaatggggcagtgcctagtggagctgtgagaagagggccaccatcctccaaggccaagaatggtagatccaccaacagcttgcaccatccacttggaaaagccacaggtactcaacaccagcccatgaaagcagcctcaagggaggctgtaygctgcaaagccacaggtatggagctgccccaagttgtgggagcccacctcttgcatcagcatgacctgattgtgagacatggagtcaaaggacatcatttcag

SEQ ID NO: 451087 - DNA, 633 bp, Homo sapiens
gtagagtgggaagaaatggggcataggagaggtgttaaggtctaactcctatcagaactcaactgtttacaggccccttatccttggtgaagctgagcctcagtttccccatccctacaacagggatgaagccagctgcctgctgctcccctgtgtggttgtagctggagagcagagaggcagcaagttgtgcagatgcaggtgattgtgccataggactaaaggcagcctatggtggggagggtgagggaccaaaacctggctggagaggcccagcacctgggctgagtgaagccttggtcacaatggctcattggggataattgctgcrgtaattatgaagattgcacaggcaaatggattctagtttacattctgctctcctgcaaaggtcatctgtaattgcctgatttcctccctacagtggggaggaggctacggtgggggcctgtcagagggtcactgggctgcaggcccaggctgaggggggtgggggctgaggtcttctggggtgatctctgccagcatgaggcgggaggcacatgggtgagctcttggcgcagaggctgctcggcctcctcctgctggatggtaccccagctccttagtgctccttcagctgcgctggctgga

SEQ ID NO: 451088 - DNA, 605 bp, Homo sapiens
aggggttgatgggcgcagcaaaccactatgacacgtgtatacttatgtaacaaacctacatgttctgcacatgtatcccagaacttaaagtattaaaaagaaaaaaaaaggaaaaaaaaaaagcatattgtgtatgccaagataagcctttgaaaaacactgggctacaacaatgaattagatatctgccctcaaagcacttttatatgctaaacataaaccacaaacatttactggacgcatactatgtgcagagtaagttaatccaaaagagggaataatcatttgaatttcaatatgaaaaaaagaaaaacactgattgcaaaggcatagtatgataaaaagaatgtaaaaatctcattacatgctgaaatgattaagttttggatacgtcaagttaaataacatcgttaaaattaatttcatctgtttctttatcctttaaaaaatatcctaaaaaaaataacatcattaaaatttwaaaaaaaaaagaaagaaaaagtgctcatcattaggacaaatagctaatgcctgtggggcttaaaacctaaatgcaggttaataggtgcagcaaaccagcattgcacacgtgtgtacctgtgtaa

SEQ ID NO: 451089 - DNA, 554 bp, Homo sapiens
accgccgcctggccacagggcagcagggagtgggarcctccttatttcctgggctctctgggctcttcctggagctttcattaccagtcataaggggactgtaaagagcaccttgggtagccatttaaaaagtgacgaaaccacctataaaccagcaaattatacaggggaggcattttatgtcttgttttctttacagccattctgaaaggggacataaaagtcactggaaagtcctggttcctgtcaccttcgggccccattgcagcctgcatggtatgactcatttgttttcagaggctgctgccccagtgctggcacagggagggaccaactaggggctgtcttttagaactgtattatccagagacaatattctccctgtgtcccgaggagtgatatttcctgacccctggggcagagccgggaggcctgggagagttcagagagcagaagcccccttttcaccccaggctcagtccttacctgcaatctccaaatgttcccttattggggccacatcattcaccctccccaccaaggatagtgatcat

SEQ ID NO: 451090 - DNA, 477 bp, Homo sapiens
ttggttgtctgggctctttaaaaatccatatgaaatttagaatatatttttttctaattctgtgaaaaacgacattggttgtttcataggaatagtgttgaatgtgtagattgcttttggcagtatagccattttaacaatattgatctttctaatccatgagcatggaatagttttmcatttgctttgtcatctatgatttctttctgcagtgtttcttagttctccttttagatatcctttacctccttgcatagacatattcttcttttcttttattttattttgggggttgctgttgtaaacaggattgcactcttgatttacctctcagtttaaacatttttggtgtacagaaatgatacttctttctatatgttgattttttttaatcctgaaagtttgctgaagtttttttttatcagttctaggagtcttttggcacagtctttagggatttctaggtgtagaatcata

SEQ ID NO: 451091 - DNA, 477 bp, Homo sapiens
ttggttgtctgggctctttaaaaatccatatgaaatttagaatatatttttttctaattctgtgaaaaacgacattggttgtttcataggaatagtgttgaatgtgtagattgcttttggcagtatagccattttaacaatattgatctttctaatccatgagcatggaatagttttacatttgctttgtcatctatgatttctttctgcagtgtttcttagttctccttttagatatcctttacctccttgcatagacatattcttcttttcttttattttattttgggggttgctgttgtaaacaggattgcactcttgatttacctctcagtttaaacatttttggtgtacagaaatgatacttctttctatatgttgattttttttaatcctsaaagtttgctgaagtttttttttatcagttctaggagtcttttggcacagtctttagggatttctaggtgtagaatcata

SEQ ID NO: 451092 - DNA, 631 bp, Homo sapiens
atgctaccttttaccttctagtattggtctcaactcactggtaagtaagttggggccagtgtttcacagctattttgtgaccttgctcagatttaaagttcagtctgtgaggcttccatgcccctggatgattccctgtttacaaagaagctgctagacctttctcttttcaatgatttttttgtttgtttttgtttttgtttttgagatggagtctcactttgtcacccaggctggagtgtagtggtgcgatctcagctcactgcaacctctgcctcctgggtttaagcgattctcctgcctcagcctcctgagtagctgggaccataggtgcgtgccaccacaccctgctaatttttgcatttttagggcagatggggtttctccatattggccaagctggtcttgtactcctgacctcaggtgatctgcccacctcggcctcccaaagtgctgagattacaggcatgagctactgtgcccagccctcaatgacatttgaccgagaaacaggtctgtctccccctttgcagyccagcccagcccagctgatttttaggcattctccatcctcacatcttttgccacaatttatttggtggtttgatgggcaaaaaggattcctggtctg

SEQ ID NO: 451093 - DNA, 515 bp, Homo sapiens
ccactatacatctaccagactggttaaaatgtaaaggactgatcataccaaatgttggtgaggaggaggagyagctcttacatgtatatctatttaaaaaaaattttaaattattattatactttaagttctaggatacatgtgcacaatgtgcaggtttgttacatatgtatacatgtgccatgttggcttacatgcatatattaactctaggtatgtgatgataggttaggtatgaatactgtagtcctttgagcaaattctaaagaataatacaaagagatacagccaaaaatccaaaagaaaaattaaaatggagtcctaaaagcatttaactaggaccaaagaaggcaaggatggggaagaaatgaacaagaaataaaggggacaaatagaaaataaatgaaaatgtagttcacctatattcaaccatatgggtaatcactttaaatgtaaatggtctaaatataccaaatcagcacagattgtcagattggataaaaatatatgtatat

SEQ ID NO: 451094 - DNA, 404 bp, Homo sapiens
tgtcatgttccatgctgttatttccccgagtctgttgtttctttttttattctagtttcgtgtgctttcactgtacaattctctctttttccctttatttttcactgccttattctggatgtgtttctattactggtgactgcgaatcgtttctgaggaacgtgctggctctctctctctctctctctcttwcacacacacacacacacacacacacacacacacagagcaggcctccatgggtgtcttggctgctggagcctgcaggagcccccccgcccctcaccatgggggctggccgtggcctgtacaggttagggcatctgtggcgacaccccctctcacaacaggctaggggaaacggggtggtaaggccggcaaggggagggaagggcagtggggat

SEQ ID NO: 451095 - DNA, 533 bp, Homo sapiens
  misc_feature (1)...(533): n = A,T,C or G
gtttaattggctcatggttctgcagagtggacaggaagcttagtgcttctgcttctggggggcctcagaaatctttyaatcattgtgcaaggtaatgaaagagtgaattgtctcatatggcaagaggaaatcacggagagtagggagtgatatagagttttcagtggccagatctcacgagaattcactcatgattgtgaggagagtaccaaggggatagtgctgaaccactcatgagaaatttgccttcatgattcaatcaccttataccangatccacctccacattaggaagcataactcaacatgagatttggtggggacacatattcgaattgcctcatcagtctttgagtataaagacatccatagcaggctttatccagccagcttctttgggattctttatagggtttcaggtctatagcatatccactaaaatattcctacttcaaaaggcaataaagtaagtggtattatcattcttcaaaaagttataatggtagtgtaggcattcatagtatgatttagtt

SEQ ID NO: 451096 - DNA, 597 bp, Homo sapiens
  misc_feature (1)...(597): n = A,T,C or G
tctgcttctggggggcctcagaaatcttttaatcattgtgcaaggtaatgaaagagtgaattgtctcatatggcaagaggaaatcacggagagtagggagtgatatagagttttcagtggccagatctcacgagaattcactcatgattgtgaggagagtaccaaggggatagtgctgaaccactcatgagaaatttgccttcatgattcaatcaccttataccangatccacctccacattaggaagcataaytcaacatgagatttggtggggacacatattcgaattgcctcatcagtctttgagtataaagacatccatagcaggctttatccagccagcttctttgggattctttatagggtttcaggtctatagcatatccactaaaatattcctacttcaaaaggcaataaagtaagtggtattatcattcttcaaaaagttataatggtagtgtaggcattcatagtatgatttagttcatttgctactgtttctattctatcaccatattaacactttcgtacacaattctatattcagctgggtttcagttgagcacaaagtcatccttgtactaccaccgatagct

SEQ ID NO: 451097 - DNA, 597 bp, Homo sapiens
  misc_feature (1)...(597): n = A,T,C or G
tctgcttctggggggcctcagaaatcttttaatcattgtgcaaggtaatgaaagagtgaattgtctcatatggcaagaggaaatcacggagagtagggagtgatatagagttttcagtggccagatctcacgagaattcactcatgattgtgaggagagtaccaaggggatagtgctgaaccactcatgagaaatttgccttcatgattcaatcaccttataccangatccacctccacattaggaagcataactcaacatgagatttggtggggacacatattcgaattgcctcatcagtctttgagtataaagacatccatagcaggctttatccagccagcttctttgggattctttatagggtttcagrtctatagcatatccactaaaatattcctacttcaaaaggcaataaagtaagtggtattatcattcttcaaaaagttataatggtagtgtaggcattcatagtatgatttagttcatttgctactgtttctattctatcaccatattaacactttcgtacacaattctatattcagctgggtttcagttgagcacaaagtcatccttgtactaccaccgatagct

SEQ ID NO: 451098 - DNA, 597 bp, Homo sapiens
  misc_feature (1)...(597): n = A,T,C or G
tctgcttctggggggcctcagaaatcttttaatcattgtgcaaggtaatgaaagagtgaattgtctcatatggcaagaggaaatcacggagagtagggagtgatatagagttttcagtggccagatctcacgagaattcactcatgattgtgaggagagtaccaaggggatagtgctgaaccactcatgagaaatttgccttcatgattcaatcaccttataccangatccacctccacattaggaagcataactcaacatgagatttggtggggacacatattcgaattgcctcatcagtctttgagtataaagacatccatagcaggctttatccagccagcttctttgggattctttatagggtttcaggtctatagsatatccactaaaatattcctacttcaaaaggcaataaagtaagtggtattatcattcttcaaaaagttataatggtagtgtaggcattcatagtatgatttagttcatttgctactgtttctattctatcaccatattaacactttcgtacacaattctatattcagctgggtttcagttgagcacaaagtcatccttgtactaccaccgatagct

SEQ ID NO: 451099 - DNA, 533 bp, Homo sapiens
  misc_feature (1)...(533): n = A,T,C or G
gtttaattggctcatggttctgcagagtggacaggaagcttagtgcttctgcttctggggggcctcagaaatcttttaatcattgtgcaaggtaatgaaagagtgaattgtctcatatggcaagaggaaatcacggagagtagggagtgatatagagttttcagtggccagatctcacgagaattcactcatgattgtgaggagagtaccaaggggatagtgctgaaccactcatgagaaatttgccttcatgattcaatcaccttataccangatccacctccacattaggaagcataactcaacatgagatttggtggggacacatattcgaattgcctcatcagtctttgagtataaagacatccatagcaggctttatccagccagcttctttgggattctttatagggtttcaggtctatagcatatccactaaaatattcctacttcaaaaggcaataaagtaagtggtattaycattcttcaaaaagttataatggtagtgtaggcattcatagtatgatttagtt

SEQ ID NO: 451100 - DNA, 541 bp, Homo sapiens
gtggagcttgcagtgagccgagatcctaccactgcactccagcctgggggacaaagcaagactccatctcaaaaaaaaaagtaaaccatccaattacaacatggcaaaacatatacacagacatttcactacataatatataaagctggaaaacaggccaatgaaaagatgttcaacagtattagccattagggaaatacaaactaaaaccacagtgagctatcactatactccaatcagaatggttaaaaattttaaaaagtgacaccaccaaatgctggcaaggatgcaggaaaaccgcatcactcatacattgctggtgggaatgtaaactcatatggccactctggaaaacagygtggtagtttcttaaccatctaaacaagtaactaccacacaacccagtaactgcattctgggcatttatcccagagaaatgaagacttgagtgcacacaaaagcctgtgcacaaatgtttatagcagctttattcataataaccaaaaactagcaagaacccagataaccttcagtggatgag

SEQ ID NO: 451101 - DNA, 377 bp, Homo sapiens
ctagcttaaccccaagaagtaagtttgaaatcgaaatttagggagcctgcagatggttagggcactgaactccctattttctaatatgtaaaatggacacagtcgttcctagttcacggcactctcatgaggctgaaattaagacagtgggaacaaaagagtattttttccttccttctaaataattttctaagttaattggagaaaaaacataattaaatttccatcccttattcttggacgagatcaaagcttgacttctgtagttttaaatttgaaaaaaggcacttactggtctagtgcctatttattygcactttctgattgtctcatgaatatatgccaggaattttttcacaggaaagctggtttttccc

SEQ ID NO: 451102 - DNA, 591 bp, Homo sapiens
tattattatgtgacattattataaggactgactaaggtggaaaattttgggtttctttgtttttctgagtttgcaacataaatctcaacaggagaatcacaaaacaacaaatccaaaagagattaaaaaaaaatcagtctgctaagtctgctcaggttaatrtgtcttggctcatgatggtacccaaagcagcagggtccaatgagcaagaagcagaaaataccaaagacatccccatctgtataggcttggaaaatgtcactgcatgtacctgaccttccactattaaggtagctgatttatcccttagctaaagttgctctctcttcctaaaagatcttgcttgttttaactttgtggcattcatgttgctgttccagtccaatcccaggataaacttctgaggttgcaatgccagtttggagagcaggacagcagcaaattccaagggaagccctggggttatcgcaagctccagccgcctgagttaggtcacgttgccaacttcaacagagcttgacctcaagctgaactccgcattgccaggctgcagagagctaagccaagcagctataacaagtacaggccttc

SEQ ID NO: 451103 - DNA, 567 bp, Homo sapiens
catagtagacactctgtaaataattctggactgaataaatggtgagatttgatgccaaactgaggagaaaaaaactgcaaccccagccctccctgaaagggccaacattttaaatccattagtcatgcaaaccttgagggtgagtttatttaaattagtgataagaactagctgaagttagctatgtgacaggctgatgttgtttcactggaaggggaagaaggtatttggggccctagggctccacggtgaggtccacgccagaagagttgtctaggaggccatggaggtagtgaggggcacaaggcagatggggataaagaagcagaaaatctacagcagaagatgagagggaagtggaagacactagaatatctttaccacctcccaaattttccaggacaacctctttacatgcrtgactatgagtaagtgtttcaacattaaatgcaacctactgttagctttcccgggactagttacccagaaggttttacttcatctaaaatgcaaccaataatagcattcatagcaaatgcttatgttgtatttacccagacactattc

SEQ ID NO: 451104 - DNA, 621 bp, Homo sapiens
acagggcaccagatatgtttctggagttgatcaaacaggttggttgagaaggcttctacagtgtttcatggtattacagctagccccaggaatgcccatatccacctatagaaccactcctttgtgaaagatttcttaaaaagatatatgtaagacagttctctgggggccttggactaacccatttcttcccatttcttacttgttctcaataataactgatgagtgtgctgggaatgcaatatcttgagataagggggagctgactggaacagcctgggctctgttccagcctctcctagaaaaaaggatgtcccttcaatggtttagcttaatgagtcctgtaaccacagggtataaaactcagggcaggatgctttttcgggtccctcagctgcgatgcaattggggcatacacagatgaaactccatctgccatgggcaattttcctgagacttagggagrcacaggctcatcgtgaattccagggttctgttgtcccttgctgcctaagtaataaattcacttcatgtaacttgcgtgtgtgagtgttctgtctcagcagacttgggcaagtaaccagcgcatagtgagcctgatgtgcaatatacataagaaag

SEQ ID NO: 451105 - DNA, 501 bp, Homo sapiens
gaatctggagaaatttgattcctctagatcttcctaaattcttaaggaatttgattccttattaaggaaaaactcattttagtccctgctaggtagaattttgaagaaaaaggtatagcaacaactgatgtatttgtcggctcaaagttggtcacagcagataatgggccacttccgaaattgtccttttgctatctggctcttttcccaaagagagcaccattttcrtcgctgtcatctgtttgtgtgtcagatatttattgctctgagagatgcacgctgccaatcttggttgtctgtgcccaacgcacctctctggggaagaatgacgttcattgaactgtgagctgccttataaacaaggctgatctctgaatgcagaattagatcctcaaagcctttgtgtgaattgtggtcagactaatgtgaaggcatttggacccaagtccagtgccatgctgagtgtctggcatgatcacagaccttcccacatctacgaaa

SEQ ID NO: 451106 - DNA, 501 bp, Homo sapiens
gaatctggagaaatttgattcctctagatcttcctaaattcttaaggaatttgattccttattaaggaaaaactcattttagtccctgctaggtagaattttgaagaaaaaggtatagcaacaactgatgtatttgtcggctcaaagttggtcacagcagataatgggccacttccgaaattgtccttttgctatctggctcttttcccaaagagagcaccattttcatcgctgtcatctgtttgtgtgtcagatatttattgctctgagagatgcacgctgccaatcttggttgtctgtgcccaacgcacctctctggggragaatgacgttcattgaactgtgagctgccttataaacaaggctgatctctgaatgcagaattagatcctcaaagcctttgtgtgaattgtggtcagactaatgtgaaggcatttggacccaagtccagtgccatgctgagtgtctggcatgatcacagaccttcccacatctacgaaa

SEQ ID NO: 451107 - DNA, 542 bp, Homo sapiens
acatgcaatgcgttcaatgttcctgggagaacaagctctttcaaaattgaaaatatatattgttcagcattgttacaaatgaggtacctgtgtattaaactggcttcaaatgatggattggagttgtaattgattggcttctcccacsaccaatcatatgtgtcccaggagatgtcataggagggctcataactcatctcccacccacagcctcccagtagtcattacctggttgcaggtaaaactctcttgatatctcccaacaaaaagatgtttgttgggatcagagggtagagacctgcttagacatttgaaaacaaggagaaaacccacaaacagagggctaacatcaatgtgggtaatatctaaattttgtttactgtatatcaatgtggagaataaatgaggagtagagtagttcttttaaaagaatgaaaattaggcctattctagagacaaatagattccgctgatattgacaattgcctaaatcattagtcactgtgaaatcttcaagattttgcagcttttttgatattgac

SEQ ID NO: 451108 - DNA, 576 bp, Homo sapiens
cactttttttttgggggggggggraggagttttgctcttgttgcccatgctggagtgcaatgatgggatcctggctcactgcaacctctgcctcccgggttcaagcgattctcctgattcagcctctgaagtagctgggactataggcatgcactaccaagcctggctaattttgtatttttagtagagatggggtttccccatgttggtcaggctggtctcgaactcctgacctcaggtgatctgcctgcctcggccttccaaagtgctgggattacaggcgtgagccactgcacccagcccttagaacactttttattgcatgtagggcccacccagataatctggaataatctctccgttttatgatgtcgactttatcacatctacagactttgccttttaagatgcattcacagattccagggattagcacgtggccctcttgggaagccaggatttggcctccgtaacacctgttgtttctctggtactcagattccagggaagtggatgtgttcatggtttctctgcagaggagctcattccaaagaatgatggacacaggttagtagt

SEQ ID NO: 451109 - DNA, 576 bp, Homo sapiens
cactttttttttggggggggggggaggagttttgctcttgttgcccatgctggagtgcaatgatgggatcctggctcactgcaacctctgcctcccgggttcaagcgattctcctgattcagcctctgaagtagctgggactataggcatgcactaccaagcctggctaattttgtatttttagtagagatggggtttccccatgttggtcaggctggtctcgaactcctgacctcaggtgatctgcctgcctcggccttccaaagtgctgggattacaggcgtgagccactgcacccagcccttagaacactttttattgcatgtagggcccacccagataatctggaataatctctccgttttatgatgtcgactttatcacatctacagactttgccttttaagatgcattcacagattccagggattagcacgtggccctcttgggaagccaggatttggcctccgtaacacctgttgtttctctggtactcagattccagggaagtggaygtgttcatggtttctctgcagaggagctcattccaaagaatgatggacacaggttagtagt

SEQ ID NO: 451110 - DNA, 606 bp, Homo sapiens
tgggaaaacttcagggttggcattgggttggtgtcacttcctttctccatgcctcagagggtttgtgtgtgtgtttatgtagaagacgaagatatttataatgctcgttgcccattttgcagaggtcatcttcattaatttcagagtatgtgtgagggaggcccatagctcaagtttgaccttttaatcttcattcttggcttgttggggattaaagatagactaggcttaacaccaatagtacctgcccttaacagggtttctgagaagcaaagtcattgaygacagagtctccatatggtaatgctacttcctccttccagaagtttcacagaagctttcctttctgacaatgaaaaataaaatcacctcagacatcagaaatacttggccttttattttcgttttctcacttgaaacagaacctgagataccttgttggactcagagttctccttgagtgtgacattagggactaagaaaataagcagcagcttgattttttaaagtatagttgccactgctgacagaagtcaaattataacaccagaaaagtctggttttgattcctgccatcttcctgggagagtgggtggcttggttgat

SEQ ID NO: 451111 - DNA, 606 bp, Homo sapiens
tgggaaaacttcagggttggcattgggttggtgtcacttcctttctccatgcctcagagggtttgtgtgtgtgtttatgtagaagacgaagatatttataatgctcgttgcccattttgcagaggtcatcttcattaatttcagagtatgtgtgagggaggcccatagctcaagtttgaccttttaatcttcattcttggcttgttggggattaaagatagactaggcttaacaccaatagtacctgcccttaacagggtttctgagaagcaaagtcattgacgacagagtctccatatggtaatgctacttcctccttccagaaktttcacagaagctttcctttctgacaatgaaaaataaaatcacctcagacatcagaaatacttggccttttattttcgttttctcacttgaaacagaacctgagataccttgttggactcagagttctccttgagtgtgacattagggactaagaaaataagcagcagcttgattttttaaagtatagttgccactgctgacagaagtcaaattataacaccagaaaagtctggttttgattcctgccatcttcctgggagagtgggtggcttggttgat

SEQ ID NO: 451112 - DNA, 541 bp, Homo sapiens
tccttgagtgtgacattagggactaagaaaataagcagcagcttgattttttaaagtatagttgccactgctgacagaagtcaaattataacaccagaaaagtctggttttgattcctgccatcttcctgggagagtgggtggcttggttgataaagctgcactctcacttctggaaatggattgggttcccaagcgtaaacacgtctgcatttaatttggatctgcttgtgtattccagtaagaaacggggcttaacatatgcactgtagctctggctgaagggcattttaactggttatgggtctcctaagacacagggattttaagccattgcttttcaaatgtgcagtctgattgtgcacatgctaaagggaggggcgggagcagcagtgcgggagatggcatgtcacacacagtcataataatcgagctacatctagccagataacgctstctttgcttacaaatctaggaaataagccagaaacttaccaaagaataggagtgattactgatactgactaactaaaaaaatgtct

SEQ ID NO: 451113 - DNA, 564 bp, Homo sapiens
tcattatgttgagtgatataagccaggaacagaaagacaaagtttgcatattcttacttatttatgagatctaaaaattaaaacaatttaacctatgaacatagagaatagaggaatcggtatcagagtctgggaagggtagtgagggaggggctggggaggtggagatggttaatgggtrcaaaaaattggatgaatgaataagacctagtatttgatagcacaacagggtgagaatagtcaataataatttaattctacattttaaaataactaaaataatatataactggattgcaacacaaaggataaatgcttgaggggatagatggcccattttacatgatgtgattattagacattgcatgcctgcatcaaaacatctaatataccccattaatatattaatgtgtacctactatgtacctacaaaagttaaaataaaattttatttaaaaattaaagataaaaatgagttctctaagagaggtgtgtacacaacactatgagagcaccaaacaggcaactatccagtttgtttgatggagggaatatgggtgatca

SEQ ID NO: 451114 - DNA, 540 bp, Homo sapiens
ataaataaaaattataagttatatatttaaaatatagcaagtaattctggtttataggataagctctagaaaagaaattaaaaaactgaatgatatatctaccttttaccctaattatgactacccaaagtcaaaacaatccactgataataagacaaatgtgatattaagaataagtgagtaaaaataggtatttaatagaaccaaatgtttaaaaaatctcatttgataatctatacggatgctccctctttacggaggtggaatgtatttttcattccttaggtatgagttggaatagtgttccccttctaaagagtacagtgtggaagcttgggggaggagaataactttactgtggagaaaactagcacatgcaatctcagccaggtgatgaaggttaatatgaacartgataagacaggttgatatcatttatccttgatattaggcaaaaggaatggcactttacctctaaggtcttcctcccctaaacccataaccccgtgtaatcattataaaaataccagatgaattcca

SEQ ID NO: 451115 - DNA, 540 bp, Homo sapiens
ataaataaaaattataagttatatatttaaaatatagcaagtaattctggtttataggataagctctagaaaagaaattaaaaaactgaatgatatatctaccttttaccctaattatgactacccaaagtcaaaacaatccactgataataagacaaatgtgatattaagaataagtgagtaaaaataggtatttaatagaaccaaatgtttaaaaaatctcatttgataatctatacggatgctccctctttacggaggtggaatgtatttttcattccttaggtatgagttggaatagtgttccccttctaaagagtacagtgtggaagcttgggggaggagaataactttactgtggagaaaactagcacatgcaatctcagccaggtgatgaaggttaatatgaacagtgataagacaggttgatatcatttatccttgatattaggcaaaaggaatggcactttacctctaagrtcttcctcccctaaacccataaccccgtgtaatcattataaaaataccagatgaattcca

SEQ ID NO: 451116 - DNA, 562 bp, Homo sapiens
ttgtttatttatttattcatttatttatttatttagatgaagtcttgctctctcacccaggctggagtgtagtggcacgatcttggctcactgcaacctctgcctcctctgttcaagtgattcttgtgcctgagcctcccaagtatctgggactataggcgcatgccaacatccctgtgtaatttttatatttttagtagagatggggtttcaccatgttggccgggctgatcttgaactcacatgatcttgaactcacatgatcttgaactcagacctcagatgatctgcctgacttggtctcccaaagtgctgggattacaggtgtgagccaycacacctggcctctttagtttaattaaatcccatttgtcaatgtttacttttgttgcaattgcttttggcatctttgtcatggaatctttgcccatgcctaagtcctgaatggtattgcctaggttttcttctaggattgttatagtttgaggttttacatgtaagtctttaattcctcttgacttgatttctgtcaaggatggtgtaaggaaggggtccagctcaa

SEQ ID NO: 451117 - DNA, 486 bp, Homo sapiens
tttcattttcaaatgaatataatttcgttgggggacattcttcatgggataaaactcgacttctttaaagctgtamcctattaatccacagtgcaacccaaagactggaaaagcaaagtgaaaggcctctggttcataacccttgtccctgatttagtttcaaaaccatttctgctgttcggaattatgagaaaacgtcaattgagtctcagcagtagtcatggagaaatcacaacttaacccaaaacactgaaaaagagcttcagtgtcttatggagcctcaagaagccaaagcttttagaagtcccagcccctaaggcttgatgggggtggatggaagtcatcaagggagatctgtctaacagctatttagagtgtactcttgattgctgtttcctgaaaaaggagtcttgtaccagctacttgcggaaattagtgggtaaatttatgaacattaatatgatgttgggaaaaaagctgtgaatg

SEQ ID NO: 451118 - DNA, 486 bp, Homo sapiens
tttcattttcaaatgaatataatttcgttgggggacattcttcatgggataaaactcgacttctttaaagctgtaccctattaatccacagtgsaacccaaagactggaaaagcaaagtgaaaggcctctggttcataacccttgtccctgatttagtttcaaaaccatttctgctgttcggaattatgagaaaacgtcaattgagtctcagcagtagtcatggagaaatcacaacttaacccaaaacactgaaaaagagcttcagtgtcttatggagcctcaagaagccaaagcttttagaagtcccagcccctaaggcttgatgggggtggatggaagtcatcaagggagatctgtctaacagctatttagagtgtactcttgattgctgtttcctgaaaaaggagtcttgtaccagctacttgcggaaattagtgggtaaatttatgaacattaatatgatgttgggaaaaaagctgtgaatg

SEQ ID NO: 451119 - DNA, 486 bp, Homo sapiens
tttcattttcaaatgaatataatttcgttgggggacattcttcatgggataaaactcgacttctttaaagctgtaccctattaatccacagtgcaacccaaagactggaaaagcaaagtgaaaggcctctggttcataacccttgtccctgatttagtttcaaaaccatttctgctgttcggaattatgagaaaacgtcaattgagtctcagcagtagtcatggagaaatcacaacttaacccaaaacactgaaaaagagcttcagtrtcttatggagcctcaagaagccaaagcttttagaagtcccagcccctaaggcttgatgggggtggatggaagtcatcaagggagatctgtctaacagctatttagagtgtactcttgattgctgtttcctgaaaaaggagtcttgtaccagctacttgcggaaattagtgggtaaatttatgaacattaatatgatgttgggaaaaaagctgtgaatg

SEQ ID NO: 451120 - DNA, 604 bp, Homo sapiens
cttgcatgtatttacactttttgtattttactttggtgtgctaatataaaggatattgttcaggaacttaagcatcttgcaggctcgttagggatggcaggatgtgggagcaggtatataatcagcatttacagtttaaggtgaagagtgtcaacccttttttaatttagcataagtttattgagtgtgtgcctttggccagagagagttctgggcattggatacagtgctgtacaaggcatagcctctgcccctgaataacgtattcagggttgctggactctgagactgtgcaagagaggtgagcttccattcactggcaatcccacaaacatctcagatcctttcccacttatcccctattcctactcccaaactctagccaaatgagcttctcagtctgtagatctggagtaagaactggaacttgattttyttttcttttctttttttttttttaaagctccccctggtaattctgatgcccagtcaagtttggaaactaccatatgacctaatagcctcaatgacctcacatagatattataggagaaattgctagaagccagaaggaaaaggtatctgtgaataatttttcctcgca

SEQ ID NO: 451121 - DNA, 604 bp, Homo sapiens
cttgcatgtatttacactttttgtattttactttggtgtgctaatataaaggatattgttcaggaacttaagcatcttgcaggctcgttagggatggcaggatgtgggagcaggtatataatcagcatttacagtttaaggtgaagagtgtcaacccttttttaatttagcataagtttattgagtgtgtgcctttggccagagagagttctgggcattggatacagtgctgtacaaggcatagcctctgcccctgaataacgtattcagggttgctggactctgagactgtgcaagagaggtgagcttccattcactggcaatcccacaaacatctcagatcctttcccacttatcccctattcctactcccaaactctagccaaatgagcttctcagtctgtagatctggagtaagaactggaacttgatttttttttcttttctttttttttttttaaagctccccctggtaattctgatgcycagtcaagtttggaaactaccatatgacctaatagcctcaatgacctcacatagatattataggagaaattgctagaagccagaaggaaaaggtatctgtgaataatttttcctcgca

SEQ ID NO: 451122 - DNA, 576 bp, Homo sapiens
tcatactcaggtatcaagtgtggaaaacaatccatttttgcacatacaagagctmaaaaaaatgtaactcccatgcatcctgtcacagaaagcttttggggaatatgtaaaacaaggaagagaaagacaaggcttgggaaatggctagctaaggaacagtagccaagggaaggaagtatcagaatgaaaactgctacagcatgcaaaagcccagaagggagagctctaggggaaagaaagaaaaaggctcttgaaaaataatatggacaaacacatcccagatgtgatggaataattagtcatggagaaaactttgaaaataaaaaaaaacaaaacaggctgttgataaaggaaagtataattcttacatactgtttggctcagcagtgaataacacttacatcattattgtagtacaactattgattatttactttaccataaatcatgatatggctttattgggataaggggacaggggaactgagtgtgtgagcaatgatggtgtaagggcattaaatgcaaaaaaaatcaatagagaagatgtatatttaataaatcaagaaataacacaca

SEQ ID NO: 451123 - DNA, 497 bp, Homo sapiens
tattcctctgaaaaatgttaaattacagtggtcaactaagcctatagaaggattaagcaggcacaggttagaaggcatcaaatatacttaaaatttttttagatagaaaatctctggaggaaagatgtatctcagagatcaacccttatgtatatgctaaaaagtttttccccagcattaacaataccaacagtctgaaagcctgagcactatayattaggttggtacaaaagtaattgcagtttttgctattacttttaatggcaaaacccataattacttttgcagcaacctaacagctttttagacaagtggattggaaaggtaatatacacatatgaaatacattttggaaatagaaggcaaatatacagaataaagcaaccagctcttgtaatcacaatgcttacagtagattacagttaactttttaagtgatacatgtattaagtaaatatatatcatatatatgagaaaaagaagtgtgatattgtgta

SEQ ID NO: 451124 - DNA, 497 bp, Homo sapiens
tattcctctgaaaaatgttaaattacagtggtcaactaagcctatagaaggattaagcaggcacaggttagaaggcatcaaatatacttaaaatttttttagatagaaaatctctggaggaaagatgtatctcagagatcaacccttatgtatatgctaaaaagtttttccccagcattaacaataccaacagtctgaaagcctgagcactatacattaggttggtacaaaagtaattgcagtttttgctattacttttaatggcaaaacccataattacttttgcagcaacctaacagctttttagacaagtggattggaaaggtaatatacacatatgaaatacattttggaaatagaaggcaaatatacagaataaarcaaccagctcttgtaatcacaatgcttacagtagattacagttaactttttaagtgatacatgtattaagtaaatatatatcatatatatgagaaaaagaagtgtgatattgtgta

SEQ ID NO: 451125 - DNA, 488 bp, Homo sapiens
  misc_feature (1)...(488): n = A,T,C or G
nnnnccccacccaacaggttcaggggctcaggcacacgtgacacctctttccccaggagaagtcagcagaacaaatcttgactagggacaccaaaatccatattcggggccaagagaaggtgctctgccccgcaagtgtcagccaggaccccggcttccttccctcgctgtgtgatctcagtgtgggtttggacacatccccactctgggcttccatttcacatcagaaaacaggacctggaatggctcagtggctctcaatctgcaatcatgatccaggagcccctgascaagtttcagaaaatcctagaagaagcgcacatgcgccccaagctgaagcacacaggaagcttgctcatccaggcactgaagtttatcggtgtgtgcagttcaggctgaacagactcacacagaggtgtctgcaatcaacaaaacgggggaaacagtgactcacctcacacagatggcctgttagcgggcaaatttct

SEQ ID NO: 451126 - DNA, 569 bp, Homo sapiens
tatttatttttagagacagggtcttgtgtgttgcccaggctggagggcagtggctatgcacagatgcagtcccactgctgatcagcatggagtttttacctgttctgtttcccaccaagccagttcacccctccttgggcaacttggtggtccccactcccgaaaggtcaccatattgatgccgagcttactgcagatacccaataggcatagttcgctccagaccrgtactcctgggctcaaatgatcttcctcagcctccagagtagctgggaccacaggctgtgccaccgcactcggctccaccattctattttgatgtgagaaatgggtgctgagggctgtatgattgaggaaattcctaattatcttctcaatgtgtcacctgttggtagtcactttctgttttctcaagtttcacctctgagttgcatgacctatgacaataatgccttttggtaaccagaagacttttttatttcaaaaatgtctagacattataatgctttatcttgcactccaaacatattggcaacaaatattaactttgaatattgcccacagtcctg

SEQ ID NO: 451127 - DNA, 600 bp, Homo sapiens
ttctttaagcacgagtcactcaaaatcaaggaaaatttgcactagcaaatggtgaaatttcaaaaatgtatctctctgggrcagagttgctttcttgatgactcacaggcagcttcaacttcacaagtgcaaaagtgaaccagtcatcttctcccaccccagccctctccaggctccatatctcaaaaaaaaagcacttctgtatgttcaaaaaagaaatgctgcgatcactctgacacctctttctccctcattcatcagtaattttacctcccagatacttctccaatatattcattactctccaacttcatttctatcataccttttaaaccaccatgatcttactgctaggatatttctgttgcctcctggcttgtcttgtctcttcaatcaatttcaacactagaggagatttaagaactaagccatcgcataaacaccaatggctttcttctgcttttgaaattaagtacattgacttggctttggcttacagaaggctgcatgtcttccaatctcacttctcaccattctacaccatatttgccttcctttagttgctcaaatgcaccatgaccttccccatctctctgctct

SEQ ID NO: 451128 - DNA, 600 bp, Homo sapiens
ttctttaagcacgagtcactcaaaatcaaggaaaatttgcactagcaaatggtgaaatttcaaaaatgtatctctctgggacagagttgctttcttgatgactcacaggcagcttcaacttcacaagtgcaaaagtgaaccagtcatcttctcccaccccagccctctccaggctccatatctcaaaaaaaaagcacttctgtatgttcaaaaaagaaatgctgcgatcactctgacacctctttctccctcattcatcagtaattttacctcccagatacttctccaatatattcattactctccaacttcatttctatcataccttttaaaccaccatgatcttactgctaggatatttctgttgcctcctggcttgtcttgtctcttcaatcaatttcaacactagaggagatttaagaactaagccatcgcataaacaccaatggctttcttctgcttttgaaattaagtacaytgacttggctttggcttacagaaggctgcatgtcttccaatctcacttctcaccattctacaccatatttgccttcctttagttgctcaaatgcaccatgaccttccccatctctctgctct

SEQ ID NO: 451129 - DNA, 533 bp, Homo sapiens
gtggtgaggggcagagagcaggcaagctgagatggtgctgatgtggttgccagtccctmcccattcatcctggtaggactgggcttcccccggctctccagatacagaggctggcatgcaggcaatctaagaagggagaaggcaatcatcggcttgaaaaactttcaacattactgggactggtacaaatgtctgtctatggctgcattcactggccaatggaatgtgagactactacatcatcctctccccaaaactttgtccaaagggcatttaatccaggccctgccccaaaatattgcattaccagcaccaggctagacagaagtatatcagggccatttataaattatcttctagaatcaatactgtgaaaatggccatactgcccaaagtaatttataaattcaatgctaatcccattaagctaccactgacatttttcacagaattagaaaaaactactttaaatttcatatggaaccaaaaaagagcctctatagccaagacaatcctaagcaaaaagaacaaag

SEQ ID NO: 451130 - DNA, 533 bp, Homo sapiens
gtggtgaggggcagagagcaggcaagctgagatggtgctgatgtggttgccagtccctccccattcatcctggtaggactgggcttcccccrgctctccagatacagaggctggcatgcaggcaatctaagaagggagaaggcaatcatcggcttgaaaaactttcaacattactgggactggtacaaatgtctgtctatggctgcattcactggccaatggaatgtgagactactacatcatcctctccccaaaactttgtccaaagggcatttaatccaggccctgccccaaaatattgcattaccagcaccaggctagacagaagtatatcagggccatttataaattatcttctagaatcaatactgtgaaaatggccatactgcccaaagtaatttataaattcaatgctaatcccattaagctaccactgacatttttcacagaattagaaaaaactactttaaatttcatatggaaccaaaaaagagcctctatagccaagacaatcctaagcaaaaagaacaaag

SEQ ID NO: 451131 - DNA, 552 bp, Homo sapiens
tttgaaaaaaaagtaagaaaagtaaaaaaggaaagaaaaaaaagtagcctaagaattcaaacaaagaatmcatcttggacactcctgttataagaagtcaggggataacgaggagattacaggtaaaactatgcctctctcactgcaaaccaaagatcacagacaaggaaaattttccaggtaagagaaaggacacgaatatgttggaaggcaggcatgtcagtttcagtcctccaagaaataaatgtcaagagagcaatagatatgcaagagatttatttggggaaatgtctgtaaagcatagaagaaaagggagcaggagaggagaggagaatgtttgggtcacaatgcaggtctaacaccaacaacaggagaaaaagggaaaaaggaagattggctagaaagagcctcagagtgtagaccagctctgggaaagtctctgccgggtggatcaagaggctccgagcaaaggttgcccattcgaggagtcccacaccgagcaggaatggccaactctagtgtcctcactgtgctcagtcactggctgggtgg

SEQ ID NO: 451132 - DNA, 595 bp, Homo sapiens
gtttcactgtgttggccaggatggtctcgatctcttgacctcgtgatctgcccgtctcagcctcccaaagtgctgggattacagttcacatttactgtgtagtgataggaacaggtaaggatggttcagttctgagccttcttcyactttcctgatattatcttagttattataaacaaataaggcataaaatgaatcatgccaatttcatgtgtgcctgtgggatttcatatgagagtattctcatgaaaaggcttggttttggcatggtgatatggttttgctgtgtccccacccaaatatcatcttgaattgtagttcctacaatccccacacgtcgtgggaggggcctggtgggaggtaatttaatcatggcggtggttaccctcatactgttctcatgatagtgagtaagttctcatgagatgtgatggttttataaggggcttttcctcctttcctcagcacttctctctcctgctgccttgtgaaggacatgtttgcttccacttctgccatgactgtaagtttcctgaagccttcccagcaatgtggaactgtgagtcaattaaacctctttcctttataaattacc

SEQ ID NO: 451133 - DNA, 595 bp, Homo sapiens
gtttcactgtgttggccaggatggtctcgatctcttgacctcgtgatctgcccgtctcagcctcccaaagtgctgggattacagttcacatttactgtgtagtgataggaacaggtaaggatggttcagttctgagccttcttccactttcctgatattatcttagttattataaacaaataaggcataaaatgaatcatgccaatttcatgtgtgcctgtgggatttcatatgagagtattctcatgaaaaggcttggttttggcatggtgatatggttttgctgtgtccccacccaaatatcatcttgaattgtagttcctacaatccccacacgtcgtgggaggggcctggtgggaggtaatttaatcatggcggtggttaccctcatactgttctcatgatagtgagtaagttctcatgagatgtgatggttttataaggggcttttcctcctttcckcagcacttctctctcctgctgccttgtgaaggacatgtttgcttccacttctgccatgactgtaagtttcctgaagccttcccagcaatgtggaactgtgagtcaattaaacctctttcctttataaattacc

SEQ ID NO: 451134 - DNA, 552 bp, Homo sapiens
aaatggaattttcactgctcttttctgacataaaaaggtcatcttgttgtttatctacaaagccaggggagcctgagctgttgactattttgcagttggaaacactggcccaaattcaaagcagcctgatgcgttctctctccttcctgtcctgtttttatttaaagaagttggcttcatgaatcattggataaaggcttggaatacagctccttatgtttcagaagatgasggccttggtccaaagaaacccaaagtcaaggacaccccaaaactcctaagaatgttgatagtaagaatagagctgctataattataatgctccttgtctctgggctacaggatacatagactctcttgtactcaatgaaatcaccgaaaacctttggcaagatgggaatcttagacccattctgaagtttcctgcaaaacctcagaatagttaccctccgagcagggtggtgacataataaatatggcccagtgaaaaatgaaaatttggagccccttgttcaaagagcaggaaaaaaagtacaaagttattaaaatata

SEQ ID NO: 451135 - DNA, 425 bp, Homo sapiens
aaatgacacattacttctgttcacaactcattggctagaactggttaaatgggtcatagacaggagaaataggatcatgctaaaatgatttgtaaactgtaaagcactccacaagttcattgctttttttgaggtgtcttaaagatggtacagctttaaccagtaaatatacaatctgaggagtrggaaaatccagaaataggcccttttagaaggactagatctatgcatgaataatagattcctatcagtgaaagctaagaagcacttgttagctggaggagccactttggaggctctggctgagatgaaaatgttttaatatagtacgttgtatcacagacccaggtggtaaactgggcttgttcctggtccattttctgggaatttttctaatttttagtcttctatccccaccaccttgt

SEQ ID NO: 451136 - DNA, 568 bp, Homo sapiens
cagtagcggtgaagagtaaggcatggaaggaaaactctctcacatacacccctcccaaaacagaaacagaaagacctcaactctagacatcctaacacttggagaagacattcaacttttaggaaaacaggttgattttttccttgccatattgtgtcttaaaaacggtagcttggggaaggtggcacatgaattcaaagcacagctctgctacatataagctgcgtgaacttgaacaagttacctaacatctttgtgtctcatttttctcctttataaagtgagatgattaaagtgcttattcctagggttgtctttgatcataaagggaatacrtaataaacttgtaactacaatctattgaatgctcagggtgctgtgtatacctggtgctgtgttgctgctggtgttggtattgttgtcattgtcattgtcatcctcatccacaacagcaaattctgtctggtctcagtcagaatgaattgggaaagacagagtgatggggtatgtggaagagtctagttgtcttctggtaatattattccaggttcagttactatataagttt

SEQ ID NO: 451137 - DNA, 589 bp, Homo sapiens
cccattgcttgaccttctatcaagttttaagaattgcatgtcattctgtaagtgctcaattaacatttgctgagtgaatgttggaacaagtgacctccacaggatctttcaacactgattccctgatcttggttcattccatctccacagatcattccagacttggaaattgtggttcctaggggtgaagcaggcaggcagggggatgggaggtggcatggagagagtctacttctcaattctcagcttccaagtgtagcgtaaaggcttgctgggctcggccgtttgctggacactgggatgggagggaaatagataagtcaaccgatccctagccaaagggaattacaagcaggttggggatgtgaagcaggcatccctgagaattgaaagaataacataaaggcagagggctgtagcaatgggcgtgtgtgtggggtgccgggtgggggcggtgtggagtactgctgctatgagttctgaaaaataggcactatgcattttatgagtcccagasgtttgctccaagtggttctctcctgaaacactctgaaattctccattatggaaaattgaagaaatcacacca

SEQ ID NO: 451138 - DNA, 591 bp, Homo sapiens
attgctaaaataacttaaaacacaactaccatttaacccaccaattccattactgggtatatattcaaaggaagatacatggttttaccaaaaagacacaagcatttctacattcatcacagcactattcacaataacaaagacatggaatcaacctggttgctcatcaatggtggattggataaagaaaatgtggcatatatacaccatagaatgttatgcagccataaaaagaacaaaatcatgttctttgcagcaacatgaatgcagctggaggccactgtcctaagcaaacaaacacaggaacagaaaactaaatactgcatgtactcactcataagtgggagctaatcattgggtactcatgaacataaasagggcagcaatacacactgggaactgctaaaaggggaaggtagagaggaggacaagacttgaaaactaattattgggtactatgctcactacctgggtgacggaatcaatcataccccaaaccccagcatcatgcaatatacccatataacacacctgcacatgtaccccctggatctaaaataaattataaaaataaataaataaatttgaagc

SEQ ID NO: 451139 - DNA, 582 bp, Homo sapiens
ctttggctagttttctaagaatttcttctcctccccaaggctggcttcatctgcctgctggagaagagccagcagctctcaccacagcattcccaaggctttcatctcagaggacagcttcacgataaagtcaatctagcccactttccatcctgtgcatttgctattattaaatatccgagtggaactaatgaatgccttttacttcccttgaacataaagagtcttgaagaaatcgaaccaccacagcctgccgacttgagggaattagtctggtctttgagaaaatgagttcgccatttccaccccacccccaaaaacagttctcagtttcttgtgcccacctaaaaggataataatatcttccccattaccatgccagcaagaaaaatgtttctttccccaggaggcagagatacattttctgactgagcctgggagacaaaaatgctataatttgratttattttccttaaaatatctctaaaatatctgggatctgtccctgagttctgtgcagtcagcagttttcccagtaaactcatttattgttcatgctgactagaactggagtttttttcc

SEQ ID NO: 451140 - DNA, 532 bp, Homo sapiens
gactcctttttgagcagacacttatcagtactgccaacatgaatcccttcattcaacaaatacttactgaacatctactcttgctgtcactgagccaggtgctgggaatttgaagtagacacgatgcacatcgtcaaaagtttcacaataaacaaaaaagaatttgggggggaaattatgttgatgaaattagggagtgttacctaagcagaatcaacggaatgttggacaaatrcagcagggaataatgtcatccagcaataggcaagttgcccagagtctcagagctgaacgcgcaggcgtcagccagaagaaagaggctgtgggacaaggatttgccgagcaaaggaaaaagcatgtgcaaaggtctcaaagccagagcacatggtttctttgaaagagatgagagaatgcaagcaagaggatgaggggagggaatgatggagaggcagagagaggctgaaaatggggctttcaaccaccatcctgaggaatgcgcaaagccacagaaggagcacaatcaggcctgcat

SEQ ID NO: 451141 - DNA, 609 bp, Homo sapiens
ggtggccatgcagtcacccatggtgtggagctgctcaggatgcccctcctccacatgatgcagccagaaagatggatgatcagattccccatgattgaggaactgacaaatagaaagtggggactgaaatcaacccaagagtcccacagacagtgtttttggatagacatagaaatggacccttctggtcttaaagcttgaaacttaggacatttgttttatctgagttccttcctcagcaaaggcctctcaggcctctcaaaaagcrtcatagacctgaaactcagcagatgacagcctccagacaatgagatgccagacccctcactcatcatgagtgcttcctcacccttccctagttcctcttttcccacccacagttaacatttcttccctgctacataaacccctcactttagttgatcagggagattgatttgaaactgatcttccatctcctcagctgcagcacccaattaaagccttcttcctcagcaatactcaatgtctcagtgattggctttctgtgagctgagtagcagggcctagaccgaactcccgggctttcagtagcaatacatgtacacttttaaagactgtaattaatgg

SEQ ID NO: 451142 - DNA, 609 bp, Homo sapiens
ggtggccatgcagtcacccatggtgtggagctgctcaggatgcccctcctccacatgatgcagccagaaagatggatgatcagattccccatgattgaggaactgacaaatagaaagtggggactgaaatcaacccaagagtcccacagacagtgtttttggatagacatagaaatggacccttctggtcttaaagcttgaaacttaggacatttgttttatctgagttccttcctcagcaaaggcctctcaggcctctcaaaaagcgtcayagacctgaaactcagcagatgacagcctccagacaatgagatgccagacccctcactcatcatgagtgcttcctcacccttccctagttcctcttttcccacccacagttaacatttcttccctgctacataaacccctcactttagttgatcagggagattgatttgaaactgatcttccatctcctcagctgcagcacccaattaaagccttcttcctcagcaatactcaatgtctcagtgattggctttctgtgagctgagtagcagggcctagaccgaactcccgggctttcagtagcaatacatgtacacttttaaagactgtaattaatgg

SEQ ID NO: 451143 - DNA, 610 bp, Homo sapiens
ctgctgttctcagctccattggcttatctgggcaatgggcagaataaacttaccaggcagttacactaataaaagagaaacacaaattgtaagcatgcttcaaaagaaatgttaagtctttgtatttcttttraagaaacacaaaaggaggaggaatgataagacaggcaatacactgtcctaaatattttcatgattctcctgcctccttcatatccttcttatcccaacaacttctccccagaaaccttcaacttaaacatggtcctgccagaactgggtttgtccttcccttaacattttcctctcacctgccctacaccccttccaaatctaatctgttcattcacttccaggtcattgaggattttccatttaaaaatataaaaaattcataaagaggaagataactggtcatccatattcacacctcctggaattaactactgttaacatatctacatatttttcttctgaatcatttttaagctattgtcttttttaaaaaaaatttatacatgctaagcatagaccgtactaacagtagagaaaatgtaaacatatgtaaaatttttgatcaccttaagttcaaaaataacttctcataaca

SEQ ID NO: 451144 - DNA, 610 bp, Homo sapiens
ctgctgttctcagctccattggcttatctgggcaatgggcagaataaacttaccaggcagttacactaataaaagagaaacacaaattgtaagcatgcttcaaaagaaatgttaagtctttgtatttcttttaaagaaacacaaaaggaggaggaatgataagacaggcaatacactgtcctaaatattttcatgattctcctgcctccttcatatccttcttatcccaacaacttctccccagaaaccttcaacttaaacatggtcctgccagaactgggtttgtccttcccttaacattttcctctcacctgccctacaccccttccaaatctaatctgttcattcacttccaggtcattgaggattttccatttaaaaatataaaaaattcataaagaggaagataactggtcatccatattcacacctcctggaattaactactgttaacatatctacatatttttcttcygaatcatttttaagctattgtcttttttaaaaaaaatttatacatgctaagcatagaccgtactaacagtagagaaaatgtaaacatatgtaaaatttttgatcaccttaagttcaaaaataacttctcataaca

SEQ ID NO: 451145 - DNA, 476 bp, Homo sapiens
tgttattggtcgttcaggctttcggtttcttcttgattcaatcctagtcgtttgtatgtttctaagaatttatccatttactctaggttatccaatttgttggtatagagctgttaatgatagtttcttatgatcctttttacttgtgaggcttctgttgtaatacctccactttcatttcggatgttatttatttgagtcttctctatttttttcttagtttagccaagtgtttgttaattttactttttccagaaatacaacttgggtgtgagaggcctacgttgcatcaccactggaggccagtagttcccagtmggcctgggaagaatagtaagatgttgtctctcctaaaaagagggagaaagagaaaggaaaaggaaaaaaaaaacccaacaactcagttttgtttatttttctgtagtatttctattcttcagttgattgacttctgcatcgatatgttgtttcctttc

SEQ ID NO: 451146 - DNA, 536 bp, Homo sapiens
gaggccaggcacggtggctcatacctgtaatcccagcactttgggaggctgaggtgggtggatcacctgaggtcaagagtttgaaaccagcctggctaacatggtgaaagtccatctctactgaaaatatagaaaattagccgggcatggtggcctacacttgtaatcccagccactcaggaggttgaggcagaagattcacttgaacccggaggcagaggttgcagtgagctgagatcatgccattgcactscagcctgggcaaaaggagcgaaactccatcacaaatatatatatatatataaaagcagacagaagatagatcatctgtgattactatgtcaaggacaattttagaattcttgttaaactcacctctttcttttcacagctggccaggacttagtcagtatctactgaaaccttgaatatcttggctgtgttaactgttttgacccaacatggagcgaaaatgttggttgtaccttgagattctgacatctggttgaagtccaggttcactggcccaggacagg

SEQ ID NO: 451147 - DNA, 536 bp, Homo sapiens
gaggccaggcacggtggctcatacctgtaatcccagcactttgggaggctgaggtgggtggatcacctgaggtcaagagtttgaaaccagcctggctaacatggtgaaagtccatctctactgaaaatatagaaaattagccgggcatggtggcctacacttgtaatcccagccactcaggaggttgaggcagaagattcacttgaacccggaggcagaggttgcagtgagctgagatcatgccattgcactgcagcctgggcaaaaggagcgaaactccatcacaaatatatatatatatataaaagyagacagaagatagatcatctgtgattactatgtcaaggacaattttagaattcttgttaaactcacctctttcttttcacagctggccaggacttagtcagtatctactgaaaccttgaatatcttggctgtgttaactgttttgacccaacatggagcgaaaatgttggttgtaccttgagattctgacatctggttgaagtccaggttcactggcccaggacagg

SEQ ID NO: 451148 - DNA, 497 bp, Homo sapiens
catgcctggataatttttgtatttttagtagagacggggtttcaccatgttggtcaggctggtgtcgaactcctgaccctgtgatccacccacctcagcctcccaaagtgctgggattacaggcrtgagccaccgcgcctggccacaagtaactttttatatgaaatttccggtttcaattctgacatataaagaggtgggaagtcaccatttgtcctcacaacaagaataaagctgaacaaactgaaaaccaacaactcttcttagacggccagagaattgaggtcactgccaccctgaaaactagaaagacaggcaaatgcacggagtcacagcttaccaggaacagaaactgctggagccagcacctgggaggagaacttaaatagtattgacagattactagaagctgagggtggcttggcttgagcattaaaaacgctctgagaaccagtcatggggggaatctcacactttcctaaatctgaccactagaa

SEQ ID NO: 451149 - DNA, 497 bp, Homo sapiens
catgcctggataatttttgtatttttagtagagacggggtttcaccatgttggtcaggctggtgtcgaactcctgaccctgtgatccacccacctcagcctcccaaagtgctgggattacaggcgtgagccaccgcgcctggccacaagtaactttttatatgaaatttccggtttcaattctgacatataaagaggtgggaagtcaccatttgtcctcacaacaagaataaagctgaacaaactgaaaaccaacaactcttcttakacggccagagaattgaggtcactgccaccctgaaaactagaaagacaggcaaatgcacggagtcacagcttaccaggaacagaaactgctggagccagcacctgggaggagaacttaaatagtattgacagattactagaagctgagggtggcttggcttgagcattaaaaacgctctgagaaccagtcatggggggaatctcacactttcctaaatctgaccactagaa

SEQ ID NO: 451150 - DNA, 497 bp, Homo sapiens
catgcctggataatttttgtatttttagtagagacggggtttcaccatgttggtcaggctggtgtcgaactcctgaccctgtgatccacccacctcagcctcccaaagtgctgggattacaggcgtgagccaccgcgcctggccacaagtaactttttatatgaaatttccggtttcaattctgacatataaagaggtgggaagtcaccatttgtcctcacaacaagaataaagctgaacaaactgaaaaccaacaactcttcttagacggccagagaattgaggtcrctgccaccctgaaaactagaaagacaggcaaatgcacggagtcacagcttaccaggaacagaaactgctggagccagcacctgggaggagaacttaaatagtattgacagattactagaagctgagggtggcttggcttgagcattaaaaacgctctgagaaccagtcatggggggaatctcacactttcctaaatctgaccactagaa

SEQ ID NO: 451151 - DNA, 494 bp, Homo sapiens
tactaattaattgtaatatgtttgctttaaaacatttttgaaaacataaatgattacatttaatgatgacacaagtatttctttagctctagtctgttgtggcatttcactgagtaggggagggatctagartcacaattcttctagctgttaagatgaaattcacattctattttaaaatgtggatctgaaggggaacagatgaatcccagcaatggtcatttgtagatgtagaatatcataaaatgctgggggaaattcttctgtttgaatcattctgggtacccagaattcgtattaggaataattagggttcctattttccccatgagtcctgcctactgcactgccagagagaaagcatcatgtaattttaattataaagtctactgcaaagcaaagttttcatgctaagaagaggccaaattatgggacttctcgcatttgggttcatttcctagaaaagcatcactttggatagggctattcttccc

SEQ ID NO: 451152 - DNA, 580 bp, Homo sapiens
taaattttgctcaaatgaaatcagaagacatactgttagatgaggagttagccaactgcgagcttggttacaatgaacaacacaagctttggtgccacctaaaaaagggarcatttatttggatggaatttgtttaaggcaagattcaaaacattaaaaaaaacacacacacaacaccatattactatattggggcctgataacgtgtgattattttttagagaattggttaaattatcttgtggaaaagcattaacctaacaaagagaaaacttctaggatatttatcacatggagggtgattatgacagcatgttcttattagagaggaatattttgtgctcattaaggttacctcttaagtgctcaaggatgcaaaatgctttgcagtgaagtactacacttctgttgtcctgtgagcacttgctgttagctggaggctttcattccaaactgaggggcctctctaaaagatccagccctggtggtgcctgtatcaaagccactgggcaaatggaagggaccaggaggttttcaagtccaacactccaggaatgcatctgcaagaattgagggtgat

SEQ ID NO: 451153 - DNA, 627 bp, Homo sapiens
atttgacctgtcaccttcggccacatgaaaacaccccagacatgtgaaataacaaagtaaaaatcaggaggacaaggcaggcagggaatggggagctgaaaggattctgcaaacctgggccttaaaagtctcccagcaggccacaactttcctcttttgaattcgcccacctgacacttcttaccagacccttggccatcatgtctactatcagtttctgaaatgaaagcagtcattgttgctttactaaatgaggtggaaaggtcttaatgtttatatataaattctaatctaattctgccccaataaatttcttggtgggaggactttcagcatgtgagaggcactgtaccttctgcaggaaaaattaggccatgagactcaagatcggctgtgcggagctgcctaatatcatccyttatgcgccagcaggggcaaagaattttaactcaaaataataataggagacgggtaagaggaaatggataacagaagtttgggcccggctctgcaaccaggcacgcccaggtagctgccactcaatggctgaagagaaggcaatgggagagcccctgcaatcgcgcagccagccgcgagggtagtagtcacgtgatgccgctggctaga

SEQ ID NO: 451154 - DNA, 621 bp, Homo sapiens
agtgggactgggtaaagacctagtgggagacttaaggagcttggggatactgttccagagtccataggagtaatccctggagaggcccccactcactcatctgcgcacaccgctctctagtcaacagccagggtacagagcaagcccgaattccctcaccaaagattcagagatgcaaaagaaacatcatttccctgcaaggcttgaccccgcccctgagcatgtccaccagtggtgaaaagtctcattctttccaagcatgttgacttcaagcttggttttttcaaaaaccaggcagctctcttccagtacatttttgtaaccacgtggcttaacaagaactaaagtttccctagccctggggagagcttttccaaatatttttagaaagttaaaaatataacaaaacaaactactcacaagccacttgtttaaagaggggaggtgggatccgacagactcctggggaagggctgcctaggcaggagtcagatggcrgggagggaggaggagggagagtaagcagttttatttgcaagggaggaaatcaactgtctaatttgccatcgtgtgggctttcattttaaggggtggagcaaaattaaacggatacagggtggt

SEQ ID NO: 451155 - DNA, 579 bp, Homo sapiens
catctttcacatgctgaaagaaaataattgccaaagctgggattttatacctggtgaaaatatacttgaaaaattaaggcgaaataaagacaatttcagacatataaaaatggagaaaatttgttgccacgtcctgtactaaaaataataataataagcaatagcaaaaggagctcttcagagagaagcatgtaaattcaagaggaaatgaaaaatatcagaaagggaaaatatctgggtaaatacaaacggatattgattgtatagaacaataatcataatgtcttttggagtcttaaattgatatataatcaaaatgcatgacaaaaataatgcaaaaagtraaaaaaggattaaataggagtaaggtgctataaggttctagcagtattggaaagtgatataagtaataattcatactagaatgtgataattcaagtatatacgatgtaatctaagtaatctatattcctataccatgaaatacaatgaaaatgatagtataacaaattaacataggaaaatattttaaaatgtaccagattaatccaaaacaagaaaggaaatagaatatgaaac

SEQ ID NO: 451156 - DNA, 604 bp, Homo sapiens
tgtgtctcattcagtttctttgattcttttgtgggtttataatcagttcacaccttagaytattttattttttggcctttcaatttttcctttagattttgaatttgactgaggaaccatttccattgagttaaatttagggaaatgactgatacttatgtaaggctcttcttccagggtgcatgataaatgcttcctcaggacacagtgttggcttcttcagtttcaacagctgtgattactgtctttgggaacaaagaaataattggagatcacttgtaataaaagccttctctctttttctaagagccttcatatttttgttgacctctttgaaaattagagagaaaataaaataaatccagcaacccccccaccgccccgcaacaaaacaaaacatacaactcacagaactcaacacctcatccaaattctccaacccaaactaaaacatcctctgaagaagaagcctttttttttttttgtctttaatctaagggcagtgtaaaagcctgggtagtctctaggactactttaatcaacttaatggagattgttgacttcaggctttgggctagtacaaagaggcactcagatgtaagcc

SEQ ID NO: 451157 - DNA, 604 bp, Homo sapiens
tgtgtctcattcagtttctttgattcttttgtgggtttataatcagttcacaccttagactattttattttttggcctttcaatttttcctttagattttgaatttgactgaggaaccatttccattgagttaaatttagggaaatgactgatacttatgtaaggctcttcttccagggtgcatgataaatgcttcctcaggacacagtgttggcttcttcagtttcaacagctgtgattactgtctttgggaacaaagaaataattggagatcacttgtaataaaagccttctctctttttctaagagccttcatatttttgttgacctctttgaaaattagagagaaaataaaataaatccagcaacccccccaccgccccgcaacaaaacaaaacatacaactcacagaactcaacacctcatccaaattctccaacccaaactaaaacatcctcwgaagaagaagcctttttttttttttgtctttaatctaagggcagtgtaaaagcctgggtagtctctaggactactttaatcaacttaatggagattgttgacttcaggctttgggctagtacaaagaggcactcagatgtaagcc

SEQ ID NO: 451158 - DNA, 598 bp, Homo sapiens
tctgctcttccttttcatgaaactcccagagactaagttagagacccagatggagtggacatcttgccatctgtcccgaagctgcaactttcctgattctccttgctttcatcaatgaatggcacyaccattgtcctcatacaggaatatggatacctattcctgaagattcatcctttgctattcctcccaaatatggctagacattttcacttctggttacagtatcatatttcagggtgcattcagatgtagatttccaacctgtcctgaacaacatattaacattactctagtacaggcctacaatctccatatgcatctcaactcctctttctgccactgcaatgcagtgcccatggcctatagttacctatgtgggctaagtactatgctaagtgttttatatgggtcttttcatttgatgcaaacaatgatgctaagaggtaggcactctttttataccagtttccaggtactttgctcatggtcacatagctagaggaactgggatttgaatcaagatatttgcatttatcattccaattcttcaccccttcctgtgtccttgccttttgccatgtgactttgtagttcc

SEQ ID NO: 451159 - DNA, 622 bp, Homo sapiens
ttgatacttggagattaaacaatatatttctaaataattaatgggccaagagaaattttaaaatattttaatgaaatgaaattaaatttaaaatacataaaatgaaataaaaatgaaatacaacttattaaaatttgtgagatgcagtgaamacagtgcttagaggaaaatttatagcattgaatgtagatattagaaaagaaaaaaggatcaactacttgttgatcttggattctatgctttttacctgggtgatgaaataatatgtacatcaaaccctcacaacacacaatttatctacagaaccaacctgcacatgtatccctgaaactaaaataaaagctaaaaaaagaaaagcagaaaggtctaaaatcaatcatctaagtatccactttagatactagaaaaaagaagagcatatttaacctaaaataatcagaaggaaagaaattgcaaaaactggagcagaaatcaatgaaattaaaaacaggatatcaatagagaaaatcagccaaaccaaaaactggttctttgaaaagatcagtagaatcaataagccacgctagaacagggtaactaagaaaaaaagagaaagggcacaaattactaatattaggaatga

SEQ ID NO: 451160 - DNA, 622 bp, Homo sapiens
ttgatacttggagattaaacaatatatttctaaataattaatgggccaagagaaattttaaaatattttaatgaaatgaaattaaatttaaaatacataaaatgaaataaaaatgaaatacaacttattaaaatttgtgagatgcagtgaacacagtgcttagaggaaaatttatagcattgaatgtagatattagaaaagaaaaaaggatcaactacttgttgatcttggattctatgctttttacctgggtgatgaaataatatgtacatcaaaccctcacaacacacaatttatctacagaaccaacctgcacatgtatccctgaaactaaaataaaagctaaaaaaagaaaagcagaaagstctaaaatcaatcatctaagtatccactttagatactagaaaaaagaagagcatatttaacctaaaataatcagaaggaaagaaattgcaaaaactggagcagaaatcaatgaaattaaaaacaggatatcaatagagaaaatcagccaaaccaaaaactggttctttgaaaagatcagtagaatcaataagccacgctagaacagggtaactaagaaaaaaagagaaagggcacaaattactaatattaggaatga

SEQ ID NO: 451161 - DNA, 622 bp, Homo sapiens
ttgatacttggagattaaacaatatatttctaaataattaatgggccaagagaaattttaaaatattttaatgaaatgaaattaaatttaaaatacataaaatgaaataaaaatgaaatacaacttattaaaatttgtgagatgcagtgaacacagtgcttagaggaaaatttatagcattgaatgtagatattagaaaagaaaaaaggatcaactacttgttgatcttggattctatgctttttacctgggtgatgaaataatatgtacatcaaaccctcacaacacacaatttatctacagaaccaacctgcacatgtatccctgaaactaaaataaaagctaaaaaaagaaaagcagaaaggtctaaaatcaatcatctaagtatccactttagatactagaaaaaagaagagcatatttaacctaaaataatcagaaggaaagaaattgcaaaaactggagcagaaatcaatgaaattaaaaacaggatatcaayagagaaaatcagccaaaccaaaaactggttctttgaaaagatcagtagaatcaataagccacgctagaacagggtaactaagaaaaaaagagaaagggcacaaattactaatattaggaatga

SEQ ID NO: 451162 - DNA, 567 bp, Homo sapiens
gggtcactctcagtccttagagtctctggaggccaggagggaagaagattggtataatgatcatgacttaaatggccagacacctttgctcccccaaagtgcctcccttacctgcggttctggtaccaggtcttgacttgggtgtcagtgaggttgagcgctgcagccaggtccatgcgatcctgcacgctcaggtacttctgccgctcaaagctacgctccagttgattgagctggtggtcggaaaaagctgtccttgcttttcgaggcttcttggctctcacagggggactctcacggctactcgtaatctmccggtctccttcctcctttgtccctaccatagaaacccagccacggtggtaagttagcctggaatggggaaggactgagtgtcctcctggcatacacttccacattcccaagccaactactggcttcgggggactgcactctgccacccctagaacacacacacactcacgccttagcctgagtgtggaggaagaggattgttttcagactggagagtatgggaccttgtttagagtttctaaagggggtcta

SEQ ID NO: 451163 - DNA, 524 bp, Homo sapiens
atcacatattgaggataatgttaaatattaattcactagttatgatcaggaagtatgcatagataaatgttcttgacaaacaatccakaattttttttttttttttttgagacggagtctcactctgtcacccaggctggagtgcagtggtgcaatcttggctcactgcaacctccgcctcctgggttcaagcaattctcctgcctcagccacccgagtagctgggactacaggtgtgtgccactacacccagctaattttttgtatttttagtagagacaggttttcaccgtgttagccaggatggttcgatctcctgacctcatgatccacctgcctcggcctcccaaagtgctgggattacaggcatgagccaccgcacctggccacacaatccagaatttttaaaccaacacttagagagagagagatgtgatgatacttttttgttcatagctcactgaaacctcaaaacctgggctcaagcgattaatcctcctgcctcagcctcccagtagctagta

SEQ ID NO: 451164 - DNA, 618 bp, Homo sapiens
aatgacgaatcagtgggtgcagcaaaccaacatggcacatgtatacatatgtaacaaacctgcatgttgtgcacatgtaccctagaacttagagtataattttttttaaaaaaggcagctatcctgcacacactttcttgcctgctgccaaataagatgtccctttgctcttcctttgtcttcctttgattgtgaggcctttccagccacagaactgtgaatccattaaacttgtttcctttataaaytatctagtttcagttatatctttattagcagcatgagaacagactaatacgcccacaaagagctctttagagtcctcgctaaaattctaaaatttttaagagtgtaaaggggtctttggacgaaaaagcttgggaactactgccttagaaagactactaaaaggtatgtttgactccagctgaccaagctgcagcatgtcacctcagtaacccaaagctttgccctaggccttttcaccctgttggctcaaaatctcttctgttgctggtaacttagcttctctatacatctgaagtcactattctgtctcctacttttgctttgttgctgatggaaaatgatttttgctcaatgtttcctcactcttgt

SEQ ID NO: 451165 - DNA, 618 bp, Homo sapiens
aatgacgaatcagtgggtgcagcaaaccaacatggcacatgtatacatatgtaacaaacctgcatgttgtgcacatgtaccctagaacttagagtataattttttttaaaaaaggcagctatcctgcacacactttcttgcctgctgccaaataagatgtccctttgctcttcctttgtcttcctttgattgtgaggcctttccagccacagaactgtgaatccattaaacttgtttcctttataaactatctagtttcagttatatctttattagcagcatgagaacagactaatacgcccacaaagagctctttagagtcctcgctaaaattctaaaatttttaagagtgtaaaggggtctttggaygaaaaagcttgggaactactgccttagaaagactactaaaaggtatgtttgactccagctgaccaagctgcagcatgtcacctcagtaacccaaagctttgccctaggccttttcaccctgttggctcaaaatctcttctgttgctggtaacttagcttctctatacatctgaagtcactattctgtctcctacttttgctttgttgctgatggaaaatgatttttgctcaatgtttcctcactcttgt

SEQ ID NO: 451166 - DNA, 618 bp, Homo sapiens
aatgacgaatcagtgggtgcagcaaaccaacatggcacatgtatacatatgtaacaaacctgcatgttgtgcacatgtaccctagaacttagagtataattttttttaaaaaaggcagctatcctgcacacactttcttgcctgctgccaaataagatgtccctttgctcttcctttgtcttcctttgattgtgaggcctttccagccacagaactgtgaatccattaaacttgtttcctttataaactatctagtttcagttatatctttattagcagcatgagaacagactaatacgcccacaaagagctctttagagtcctcgctaaaattctaaaatttttaagagtgtaaaggggtctttggacgaaaaagcttgggaactactgccttagaaagactactaaaaggtatgyttgactccagctgaccaagctgcagcatgtcacctcagtaacccaaagctttgccctaggccttttcaccctgttggctcaaaatctcttctgttgctggtaacttagcttctctatacatctgaagtcactattctgtctcctacttttgctttgttgctgatggaaaatgatttttgctcaatgtttcctcactcttgt

SEQ ID NO: 451167 - DNA, 559 bp, Homo sapiens
tccactgaaaattccaggattttgcctctcagaacacaatcttgagagtacatttttcctaatccaatctgttttaaatgttgtcaggaagtaccataattggttgtggtaaatgacactggaaccacattgctactcactctggaaatgatatgagctcagcgtgctgctgatcaaatgcgtttctgcattaaaactattacaggcagaatgcctcaatgggattctttcctcctaatagttttccagggtttgtgctgaaagggttctgtcaatcaagcctgaaaatcagcttaacactctgacttgggttaataaaatgcagctgccaggatctcagctcagaggccactgttccctggttccaacattatcaagccccactaaaaatgcctcattataattgatactcactgataatacacttttttttattgcaaagaatgcctccagaaagactttgccttacataaagcctgctagaagagagaccccatatcaaagacagatagctaasaggaagtagtacaggctaaatgtattttcacaagtaccctgg

SEQ ID NO: 451168 - DNA, 540 bp, Homo sapiens
cccctgggttggacttgtgacttggttttgccaataaaatgaggaagaattggttttgtgccaattcaagaggtcttgtatttctgctttctctctctctctgcctcttgaaatcctrcccagcaaccatgagaataagcctgagctaaattgctggatgataagtgatcagtgtcccagccacccacttcaccataactaataacctgcttaattgccaggcatgtgagcgagctcgcccttgaccagcctgccctagctgaccccccagctaactgcaccctcatgagggtgtgtagtcactatttcgggcccagctgaagtcaactgagcctggcccagatgacttatcaacttgtgaataaagttctttctgtttgaaaccactgttttggggtgctttgcttttacatcaataggttactgattgaagagattgctggaagatatttataattttgcattagcatggaggagatttgaacatatttgcacatatgggaaaaagacagatttaagattcaagaaagaggggtaagt

SEQ ID NO: 451169 - DNA, 573 bp, Homo sapiens
atttataattttgcattagcatggaggagatttgaacatatttgcacatatgggaaaaagacagatttaagattcaagaaagaggggtaagtgatgggagaaagggatgtgatcaaaagctcaggtgggagattagcctgggaaaagacagagtgcctcttttactttcaagataagagaacaaagtagggatgggagtagacatcctggactgaaattcagtgcatcactagggctgtggctctcaactgtgaacatggtggtagtttctctagctgtatcttgggacatgctcacatgtaatatccaactaaaaattaactctccaaactcatgcatttccacatctgtcaaagctaaaaggggcatctgagacagatttccttttgttttcactggcgtgtcaaatgccacrgtgacagcaaaggaataatcttcagtttgtgtataatgaggtctgaaatttccgtcgccacatattgatcatgaatcttatttcactagataaactgacagcagagtctcagttacttaaacaaaattttgaagaaaatcaacattatcacccacatc

SEQ ID NO: 451170 - DNA, 573 bp, Homo sapiens
atttataattttgcattagcatggaggagatttgaacatatttgcacatatgggaaaaagacagatttaagattcaagaaagaggggtaagtgatgggagaaagggatgtgatcaaaagctcaggtgggagattagcctgggaaaagacagagtgcctcttttactttcaagataagagaacaaagtagggatgggagtagacatcctggactgaaattcagtgcatcactagggctgtggctctcaactgtgaacatggtggtagtttctctagctgtatcttgggacatgctcacatgtaatatccaactaaaaattaactctccaaactcatgcatttccacatctgtcaaagctaaaaggggcatctgagacagatttccttttgttttcactggcgtgtcaaatgccacagtgacagcaaaggaataatcttcagtttgtgtataatgaggtctgaaatttccgtygccacatattgatcatgaatcttatttcactagataaactgacagcagagtctcagttacttaaacaaaattttgaagaaaatcaacattatcacccacatc

SEQ ID NO: 451171 - DNA, 482 bp, Homo sapiens
caactacactaatgattttttaaagtaggaataaggcagtactatggctttctgggggaamaaaagtcacacagcaggaaaactgcagcagatatcatcaaagaagctcagaataaaatgcccacccattcttgttattggcccaaatgattttccaggagcaaaaggatcattctaacaggcatcttaataaacaaatagaatcattaccttagttattttcctccaggcaaatgaggcttaaaaaatcagctcttcctgttaatgttagttatttttcatagtcagaagaatctgaaagatcataaaaataagattaggccaccaaagaatgtggataagcagttcagagatgttaagcgcgggctctggaatcagcttttggttcagatctggagctctgtcccttaccctctgatgaccattggcaatttactcaacctctacccccagtctctgtttcttcatacagaaacttgtat

SEQ ID NO: 451172 - DNA, 430 bp, Homo sapiens
acaggaaaaacacactctctagcacaccgaaagagtttgcataagtattcttaggggccagcctaagcaacggaaagcattgttctgagagaaatttaactgcattgcagttcccagatatttaatactttaaagaggaagttctaaaatttaacagttgattttattattactctttggatgtaattaactagggatgcactttaaactgctttattctggctactgaaatggattttatggtttacactggggaaaaaaaaattctgtcagatcatgggcctctcccttggtgcacattattagagtctttttagagacaagcaagcaattttgctgtcactggtcttgttcaactagagtatgtttatctatgcaatactcttgggaaarggtgtcaaaaaaggatcaccagttagcagctgacata

SEQ ID NO: 451173 - DNA, 602 bp, Homo sapiens
tggaaaaatggtgctgatacactttctggtgcaagacttcctggtgcagaattgccacaaaacttcaatttctttaaaaaaaaaaaaatgtagtatctgtgaagcacaataaagggaaggacaataaaatgaagtgtactagtatttggtttcctgttaaaatttgtatttttgccctttcttgatccttatcctatcaccattatctagttctttgtacataattgcagaaattttatggctttattttgattagactataatgcaagatgatgttcccatagcaattttttgaaaagcaagcacacctgtccagamagagggaaaaattgatccagatgctgaggagaaaattgtgttgatccctaacagatatctattatactgaggttacaatcagttcctgggtttgtggtcaaggtgaaaagccaaaaacctctaatctacggcaggattcaattttctgtatgaattcattccttctaggtttattgtttaatagtgtcatgatgattatatctgtattcatgcaggtttcttaggcagaatataaagtggactgagctcaaagtcacaaggtgggattctattacagtatctca

SEQ ID NO: 451174 - DNA, 608 bp, Homo sapiens
tattcaacctttcctgacttcttttcttttctttttcttttcttttcctctctttttgtttttgttttgacggagttttactcttgtcacccaggctggagtgcaatggcgcaatctcagctcactgcaacctctgcctcctgggttcaagtgattctcctgtctcagcctcccaagtagctgggattacaggtgcccgccaccacacctggctaatttttgtatttttagtagagatggggtttcaccatgtctggtgaaaccatatataaatatatgaaatatatatttcacatatatatttcatatacatgtgaaatataaaaaataaagctagtagctttattttttttaaaactggcatatgttgaacacctagtctgtgccaggcaccttgtatgctttatctcatttaatcctcatagcaacccawtgaggaacttttataaatattcctcattttgtttcccttcaatttccctacgtttaaaaaaaatctgtaatgacaaaaactaaagttttcttaaacatgccatattcctccaataatatctccttagtcttggaaactgttcagtatctctggatcctgagtctttagtgtctgc

SEQ ID NO: 451175 - DNA, 608 bp, Homo sapiens
tattcaacctttcctgacttcttttcttttctttttcttttcttttcctctctttttgtttttgttttgacggagttttactcttgtcacccaggctggagtgcaatggcgcaatctcagctcactgcaacctctgcctcctgggttcaagtgattctcctgtctcagcctcccaagtagctgggattacaggtgcccgccaccacacctggctaatttttgtatttttagtagagatggggtttcaccatgtctggtgaaaccatatataaatatatgaaatatatatttcacatatatatttcatatacatgtgaaatataaaaaataaagctagtagctttattttttttaaaactggcatatgttgaacacctagtctgtgccaggcaccttgtatgctttatctcatttaatcctcatagcaacccaatgaggaacttttataaatattcctcattttgtttcccttcaatttccctacrtttaaaaaaaatctgtaatgacaaaaactaaagttttcttaaacatgccatattcctccaataatatctccttagtcttggaaactgttcagtatctctggatcctgagtctttagtgtctgc

SEQ ID NO: 451176 - DNA, 572 bp, Homo sapiens
cagggtttttacagtggaggaaacaaggtagttgacaccttctagttagccaacttggatctaaaatgtaaagacaagtgagatttgtttttcctaaatctttctttaagacagcatrtcagtctcattcaccctcccactaactttccttgaaaacatgcaagactagtaccatatacatatactttagtgatccaggttcctcctttttatattagtacaactggaaagtgtgatgctatctctatgtgtgtaatgtagcacaaaggtatgctcactgaggcatacaaccagaatgtgtcacttcagaggaggaaaagtcctctcatccctggaaaaatattttgcgctaaaaactatagctatttccaatgcaagatttactaagtgatacacctggggggcaagtgacttcatgttccaataaataccttattgcatggggtctagttggatatacccactttttaaaggataaggaattttttagctgttcaaaatataaggaatttgtgaccatatattccctaatgtagaagattccattggcttcattttatcacccagatctt

SEQ ID NO: 451177 - DNA, 482 bp, Homo sapiens
tattctcacacctatttatttcagtccttattaccccctgagcaaactaccaacatgtttcagttttactggccctttaacacaaacacatatgctcacacaaatgcacatttagaagtgaaacaagtagagcaagttacagtgaactgcacaatakcatactacttaagaaataaacccagaaaatcagtagttttcagtggctaatgataggttattgtgggaaggagagagagtttaactaactgcttgttaactatttaaaccactgacttcaggtggcactattataataaaaataataatactgtaattttcttcaaataatccttaaagactgttaaaaataatttggttcttggtcattaacaatgtagtttccatcacactaaatagagagcatgggctgttggctttataataatgctttcccggttacttccatgcgttattaaaaagttcacagtattattcttgaatga

SEQ ID NO: 451178 - DNA, 503 bp, Homo sapiens
ttatcagtattcctagacttgaaaattctattaagctctgtattttcctaaaggtacatctctttacttttccaatggcagattctgatctcctcaatggcgtttgtgtggaagggtcttatgagacagccgggggtgggcacagaaccygtaactaagatccatccaagagtaaaactagaagtttcaatacataatgggtgacatttgtcacctttagaaataatagacaacagtaagcaggttgctgaagagatgtggaatcatttaaattcaggaaaaatgatgaggatgcaattccctgatcctgatgaggacggctgatttttgcagttaaaaaggaaaaggtataaatgaaacaattccataacatatttggaaaaaagatgtcagagaaggatattagtctgcatgagagctagaaatgagaagccaaacagtaagaagttggagtttgatacagtatttttttttttaagagaaaaactaaatgcggtggagaa

SEQ ID NO: 451179 - DNA, 604 bp, Homo sapiens
gcgtttgtgtggaagggtcttatgagacagccgggggtgggcacagaacccgtaactaagatccatccaagagtaaaactagaagtttcaatacataatgggtgacatttgtcacctttagaaataatagacaacagtaagcaggttgctgaagagatgtggaatcatttaaattcaggaaaaatgatgaggatgcaattccctgatcctgatgaggayggctgatttttgcagttaaaaaggaaaaggtataaatgaaacaattccataacatatttggaaaaaagatgtcagagaaggatattagtctgcatgagagctagaaatgagaagccaaacagtaagaagttggagtttgatacagtatttttttttttaagagaaaaactaaatgcggtggagaaggaatctgggagggacatctgtgctgctcagctaggtcatcaaggttggcatcatctgaggaaagcatctcccaccgctgtctgagcccctttgctaaaatagcttctgattggtaatcttgctttccaggtgctctgatcccaggaaggtagtgtcctatatggaaaatgtctgcactttggtcaccaggagactatcc

SEQ ID NO: 451180 - DNA, 595 bp, Homo sapiens
tttcatatgaaagaataggatcatcagggactttatacagaactcatcttcatgtacctgggtaaactgaagtctagtatcagtcattgttcaaggaaaaatacaatttctccaactacaattttgatytattggagacagttgccatgtcttattttttcccttcctacctatctactaggtcataaattgtgaaatgtattcatgatgaatttgttctgttccatttacttagtgactggtggaaatcttctataatatggctatctagaagtaagagaatcattttggggcagaaagataagaaaaataactggccatccccggagcccataatgctgtagtcattatcactatggtctaattatctctaggagtttgtgatgccttatgtcatccagacttctattccagctccccagtgatctgtgggccattatttggaatcatgataaggcttctgtgtctccagggacatgtgactttatcaagcaattaacagcacgactatcttctgtcagctttaatttcttcttagagcttgactgaactactagagaagcttcttttcctcccatatatccaggttaaggtc

SEQ ID NO: 451181 - DNA, 595 bp, Homo sapiens
tttcatatgaaagaataggatcatcagggactttatacagaactcatcttcatgtacctgggtaaactgaagtctagtatcagtcattgttcaaggaaaaatacaatttctccaactacaattttgatttattggagacagttgccatgtcttattttttcccttcctacctatctactaggtcataaattgtgaaatgtattcatgatgaatttgttctgttccatttacttagtgactggtggaaatcttctataatatggctatctagaagtaagagaatcattttggggcagaaagataagaaaaataactggccatccccggagcccataatgctgtagtcattatcactatggtctaattatctctaggagtttgtgatgccttaygtcatccagacttctattccagctccccagtgatctgtgggccattatttggaatcatgataaggcttctgtgtctccagggacatgtgactttatcaagcaattaacagcacgactatcttctgtcagctttaatttcttcttagagcttgactgaactactagagaagcttcttttcctcccatatatccaggttaaggtc

SEQ ID NO: 451182 - DNA, 584 bp, Homo sapiens
gaggatgaatgatcaagccatagctttgtatattgatggagataatttagtagagaaggaaaaaatgataataaaaaaacatttcaaagtgatgtgcttaattatgcaagaggatgagatttaatacacaaatggatgggctggtcttagaagcacaggcagttcacccatggggaattagagggaaggcagaatgagtatatgacatagacgaagataggcaggcaaacggatgtcagagagggagattttaamagttgtcttctgaatgcttgtacttgctcagtgagacaggaagcaaagttagaagctggcatggagattgggaaagagatcttggaagttccaggtgagaagaaaaggtgtgaaattctatagcagtaggctatagaatggacaacggtctgtagtatggttgagagacagcattaacggcccacttgaagttaggtcctgaatttaaatggttgttgtatgtttttctccaagaacacacagctgcctggattcaggcatggagtaggctgaaagctacctttatagtcaggttttgccagggacttacaactaagtgaaaggggaca

SEQ ID NO: 451183 - DNA, 584 bp, Homo sapiens
gaggatgaatgatcaagccatagctttgtatattgatggagataatttagtagagaaggaaaaaatgataataaaaaaacatttcaaagtgatgtgcttaattatgcaagaggatgagatttaatacacaaatggatgggctggtcttagaagcacaggcagttcacccatggggaattagagggaaggcagaatgagtatatgacatagacgaagataggcaggcaaacggatgtcagagagggagattttaacagttgtcttctgaatgcttgtacttgctcagtgagacaggaagcaaagttagaagctggcatggagattgggaaagagatcytggaagttccaggtgagaagaaaaggtgtgaaattctatagcagtaggctatagaatggacaacggtctgtagtatggttgagagacagcattaacggcccacttgaagttaggtcctgaatttaaatggttgttgtatgtttttctccaagaacacacagctgcctggattcaggcatggagtaggctgaaagctacctttatagtcaggttttgccagggacttacaactaagtgaaaggggaca

SEQ ID NO: 451184 - DNA, 584 bp, Homo sapiens
gaggatgaatgatcaagccatagctttgtatattgatggagataatttagtagagaaggaaaaaatgataataaaaaaacatttcaaagtgatgtgcttaattatgcaagaggatgagatttaatacacaaatggatgggctggtcttagaagcacaggcagttcacccatggggaattagagggaaggcagaatgagtatatgacatagacgaagataggcaggcaaacggatgtcagagagggagattttaacagttgtcttctgaatgcttgtacttgctcagtgagacaggaagcaaagttagaagctggcatggagattgggaaagagatcttggaagttccaggtgagaagaaaaggtgtgaaattctatagcagtaggctatagaatggacaacrgtctgtagtatggttgagagacagcattaacggcccacttgaagttaggtcctgaatttaaatggttgttgtatgtttttctccaagaacacacagctgcctggattcaggcatggagtaggctgaaagctacctttatagtcaggttttgccagggacttacaactaagtgaaaggggaca

SEQ ID NO: 451185 - DNA, 584 bp, Homo sapiens
gaggatgaatgatcaagccatagctttgtatattgatggagataatttagtagagaaggaaaaaatgataataaaaaaacatttcaaagtgatgtgcttaattatgcaagaggatgagatttaatacacaaatggatgggctggtcttagaagcacaggcagttcacccatggggaattagagggaaggcagaatgagtatatgacatagacgaagataggcaggcaaacggatgtcagagagggagattttaacagttgtcttctgaatgcttgtacttgctcagtgagacaggaagcaaagttagaagctggcatggagattgggaaagagatcttggaagttccaggtgagaagaaaaggtgtgaaattctatagcagtaggctatagaatggacaacggtctgtagtatggttgagagacagcattaacggcccacttgaagttaggtcctgaatttaaatggytgttgtatgtttttctccaagaacacacagctgcctggattcaggcatggagtaggctgaaagctacctttatagtcaggttttgccagggacttacaactaagtgaaaggggaca

SEQ ID NO: 451186 - DNA, 595 bp, Homo sapiens
gtatacatacatacaaacatacactttataagttgtaaaaaaaggaaactgtttggggatactatacattaattcaaaatataagccaaagggtaaaaaagctataagataaattctgaagaacaaaaaaaaggttttttcaaaactatataataattcattatctattgctgcattgtaaactacactcaaacttggcaacttaaaaaacaaatatttcttatttcacaatttccatggtyaggaatgtaggcacagcttggttgggtggttctgggtccaggttcttcatgaagttgtggttatgatgtaagccaaagctgcagtcaactgaaggcttgagttagggtggaggatgtgccttcaaggtggcttactcctacacctcactttctgcttgactttcccatgtcccactgatgtaggtgaaaacttgttttcacatatttgaatctagaaattctgttctaacattacaaaaacttaaaaaagtggatctcatggaggtacagagtagaatggtggttagcaggggctggaaagggaatgagggagggagagatgaagagaagttggttaatgagtacaaatatgc

SEQ ID NO: 451187 - DNA, 591 bp, Homo sapiens
tagcacaacagctgtcacattgtgagcaattaataaatgaaagatcttattattatactatttcctcaatctataaatccttccctacttccagccacatgtccaaatcctaattattttttaaagtctttctcaagtctcacctgttctctaaaccttctacaaaccttattctccccttttcgtgtatttcttgagaactctaacataaattcacattggtataacttctagtatgggacacatcatgatcatttagtaaatcctttacttaattaattgatgatgaaagagggaaagaaaacaatagcagatgctgcggatacctgaccctgcttccccttgacccacctgagttgttttgcagctgtggtgggcagttttacaattcctactgacagacatgttccacacggctctgcagaagttycccagagggatggagccccagctgcccgcaacagtattccactcattaacatgcacttgattggctttgctcccttccgtctcatctcccttatacctatttaagcttcctggaatcacctcccagataaaccacctgcatcaaagctcttgtcttagatt

SEQ ID NO: 451188 - DNA, 560 bp, Homo sapiens
atattcatatccaataatgccaccaacactttaaataacaacatgtaaaggatgtaatgctcaaggttcactacattgttaaattacattgtgcagcctgattacttacttcaaaacatttctcatcagcagattgaaagcatcttttgctgacctgcagaagtttctgccatatattgcaatctgaggaagacagtggctattattctggagccagtaacatactctaacaagatcaaaagacaatccaatracaggaaggtaaccaaattaattcctgtcatttgtagagctatctccactcttttttctaatgtgtatttgtgggacacactgtgtgtcctcagctctacacaactctcagtgtcattgacagtcaggtgtgcttccgatactgtatgccctcaaactctgggggattagacagccttaaacagaggcagctctttttcccaaattccagataatggcttctgtctttaaaatgtttgggctagagtttattgctaaaaaggttaaatattgtagtctctacataaaaaattactcttaaggaaacc

SEQ ID NO: 451189 - DNA, 560 bp, Homo sapiens
atattcatatccaataatgccaccaacactttaaataacaacatgtaaaggatgtaatgctcaaggttcactacattgttaaattacattgtgcagcctgattacttacttcaaaacatttctcatcagcagattgaaagcatcttttgctgacctgcagaagtttctgccatatattgcaatctgaggaagacagtggctattattctggagccagtaacatactctaacaagatcaaaagacaatccaatgacaggaaggtaaccaaattaattcctgtcatttgtagagctatctccactcttttttctaatgtgtatttgtgggacacactgtgtgtcctcagctctacacaactctcagtgtcattgacagtcaggtgtrcttccgatactgtatgccctcaaactctgggggattagacagccttaaacagaggcagctctttttcccaaattccagataatggcttctgtctttaaaatgtttgggctagagtttattgctaaaaaggttaaatattgtagtctctacataaaaaattactcttaaggaaacc

SEQ ID NO: 451190 - DNA, 586 bp, Homo sapiens
gatattaagcatcttttcatgtcctcattggccatttgtatatcatttttggagaaatatctattcaagttctttgtccatttttgaactgggttgcttattattttgctgttgagttgtagaagttcttttatgttctggatatgaattccttatctggcatatgatttggaaatattttcttccatcatgtgggctgtcttttcactctcttggtagtgttctttgttgaataaatgtttttaaatytgatgaagttcaatttatttttcttttgttgcctatgctttgggtgtactatctaagaaataatcaccaaatccaatgtcatgaagctttcatcttatgttttcttctaagagttttatagtttttgtgcttttgtttaggtctttgatccatttttagttaatttttgtatgttaatgtaagataaggttgaacttcattcttttgcatgtggatatcccattttcccagcaccattagttgaaaagactgatcttttcccattgaatggtcttatatgtgagagttagtttctgggatttctgttttattttacctctatatgtctgtccttatg

SEQ ID NO: 451191 - DNA, 497 bp, Homo sapiens
ggctgtaagtatttggctttatttctgggttttctattctgccccattgggctatgtgcctatttttatagcagtacaatgctgttttggtgactatggcyttatagtatagtttgaagttgggtgatgtgatctgtgatcccttcagatttgttctttttgcttactcttgctttggttatgcaggctcctttttgattccatatgaattttaagattgttttttcgacttctgtgaagaataatggtattttgatgtgaaatggcctaatctgtacattgttttcagcagtatggtcattttcacaatattgattctacccacccatgggcatggtatgtgtttccatttgtttctgtcatctatgatttctttcagcagtgttttgtagttttctgtgtagcgatgtgtcacctccttggtttggtatattcctaagtattttgtttttgttttgcagttattataaaagggattgagttcttgatttgattct

SEQ ID NO: 451192 - DNA, 497 bp, Homo sapiens
ggctgtaagtatttggctttatttctgggttttctattctgccccattgggctatgtgcctatttttatagcagtacaatgctgttttggtgactatggccttatagtatagtttgaagttgggtgatgtgatctgtgatcccttcagatttgttctttttgcttactcttgctttggttatgcaggctcctttttgattccatatgaattttaagattgttttttcgacttctgtgaagaataatggtattttgatgtgaaatggcytaatctgtacattgttttcagcagtatggtcattttcacaatattgattctacccacccatgggcatggtatgtgtttccatttgtttctgtcatctatgatttctttcagcagtgttttgtagttttctgtgtagcgatgtgtcacctccttggtttggtatattcctaagtattttgtttttgttttgcagttattataaaagggattgagttcttgatttgattct

SEQ ID NO: 451193 - DNA, 497 bp, Homo sapiens
ggctgtaagtatttggctttatttctgggttttctattctgccccattgggctatgtgcctatttttatagcagtacaatgctgttttggtgactatggccttatagtatagtttgaagttgggtgatgtgatctgtgatcccttcagatttgttctttttgcttactcttgctttggttatgcaggctcctttttgattccatatgaattttaagattgttttttcgacttctgtgaagaataatggtattttgatgtgaaatggcctaatctgtacattgttttcagcagtatggtcattttcacaatattgattctacccacccatgggcatggtatgtgtttccatttgtttctgtcatctatgatttctttcagcagtgttttgtagttttctgtgtagcgatgtgtcacctccttggtttggtatattcytaagtattttgtttttgttttgcagttattataaaagggattgagttcttgatttgattct

SEQ ID NO: 451194 - DNA, 562 bp, Homo sapiens
agaagctgaatggagagagctcactgacagcactgacaggagcaggagccttagagaggtgtagccaaactgttgtgacccatcagcaagagagtcaaaggaagaaattctacaaactcatgctcctaccctccaatctcacaaaattggaagccagaggacaagagagccacttgctgtaacccataaatgccagattcccaggggacagagcaggatgaggagaataaggaaaagatttggaggggaaaatgaaaaacgcccagcccatattctgaacaagtgaccagcctattaaagagtgggacttcagatatatacagcaagayattcagcacttcatttaaaaaatatataaggttttcagactttctttaatcagaatttactgctacatgaaacagcaatagcaaagagcaagaagatacacccaaatttcaaggtctatgaattggaaggagagtaggatgtaaaagatgggacaaagcatatccttaaaacaggtttgcagaaaatagacacagaattgaagaaaacagaaaaacaaccaaattaccaagaa

SEQ ID NO: 451195 - DNA, 639 bp, Homo sapiens
ctgtgggttttttttgtttgtttgcatttgactttttgctgattactttaatacacttatgtttctgattattctaagtcaatgctagaccaccactattcaagattttatttaagattttgattcacattagaagataggtttttcattttcattttaaaggtaaggaagtatttgaaataatgaggacgagagtttatgggtttttttccttcattcattgtacaaataatttcttcrttcattctacaaatattgtttaaagtgcttcctctgtgtcagcaccaacctagaacctgggaatataatggtccttgctctcccaaagcctacagtctgttgggagaaatagattttaatgaattaactgcacaaataaatgtaaaattccaattctgacacgtgctacaaaggaatcatgaataacatgattcacagaggcagatgatcacatgacggaggtcagggatgatgtttctgaagaagtgattcaggagctgagacctcaaaaacgaatagaggcccaaaaggcttccagcagatgaacaacatggacaaagggcctgtgaggggtgggagtgtgatgggtactgaggacagaaaggagaccagtgtggtgcttacacagaaagcagggta

SEQ ID NO: 451196 - DNA, 653 bp, Homo sapiens
gttctgttcaggcaggtccttatcttcctattcaaattttcctggacgaggtctaggccaccccctattcagtgtttctggtcttgtctttacttgcttaactgtgcttctataattagccacatcttcttgctttatatgaagcagctctcatggttcctaaaaatcgatacaatgtattgtatctgaaaatgttacatgtaatactcattaacatctactagtaaataacacttttttgggagacccatgaaatcctttgaggtttttctggccaaagaatgaaatattgcctamaataattttatttactccatagtacaaacattaactgaaggaaagaaaaccaactatttaggtgtggattatgataaagaatacactcccctttttagtctatacaaaatagagactaatttttttaattactgaagattgacaatggcactgcagcaaagtgacccatatcagtctcagaggggcaagactgaagataatagattgttgatgatctttgcagaagaatacctgcctttcatttatcccccaaactgttcttggatactcgctgttttaagcccaactcagtgtggaattagaggaggcaggaggtgaaggaggaagagaaaagtattagttgaagatcatggggt

SEQ ID NO: 451197 - DNA, 653 bp, Homo sapiens
gttctgttcaggcaggtccttatcttcctattcaaattttcctggacgaggtctaggccaccccctattcagtgtttctggtcttgtctttacttgcttaactgtgcttctataattagccacatcttcttgctttatatgaagcagctctcatggttcctaaaaatcgatacaatgtattgtatctgaaaatgttacatgtaatactcattaacatctactagtaaataacacttttttgggagacccatgaaatcctttgaggtttttctggccaaagaatgaaatattgcctacaataattttatttactccatagtacaarcattaactgaaggaaagaaaaccaactatttaggtgtggattatgataaagaatacactcccctttttagtctatacaaaatagagactaatttttttaattactgaagattgacaatggcactgcagcaaagtgacccatatcagtctcagaggggcaagactgaagataatagattgttgatgatctttgcagaagaatacctgcctttcatttatcccccaaactgttcttggatactcgctgttttaagcccaactcagtgtggaattagaggaggcaggaggtgaaggaggaagagaaaagtattagttgaagatcatggggt

SEQ ID NO: 451198 - DNA, 653 bp, Homo sapiens
gttctgttcaggcaggtccttatcttcctattcaaattttcctggacgaggtctaggccaccccctattcagtgtttctggtcttgtctttacttgcttaactgtgcttctataattagccacatcttcttgctttatatgaagcagctctcatggttcctaaaaatcgatacaatgtattgtatctgaaaatgttacatgtaatactcattaacatctactagtaaataacacttttttgggagacccatgaaatcctttgaggtttttctggccaaagaatgaaatattgcctacaataattttatttactccatagtacaaacattaactgaaggaaagaaaaccaactatttaggtgtggattatgataaagaatacactcccctttttagtctatacaaaatagagactaatttttttaattactgaagattgacaatggcactgcagcaaagtgacccatatcagtctcagaggggcaagactgaagataatagattgttgatgatctttgcagaagaatasctgcctttcatttatcccccaaactgttcttggatactcgctgttttaagcccaactcagtgtggaattagaggaggcaggaggtgaaggaggaagagaaaagtattagttgaagatcatggggt

SEQ ID NO: 451199 - DNA, 587 bp, Homo sapiens
  misc_feature (1)...(587): n = A,T,C or G
aagcagtagtcttggattgggagccactacagtagtgggaagattaagatgagcaatggactatgaaatgtactaaatggcacaaccaaaatgtcagatctccagaacaatacaaagtctctacacctaggaactggaaatcagattgctccctccttggtgttttgggaaagtttagtcaggaaagagtgtgatgtgctagatttccttaagtaataaatgaaaaaatagatgtgactgtattattgccccaaaacaataaacatatagtttaatatcaaaaatgatgaggtaaattttgactactttattattaactattttgtttattctctaccttattctacgaaggattaaggctgaatatgaaaatttagccttatgyaattatgtaaacttctttctttctctacttggtattttcagttccactgtctncagtctccagtcaagccatgatgccattcctttaatcctttgtactgatctataaattatctgcatgtcaggctctttactgctgtgcttgggctggttcatttctctataaagaagcatcacaagctgaccgtattaaggggaaagga

SEQ ID NO: 451200 - DNA, 626 bp, Homo sapiens
cagaaccgatgctagagatggagaaaatgaggaccagaggcaaataatttgagtattataatgttgccccaaagctgaaatttttaaccatccattgtgacatctaaaaacccggcttccctttctgctgagtttctctggctctacacctgaataatagtttcaataaactccaccaggtgtcatctacatattttttcacaaataagtccaaggtacagtttatcatcctctgaatgctaacaaattctgaagatgcaaaacctacagggtgtgtataaataatttcactcagcggtataaatatgaatactgtttaaaaaaataaacaaccttgtttccctaagttgttgtgttacctcttctctcctggactttttattggctctctggtgccartaggaacctgttctaaaactgattagccctgagaaagactctgtaatcaaataaatctgaagttaggcgtgctttcaatttttgttaagaagtgagtttttttttttccaaacaggacgtgtttcccaaagaaagcttggtgtcttttgtattctaaaacatgtctgcgtctgtgatttcaaaggacagtagaaccaattctgtttgtaactggccaatttcagttc

SEQ ID NO: 451201 - DNA, 584 bp, Homo sapiens
atgcttgttttcatactctcccccacttccatatttcccgtccacccccacagggcacagagctgcaggtcactgtgggagcgtggagcctttggccctaccccaatcattctttttgaaaaggagtcagaatataggtagcacagctcctcctctttatctgagtctagctcataattggaaccaccattttcctcactatctgagctgggtattgggaaactccagcagcagcttgccttccctccagtggggaggaggggggagtatctgaatcttcaggggggcaatccaagactcaaaatccttccaatccggtgagctcccctcttcctgttccttaatggtctgcatgaggtccttcatctctaatttagggggttctctttcctctttatgtgtggacaaaggtcttcagtggagactgyctatctgagtcttatctatcctttgtttagaagccacaaccacattgcactgcacacgagtcctgcccctctgattgtctcccttttgggcccttggaggaccacttgtagaggtctctactgctcaggtctcatccacagctacagtggcttcca

SEQ ID NO: 451202 - DNA, 624 bp, Homo sapiens
cacttagggacttgcctatggtaggtactcagtaaatgtttcttgaaataattaatgacttgggttgatttggatgaaagacggaatggacggagggcattttttagtagcctggagacttggtttccatgcaccatgctgggatgtccctggcagcccatctactgagctggcaccagcatgcttaccagtctcctttgtgacagtcccaatggatatttttattagccagcatgatttatttcataatgctgagttgcagcacccttcatggctagagatttttgctgtggagataagttcttagaactrtctccatttccagaaaagagagggtttctctcgtctgttgcccagaaaagaagtcagtttacgtatgcatcttccctgggtcaggctaagaagtagccccagcactggcatgctagacttggagagtctaatattcttccagccaaaccctgaagcaaaccacacctcctaggtcctgcaagtccccattaagtgtgcttaagtcatttgaactcctagagaatccatgtcagaggaggagaatcagcattcaacaaaagatagcatgtagtttttttttaaaaagtgaaagactaaagcttgccttttcta

SEQ ID NO: 451203 - DNA, 495 bp, Homo sapiens
gccacattgggtcaattcacatggaggattagatctgggcacaccgtatcttttatgtcttttatttctttgactttattctgctggaaagtgttggcccacagccagaaccggcagagggcaaaggagggattactttcttatcacagggaaattaaatgcctgagacagcaacatagtgatttttttaaaacaaatttttaggaaaattgaactyaccctgtttactttcatagaaggcttttgggctgtgggaaggaacctatttttgtacttaatgaaatggatctcggcagtcaagggtttaaaactaacttcggatcttatttaaaaagtaatatccttgccactaacttgtcttctgtctttaaaggaaagagaatttttacagtgcctatagagcatgccattcctcaccagtcatttggcagtcctattagcaaactcatttgtcaaagcctcattaggtgattgcaaaagtactctcccaggacc

SEQ ID NO: 451204 - DNA, 586 bp, Homo sapiens
ctgaagaaaacaacacggaaggattccccctgccttggcttcacctgggaggggagatgggcagtgagcccatgctagcttctaatgcactcaccacttcttttaataaatacaatactctccccgcttcccctaaygattctgtgaagcaaaccagtctatagttcctggtatcttcttttcttgaaaagttgacatagatgacagttgtgtcctgaagtctgatagcttctatgaatttctcaaacattggttaccaactggtttggggatcaccttgacaaactgtgtaatttagaggtgagggcctcctttattggagtcaggagacctcttggatttgtgtcttcactctgttatgagttgagtggcctcaggcatcttctgagtttctcattcctttactgaaaataataatgcttatcttaaagtagcttgttcagaacttgccttgtctcaagaatcagccagacatttataaacaaatctgaatcctgaacgtcaacccaggcttgtctaagaattctcctctttataatttttagctgctcagagtagagagcctgtcaccaaccctcacactgtt

SEQ ID NO: 451205 - DNA, 586 bp, Homo sapiens
ctgaagaaaacaacacggaaggattccccctgccttggcttcacctgggaggggagatgggcagtgagcccatgctagcttctaatgcactcaccacttcttttaataaatacaatactctccccgcttcccctaacgattctgtgaagcaaacyagtctatagttcctggtatcttcttttcttgaaaagttgacatagatgacagttgtgtcctgaagtctgatagcttctatgaatttctcaaacattggttaccaactggtttggggatcaccttgacaaactgtgtaatttagaggtgagggcctcctttattggagtcaggagacctcttggatttgtgtcttcactctgttatgagttgagtggcctcaggcatcttctgagtttctcattcctttactgaaaataataatgcttatcttaaagtagcttgttcagaacttgccttgtctcaagaatcagccagacatttataaacaaatctgaatcctgaacgtcaacccaggcttgtctaagaattctcctctttataatttttagctgctcagagtagagagcctgtcaccaaccctcacactgtt

SEQ ID NO: 451206 - DNA, 541 bp, Homo sapiens
ctgcccctccttgaatcctggaaggatcatctattgcctttcaactcaaagtgtgggacgtgtactagcagcatgggcatcaccagggagcttgttggacaygtggagtctcagactccaccttagacccactgactcaatctgaatcttgacaaggttcctgtatatcatgcatgttactctttgagaagcaccagcctgttgaatacctctgggccaaaatactattcagatgtgttgttctttttcaattacgaaaataattagtgacttaaaactcacttctgattcaggactgcatggctgtttaagtcgatatgtctgcgttaatgctgttgtaatgacatcacagaattgaggcatttatgaactggagagtaaattctatatgtgtttaaaaattagataaataagaacttacatgacagtttaataggggctttaaaaatttaacacggataagtcatctgctttttcaatggattttcctgaatagtgggatcacaaaagaaatttatgtgtttttctaagtttctttttc

SEQ ID NO: 451207 - DNA, 602 bp, Homo sapiens
ttgttttattaagggagggggatgggagactgaacagatttattcttacagcaatccagggattttgatattccaaacaaactcacaaactggacagaagaatgtgcagaaggaggttccaaygtgatgccattagaagaacagctgcaggctgctgggagtttgatttggggatattctgtggagaaactcagcagcatactgtccagaaaaaacaaaaataaaagtagcagttaagtgtaaatgagatggacaatgactggcttttagtgatgaatctacacacacacaaaaatccaaacttctagtaaactaaaggcggtatagagctggcctgagacttgatgagtttctgaatttaggcaaaagagttactacacataaagtagtatacaaatacacttaaaacataaacactcctctctcctctcacaaaaaaagcaagataacaatcacaggctctaaacttcctttttggaaatagaggtatttcttgtcttttgtgtatgttcaaacttggaaattctttttttccagtgggtgtatgagagctctgctcttttttgatggaaaattgacacactttttaagaaacactgtca

SEQ ID NO: 451208 - DNA, 574 bp, Homo sapiens
  misc_feature (1)...(574): n = A,T,C or G
taatgttatggctggtttgatctatccagattactaaaactttttttatatcagcaataagcctgtttcactttcttatcatttcttatcatttgttactagagtagtgtagggagaccccctgaaactattgctatggaataaaagatgaaatgctcctgattattgtaaatacaaagttgcatgcaggattgtgtaaagacaatgccaggtntgactgcccagatgagccaacagcatgtgatgtgcttcctnctgcagagagcctgtgaatggacgtgcacattcacatcaccaagaattctatcccagaaaagcagatgttcatagctctgsgaatggaatgccacccttgtggagagcctataaacagatgcgtgaggggcacctattcaaatggataagatagggctataaaaaccctcatcttgccatggctcttctagccctctttagggttaaagcatactcccttctgagaatttctggtctaactggttgtctagcttcacatgctgtttctatggattgtttgtaaccagcttttgctgcaactgttactgctgattaatat

SEQ ID NO: 451209 - DNA, 574 bp, Homo sapiens
  misc_feature (1)...(574): n = A,T,C or G
taatgttatggctggtttgatctatccagattactaaaactttttttatatcagcaataagcctgtttcactttcttatcatttcttatcatttgttactagagtagtgtagggagaccccctgaaactattgctatggaataaaagatgaaatgctcctgattattgtaaatacaaagttgcatgcaggattgtgtaaagacaatgccaggtntgactgcccagatgagccaacagcatgtgatgtgcttcctnctgcagagagcctgtgaatggacgtgcacattcacatcaccaagaattctatcccagaaaagcagatgttcatagctctgggaatggaatgccacccttgtggagagcctataaacrgatgcgtgaggggcacctattcaaatggataagatagggctataaaaaccctcatcttgccatggctcttctagccctctttagggttaaagcatactcccttctgagaatttctggtctaactggttgtctagcttcacatgctgtttctatggattgtttgtaaccagcttttgctgcaactgttactgctgattaatat

SEQ ID NO: 451210 - DNA, 574 bp, Homo sapiens
  misc_feature (1)...(574): n = A,T,C or G
taatgttatggctggtttgatctatccagattactaaaactttttttatatcagcaataagcctgtttcactttcttatcatttcttatcatttgttactagagtagtgtagggagaccccctgaaactattgctatggaataaaagatgaaatgctcctgattattgtaaatacaaagttgcatgcaggattgtgtaaagacaatgccaggtntgactgcccagatgagccaacagcatgtgatgtgcttcctnctgcagagagcctgtgaatggacgtgcacattcacatcaccaagaattctatcccagaaaagcagatgttcatagctctgggaatggaatgccacccttgtggagagcctataaacagatgcgtgaggggcacctattcaaatggataagatagggctataaaaaccctcatcttgccatggctcttctagccctctktagggttaaagcatactcccttctgagaatttctggtctaactggttgtctagcttcacatgctgtttctatggattgtttgtaaccagcttttgctgcaactgttactgctgattaatat

SEQ ID NO: 451211 - DNA, 571 bp, Homo sapiens
tagtaattaaagtacctgtagccaagaggggctgattttacctcgcttaaattttaaaaataagaataaaaggagaacaacaacaaaaggaagagaaggatgaattctttttaagatactggagttgctcaaaaaattaataaatccctaagcatccagacttggggccaccccaggaactgtggctgcaggtgttatgacctgccctacagactgaagatataaaggtgccttcatgtcagagggccccggctctgggtttcaaatcgctaggctagagaagttaattggcctgactcagtcggttgctatgtccagggtgtagaactgcattgcacagatcyctcctcccatatattcctaaaaaggaagaattgtttagtaagccaggaaagacagaaaaaaaaagtaaaaccacctgttcaaatcacatgggtaagaagtgaaggaggtaggattcaaattctggcagcatggctgcagaggctgactcccaaccaccccacagatggcctccgaaggtaatgaaagaggcatgtttgttaatttttgacaacctagtgaaaatatt

SEQ ID NO: 451212 - DNA, 571 bp, Homo sapiens
tagtaattaaagtacctgtagccaagaggggctgattttacctcgcttaaattttaaaaataagaataaaaggagaacaacaacaaaaggaagagaaggatgaattctttttaagatactggagttgctcaaaaaattaataaatccctaagcatccagacttggggccaccccaggaactgtggctgcaggtgttatgacctgccctacagactgaagatataaaggtgccttcatgtcagagggccccggctctgggtttcaaatcgctaggctagagaagttaattggcctgactcagtcggttgctatgtccagggtgtagaactgcattgcacagatctctcctcccatatattcctaaaaaggaagaattgtttagtaagccaggaaagacagaaaaaaaaagtaaaaccacctgttcaaatcacatgggtaagaagtgaaggaggtaggattcaaattctggcagcatggctgcagaggctgactcmcaaccaccccacagatggcctccgaaggtaatgaaagaggcatgtttgttaatttttgacaacctagtgaaaatatt

SEQ ID NO: 451213 - DNA, 439 bp, Homo sapiens
gtgcatatagtgtttgcatatcccagaattgctccctgaccagcacagctttttgggtaagtttaatatgggggtgattatgcttgagaatgttcactggaccacaaggcacctcccatattctggagatgtgtgtgagctgcaaaaggggtacgtgagctccaggaacaggtagcatcatttccatcagctcagccagactctgttgtgcatatgcggcatgctgrggattgagacgagagctacagacacaaagctcaaacagctccagttgttgctctggaggagcttgtagtctgcgtcagtgctacttagagtggggtctgtggaccagcagtatcagcatcacctggacatttattagaaatgcagaatctcaggactcaccccagatctcttgaatccagatctgcattttaacaagatgtccagtgattcc

SEQ ID NO: 451214 - DNA, 672 bp, Homo sapiens
cctctgcataaggctgaacaaagcacaaattccttttactttcttgtgtacaaaagattaatcatctcttttttggcttaggttcccagacactaatgtcttcagtgtttcacaatctactccaaatgtcttatcacggtattttcccacacaaaggcaattctccccctaaggaaaccctggtatcagtgcttaaaattataacatttcctccattttatattgaacttgttgggaccaaagaccatgaggaggcagccttgttgtgccaagaccatccactggtggacacttgcaatctgtctacacagcctgctcctttagcactcaactttatccttggactgtcaggtctagcagggcctctggtgatcacctaatacaacctactcattttatagtgatgcagggagctgacactcccaaagccacagtgcaggttagtggcaagccagaactttgcaggtcctcacttctcccaagactcacacacactgtgctcacaawgtcacagcattaatacaaatgattcaaaaatagggcaaagcacaaactgtgcaggtttgtttttgaaagcatttaagcatggcttctacttcctttttaaagaagtcaaagtcttctaactcacagtaaacgataacactcaaatgccccaggagtatcaatatc

SEQ ID NO: 451215 - DNA, 608 bp, Homo sapiens
ctgatcctttgctacagatgcctttgtgatcataagtaattccacacagttaccttgtttctttaaccatctcttaaagcttcagtgatgagcaaacacaacttggctgaacacagttccatcaaagaatctgagctgagtttctatctctattcacaatggaagaggccttgatttggagattagaatgtgattaaacaagaaaggtagtgcaccaagctaggggtcctggctggcagtcctcagatgggcttcaaaggatctgtgaatcccttcaaattgcatgcaaaaccatgttatgtattctgtgaatttttgtgaaaaaaagagcctgtagctttcaataaaagggttggtggctcaatgagatttaggaatcttgaggcacatagaccagtaactgctttgtgaataaatgaataaatgcactcagggagaacagcttcagytcactgctaggcttgaccttccagatcaaactcttctttagaggtgatttcaagaagacagtgagagactggtggtgccagaccattattacacatctaagagtcagctgaccatgtcacagtcctgcctcccacctcttacaccaaacattactttac

SEQ ID NO: 451216 - DNA, 564 bp, Homo sapiens
cctgtagctttcaataaaagggttggtggctcaatgagatttaggaatcttgaggcacatagaccagtaactgctttgtgaataaatgaataaatgcactcagggagaacagcttcagctcactgctaggcttgaccttccagatcaaactcttctttagaggtgatttcaagaagacagtgagagactggtggtgccagaccattattacacatctaagagtcagctgaccrtgtcacagtcctgcctcccacctcttacaccaaacattactttactcttcatcattttcaactcaaacagcccaaatatatagctaaaatcgcagctcttttccctaattttgaaaatcaattcaagtattagagatctatagcctcaatgccaagaaatataaatgtctaccgacaaaatgccaagggtacaggttctgaggatgatgaaagggcatataggagcaaaaatgggccaaaaaataaagtacattgggtgtagagagagggagaggacagaaaaaagaatgtagatctgccatagaagcttccattcttctccacattgcat

SEQ ID NO: 451217 - DNA, 435 bp, Homo sapiens
aaaaaagagcctgtagctttcaataaaagggttggtggctcaatgagatttaggaatcttgaggcacatagaccagtaactgctttgtgaataaatgaataaatgcactcagggagaacagcttcagctcactgctaggcttgaccttccagatcaaactcttctttagaggtgatttcaagaagacagtgagagactggtggtgccagaccattattacacatctaagagtcagctgaccatgtcacagtcctgcctcccacctcttacascaaacattactttactcttcatcattttcaactcaaacagcccaaatatatagctaaaatcgcagctcttttccctaattttgaaaatcaattcaagtattagagatctatagcctcaatgccaagaaatataaatgtctaccgacaaaatgccaagggtaca

SEQ ID NO: 451218 - DNA, 435 bp, Homo sapiens
aaaaaagagcctgtagctttcaataaaagggttggtggctcaatgagatttaggaatcttgaggcacatagaccagtaactgctttgtgaataaatgaataaatgcactcagggagaacagcttcagctcactgctaggcttgaccttccagatcaaactcttctttagaggtgatttcaagaagacagtgagagactggtggtgccagaccattattacacatctaagagtcagctgaccatgtcacagtcctgcctcccacctcttacaccaaacattactttactcttcatcattttcaactcaaacagcccaaatatatagctaaaatcgcagctcttttccctaattttgaaaatcaattcaagtattagagatctatagcctcaatgccargaaatataaatgtctaccgacaaaatgccaagggtaca

SEQ ID NO: 451219 - DNA, 564 bp, Homo sapiens
cctgtagctttcaataaaagggttggtggctcaatgagatttaggaatcttgaggcacatagaccagtaactgctttgtgaataaatgaataaatgcactcagggagaacagcttcagctcactgctaggcttgaccttccagatcaaactcttctttagaggtgatttcaagaagacagtgagagactggtggtgccagaccattattacacatctaagagtcagctgaccatgtcacagtcctgcctcccacctcttacaccaaacattactttactcttcatcattttcaactcaaacagcccaaatatatagctaaaatcgcagctcttttccctaattttgaaaatcaattcaagtattagagatctatagcctcaatgccaagaaatataaatgtctacmgacaaaatgccaagggtacaggttctgaggatgatgaaagggcatataggagcaaaaatgggccaaaaaataaagtacattgggtgtagagagagggagaggacagaaaaaagaatgtagatctgccatagaagcttccattcttctccacattgcat

SEQ ID NO: 451220 - DNA, 531 bp, Homo sapiens
tcctgtggtcttagttcttgtccctgtagtagcaggtattaccatgtactgtcaataaactgctttcatgcccagctcttctttgactatcaaatgttagggagccgcggccttccagtgtttactgagcatctgtaattgagttctgttcttaccctaagtgagattatagactcagtgagaaggcaaataattaaactagtaattaaaagtatgcgaggagtttgaaaattacacctcatggtatgggagtatatgggtggggtgttgacggttactgaactgaatgtaaaaggcagaaaaggctttgttttattcaacttggtatttctaagaactagcttggctctcagtaggtgatccttaagtgtttgctgaatgtrtcagtggtgttattaatttttttttatgtcagttatagacacaggtccaacctgtcttctgaaaacagctgagcatttcaaggatatggcatggattttttactctaatgtatagcaggcagattagagcttgttgattagtttgctc

SEQ ID NO: 451221 - DNA, 531 bp, Homo sapiens
tcctgtggtcttagttcttgtccctgtagtagcaggtattaccatgtactgtcaataaactgctttcatgcccagctcttctttgactatcaaatgttagggagccgcggccttccagtgtttactgagcatctgtaattgagttctgttcttaccctaagtgagattatagactcagtgagaaggcaaataattaaactagtaattaaaagtatgcgaggagtttgaaaattacacctcatggtatgggagtatatgggtggggtgttgacggttactgaactgaatgtaaaaggcagaaaaggctttgttttattcaacttggtatttctaagaactagcttggctctcagtaggtgatccttaagtgtttgctgaatgtatcagtggtgttattaatttttttttatgtcagttatagacacaggtccaacctgtcttctgaaaacagctgagcatttcaaggatrtggcatggattttttactctaatgtatagcaggcagattagagcttgttgattagtttgctc

SEQ ID NO: 451222 - DNA, 572 bp, Homo sapiens
gtggatcttatttactgagtttttatttaagactgcattgaatccttaaaaattccacttctaggtatttatccaagtgaaatgaaaacstatgtccacaaaagagtggtacatgcatatattcatagcccctttattcgtaattgctccaaactggaaacaaccagtatgtttataaaatgtaaaactactaagcaatgagaaggaatgcactgtcgatacatgcaacaatgtagatgaatctccaaaacattacattaagcaaaagaagccagacatgaaagagtacgtaatacgtgattctatctatatgacgtttataaaagccccaactctacagtgatataaatcaatcagtggttgactgaagtcagggatgaagtgggcagattagtgggaagagctttacaggggcatgtgggtatcaactggggtgatgattacagagatcactaaaccacatcctaaaaatgtatatattttattgtaaataaataatactttattaagttttcttttaaagactccattaactccatagattcgtttaggaaggactaacatttttacaa

SEQ ID NO: 451223 - DNA, 572 bp, Homo sapiens
gtggatcttatttactgagtttttatttaagactgcattgaatccttaaaaattccacttctaggtatttatccaagtgaaatgaaaacgtatgtccacaaaagagtggtacatgcatatattcatagcccctttattcgtaattgctccaaactggaaacaaccagtatgtttataaaatgtaaaactactaagcaatgagaaggaatgcactgtcgatacatgcaacaatgtagatgaatctccaaaacattacattaagcaaaagaagccagacatgaaagagtacgtaatacgtgattctatctatatgacgtttataaaagccccaactctacagtgatataaatcaatcagtggttgactgaagtcagggatgaagtgggcagattagtgggaagagctttacaggggcatgtgggtatsaactggggtgatgattacagagatcactaaaccacatcctaaaaatgtatatattttattgtaaataaataatactttattaagttttcttttaaagactccattaactccatagattcgtttaggaaggactaacatttttacaa

SEQ ID NO: 451224 - DNA, 646 bp, Homo sapiens
tatgcatttaagtttcctccatgtcttttcacagcttgatagctcatttgtttttagcactgaacaatatttcattttctaggtgtaccagaatttgcttatccattcycctactgaaggccagcttggttgctccaagttttggcacttataagtacagtttctgtattcgtaaacacagaataaacacctatatgaagatttgtgtggtaagagtgttttcaacacttcctcatgttgatcttttatattgtatgcttgttttcacttcagtcacgtctgctctttatccatttcctttcttctactttcttttgtttaaattgactgattttaaaaaatgatttcttgaagtggttagtagattctcaaattttgtcgtaatgtatttacacaatagggttccccttaagtactgtttttgctgttttagatgaaatcattttattatcattcagttaagagcagtttctaatttctaccagggattttctagccatcttttcattattgatttttggcttcattgcattgtgaggaaagaacacgctttgaatgatttcagtgcttgaaatgtgttgagatgtgtttgatttcataacatctggcatatttttatacgtgtttgctatgtgcttgaaaataa

SEQ ID NO: 451225 - DNA, 646 bp, Homo sapiens
tatgcatttaagtttcctccatgtcttttcacagcttgatagctcatttgtttttagcactgaacaatatttcattttctaggtgtaccagaatttgcttatccattcccctactgaaggccagcttggttgctccaagttttggcacttataagtacagtttctgtwttcgtaaacacagaataaacacctatatgaagatttgtgtggtaagagtgttttcaacacttcctcatgttgatcttttatattgtatgcttgttttcacttcagtcacgtctgctctttatccatttcctttcttctactttcttttgtttaaattgactgattttaaaaaatgatttcttgaagtggttagtagattctcaaattttgtcgtaatgtatttacacaatagggttccccttaagtactgtttttgctgttttagatgaaatcattttattatcattcagttaagagcagtttctaatttctaccagggattttctagccatcttttcattattgatttttggcttcattgcattgtgaggaaagaacacgctttgaatgatttcagtgcttgaaatgtgttgagatgtgtttgatttcataacatctggcatatttttatacgtgtttgctatgtgcttgaaaataa

SEQ ID NO: 451226 - DNA, 646 bp, Homo sapiens
tatgcatttaagtttcctccatgtcttttcacagcttgatagctcatttgtttttagcactgaacaatatttcattttctaggtgtaccagaatttgcttatccattcccctactgaaggccagcttggttgctccaagttttggcacttataagtacagtttctgtattcgtaaacacagaataaacacctatatgaagatttgtgtggtaagagtgttttcaacacttcctcatgttgatcttttatattgtatgcttgttttcacttcagtcacgtctgctctttatccatttcctttcttctactttcttttgtttaaattgactgattttaaaaaatgatttcttgaagtggttagtagattctcaaattttgtcgtaatgtatttacacaatagggttccccttaagtactgtttttgctgttttagatgaaatcattttattatcattcagttaagagcagtttctaatttctaccagggattttctagccatcttttcattattgatttttggcttcattgcmttgtgaggaaagaacacgctttgaatgatttcagtgcttgaaatgtgttgagatgtgtttgatttcataacatctggcatatttttatacgtgtttgctatgtgcttgaaaataa

SEQ ID NO: 451227 - DNA, 611 bp, Homo sapiens
actgtgggagctggaggaagtcttggcttgtcgtaatgaaccacagattacagatggagatgctgacatcctgagatttgagatgtgctataggtcacagaggtgcatgggagagttaggccaaggtctcaactcagggctctctccacttttccacacttcctcctcattttgctagctcatttaattaccactttttcttcctttctgataacactgaagtttaagagcatttcattacaagtgtgatgatacaatgtggtattaagacatgacaaggcaagttttattggccattactatttgcctcaagtgagtggcaaagcctttgaccactcgaggcatatattaatagccctataaaatacatcctggattgctagtgctattaccgtctggctattacatttaaaaaaatattgtacaaataccacttcaaataattttcttactcttttttttaaactggaacrattagctttttttatgagagacaattcttcacatgatggagaaaatagaattgtcaggtaacatggaaagagtataagctttggagtcgtaccaaactgtgtgcagatatttgctctgctatttatcatcactgtgac

SEQ ID NO: 451228 - DNA, 567 bp, Homo sapiens
ttattgagacagaaaatatgacctgtgaggtttcatggcatatgtaaaaccttacccatttttcacattatcctaatctgtttggtcatttagtgaaacaggatttcttgggagataaaacaccacagccaacacatgtacaaataaataaatcaataactaactcttccctcaaataccttatcatgagaagtgcatttttccctttctaaattgattatatttttgcaacttgagttctttgcgggttaataacyagtggtataaatcagtactaactgctatttggacaaaaatgtttctcatatttgactcattctcttgaacttgaaactctaagcagtgaggagctgattgttcttctgtttgtattttggtattaataattaatattattaatttttcatcccccacttccaaatcaagttgataaggcatttgctgaatcatatattcttagattcccctatggctttgagcttaataaaagtggaagattatttttgttgttgttgttgtgtaaggtaataatagtacgctaataaaaggataaaatgagttaatata

SEQ ID NO: 451229 - DNA, 559 bp, Homo sapiens
gtatttttgcttgttggtttgcaaagcaaactgtgataaagaaaaataacgagttggcagttcctcttagattgttaactaggattggccattactttcactattgcgcctcctctcctgccctgaacaatcagttcagacaagtatgagggttgccttgctccttaccagactttgcaatctgttggcaatctttaccccatccctggacctcccagctaytttgaacaccctgagacaggtccacttggtactgtgtccctcataaatttgttcatctcccatcttctctgatgctaggttggaagcctcattataggatgctgccatcaaaacaacctgtactggtataagaatattgtgtcagtcatttccagcaccatgtctcatctctaatcctctgccattcagttagggaaaacatggagaaagcattctgaaataaggtaacggatgcagaggggctgttagcattggaacaagcatttcagagagtctagggacagtcttaggaggagacgaatctggatgagaagttgcaaagcaaaaagaatgacaa

SEQ ID NO: 451230 - DNA, 548 bp, Homo sapiens
caattgcagtgcaccaggattatggcttatgagcactttatgtttattatctcacaactcactgagttagatactctccacaacccagtgaggtaaatactattacttccacagtatatattattatataataaaatgcttagaatatacacacagtaactaaacactacttataaaatatggctctagatatgtttgataaatatttccttcatgaaaacatggaggaattaattagcagtatctctctgcagcctttagccctcgagaatcatgtagaaaagaggagctgtcttctcttttagcagaacatctgtcagagatggtttcccctgacttagacaattgtgtttttttccctwcagaatgattgagtctcagaattgttctttaatcctcagtatttccattaagaagagcttctatcaagtgcttcaaaagtacccaatgtgaaggagtaataatgactccctgctggtgagcgaagtgtggaggacacaggtccctcagccgtccactggatgctgcactgtttggcctgagccaac

SEQ ID NO: 451231 - DNA, 495 bp, Homo sapiens
agcggattaagggaatgcaaggacatgaaagagtgtcctaggcagagggaacaacatatacaaaggccctgaggtgggagtgaacaaggaactgagagaagaactgagagaaggccactgtggaaagccagatgctgtgtgacatgaataatgggacacaggaaattgagatattagcaaaagagagattgatgacccataggcttgaagatgtactggaactaaagtaaggggcgaggataaataaaaagagggaraaattggagaaacagagtgcttggaagccctgatgaatttgaggaaaaggatggtgatagagttgacctagccagctagaagagtagtactttttagtcagtgagccctccatcccatttctcattaattcttgtaacactttctcacttcctatattctgtcatattttatagttgtttatataattatcttattctttataccaattgtagtttccctgggtgcttattatggatt

SEQ ID NO: 451232 - DNA, 534 bp, Homo sapiens
agcctggggcacagaaggagaggcagatagatggcagccctgaagaacggagttcaaatccagctttgtcactaagaatggaggtgcccttgcgtcatctcttcagttacccctcatctctgtaaaatgggggggttggattagatgactgctatgggacttctagaagtaacagtccatggttatacctgagagtccagacacctgcacttattctaattgtgaacctggcattgacttaccaggtggcctgaacataaccattagactcctcagagctcaacactggaaggcatctgtggtatgaactgattcagcctctgattccccctaaacccctccctagcattcctgaaagatgaccatytggcttctgttggaatacctccaaagatggggagctcacttccctggaccaggaggaagacatcctttctattgccagctcgctccacaagttacaaagtcttttcatagatatgagctcaaatccactttcatgaaacccctgcccaaagggaggcccaggaaagc

SEQ ID NO: 451233 - DNA, 643 bp, Homo sapiens
gttttaagatgctaatcttggggtcatgtgttacacagccatagataactaacatgcactatctcatggtgaccctcatagcctaaattttaagtagatatctgtatccacattacagaggtacagagactgaggcccaggggtttggtccaagataatacagcttagcaagagatagcgctggggcttaaaccagcctgaccccagagctgtggtctttccaccacacttctctaagcatcccggaccaggccccttgggagatcccaagaaaggaggaaaagttgggatctctgccctgcaggacctcccaggctgatagggcaggcaggggagcaaagcagagggtcctctcagtcacgctgaatgacggtcccccacctgcggctccctgtggctcccgttcagcaccacagctgccaaacccatttcattcaattctgcaaagagctcagaacaccctgagtgggggttcctgcctctccctcgaagcagagagcagcgaaattggacagtaatgtgttgtcgttcaaatatttcagctggagctggggtgaattatgatgccrtcccactttattcagtgtagcatctttcataagagccgtgtctcagaaacactttggagaaggaaataataaat

SEQ ID NO: 451234 - DNA, 640 bp, Homo sapiens
ctgcttattttcaggtgtgatggatttctgtgtttgtgtgtgtgtgtacatatgtatgttaaaggtgaggttacaaacacatctgcgttagtgtgcttttgttgtataaaccaccaccttaaaatttagttgcttaaaacaatagtcatttagatagctcatgattcagtaggtgagcagtttgggcagggctcagctaagtggttcatcttatcttgcctgtcttactcatggctgcagacaggctgggggctggttggtcccaaatggcattgctcatgtctgagagttggctaggtgctgaagcaccaacccatgtgtctctagcatccagcagctttcttcacaaagtggctgtgtttcataagcagcaagagagagcgagtcctagagcacaagtcctttttttctgcttgtgtcacatttattaatgtgcctttggttaaagccagacatgtggctgtgcctggcttcaaggtgaggagaaatagactccacctcttgatgggagkagctgtaaaatattatgaccttttttttcttttttcaatctgtcagaacatgaaagagtgtactgctggccgggcaccatggctcacacctgtagtcttagcactttgggaggctgaggcaggcagat

SEQ ID NO: 451235 - DNA, 555 bp, Homo sapiens
ctcacttttttccccaggctgttcatgaactcctggcctcaagagagcctcctgccttggtttactaaagtgctgagactacaggtatgagccaccatgttcagccctaacatatattattaaacgaagcaaacaattaagtagatttattactcaagatttattatgtattagttgagattcctcattgaacgtattcctattttttgtagccccaaatcttaccctttcttctctgtcaagtcaaaaactcagcaagaaacattttataactgcacacaaattaatggagcaggatcagtatgaagctgttttgattttctttgaaaaaactataaacaaaaccatacayaaacattctattaaggtaagtcctctaagcagtattaaccatgtgatactaacggacattgtaagtaaatgaatcaaagttaatcacccactttagtttcttattacactctgttctaaaaactaactaaataaaaagtaagtaagttgcttacaaaggctgtatcacatctttactttattccagacatttgtaaatttagt

SEQ ID NO: 451236 - DNA, 555 bp, Homo sapiens
ctcacttttttccccaggctgttcatgaactcctggcctcaagagagcctcctgccttggtttactaaagtgctgagactacaggtatgagccaccatgttcagccctaacatatattattaaacgaagcaaacaattaagtagatttattactcaagatttattatgtattagttgagattcctcattgaacgtattcctattttttgtagccccaaatcttaccctttcttctctgtcaagtcaaaaactcagcaagaaacattttataactgcacacaaattaatggagcaggatcagtatgaagctgttttgattttctttgaaaaaactataaacaaaaccatacataaacattctattaaggtaagtccyctaagcagtattaaccatgtgatactaacggacattgtaagtaaatgaatcaaagttaatcacccactttagtttcttattacactctgttctaaaaactaactaaataaaaagtaagtaagttgcttacaaaggctgtatcacatctttactttattccagacatttgtaaatttagt

SEQ ID NO: 451237 - DNA, 558 bp, Homo sapiens
actttcaaacttactcatcctggaaattactcatctcactaagtgaagatggtttaaaattcatatccacctattgccttagcataagcaacagtcgtttcatacagtaggtacatggccaaaacatcaagaaacacagagaagaygaagcagaaagtgtgtctgcagaaagggacaaaaacttcgcaagatgtcagccaaggaaatcgttacatgctatgtactttgtaaagtatattgaatcataaagaattaaaattaccgtgctatttaaagaagtatttttaaaaaagaaattgtgtgaaaatattaataaggaccttaatgcaaaaaatgtagaaaggcaagcaataaaaatgatttggccatatagaaaagtatcatgggacttgaatagcatgaccaagaacagcaatacaggcctaactagaggaaagaagaaattcgaaatcaaaattagaaactagccatcactgctagctctatttacatatctataaatctctatatctatctattatctatctctctatctgtttatctggacaaacttaaaaa

SEQ ID NO: 451238 - DNA, 558 bp, Homo sapiens
actttcaaacttactcatcctggaaattactcatctcactaagtgaagatggtttaaaattcatatccacctattgccttagcataagcaacagtcgtttcatacagtaggtacatggccaaaacatcaagaaacacagagaagacgaagcagaaagtgtgtctgcagaaagggacaaaaacttcgcaagatgtcagccaaggaaatygttacatgctatgtactttgtaaagtatattgaatcataaagaattaaaattaccgtgctatttaaagaagtatttttaaaaaagaaattgtgtgaaaatattaataaggaccttaatgcaaaaaatgtagaaaggcaagcaataaaaatgatttggccatatagaaaagtatcatgggacttgaatagcatgaccaagaacagcaatacaggcctaactagaggaaagaagaaattcgaaatcaaaattagaaactagccatcactgctagctctatttacatatctataaatctctatatctatctattatctatctctctatctgtttatctggacaaacttaaaaa

SEQ ID NO: 451239 - DNA, 621 bp, Homo sapiens
ccacaacatatatgttcatgattgtagaaccargtgttagctgggaaagcatgtaacccgtaatgcatgccaaatgcattatggtatgcaactcaagtgaataaacttctgcttctctttgtgctgcaccttaagagattcctgcctcataagcttggaaacttttagtggtgattatttctcatagtctcaaatatggactggaaactatcaaatctatttacttatatgaggatgcagttaagtaaaactaaaaagaaacatagagcattcttaaaacatgatacaatgaactaacatggaccacaaatacagagacatcttgaagaaattatatcatcttgtaaataaataagatttaacacaaacatgattatacaactttttttttctaaaggcagaaattgtttaaaaatattctttaggaaagcaatcacacaaagccttttgattacagcagcatgttaagaaaacttctatacagaagccatgtgtgatatagggcaacagaatggtaaaccaacgaccaccatagagaggttattattacctataggagggaaaaattctcagtcaggaaaatataaatctcttaaccagcagacagtgttttctagaagt

SEQ ID NO: 451240 - DNA, 589 bp, Homo sapiens
attgcccactctgtaggggagagtgtaatatgcttaccactcacacccacaccccctagtccatgtttttataaagggacaacttgatttatcctgcaggaatgttttatctctgtattaaggtttactccatttcccagcagagccctaagctaagtaaacagtgccttcctccgcttcaaaccgatgagwcttgggcagctgcagttgttgccaaatgttacccttggtcacagaggcatgacggatgcctcatgctagaagttcaggggagtttggaaaaatatggaaattcccaggcactatttgggggcacagtgccaaagtctgaggactgaaaatgagaatacctgcctcccagatgcattcattgatttactcacccatcattcattccaatatcgtacccttggccaggctttgtgtctagagtcaggattaccaagttgagcagctgcacggcccctgaccttgctggagcttatgaaatctgtaatgaagcttagtgagtttgctttgcttttcttcctctgccagaattgttctttcctatcttgtccacctagtcttactcatgccttgcagaatt

SEQ ID NO: 451241 - DNA, 589 bp, Homo sapiens
attgcccactctgtaggggagagtgtaatatgcttaccactcacacccacaccccctagtccatgtttttataaagggacaacttgatttatcctgcaggaatgttttatctctgtattaaggtttactccatttcccagcagagccctaagctaagtaaacagtgccttcctccgcttcaaaccgatgagacttggrcagctgcagttgttgccaaatgttacccttggtcacagaggcatgacggatgcctcatgctagaagttcaggggagtttggaaaaatatggaaattcccaggcactatttgggggcacagtgccaaagtctgaggactgaaaatgagaatacctgcctcccagatgcattcattgatttactcacccatcattcattccaatatcgtacccttggccaggctttgtgtctagagtcaggattaccaagttgagcagctgcacggcccctgaccttgctggagcttatgaaatctgtaatgaagcttagtgagtttgctttgcttttcttcctctgccagaattgttctttcctatcttgtccacctagtcttactcatgccttgcagaatt

SEQ ID NO: 451242 - DNA, 589 bp, Homo sapiens
attgcccactctgtaggggagagtgtaatatgcttaccactcacacccacaccccctagtccatgtttttataaagggacaacttgatttatcctgcaggaatgttttatctctgtattaaggtttactccatttcccagcagagccctaagctaagtaaacagtgccttcctccgcttcaaaccgatgagacttgggcagctgcagttgttgccaaatgtkacccttggtcacagaggcatgacggatgcctcatgctagaagttcaggggagtttggaaaaatatggaaattcccaggcactatttgggggcacagtgccaaagtctgaggactgaaaatgagaatacctgcctcccagatgcattcattgatttactcacccatcattcattccaatatcgtacccttggccaggctttgtgtctagagtcaggattaccaagttgagcagctgcacggcccctgaccttgctggagcttatgaaatctgtaatgaagcttagtgagtttgctttgcttttcttcctctgccagaattgttctttcctatcttgtccacctagtcttactcatgccttgcagaatt

SEQ ID NO: 451243 - DNA, 521 bp, Homo sapiens
tttaaaacctaaagccataaaagggcttactcctataatagaggagttaataaaaaaggtttgttattccttgtaccaatccttgcactactcccatcttatctgtcaaaaaactgcacagataagaatgaagacttgtacaagatcttagagatataaatacaattgttattccaagatttcctgtagtatctaacccaaactccctactggcaaatgtactcactraatccaaatggttcacagaaatggaatagacaaagagaattgtttacctttattctattgttggaaaaatcaacaatgtattttgacagtaatgcctcagtgatttaccagttgatgaaatttacctttaatcaattcatgagggcagaacccacataacccaatcacctattaaaggtcctgcctcttcatacttcttaccagttttacatcaggatttaaaaaccaaccctgcaatttcccagaaattccacttggtttaatatgtagatgatttccttctttgctcttca

SEQ ID NO: 451244 - DNA, 521 bp, Homo sapiens
tttaaaacctaaagccataaaagggcttactcctataatagaggagttaataaaaaaggtttgttattccttgtaccaatccttgcactactcccatcttatctgtcaaaaaactgcacagataagaatgaagacttgtacaagatcttagagatataaatacaattgttattccaagatttcctgtagtatctaacccaaactccctactggcaaatgtactcactaaatccaaatggttcacagaaatggaatagacaaagagaattgtttacctttattstattgttggaaaaatcaacaatgtattttgacagtaatgcctcagtgatttaccagttgatgaaatttacctttaatcaattcatgagggcagaacccacataacccaatcacctattaaaggtcctgcctcttcatacttcttaccagttttacatcaggatttaaaaaccaaccctgcaatttcccagaaattccacttggtttaatatgtagatgatttccttctttgctcttca

SEQ ID NO: 451245 - DNA, 591 bp, Homo sapiens
aaatggaatagacaaagagaattgtttacctttattctattgttggaaaaatcaacaatgtattttgacagtaatgcctcagtgatttaccagttgatgaaatttacctttaatcaattcatgagggcagaacccacataacccaatcacctattaaaggtcctgcctcttcatacttcttaccagttttacatcaggatttaaaaaccaaccctgcaatttcccagaaattccacttggtttaatatgtagatgatttccttctttgctcttcattcaaagaggactcagaaattcatttaatgtacagttgtccccagtattcctgagaaagctgttccaagacctmcctctggcaccaaaatcggaggcttaagtctcttatataaaatggcatagtattgccatataatctacacacatcctcctatatactttaaatcatctctagattacttataatacctaatacaatgtaaatgctatgtaaatagttgttatattgtattatttagagaaaaataacaattaagaagtttgcacatgtttactacagatgcaaatttttctgtacattttttatctgtagtt

SEQ ID NO: 451246 - DNA, 591 bp, Homo sapiens
aaatggaatagacaaagagaattgtttacctttattctattgttggaaaaatcaacaatgtattttgacagtaatgcctcagtgatttaccagttgatgaaatttacctttaatcaattcatgagggcagaacccacataacccaatcacctattaaaggtcctgcctcttcatacttcttaccagttttacatcaggatttaaaaaccaaccctgcaatttcccagaaattccacttggtttaatatgtagatgatttccttctttgctcttcattcaaagaggactcagaaattcatttaatgtacagttgtccccagtattcctgagaaagctgttccaagacctccctctggcaccaaaatcggaggcttaagtcycttatataaaatggcatagtattgccatataatctacacacatcctcctatatactttaaatcatctctagattacttataatacctaatacaatgtaaatgctatgtaaatagttgttatattgtattatttagagaaaaataacaattaagaagtttgcacatgtttactacagatgcaaatttttctgtacattttttatctgtagtt

SEQ ID NO: 451247 - DNA, 545 bp, Homo sapiens
tactaaatatactcatgatttttcagctagcagtctaatatcttataagatcctgcttctagctccttcaaacctacttattatttgatgtaactctctgaactctcccaccctattacctttacctgacaaataagagattcactattgcgttgaattggttttccaaaattttactcctgaattagatttacaagacccactattgaataatctacagttgataatctatgttgatggctactatgccataaattctaaaagaaagtactgaattgtatatgctgttacaatctgacacaaattattagaaagaagagtacttcctaaatttagttacrcccaacctgtggaattaattgccctcactcaagactgtgaattaaccaaagataaactgtaaatatatatactcatgtgcttttggagtagtccattatttttgtatgtattatttttgtatggtatggaaatgggatttcttacatctaatggtatgcccataaaaaagatcaggttgctaattttctttctgcactattgct

SEQ ID NO: 451248 - DNA, 554 bp, Homo sapiens
ccagtgttggtagtggggcctagtgggaagtgtttgggtcatggggatggatcccccatgaatgacttggcaccctcccagtggtaatgagttactgtgagatctggttgtttaaaattaaagtctgggacctccctcctctcctgcttcccctcctgccgtgtgacacactgactccccctttgccttcttccacaattgtaagcttcctgaggccttaccagaagtagatgctggtgtcacgcttgtacagcctatagaactgtgagccaaataaacctcttttctttataaatacccagtatcargtattcctttatagcaatgcaaaacaaactaacatgcccagatagtgatttatattttattttgttttattgtatgacaataaaatgtttaaattttcctaattttatttgattttactttggacagaaaggtttttctgacacttcaaactaatttagttgtccattttgtaaattttcacaacacatcacacttttgcattttgtcatttatctgaattgtaatgaaagaactgtgtttgtaat

SEQ ID NO: 451249 - DNA, 554 bp, Homo sapiens
ccagtgttggtagtggggcctagtgggaagtgtttgggtcatggggatggatcccccatgaatgacttggcaccctcccagtggtaatgagttactgtgagatctggttgtttaaaattaaagtctgggacctccctcctctcctgcttcccctcctgccgtgtgacacactgactccccctttgccttcttccacaattgtaagcttcctgaggccttaccagaagtagatgctggtgtcacgcttgtacagcctatagaactgtgagccaaataaacctcttttctttataaatacccagtatcaggtattcctttatagcaatgcaaaacaaactaacatgcccagatagtgatttatattttattttgttttattgtatgacaataaaatgtttaaattttcctaattttatttgattttactttggayagaaaggtttttctgacacttcaaactaatttagttgtccattttgtaaattttcacaacacatcacacttttgcattttgtcatttatctgaattgtaatgaaagaactgtgtttgtaat

SEQ ID NO: 451250 - DNA, 580 bp, Homo sapiens
aagaaattctaagatttttatggttagtcaaagaaagcataggtctaaaaatcccagtcataaaattggcctgagaatggaataagtataaggaatgtggctggatcagtgcaatcttaccttctaccccttttttccatataattattttaatttccagtcaaacaaaacatttaccattttgcttccatgtctgtggtaggcagaatattggctccccmaaaaaaaaatctcatccctatccccagaacctatgaatgttactttacatgacaaaaaggaccttgtattaatgttactttacatgacaaaaaggaccttgtattaatgttactttacatgacaaaatggaccttgtattaagattaaggttcaaagattgtggaggtagagcaagatggccaaatagaactctccagtgaatgaccccttgcaggaacaccaaattaaacaactaattaaagcaccttcataggaacaaaaaaacagggtagcaatcacagtacctagttttaacataataacaaagaaagagatattgagtggataggaaagatagcctcacattgtctacactgtc

SEQ ID NO: 451251 - DNA, 512 bp, Homo sapiens
tcataataaccaaagactaaaatccatctgaatattcatcaaaaacagtagaatatttcaaaacagtgaaaaagagcaagctattgctatgtgcaacaagaagataaatctcacagacataatgttgagtgaaaagaagctagacacaaaagaataccactatgaatccatttatatgaagttcaaggataattaaaattaatctatggtgatagaagaatagtggctatcttcggaggatagtaactcaggggtggtcatcaggaagccttctgggaggctagaaatactcactgttttatctgtgtggtagttctatgggtgtatttacatgtaaagagtgattaagctgtgcacttaagatttgagcactttactgaatgtatattatatctcaaatttttaaaacaagaakaaaaaatcctgttcagaagtttatatttggagattcaaaatttaagcttacgcccaagatgccggctcttcattggtaatacattcagtgattgatg

SEQ ID NO: 451252 - DNA, 500 bp, Homo sapiens
aagcccatataggattacaacctaccaggagagaatgacagtttccatagtaactggaccagatggggcccatgcaccacccccgccagctcccggatggtgatctttctgtgtgccacgatgtcagtaagatttccacctataggaaaaaccacgatgcaaggagaacaatacaagctctgtcccgttgtgaactcctgaagagcaccgtgcccacaccttacacggtggcctgaaccccgcagagccattctccaagggctcagtccctaaggcaggaayggcgagcagggaccgacgcccatcagtagttagacttgctgtgggggcgaccagccacaggaacccgttgcgaggggagaggaaatgcctgtggagggcggcaggcccccacatcccacgccaggtatcctcagctcaggctgtccctggctcctgaaggctggccttaagtcaagacctgaccctctgcgcctcgacgtgaacttagaggagcccga

SEQ ID NO: 451253 - DNA, 500 bp, Homo sapiens
aagcccatataggattacaacctaccaggagagaatgacagtttccatagtaactggaccagatggggcccatgcaccacccccgccagctcccggatggtgatctttctgtgtgccacgatgtcagtaagatttccacctataggaaaaaccacgatgcaaggagaacaatacaagctctgtcccgttgtgaactcctgaagagcaccgtgcccacaccttacacggtggcctgaaccccgcagagccattctccaagggctcagtccctaaggcaggaatggcgagcagggaccgacgcccatcagtagttagacttgctgtgggggcgaccagccacaggaayccgttgcgaggggagaggaaatgcctgtggagggcggcaggcccccacatcccacgccaggtatcctcagctcaggctgtccctggctcctgaaggctggccttaagtcaagacctgaccctctgcgcctcgacgtgaacttagaggagcccga

SEQ ID NO: 451254 - DNA, 600 bp, Homo sapiens
tggacaatagtcactccagaccttcgagcctggtcggttgagctagagaggccacgcttgccattcctagtgatctaaaaaggataggtcactgggagatgggagtccaagccttggctagtggtgcactgtggggacctatggtaaattgcttaccgtttaaagactgcccctaayggaaggactctaagtttaggtgagcttggcaccatgaggcacaggtcacaataattttgtttccaaaattatcccaccctaccccagaagatctgcagaaagcaagaccatgggattggggagatgtgagactcagattgaggaacggtttccccaaggacctctggaaagctcgtctgattgagtttgaacaagggttatccaccagagggcgggcttcaccctccaagaagctttcctgataccacttcgcccacgggctcttcctgagcttcactagcatagggggccgccccgctgcctggtcttgctgcgcacacctggacatcctcagagctgctgtttcacctggggactgctcagatggttgcttaccttgacactgctgcttgtaataccagttaactgataagagcagcgatt

SEQ ID NO: 451255 - DNA, 600 bp, Homo sapiens
tggacaatagtcactccagaccttcgagcctggtcggttgagctagagaggccacgcttgccattcctagtgatctaaaaaggataggtcactgggagatgggagtccaagccttggctagtggtgcactgtggggacctatggtaaattgcttaccgtttaaagactgcccctaatggaaggactctaagtttaggtgagcttggcaccatgaggcacaggtcacaataattttgtttccaaaattatcccaccctaccccagaagatctgcagaaagcaagaccatgggattggggagatgtgagactcagattgaggaacggtttccccaaggacctctggaaagctcgtctgattgagtttgaacaagggttatccaccagagggcgggcttcaccctccaagaagctttcctgataccacttckcccacgggctcttcctgagcttcactagcatagggggccgccccgctgcctggtcttgctgcgcacacctggacatcctcagagctgctgtttcacctggggactgctcagatggttgcttaccttgacactgctgcttgtaataccagttaactgataagagcagcgatt

SEQ ID NO: 451256 - DNA, 558 bp, Homo sapiens
tatcccaataaaattattacactttaaagatttaaaagaatatagaaaaagaatccttyggaagtcaggcaaagaaaacaaaagtcaagtcacttataagaaacagaaatccatttggcattatatctctcatctgtcactggaatacagagtaacaaaacctataagactctcaaaagaaacaaactgtacatcaaaattgtatatccagccatgttgtccttcagccataaaggctataaacaaatagttttgaattttcaaaactcagcatttattgttcatataactctttcctgaaaaacttgtaatgactttttttactttttttctttttctttttacttttttactttttctttttctttttacttttttaaggtggtgttttaaatattttaaattcccatgtggctcacatttgtgacttgcattacatttcttttggacagcattaatataagacagcaccatgtacaattaataaatataactgtgcaagacaaaaacaattctgttagacaaaaacaaataacaaattccggaaaatatagtttc

SEQ ID NO: 451257 - DNA, 654 bp, Homo sapiens
gttggttctgccattcagccgttcattcatgcattcagcaagtatttattgaatggctgctacatgctagccaatataatggtgaacaaaacagatatatccctgcagtcacagaagttacaatgtagcaggcaggagggatacagagaagttaaacagaaatcataataccttgtaataaatgctatcataatggagaaattatagtgtgctgttggtacctcaatggaaggacaacgcagtgtgtgtgtgtgtgtgtgtgtgtgtgtgtgtgtgtgtgtgtctgtgtgtctgtgtgtctgtttgtaggctggtggtcaaaaagggcttctcattcatgtttatgagttttaattagataaatgatataggggtagtggtgggaagacaaggaaccagcatgtacaaagacccaaagatgaaaaggaacataacattaactccgcagtgtttcaacagtcttctaacatttcactcttattctctgtgacagaagcagtgccacartcaaggccttgggtgagactgtgcctggagttgccgaaagcctttgcccataaaagttgcttttctctgttaataattgttcagtggtttgaatctgtcatttattgcacccccacttaaaatgtgaccgacttgcagacagggagc

SEQ ID NO: 451258 - DNA, 654 bp, Homo sapiens
gttggttctgccattcagccgttcattcatgcattcagcaagtatttattgaatggctgctacatgctagccaatataatggtgaacaaaacagatatatccctgcagtcacagaagttacaatgtagcaggcaggagggatacagagaagttaaacagaaatcataataccttgtaataaatgctatcataatggagaaattatagtgtgctgttggtacctcaatggaaggacaacgcagtgtgtgtgtgtgtgtgtgtgtgtgtgtgtgtgtgtgtgtgtctgtgtgtctgtgtgtctgtttgtaggctggtggtcaaaaagggcttctcattcatgtttatgagttttaattagataaatgatataggggtagtggtgggaagacaaggaaccagcatgtacaaagacccaaagatgaaaaggaacataacattaactccgcagtgtttcaacagtcttctaacatttcactcttattctctgtgacagaagcagtgccacaatcaaggccttgggtgagactgtgcctggagttgccraaagcctttgcccataaaagttgcttttctctgttaataattgttcagtggtttgaatctgtcatttattgcacccccacttaaaatgtgaccgacttgcagacagggagc

SEQ ID NO: 451259 - DNA, 557 bp, Homo sapiens
tgaccttgcctttctctctggctgcctttaacattttttttttttttcattttgatcttggagagtctaaagattaagtgtcttggggatgatcctgtggagtatcttactggggttctctgcatttyctgagtttgaatgttggcctgtctagctaagttggggaagttctcccggatgatatcctgaaatgtgtttccaaattggttccattctccctatctctttcacatagcccaatcaggcatagatttggtctctttacataatcccatatttcttggaggtttcattcattcctttttattcttttctctctatgcttatctgtctgtcttatttcagaaagacagtcttcaagctctgagattctttcctctgcttggtctgttctgctattaatactcgtgattgcattgtgaagttcttgcagtgtgtttttcagctctatcatgtcagttatgttccttactatactagctattttggctgtcagctcctgcattgttgtatcatgtttcttagcttctttgcattgggttacaacatgctccttt

SEQ ID NO: 451260 - DNA, 557 bp, Homo sapiens
tgaccttgcctttctctctggctgcctttaacattttttttttttttcattttgatcttggagagtctaaagattaagtgtcttggggatgatcctgtggagtatcttactggggttctctgcattttctgagtttgaatgttggcctgtctagctaagttggggaagttctcccggatgatatcctgaaatgtgtttccaaattggttccattctccctatctctttcacrtagcccaatcaggcatagatttggtctctttacataatcccatatttcttggaggtttcattcattcctttttattcttttctctctatgcttatctgtctgtcttatttcagaaagacagtcttcaagctctgagattctttcctctgcttggtctgttctgctattaatactcgtgattgcattgtgaagttcttgcagtgtgtttttcagctctatcatgtcagttatgttccttactatactagctattttggctgtcagctcctgcattgttgtatcatgtttcttagcttctttgcattgggttacaacatgctccttt

SEQ ID NO: 451261 - DNA, 534 bp, Homo sapiens
tggcctgtctagctaagttggggaagttctcccggatgatatcctgaaatgtgtttccaaattggttccattctccctatctctttcacatagcccaatcaggcatagatttggtctctttacataatcccatatttcttggaggtttcattcattcctttttattcttttctctctatgcttatctgtctgtcttatttcagwaagacagtcttcaagctctgagattctttcctctgcttggtctgttctgctattaatactcgtgattgcattgtgaagttcttgcagtgtgtttttcagctctatcatgtcagttatgttccttactatactagctattttggctgtcagctcctgcattgttgtatcatgtttcttagcttctttgcattgggttacaacatgctcctttagctcaacaaagtttgtttttatccagattctgaagcctaactctgtcatttcagccaggtcagcctcagcccagttctgagcccctgctggagaagtgttgtgatcatttggaggaaa

SEQ ID NO: 451262 - DNA, 583 bp, Homo sapiens
caactcttattttctgcacacccacagacccaacaccacatggtagccaacaaggcttggggyttgcatcctctgaagcaatggatgagctgtaccttgtccccttttagccacagctgcagctggagccgctggaacacagggccccaagtcccaaggctgcatagaacagctgggtcctaggcctggcccataaaaccatttttccctcctaggcgtctcagcctgtgataggaggaactgctgcaaagatctctgacatgccctggagacattttccctattgttttggctatcaacattcagttccttgttacttatacaaatttctgaagccagcttgaatttctccccagaaaaaaatgggtttttcttttctaccacatggttaggctgcaaattttccaaacccttatgctctgcttcccttttaaatataagttccaatttcaaaccatctctttgtgagcacctaaaactgaatacattcagaataatccaggtcacatcttgaatgctttgctgcttagaaatttctttgccggataccctaaatcatctctctcaaggtcaaaattccaca

SEQ ID NO: 451263 - DNA, 583 bp, Homo sapiens
caactcttattttctgcacacccacagacccaacaccacatggtagccaacaaggcttggggcttgcatcctctgaagcaatggatgagytgtaccttgtccccttttagccacagctgcagctggagccgctggaacacagggccccaagtcccaaggctgcatagaacagctgggtcctaggcctggcccataaaaccatttttccctcctaggcgtctcagcctgtgataggaggaactgctgcaaagatctctgacatgccctggagacattttccctattgttttggctatcaacattcagttccttgttacttatacaaatttctgaagccagcttgaatttctccccagaaaaaaatgggtttttcttttctaccacatggttaggctgcaaattttccaaacccttatgctctgcttcccttttaaatataagttccaatttcaaaccatctctttgtgagcacctaaaactgaatacattcagaataatccaggtcacatcttgaatgctttgctgcttagaaatttctttgccggataccctaaatcatctctctcaaggtcaaaattccaca

SEQ ID NO: 451264 - DNA, 534 bp, Homo sapiens
atgctccaactttgttcttctttttcaataatgggttggctattctgggtcttttgactcttcatgtaagctttggaattcatttgccaatattcacaaaagaacttgctgtgttgtgaagaatgacatcttgataatattgcctttctatccatgaacatggaatatttctttatttatttagatcttgtttgatttctttcatcaaagttttattgttttctttataaatattcgtatttgttaggtttatatccaagtatttaagtaacttcctaagcattttattttttggtataaatcktgttgtgtttttaatttcaaattatagttgttcattgtttgtatgtaggaaagcaattgatttttgtagattaaccttgtatcctgcagctttgttataattggtaattcattctggggtttttttggtcaattatttgagattttgtatataaaaaattatgtcatctgcaaagatagtttaatttcttccttttcaatctatatatcttttatttcctttacttgtct

SEQ ID NO: 451265 - DNA, 583 bp, Homo sapiens
caactcttattttctgcacacccacagacccaacaccacatggtagccaacaaggcttggggcttgcatcctctgaagcaatggatgagctgtaccttgtccccttttagccacagctgcagctggagccgctggaacacagggccccaagtcccaaggctgcatagaacagctgggtcctaggcctggcccataaaaccatttttccctcctaggcgtctcagcctgtgataggaggaactgctgcaaagatctctgacatgccctggagacattttccytattgttttggctatcaacattcagttccttgttacttatacaaatttctgaagccagcttgaatttctccccagaaaaaaatgggtttttcttttctaccacatggttaggctgcaaattttccaaacccttatgctctgcttcccttttaaatataagttccaatttcaaaccatctctttgtgagcacctaaaactgaatacattcagaataatccaggtcacatcttgaatgctttgctgcttagaaatttctttgccggataccctaaatcatctctctcaaggtcaaaattccaca

SEQ ID NO: 451266 - DNA, 562 bp, Homo sapiens
aaccccctgtgctccaccaactaatttgctggaaagttcttcttagctctgctattgctacaccctttccacattccttgtccttccccacaacaatttctcacccactgcttacaggcaatttgaagtttgcagcttttctctgtctcttaatttcactgaaaaatagcgtgtagggttttttttttgcctctgttcttattgctttgtgtgttttctaacaagagaagtgagaagacttatcagtaagctgctaccatattcctcaagggggcatgatttctgacctcaaggaattatgcaatgacatttcaaggggacatataaataaacaagtgagagtgtactaaacacaattcaagtcactgaaaatttctcttttctaytgctatacatggcagtggagcatgatcaggggtaattcgaggatttaattttggaggcagtgggagcccagaaaagggcagtttcaaaaacatcaacaaaatacaccttctaaaagtgagtgcatcacctgggtagacaaaggttgcccctaggtaacagtggtttataaaaaatt

SEQ ID NO: 451267 - DNA, 603 bp, Homo sapiens
ctgggcatgggccatcttttaggctcactagtttggcaccagtctccctgccctcaggcccctgggttccttcttaccccagccctgggctcagggtacactcacctctgcatgggaggcctaattgcaggggtccttgggcaggtccagactgagggcaggagtggacagcaaggactagaagtaactttggtggcagccaaacctcactctccacaggaaaagcagagaaagcctccaccccccgccccccaaattaaccctcgccttcctgaggcagatcctggcctccattaactctttcctgatcacagtcctgcgctgtggagacctgtgaaccaagtccagctccttttattttacagatggtcaaacagtcccagcccggttaggtgattggctgtggaagcactgtgagcttgggcagagccrggactccaaacaaggcctcctgatccccaggcttcctccaaaggcctggggtgggggctccgtatgtgggatcagccccctccctgggctgtggcagatgctctgacagtctgaatgggaaggcagaacagggttctagtcaacttgcttttttccctctgtagcaggctg

SEQ ID NO: 451268 - DNA, 476 bp, Homo sapiens
ggggaggagggtagagggagtaaatgagaactctgtatttctgctcaatttttctgtaaacctaaaacttctcaaaaaagaaagtctattaattaaaaaaattgaatcaagggttgtgcatgacaatagcaggtaatttagggatgaatacaatttgcttgacttagagcccaactagctctgaaactctcttagaaaccaaaacacactgggtttccaaagcttactgcaaatgagaactttgcatacgtggagaaattttgactagaaaagtcttactggggaagatagagtgtctgaggaagtgatcaaattggctgacaggaactcctctttcctcatggccttaattggttgaggtggctaccacttgtgaaaggaagctgactgmctgccacctacagccacctcatccttagtggttgatatagtttctttcataaagtctggagagaatctttctcccacaggtgtca

SEQ ID NO: 451269 - DNA, 558 bp, Homo sapiens
gagagaatctttctcccacaggtgtcacaatgctttggggttcttttgaagttgctctttgtctttcagttttttaaaatccagtacaagtttccccagaactaggtcagagaatatcaagatgactcaagccaaagttgctcccaagagtccccatctcctctgaaaatcaaccacagtcccagcaagctcttggttctctatccactcctcccatcacccattctcaggttgagcatgtgcctcycatccctctctccttcaagtttatcccacagttttaattcctgggtcccaaatacttgttaaaaatatcattcatcttttacaaagagagaaagaaaaagtattttagaatgtgtcctctttactgtctcttgcaaaaagccctaatgtttctcagtgactctggtcacttctgtggagatagattggtctcttccttggaccatttcatctcatatgaaataagtgatgccacatttatctctttagccttatattcttctatgaaaagtggtctttttttagcagtagcaagggatatgttggtgaaat

SEQ ID NO: 451270 - DNA, 558 bp, Homo sapiens
caagccaagattgtgaggctgtgaggggctgggaaccagccacaagttcaggccacagaagagaatggaaggggtagtaagtactccacaacttgggccagcttctacatcaaccacttggcttcgactccgtgtaaaaaaaccctagacatcatgactatataacctgagagaatctccatatctaggtgtgtggattctagatttttatttcaaaataatcttgggcacttactccctgatactgggctccttctcttacctcaccccactgatccctgggcccaggctactacagttgcctcatgtcacatacaatctgtgcttgcctctgtttaggaggatgccaaagaccattaggacctaaataaggttttcttattaagtaagtaaaaaattggaaataaagaaacattggagggaaatctgaagttttcgtgttggggaaggactgcttcatttctgtgcttctctggaccctttcctctgagatgggggaggtgawcctgagcctcacgtttgtttggattgtgaagccccaggggcttctgaacagac

SEQ ID NO: 451271 - DNA, 594 bp, Homo sapiens
tttcctttctgtaaatcggggctaaaggagccttgatgtgagaaataaataagatctgactgtaaaaaccctgacacatagtaggcatgccataagtgctagtgccttcctctctccatctcatttattggctgacttctttattcctttctctaggtaaagactgacaggtggaaaggaagtaagartgatatgaggaagctctacctactgatttgtcccgataaaagagaaagatttatttaataaatgttcactgagcgcttttcatgtgaatgtgcatgctgggcagtagggaaatgatgaaattgtacattatacatttgatgccctcaaggagtttttagagtagtagagaggctgagacaagattagataagggttctataaactggtaaataagaagcactctgggaacgggtaggaaatgtaaagtcatttctggttggattcatcgtggtgttgggaacagaatggaagcagcactaacagtgcttctcaagtgccgacagcgtgatgaagagcatgcgtgtatgatcttatgcaatactcacagcaattctgtgtagtacacattcttagattcattttaca

SEQ ID NO: 451272 - DNA, 594 bp, Homo sapiens
tttcctttctgtaaatcggggctaaaggagccttgatgtgagaaataaataagatctgactgtaaaaaccctgacacatagtaggcatgccataagtgctagtgccttcctctctccatctcatttattggctgacttctttattcctttctctaggtaaagactgacaggtggaaaggaagtaagaatgatatgaggaagstctacctactgatttgtcccgataaaagagaaagatttatttaataaatgttcactgagcgcttttcatgtgaatgtgcatgctgggcagtagggaaatgatgaaattgtacattatacatttgatgccctcaaggagtttttagagtagtagagaggctgagacaagattagataagggttctataaactggtaaataagaagcactctgggaacgggtaggaaatgtaaagtcatttctggttggattcatcgtggtgttgggaacagaatggaagcagcactaacagtgcttctcaagtgccgacagcgtgatgaagagcatgcgtgtatgatcttatgcaatactcacagcaattctgtgtagtacacattcttagattcattttaca

SEQ ID NO: 451273 - DNA, 594 bp, Homo sapiens
tttcctttctgtaaatcggggctaaaggagccttgatgtgagaaataaataagatctgactgtaaaaaccctgacacatagtaggcatgccataagtgctagtgccttcctctctccatctcatttattggctgacttctttattcctttctctaggtaaagactgacaggtggaaaggaagtaagaatgatatgaggaagctctacctactgatttgtcccgataaaagagaaagatttatttaataaatgttcactgagcgcttttcatgtgaatgtgcatgctgggcagtagggaaatgatgaaattgtacattatacatttgatgccctcaaggagtttttagagtagtagagaggctgagacaagattagataagggttctataaactggtaaataagaagcactctgggaacgggtaggaaatgtaaagtcatttctggttggattcatcgtggtgttgggaacagaatggaagcagcactaacagtgcttctcaagtgccgacagygtgatgaagagcatgcgtgtatgatcttatgcaatactcacagcaattctgtgtagtacacattcttagattcattttaca

SEQ ID NO: 451274 - DNA, 596 bp, Homo sapiens
ggagtgtgaattatttttagtttcttcttgtactttattatacttcatgaatttctataataacaattttttaaaacattttttaaatatataaatcaacatattttttctctttcctgctgggattttctttccgttttgtattcatacttcttaacattctacaaatgtgacacttactatcacacccttccctaggtgtaacctagtggaagaaatgaaaattcattgacaagatatattgatgatatgatatctgataattaccaggatcgactagaggccacagaaaaaaaaaaaaaaggaaaattccattggtgtttttttcctggagaaaattttaaaggcccctgaaggtttatataacaatctrggtatacaccaaattgttgtatttatagcacctgttatcattgatggtaacaaacacagcttaatgtttttccaagagaaagagaagtgtgcagtgtttcttggttaattcacaaagctaaaagcctcaaaatctcctggaacagataaagtctatcaaagttcctttgataggaatgaggagaagtttatgcatttagcagacgtaagttgtaagttctcat

SEQ ID NO: 451275 - DNA, 601 bp, Homo sapiens
ggttggcattagacacctcccttgactcccagaagcatgtcaggagcaaaattcccagccacaatccacgcttccaatgagacacttgggacaacagaaagttatagccagagcattgcctacctttggcctgctgagaaagagaaaatgtcttaacttttgctgcagtgaaatgcacaattatgcattttttaagagaacagaacaaaccatctttttctagccagtggaatgtgatgtgtttttcagtaaagttgctgagaagcataataaattctagttttgcagaaataatatgtctaagttagaaatcaagaaattagatgctcttctcaagtccccagtcagctttctgctttgraaaattgggatgttagggaggaacaaggatccttagaacattttcttcaaggcaaatctgaaaggaatactttaggttaagaaaaacttcacaacattcagaagattccaggaatcattacatgatatcagaaaactccttttaattttactaaatcaacaacttactttatagaattattattataattaaattgattaatagatataaacagcataatatagactgtagcatataata

SEQ ID NO: 451276 - DNA, 435 bp, Homo sapiens
aaatcaacgtgcaaaaattgttagcattcctacacaccaacaacaggcaagccaagagccaaatcatgaatgaactcccattcacaattgccacaaaaaagaataaaatacccagaaatacagctaacaagggaagtgatrgacctctataaggataactacaaaccagtgctcaaagaaatcagaggacacacacacacacacacaaaaaaaaaaaacagtccatgctcgtggataggaagaatcagtattgtgaaaatggccatactgcccaaagcaatttatagattcaatgctatccccatgaaactaccattgacattcttcacagaattaaaaaaaaaactgtttcaaaattcatatggaaccaaaaaagagcctgaatagccaaggcaatcctaagtaaaaagaccaaggctgaaggcattacactac

SEQ ID NO: 451277 - DNA, 435 bp, Homo sapiens
aaatcaacgtgcaaaaattgttagcattcctacacaccaacaacaggcaagccaagagccaaatcatgaatgaactcccattcacaattgccacaaaaaagaataaaatacccagaaatacagctaacaagggaagtgatggacctctataaggataactacaaaccagtgctcaaagaaatcagaggacacacacacacacacacamaaaaaaaaaacagtccatgctcgtggataggaagaatcagtattgtgaaaatggccatactgcccaaagcaatttatagattcaatgctatccccatgaaactaccattgacattcttcacagaattaaaaaaaaaactgtttcaaaattcatatggaaccaaaaaagagcctgaatagccaaggcaatcctaagtaaaaagaccaaggctgaaggcattacactac

SEQ ID NO: 451278 - DNA, 367 bp, Homo sapiens
tcatatttaccctaaaacaaccggaatctcattgaggggtttcgcagagatgtgtgacataatcgatacacattttgataggatgttttgagaataaactctagggagacaaaaatgggagctggaagaccagttgagagtctatggcaatagctaatgccagatattatagtgcttggaattaagataragcaatgaagggtaattagtagatggttctggatatattttaaaggtagagttaactctgctggagtaaatgtagcatgtgggtgaaataaatatttttggctggaactactggtgaataaagttgccagcaattaacataaaaagttgtaagtaaaacagggtcagggaatatgat

SEQ ID NO: 451279 - DNA, 512 bp, Homo sapiens
gcaaataatcagcaagatatggtatttatggagattataggagtctccaaaggaattataattacagacagaagagaagtggtctaaagactaaatcctaaggacctccaatattgatagaaactgagaacaagttctgcaagaaaggaaggaagaaaatgaggagaacgtgaccatttaaaacccaagtaacaaaagcatttcttggtgaagggaatcataaaatgtttctaattttgcttttaggtcaagtaaaataaagacagaattcactgtcagatttaataatgggaaactcactggtgagctgaaataaataaaaagcctcacataactctgcaagtgatttatacgtttacaagttttcttttatgataagtacaaaacaatgcactagtattctgaaraatgcattttattgtattagtttactaattgctgaaataatctcgcattctagttaagctattgatgttccctctgtttgaaaagacaaaaatagtactgacttt

SEQ ID NO: 451280 - DNA, 462 bp, Homo sapiens
acaaagctatcacacacacacaaacacaatgtgtctattgggttcagagatttttagatgctcatatatttgaaaatacaagttttttcacaatgagaaaccttagcctttgaatgccctacctgtttgaatttctctctgttttttacctaattaatttaaaatggaaacagaatcaatcacttttactyaaattcagtgttttagacaggtgaggtaaatataactagaaaaagaaaatgtactatcaatagtaaaccccttggactaactactgtacaaactgaaagagcaataatgtgcaaaaccagaaaagagaaaaggacatgttggaacattagcaagagcactaaagtgattaagaagtgtcaaagagggatgctgagtaagatatctggtatttagctgtcaaggtacaactaagtgagtcaaattagccttgaataatataatgtgagtgac

SEQ ID NO: 451281 - DNA, 462 bp, Homo sapiens
acaaagctatcacacacacacaaacacaatgtgtctattgggttcagagatttttagatgctcatatatttgaaaatacaagttttttcacaatgagaaaccttagcctttgaatgccctacctgtttgaatttctctctgttttttacctaattaatttaaaatggaaacagaatcaatcacttttactcaaattcagtgttttagacaggtgaggtaaatataactagaaaaagaaaatgtactatcartagtaaaccccttggactaactactgtacaaactgaaagagcaataatgtgcaaaaccagaaaagagaaaaggacatgttggaacattagcaagagcactaaagtgattaagaagtgtcaaagagggatgctgagtaagatatctggtatttagctgtcaaggtacaactaagtgagtcaaattagccttgaataatataatgtgagtgac

SEQ ID NO: 451282 - DNA, 604 bp, Homo sapiens
ttccaactagccccatcttgggacagtttgggacagtccttcgtaggagttttcctatctctaatttggggtgaatttagctgtggattcagatacactgagtaaatacagagaatagtttctctatccaaaaaattctctgtacttcacctaccycactcactctccttcaaagccctggcaactattggtctatgactaatcttgagttaattttgtaaaagttgtaagatcttgtctagattcatttatttttggcatatggttgtccaatttttctcacatttgttttgtagagaaaactatctttctccatggaatttcctttgttcctttgtcaaagatcagttgactgcatttgcatgggtctatttctgggtactctagtttgttccattgatctatgtatcctttttttttttttttgccactactaagctgttttgactacaatagcttcataataagtcttgaagtcaagtctcatttgttctcaaatattgttcttcttcaatgttctgttggctattctgagtcctttgcctttccaagtaaactttggaatcagttggttaataccataaaattgcttcttgggaagttg

SEQ ID NO: 451283 - DNA, 582 bp, Homo sapiens
ggatgtgataagcaccaaatatgtgataggcatgcacacacacacacacacaaacacacacacacacacacatacatacacagagtcagaattccaagattggagakatcacaggtgctggggaattcacagaatggtttatatagcaggtaggacttcaatctgatattgaatatatgtagataacatcaaatatggaaagcaaagccatgtactcagccagaggtagctgcaaagacaaaagtataattgtatggattcaaatggcatattctgaggaaatgtggagcactggactacttgaagaaaatgaactgttttgagaagtaatgaaaattgattatgttacacacagcttttaatatgccatactgctttaaatactttacctgtgttagctcatttaattctagtaataaccttttgagatagacaatattattattcccagttggtaaatcagaatattagatcctagaagttcttgataaacttacacagctatcaaacaaaagagactgaattcaaccaggtattctgactccataactcatgctcataaagtaggttaaagctagttta

SEQ ID NO: 451284 - DNA, 623 bp, Homo sapiens
agataacatcaaatatggaaagcaaagccatgtactcagccagaggtagctgcaaagacaaaagtataattgtatggattcaaatggcatattctgaggaaatgtggagcactggactacttgaagaaaatgaactgttttgagaagtaatgaaaattgattatgttacacacagcttttaatatgccatactgctttaaatactttacctgtgttagctcatttaattctagtaataaccttttgagatagacaatattattattcccagttggtaaatcagaatattagatcctagaagttcttgataaacttacacagctatcaaacaaaagagaytgaattcaaccaggtattctgactccataactcatgctcataaagtaggttaaagctagtttatgcattttcataaatgcagaatctctgtaattttctctgactctgctgcttataattatggggccatagagaaatcacagccatcagttttatattcttcaaaataagaagtttaagataaataatcttaaacttttcctaaacttgaaaactctatggttccaatattttaaaaatagattttagcctacacgaagccagcaattacagaagttttttgg

SEQ ID NO: 451285 - DNA, 481 bp, Homo sapiens
gggtaactcctcactgtaggcaggtcatcaagtcgagtgttcagttctcagcagagaggagaccctggagagggtagctcctctctgcaggcaagttactccaacgtctttgcaggtctctgaagctctcagcagagagggtagctcctctctgccagcaggtcatctctgcagctctcagtgcagagggtactcctctctgcagctgatcatcccatcatctccagctcagcagagagagtatacctctctgcagtggggttgtcccattgtcatctctctgccctttcsattctctgtccatcctctaccctgctctgcggagcccagggcttttatggacctcagaagggaggaagactgtgctgattggtccatgggcggccataggctgctcagaagaagcaccactagttcacactccagtccaggggactggtagcttggcccccagccttcaggccctccctggccctaatgt

SEQ ID NO: 451286 - DNA, 535 bp, Homo sapiens
ttcatagttacaattatcttataaaatgtgcattttcattattaatttgtattagtccattctcacactgctgtaaagaaatactgaagactgggtaaattgtaaagaaaagaggtttcattggctcatggttctgcaggctagacagaaagcatggctaggtaggccttaggaaacttacaatcttgacaaaggtgaagggggaagcaggcattcttcacatggccagaggaggatagaagtgtaggaaggggtagtgctacacacttttaaacaaccagatcttgtgattaactcattcactatcatgagaacagcagyaaaggggaaatctggccccatgatccaatcatctctcacctgtccccacctccaacactgggaattacaatttgacatgagatttgggcagggatgcagacccaaactatattgtaattcaaatgctccaagtacactaaatctctttctttctcttctattaaattgtcttagtttctcatatgagggcaaaataaacttcttgggtctgtag

SEQ ID NO: 451287 - DNA, 563 bp, Homo sapiens
tttaaacatttatgctctttccagcatcacaggtgcttgggagcctgggaaatatgtttttcaaaatccttcccagtggtgttttggttgttttctcactatacttatatgagattgcattatagtaaaggttttaatttcttaaccaatctgaaaggtttayttgtaatagatcttagattttttcaaatcataaatgactgtctaccaagtttgtttataaagtccaactgcaaggcatctggcaaattgaaaggacaattgtctgatgtcagatactgttggttttccagttctgccatttcctttaaattctaaattttcttccagctctctgtgtgcgtttgcatgtcagttaatacttgaattataaaatgtggcacactttttatacaccaactctatgggaaggaactgtgaaaaggatacaaagaacgagttgtataaaagtgcccccactaacaggtatatgaaaaggtgctcaacatcacaaatcatcagggaaatgcaaataaaaacaacgagatcacttcacacttattaggatggctgttattatatat

SEQ ID NO: 451288 - DNA, 554 bp, Homo sapiens
ctgatgcaagcaaacatggtgatcttttcatttgccaagtacaccttctgtcttctggctcagaatgtcattttatttaaaataaatgagttcttatttgataagagtgaaacaaatgctcatcataaatcaaaycaatgtggaaaaaattatacttaggctgaactgtaataatttctgaggccaaatctaaggtgccagaaccaccagaacttttcaacacacagggtgagtcactttttttaaaaaatgagagttttggaatctaacaaggagtacagcagtataaaatttgaaaagaacttcagagaaggatgtagatgttttaaacagccaagggcagccccattagagcagtttaacaaagatatgctaagaagataaagaaagtattgaaagtggaatgagactctttcagtcaaatgcacaaaacactcaattagaagttcctactgagagacaagcccacactgaggggatacagcctacataggtctaagcagtgtctcctgtctaagctgtcactagaaaaagacacagaaagagtaaaaagt

SEQ ID NO: 451289 - DNA, 470 bp, Homo sapiens
tccacccaaaaccaacagaagatatattcttttcattgccatatggcatatagtctgaaattgatcacatacttagaagtaaaaccttccttagcaaatgcaaaagaactgaaatcataacaaacaatctctcgaaccacagcacaatcaaattagaaatcaagactaagaaatacattcaaaaccatacaattacctgaaaattgaataacctgctcctaaatgaccttagaataaatactgaaattaaggaggaaatcaagaagttctccaaaactaatgagaacaaagataaaacacaccagaatctctgcgacacagctaaggcactgttaagaaggaaatttatagcactaaatattcacagtaaaaacttagaaagatgtcaagttaacmtaacatcacaactaaaagaagtagagaaccaagagcaaacaaattccaaagctagaaggcaagaaataaccaaa

SEQ ID NO: 451290 - DNA, 443 bp, Homo sapiens
gacatttacttatgtaacaaacgtgcacatcctgcatgtgtatcctggaacttaatataaaataaaatatttttttaaaaagaaacacttatacactgttggtgggagtgtagataatttgacaaaattcagcctgttttttactttgtaaaatataaatagatgttaaaaaataaaatgtttaataatatattcttcaatgtaattatttaaggtctatataaaaacagctggtagaaaatattctaaaaaatctaaagaaaaaatattttagttaaacttaggagataaacaagtatgcyaacaaacaatattgttgtcaacattgtcttggagattccagtgagtacactaaggtaaaacatggaattactatcacaaacattgactgcaaatagttaaccatctttggaatgaccttagatggtatatgcagaaaacac

SEQ ID NO: 451291 - DNA, 499 bp, Homo sapiens
atactaaatacaaatgaaaacacacctggatatcaaaatagaattgctgataaccaaagaaaaatagtgcttcaggcttattctctcacttttctctttatgatattcgaattaaatgtgtattaggtctttcattatttcctttatgtatatctaatgatacatatatatcttcctatcctttagtctgaacattttgttctgacatatttaccagttcctaaattcctttttaaatatgaattaacttatcttgaaaccaatacctgatgattccagtggcttgatatcctgcatatttattatgtttacttttttttttggtgtaatgtttcctttctgtatacctgattaattttgcttgtktgcttgatattgtgaatgaaattttttagaaaaattgaaggctttaaatatctttttcgttcagtgagcatttacattttcttctaggaggaagcctgttttgggacaatcaccttattttattcatgagtga

SEQ ID NO: 451292 - DNA, 469 bp, Homo sapiens
acccaggacagcccttacctcacagtggggaggagtgagcaacaaagacaacaacaacaaaaaacagctcatcatcttgttattaattgcaactctggtgccttggatatgcctgattgaagacaagggacttgaaggccagmctataaacatgctatattctcatggaaaacccaatactttaatggctgtatttttgtggtttattattttattgatctcaaaggaaaacctgcagcaaaaaaagttggtgcattttcttctattatggaaaatttctccagttgcagaaataaagtcccaacctccccagtcacccggtttcagattgtacacattgattccttaacaaaaaagcaccattatatggtacaataaaagtgaatttttaaagatttatatttttgtggttctttttaaaatccaccagaaaaattctggtagaaaataatcagtggggaatgaatca

SEQ ID NO: 451293 - DNA, 469 bp, Homo sapiens
acccaggacagcccttacctcacagtggggaggagtgagcaacaaagacaacaacaacaaaaaacagctcatcatcttgttattaattgcaactctggtgccttggatatgcctgattgaagacaagggacttgaaggccagcctataaacatgctatattctcatggaaaacccaatactttaatggctgtatttttgtggtttattattttattgatctcaaaggaaaacctgcagcaaaaaaagttggtgcattttmttctattatggaaaatttctccagttgcagaaataaagtcccaacctccccagtcacccggtttcagattgtacacattgattccttaacaaaaaagcaccattatatggtacaataaaagtgaatttttaaagatttatatttttgtggttctttttaaaatccaccagaaaaattctggtagaaaataatcagtggggaatgaatca

SEQ ID NO: 451294 - DNA, 506 bp, Homo sapiens
agggagtgggagacccaggaaggaagggcargttttacatggaggaaaagaatgaaacaataagggtattctggaatttgaaaatagtgtgagtgggaggtagatctgtagtgccaccaactcagccctagttcatacttagtacaaattgcttgtgaaaaattgtcccctacctatggaattcaaagataaagaaattgagataaacacaaaacaaacatgcaaatacattttttaatcatcataaagcaagagaaagaaatagaaagcacatcaagataaaatgaaggcagtggcctcggaatttttttttaataagtgaaaaatattctagcattaaggttttttcataaagaaataatgtttaaaagcataaagatattcgttatgagtctgaacattatttttaaaacatttttaacaactaacatatcccatggcgtgcaaggaattagagggtgttgagacagaaaagtgtcctgtcactaagtctagggttttctaca

SEQ ID NO: 451295 - DNA, 506 bp, Homo sapiens
agggagtgggagacccaggaaggaagggcaagttttacatggaggaaaagaatgaaacaataagggtattctggaatttgaaaatagtgtgagtgggaggtagatctgtagtgccaccaactcagccctagttcatacttagtacaaattgcttgtgaaaaattgtcccctacctatggaattcaaagataaagaaattgagataaacacaaaacaaacatgcaaatacattttttaatcatcataaagcaagagaaagaaatagaaagcacatcaagataaaatgaaggcagtggcctyggaatttttttttaataagtgaaaaatattctagcattaaggttttttcataaagaaataatgtttaaaagcataaagatattcgttatgagtctgaacattatttttaaaacatttttaacaactaacatatcccatggcgtgcaaggaattagagggtgttgagacagaaaagtgtcctgtcactaagtctagggttttctaca

SEQ ID NO: 451296 - DNA, 602 bp, Homo sapiens
attttcttaaagatagtacattttgcctctgaaatacagaaaagctacaacttcaaagtaagtcttacaataaatacatttacatttacaaaaatctaaccacgtagtcctcatatatctcatttttttctttgcacagtaagaaaatgttactctttggcatttaggaatcagtggcatacattgatttctaaacttatttgacatgcaagatcttataacatttcgagggatctgtattccatgggacacattttggaaaacatttctcttgacaatgtttcattaaattttgtgatcaattactgttacaaagacactgaaaacaagatatttatcttgagaataatacaactgggagaaaaaagatacacggaataaaatattttttaatacatatggtaagatagatgaaaatcaataargggaatttaaaagttacatatgtacagttattcatttagactaaaaacaaaacaaaccacaagaagatgcgaattcctgatttaaaaagtttcatgtaaagatattttctataaaaagtagaaataaataatataacatattatgaggctcaaccaggattcagtacaccactaatt

SEQ ID NO: 451297 - DNA, 513 bp, Homo sapiens
ataaaacaagacgggaaggagagaaatgttaagcaaaaaagaaaataatgcctggaaaattgtcatcttgcctttaaatctctcaaattactattaagttttataatttcaattatgactgaaatgtcataaacctaagttacaatattattttaaagtatattgtatgactataacatgggaaattataaaatggccttattacataagacaaacatttttttcaaatgaatcatgaatagatatgtagagatttggaactctataatttcaaatgtcaagttgaagaagcaagagttgaagaaggatggggcacttttcgtttcattattgtatattaattaaggctttcaaaasacagagaaataatggtcttacccttaatttgtaaaaataaaaaatttaattgtgatataaaatatagtaaactgcacaaagtataatggatttgctcagtgaatttttatgtatgtacactcaagagtaacctgcaataagatcaatttataaaat

SEQ ID NO: 451298 - DNA, 625 bp, Homo sapiens
taaatataataactgggtgaatcaatagaaattatccagtgtgataaacattaaagtgataaaaataaaaaatgaatacagcctctcgaactggttggtaatattcagtggtagagaacgtgtacatttggagtaaatatagagaaaagacggtgatgtgtctgctaaaatatttccawgtagaatttctaaaacaaaatttatctccggcttgtcgtgactattcttaattatcatataaagagtaagagatttcagcttattcttttgttcttattttgtgtcttttctgccttaaaaagtttacctaacataatatcacaattgttactataattcttacatgtatagcatttacatgggtaaatctatgacagatttcaatttttttggcataagacttaaaattcattttttcttgtttagtactttggaatccttgttcaaaataaattgattataaaagctgagttcaatttggattcaaatcagttcttttggtatatatttctacgtttagttgaataccacagtacagatcctatacatattaaaaggacaataagggaatgtacatgacaatacatttgaaaaattaaatgaagtgtacaagtattttaacaaa

SEQ ID NO: 451299 - DNA, 625 bp, Homo sapiens
taaatataataactgggtgaatcaatagaaattatccagtgtgataaacattaaagtgataaaaataaaaaatgaatacagcctctcgaactggttggtaatattcagtggtagagaacgtgtacatttggagtaaatatagagaaaagacggtgatgtgtctgctaaaatatttccatgtagaatttctaaaacaaaatttatctccggcttgtcgtgactattcttaattatcatataaagagtaagagatttcagcttattcttttgttcttattttgtgtcttttctgccttaaaaagtttacctaacataatatcacaattgttactataattcttacrtgtatagcatttacatgggtaaatctatgacagatttcaatttttttggcataagacttaaaattcattttttcttgtttagtactttggaatccttgttcaaaataaattgattataaaagctgagttcaatttggattcaaatcagttcttttggtatatatttctacgtttagttgaataccacagtacagatcctatacatattaaaaggacaataagggaatgtacatgacaatacatttgaaaaattaaatgaagtgtacaagtattttaacaaa

SEQ ID NO: 451300 - DNA, 523 bp, Homo sapiens
gtctattatttccatctttatattcatgtgtacccagtgtttatctcccatatgtaagagagaacatgtggtatttggttttctgtttcttaatttacataggataatagcctccagctccatccatgttactacaaaggatatagttttattcttttttattgctgtgtaatattccaaggtgtttacataccacattttctttatccagtcaaccactgatggatacttaggttgactccctgacawtggtattgtgaatagtgctgcaataagcatataagtataggtgtcttttgttctagtttcttttcttttgggtaaatacccagtgggactgctgggttgaacggtagttctatttttagttttttgagaaatcatcaaacagttttgtgtggaagtttaactaattgacattcccatcaacaatgcagaagctttcctttttctctgcatctatgctaacatctgttgtttatttactttttaatagaaggctttctgatggcagtaaaatgat

SEQ ID NO: 451301 - DNA, 523 bp, Homo sapiens
gtctattatttccatctttatattcatgtgtacccagtgtttatctcccatatgtaagagagaacatgtggtatttggttttctgtttcttaatttacataggataatagcctccagctccatccatgttactacaaaggatatagttttattcttttttattgctgtgtaatattccaaggtgtttacataccacattttctttatccagtcaaccactgatggatacttaggttgactccctgacaatggtattgtgaatagtgctgcaataagcatataagtataggtgtcttttgttctagtttcttttcttttgggtaaatayccagtgggactgctgggttgaacggtagttctatttttagttttttgagaaatcatcaaacagttttgtgtggaagtttaactaattgacattcccatcaacaatgcagaagctttcctttttctctgcatctatgctaacatctgttgtttatttactttttaatagaaggctttctgatggcagtaaaatgat

SEQ ID NO: 451302 - DNA, 586 bp, Homo sapiens
aagcttcatccttagaaaatatgatggtaggtgaataatgaatagactgatgtttatgataacttcatatgagaaattaaaccaacagataawcaggaaaacaaaacccacttatttctatgcaacatgatgttccagagaggtgcttacatcaggacaagcaggataggaaatgatatggagcactctagcagccagcttaggtttgtaattggaacacagagaagaacttagcccatttctgcttggatgacatcctgagatcaatactctttcactgccttttatctgggacaaagaaaatagtttctctagataatgagaatattaatctaaaacattctgattaaattattgttgaatagagtctgatgggaaaaatcactcttccctggtttaattgcaccaggataatttgaaaaaaaaaccaaagcaataacattaaaaaaagatcatggatcattatagaacagtgtctatcaggcctgtatcttctctacctgcattcatttccaacatctggtagtaggcagaaggtctacataatgcctgcagtagagggagtatgtgggtgccccatgcgtgc

SEQ ID NO: 451303 - DNA, 586 bp, Homo sapiens
aagcttcatccttagaaaatatgatggtaggtgaataatgaatagactgatgtttatgataacttcatatgagaaattaaaccaacagataatcaggaaaacaaaacccacttatttctatgcaacatgatgttccagagaggtgcttacrtcaggacaagcaggataggaaatgatatggagcactctagcagccagcttaggtttgtaattggaacacagagaagaacttagcccatttctgcttggatgacatcctgagatcaatactctttcactgccttttatctgggacaaagaaaatagtttctctagataatgagaatattaatctaaaacattctgattaaattattgttgaatagagtctgatgggaaaaatcactcttccctggtttaattgcaccaggataatttgaaaaaaaaaccaaagcaataacattaaaaaaagatcatggatcattatagaacagtgtctatcaggcctgtatcttctctacctgcattcatttccaacatctggtagtaggcagaaggtctacataatgcctgcagtagagggagtatgtgggtgccccatgcgtgc

SEQ ID NO: 451304 - DNA, 642 bp, Homo sapiens
tagatatttatcataatagtaataattttcccattaagacctactttcttcctgggctcatggagcacttggctgrgcaataaactgttcattcccctttgcacttactaatttcatgcgtctaaatttgctgtgtgagcataagtggtgggtccaatatctatctaacttgcctaacagtaaattgattagtctatatctcctctttcccttcttttgtgttaactggaatggcaatttaacagaaatctttgtttgtttttcatttttgtttgtttgttttgttttgacaattagacaggtctaatgacaaaaggtagatggagcaacaagaaggaagaagccaggatccctgaatcctgcagattacagcaggcttctgggctagaggagcagagcttttaactgacagagtcattcttaggttttttggtcgttggtggtttttcctcagcccactccattttagttaagtttgatagggtgtttagtctttccataactaaaacaaaattataccacaatttttattaattagtagaatcaatctcatttgaagtcaatataaatttaagagaattattgccattgaaaacacaaataaaaatatgagctattgaaactgaaaagtatgtacagatt

SEQ ID NO: 451305 - DNA, 642 bp, Homo sapiens
tagatatttatcataatagtaataattttcccattaagacctactttcttcctgggctcatggagcacttggctgagcaataaactgttcattcccctttgcacttactaatttcatgygtctaaatttgctgtgtgagcataagtggtgggtccaatatctatctaacttgcctaacagtaaattgattagtctatatctcctctttcccttcttttgtgttaactggaatggcaatttaacagaaatctttgtttgtttttcatttttgtttgtttgttttgttttgacaattagacaggtctaatgacaaaaggtagatggagcaacaagaaggaagaagccaggatccctgaatcctgcagattacagcaggcttctgggctagaggagcagagcttttaactgacagagtcattcttaggttttttggtcgttggtggtttttcctcagcccactccattttagttaagtttgatagggtgtttagtctttccataactaaaacaaaattataccacaatttttattaattagtagaatcaatctcatttgaagtcaatataaatttaagagaattattgccattgaaaacacaaataaaaatatgagctattgaaactgaaaagtatgtacagatt

SEQ ID NO: 451306 - DNA, 642 bp, Homo sapiens
tagatatttatcataatagtaataattttcccattaagacctactttcttcctgggctcatggagcacttggctgagcaataaactgttcattcccctttgcacttactaatttcatgcgtctaaatttgctgtgtgagcataagtggtgggtccaatatcyatctaacttgcctaacagtaaattgattagtctatatctcctctttcccttcttttgtgttaactggaatggcaatttaacagaaatctttgtttgtttttcatttttgtttgtttgttttgttttgacaattagacaggtctaatgacaaaaggtagatggagcaacaagaaggaagaagccaggatccctgaatcctgcagattacagcaggcttctgggctagaggagcagagcttttaactgacagagtcattcttaggttttttggtcgttggtggtttttcctcagcccactccattttagttaagtttgatagggtgtttagtctttccataactaaaacaaaattataccacaatttttattaattagtagaatcaatctcatttgaagtcaatataaatttaagagaattattgccattgaaaacacaaataaaaatatgagctattgaaactgaaaagtatgtacagatt

SEQ ID NO: 451307 - DNA, 555 bp, Homo sapiens
ctaaatttctgaatagcttatgatatgtttcataattttgaattacttttttctttctatataactgacccaaatcttatttgaacatctcttcttttatcactttcaattatttgtatatgtctatgttctatgcattttctcatacaattctacacacttttattcaagttttatcaatatgtatcaatataattcttttttctatcaatacattttaatcaaattattgtcatgttgttttcttaaattcacacattaaggggagagatttactaattatatttttgtagctccagctagcactattccttctagatactgcttaatttaaacaacattgatttacaaggatttgtattcctctttaatatgtyctgtacagttgctatggttgccaatttttgcagaaaattacttctctctatgttgcatctccagggctatatgaattccaaatctcactgtttagaatactctctagtctttgtgtttttatacttgagtctgttttatgaaacagagaaagaaaagcttccaatttgtataaaatct

SEQ ID NO: 451308 - DNA, 555 bp, Homo sapiens
ctaaatttctgaatagcttatgatatgtttcataattttgaattacttttttctttctatataactgacccaaatcttatttgaacatctcttcttttatcactttcaattatttgtatatgtctatgttctatgcattttctcatacaattctacacacttttattcaagttttatcaatatgtatcaatataattcttttttctatcaatacattttaatcaaattattgtcatgttgttttcttaaattcacacattaaggggagagatttactaattatatttttgtagctccagctagcactattccttctagatactgcttaatttaaacaacattgatttacaaggatttgtattcctctttaatatgttctgtacagttgctatggttgccaatttttgcagaaaattacttctmtctatgttgcatctccagggctatatgaattccaaatctcactgtttagaatactctctagtctttgtgtttttatacttgagtctgttttatgaaacagagaaagaaaagcttccaatttgtataaaatct

SEQ ID NO: 451309 - DNA, 623 bp, Homo sapiens
ataagtcattgtacatgtgtttggtagcataagtgattaatatcttaaagatatatatccaagacacttctctacactgtccaaagcaaatctaaatctattaaatttattttggattatagttgtgggggcatgtgcgtgtacacacatgcatgcacatgcatgtctcagatattcttagggtagttctcttgacttttcaaggcaataacttcttatttcctttagttttctaaaacattaaataagaattgccagtacggtgagaaatgtaaaacatgtaactttctctttctgaatgctgttgagaaacaaaactattctcttctgttgaacacagaaaaaattagtgcgtgggaaaggaagaactgatatgcccaaggttggatttattagaggaaattcacttgggttgtgaggatttcaagggtggtaaaccgttttatgcagatccataggaaagtcctgatcaaaattactttgaccttttaccaacatcgtgatattttctaaggtgtaygatgaggttaccaaaagaccagaaaaaatacattcttaatatctctttagtccatctaccacttattcctatgtcaaagataaatctggtatggtatatgtac

SEQ ID NO: 451310 - DNA, 409 bp, Homo sapiens
ataaattcagcttcgcatagaaaattggcaaatagttaacattttaaaagttcttgaacttattatatatcaagttaatgcaaattttaaaatgagataccacaatagtracaagtaatggctgtgatgaagagtaatgtgaactctcattcatttcttttgtaatgtcaattgataccactaccttagaaatcattttggtagtaaaagacatgcataagaatatttagagtattattactcataaagctcaaaatgtaaagagactatataaacatattttgatatatttaataaacggaatattctacagccatgtaaattaatgagctgttggtatatgaagcaacatcatgaattattctcacattgttaaaataattctgatataatatgcttacactttgaa

SEQ ID NO: 451311 - DNA, 527 bp, Homo sapiens
catttcctagtttttctttcaggttttacaaaacattaagcatacatcaggatgtgttgcctgaaacctgctttatattgtcttggtgtgatttcagaagatttttctattttgttatattggagaatttgacatttaccatcattttataggtatttaacatgtccctggggctgagaatatagaatttttaaatttcactgtgaaaccagagactggttgcaattttaactaccttagatttgggctatattttagctatccactgtattcacatgccacctacctgtcaaatctaaaagtgattatttaaaattattaatagtttcagttctgagctttataggtaaaatattactttttctgctagcaacctcaccaccaaaatgttccacacatttgctaacaattttttctaataacactaatcatgtaaatgactatatgttgaatctgaattatgtatttattcactcatttatttatcaatrtatcttgtttctctattgagcaaattaacaaaattc

SEQ ID NO: 451312 - DNA, 289 bp, Homo sapiens
tactctcaaatacagatttgtgcyaactttagagattgtaacattgtaataaaggaaaatgtacaggactcatgaagagcagaaaatttcatgaatatcaagcaaaaaaagagttaattaagtggactgaactcagaaagctgaagcaaatctttttgacttttgcttggaatattgctgatctttgttttgtttttcagagtcaaggaaacttactttgaactatttacagactttaataattgagtaagatatactccctatgatcaaaatttgaagcatgtttgtt

SEQ ID NO: 451313 - DNA, 548 bp, Homo sapiens
ctctcataagtttttccctcagtaaccaagggtgactcgttctaggaccccccatggataccaaaattttcagatgttcaagtccctgatatgaaatgacatagtatttgcatataacctaygcacatcctcctttatactttaagttatctctacagtacctataatacctaatacaacataaatgctatgtacatagttgccacactgtattgtttagagaacgatggcaaggaaaaaagtctgcacaagttcactacagatgctttttttaaaaaaaaattggtgatctgtagttggttaaattcacgcatgtggatcccagggatagggaaggccaattgtgttatcacagtatcacgaaaattctactagatgtaaagttcaggtcatctaatccagcccactttttaaaaaatgaaaaatttgatatgtccattgaaaaaatcctatgaactaattgctccactttataataaaacaataattaacagtcagtaaccactttcggtatcagagggtgttcttatttgtaagcatttcaagca

SEQ ID NO: 451314 - DNA, 548 bp, Homo sapiens
ctctcataagtttttccctcagtaaccaagggtgactcgttctaggaccccccatggataccaaaattttcagatgttcaagtccctgatatgaaatgacatagtatttgcatataacctacgcacatcctcctttatactttaagttatctctacagtacctataatacctaatacaacataaatgctatgtacatagttgccacactgtattgtttagagaacgatggcaaggaaaaaagtctgcacaagttcastacagatgctttttttaaaaaaaaattggtgatctgtagttggttaaattcacgcatgtggatcccagggatagggaaggccaattgtgttatcacagtatcacgaaaattctactagatgtaaagttcaggtcatctaatccagcccactttttaaaaaatgaaaaatttgatatgtccattgaaaaaatcctatgaactaattgctccactttataataaaacaataattaacagtcagtaaccactttcggtatcagagggtgttcttatttgtaagcatttcaagca

SEQ ID NO: 451315 - DNA, 473 bp, Homo sapiens
ctacttagctatttgttttaaaaaacaaaaataaatgaagtaaatgtctatctacttcatatcgttcatcaaatttcaataatttmtttccattactttttctcatttatgagcactgccttaaaatcaattaaaaagacttcctttattctcattttgcaatgctaagtgttcattgtgaatgctaacagtgtatgatattgacaaatatataagcaagctgtgcatttgtatatgctgatataatgaatttctagagttttaattatcttcatatcaaaattgacctgctagaatatgaaaaatattaacagctcactaaaagcaaatatgatattacttaaaataatactttattcctctaaaaggacatataaacatctagacatagacatggtcttcatcacattcgtctgctatgtagaaaaataatgtaaaaataacattaagtattcaattatttacaatgtttt

SEQ ID NO: 451316 - DNA, 507 bp, Homo sapiens
tctcttttaatctgcaaaaatttagtctttcattgactttacctaccttaatctttttgaaaaagcacagggcrttattttgcaaaatgttccccaatgtggagcagtctagcatttcctcatgattatattacagttatgtattttttgacaagcatgtgatagaagtgatgctgtattctgtctagtggattatattaagaaggctttgatattggtttgtctcattattagatattaactttggttacttgaatttggtagtttatgccagtattctaacctgtagagttacactttctcctcagtgtaactaacattatttgcggagtgatactttataaacatctgtatgttattatgcatcaaactttgttattatgcatcactcatttcagcatccattgctaagtattgtctatattttagaaatgctgatctttaaactttattgtttattttacattattaattgacattaaattataaaaagttctttcttaaaat

SEQ ID NO: 451317 - DNA, 488 bp, Homo sapiens
gtattgtagttacaaattaatttttatttttaaatttatttttaagagacagagtctctctctgtcacctaggttrgaatgatcatagctcactgaagtcttcaacttgtgggctcaagtgacattgctgcctcagcctgccaagtggctgggactacaggtgcacacaaccacacctggatattttatttattttttattttctttagagacagggtttcgctatattgtccaggctagtcttgaacacctggcttcaaacgatcctcctccctcagcctcccaaagtgctgggattacaggtgtgggccactgtgcctggaccaaaataaattaaataatataaatgtaacagagaaagttatttttgtatttttttaaaaaaagctagtcctttgagacacacaaaaaattgacaaactagattaaccaaggaaaaaagagagaaaacataaatgactggaaagagaaataaaagacaggccatt

SEQ ID NO: 451318 - DNA, 488 bp, Homo sapiens
gtattgtagttacaaattaatttttatttttaaatttatttttaagagacagagtctctctctgtcacctaggttggaatgatcatagctcactgaagtcttcaacttgtgggctcaagtgacattgctgcctcagcctgccaagtggctgggactacaggtgcacacaaccacacctggatattttatttattttttattttctttagagacagggtttcrctatattgtccaggctagtcttgaacacctggcttcaaacgatcctcctccctcagcctcccaaagtgctgggattacaggtgtgggccactgtgcctggaccaaaataaattaaataatataaatgtaacagagaaagttatttttgtatttttttaaaaaaagctagtcctttgagacacacaaaaaattgacaaactagattaaccaaggaaaaaagagagaaaacataaatgactggaaagagaaataaaagacaggccatt

SEQ ID NO: 451319 - DNA, 488 bp, Homo sapiens
gtattgtagttacaaattaatttttatttttaaatttatttttaagagacagagtctctctctgtcacctaggttggaatgatcatagctcactgaagtcttcaacttgtgggctcaagtgacattgctgcctcagcctgccaagtggctgggactacaggtgcacacaaccacacctggatattttatttattttttattttctttagagacagggtttcgctatattgyccaggctagtcttgaacacctggcttcaaacgatcctcctccctcagcctcccaaagtgctgggattacaggtgtgggccactgtgcctggaccaaaataaattaaataatataaatgtaacagagaaagttatttttgtatttttttaaaaaaagctagtcctttgagacacacaaaaaattgacaaactagattaaccaaggaaaaaagagagaaaacataaatgactggaaagagaaataaaagacaggccatt

SEQ ID NO: 451320 - DNA, 488 bp, Homo sapiens
gtattgtagttacaaattaatttttatttttaaatttatttttaagagacagagtctctctctgtcacctaggttggaatgatcatagctcactgaagtcttcaacttgtgggctcaagtgacattgctgcctcagcctgccaagtggctgggactacaggtgcacacaaccacacctggatattttatttattttttattttctttagagacagggtttcgctatattgtccaggctagtcttgaacacctggcttcaaacgatcctcctccctcagcctcccaaagtgctgggattacaggtgtgggccactgtgcctggaccaaaataaattaaataatataaatgtaacagagaaagttatttttgtatttttttaaaaaaagctagtcctttgagacacacaaaaaattgacaaactagattaaccaaggaaaaaagagagraaacataaatgactggaaagagaaataaaagacaggccatt

SEQ ID NO: 451321 - DNA, 536 bp, Homo sapiens
ttgacaatcaatgtgctcacagatagttgaaataatcttttttttctcccttagagcataatagacacttcttgaaactacacaaagattttcaagccatttgacttaaaagctacaacctaagaagtygtagctgatctatttggaaacaaatcacagtaatttcagtatttacgtggaaattgctggattactgcatatgagcatttttaacatgactgtatttatgtatagctatgagaaaagggaataaaaaatagaggaaacagaaagcaaggtggttattacacaaccccggttgtccaacaatcaccattcaagtgtttgcgagaatggctatcattgggctggctacaatttgttaccattttccttgtcttccttttcatttactcttttattttctcatcgatatactcaaaatttagattctttaaaaaacactacttcattctcctgccaatattttttgttatattcatttacatttttgatgagttgctctgaataaatgcttgctccttattctgtgttta

SEQ ID NO: 451322 - DNA, 617 bp, Homo sapiens
tgtcttgaaaaggcatgaagaaagcttaaattcatattgctaagtgaaagaaaccaatctgaaagtgctatctgctgtatgatttcaaatgtgtcacattctgaaaaagacaacattgtgggagtagtgaaaattaatcagtgattttaacagatttggggagaaacagggcgagatgaatgactggagcacagggaatttgtaaggctgtgaaactattgtatatgatactgatatatacatttgtcaaaacccatagaatgtattgtagaaagaatgmgtcataatgttaccatctactttagttcatgatattgtaccaatatcaacttaccaattgtaacaaatataccactctaatgcaaaatattaagaataaggttaactgggtgtgggaggcatggagatgacagagtatagacaaaactctttgtattttccatttactttggtaaaatttaaactgctaaaacatctcaatttcttaacaatgaatcttcagaatgctacccaaagttcttctaattagaactagatgagtatggataatatttaatgttcttttctgttaggtaaaataatatcttcacaaggatagatatattattatattactt

SEQ ID NO: 451323 - DNA, 562 bp, Homo sapiens
gaaattttaatattacctctatcaatgaaggaaaaatctagacagaaaaatgtatttttatttgcaaagttttgcaggaatgttcaaaatactatgaaaacaaaaaaaaaatcttaaaactttaaaaggaatgaaaaacactgtaatgaatgaacatataaatattttcatatttataattatttcaagggcagttgattgatagagcaaaaataatagcagtgcaatgtaggatttataacttttagaagtaaaacatatgacagcaattatacaaagcatgcgtaggagtgaaaggaattacactatggtaagcttcctacaaatttgaaaagtgatatactatttagtaaaggattactatgagaagttcaggatacatattataatatccagatccaccaaaatttctaatttaaaaattcrttagaagatattatagagaattccaaaaatattcaattaatctcaaagacaatgggaaaaagaggaagaacaaaaacaaaaccataagaataaaatagaaaacaaatgcaacatggtagacataggttttaaggtt

SEQ ID NO: 451324 - DNA, 602 bp, Homo sapiens
ctcttttctcatggacaatgacaacaaagtaccttcattcaaagctataactttgctctggcctttatcacttttccagctctgctttatgtgcaagggycttcattatgctgacccacagcactggtgatctaaagatgaaagtatcatacataaaaatttaaagcccccccacctcattgaaacgtctgagctgcaggtttctgaggcatgttaacatagctccttcaaagtgaataacaaattgatttgtcctgagcccagtatcaataagaaagtgttacaagacaagtctctgtattttgagtcaacatgtaccgaatttgcatgtattgctctagttcattcatataatgaccattaatagtctcagcataaagagatacctagagcaagaaagtgttctccagcttttctgggatgcagtgctaacagagttttaatttagcctggaaccaactgtgcttgaagtgtctattgcagacggtatgctttatgtaaccttaggcacacactaatagaagaaacatagagtaggttctgatagttttagagcaaagcaaacaatatcatcttagaaaatgaatatttccttttaatta

SEQ ID NO: 451325 - DNA, 602 bp, Homo sapiens
ctcttttctcatggacaatgacaacaaagtaccttcattcaaagctataactttgctctggcctttatcacttttccagctctgctttatgtgcaagggtcttcattatgctgacccacagcactggtgatctaaagatgaaagtatcatacataaaaatttaaagcccccccacctcattgaaacgtctgagctgcaggtttctgaggcatgttaacatagctccttcaaagtgaataacaaattgatttgtcctgagcccagtatcaataagaaagtgttacaagacaagtctctgtattttgagtcaacatgtaccgaatttgcatgtattgctctagttcattcatataatgacmattaatagtctcagcataaagagatacctagagcaagaaagtgttctccagcttttctgggatgcagtgctaacagagttttaatttagcctggaaccaactgtgcttgaagtgtctattgcagacggtatgctttatgtaaccttaggcacacactaatagaagaaacatagagtaggttctgatagttttagagcaaagcaaacaatatcatcttagaaaatgaatatttccttttaatta

SEQ ID NO: 451326 - DNA, 399 bp, Homo sapiens
acatctgaattgactcaattggaaattttatcttccttggtcagctatcacatagtacttaaattctacctttcaaaaacacttattatattattctcatgcgtgttagtgttcttattttattgagatggtgagcactgctcctaatagaatctcctacataaacgtagtcatattagttcagcataatgatacccaatactgtatcaaaatatgtctaatttcatatatatgaattccmaattcagtaagtaatgttaataagctttcttttaatatcctaaattgtttaccaccaattagatgatgaaataagttttcaaataaaactacattttttaggaaggggagaaagagaaatccaaatgttctccccaaaatgcctatctcgtcaataaa

SEQ ID NO: 451327 - DNA, 384 bp, Homo sapiens
ttttagatgtgctcattaatttgcaacccattctgctcaggaattttagaatagctcttgatatttagtgaatggtgaagttatgtaagaaaaaaaatgctgatcaaaatcgaccctactagaatttatttttattgctctctcttctgccacttgctatagatgctgagcttggaacaggcacatcatcttgagtatggaaaaatggctgctaaagcagacatattccaggattattttwaattttattgtctttgtgaaggatgtacaaaatatgaagctttaacatcaaataagtcacttattatattaatattgaataataattttcaaaggaccataagatattgatgacatcctcctgttaaaaaggcttttgtgatt

SEQ ID NO: 451328 - DNA, 561 bp, Homo sapiens
tactactttcactcaaatgcatgatattgcttttactgcacactctggcatttttgytgtcgttgttgtccctatactggatatctacaggaactagtccagacattctgacacatctgcaaacctgaatgtggaaagagttaacagcccatgaggatctcatgttttaatctcttgccacttttaagttcttgaataaatgatcatttattttaagcttattttaaatggaaaacaatctgtatttcaattcatattcttaactcctgcttaatttattacgattgtcaaactcataatctagttatttatcttatctgtattcccaccagacctcatatggaaataaactccaaggtggcaagatattagtctttttgttaatttttgtctccttactgcacagaaaatttcctggtatataaatattcaataactatttgttgaatgaattaatagaataatattgaaatggcaaacacaggaggcataagtatttgaatgtgaagacaggggatatgaatgagataaaatgttgagtttttggcctgatgtaagatg

SEQ ID NO: 451329 - DNA, 561 bp, Homo sapiens
tactactttcactcaaatgcatgatattgcttttactgcacactctggcatttttgttgtcgttgttgtccctatactggatatctacaggaactagtccagacattctgacacatctgcaaacctgaatgtggaaagagttaacagcccatgaggatctcatgttttaatctcttgccacttttaagttcttgaataaatgatcatttattttaagcttattttaaatggaaaacaatctgtatttcaattcatattcttaactcctgcttaatttattacgattgtcaaactcataatctagttatttatcttatctgtattcccaccagacctcatatggaaataaactccaaggtggcaagatatyagtctttttgttaatttttgtctccttactgcacagaaaatttcctggtatataaatattcaataactatttgttgaatgaattaatagaataatattgaaatggcaaacacaggaggcataagtatttgaatgtgaagacaggggatatgaatgagataaaatgttgagtttttggcctgatgtaagatg

SEQ ID NO: 451330 - DNA, 561 bp, Homo sapiens
tactactttcactcaaatgcatgatattgcttttactgcacactctggcatttttgttgtcgttgttgtccctatactggatatctacaggaactagtccagacattctgacacatctgcaaacctgaatgtggaaagagttaacagcccatgaggatctcatgttttaatctcttgccacttttaagttcttgaataaatgatcatttattttaagcttattttaaatggaaaacaatctgtatttcaattcatattcttaactcctgcttaatttattacgattgtcaaactcataatctagttatttatcttatctgtattcccaccagacctcatatggaaataaactccaaggtggcaagatattagtctttttgttaatttttgtctccttactgcacagaaaatttcctggtatataaatattcaataactatttgttgaatgaattaatagaataatattgaaatggcaaacacaggaggcataagtatttgaatgygaagacaggggatatgaatgagataaaatgttgagtttttggcctgatgtaagatg

SEQ ID NO: 451331 - DNA, 621 bp, Homo sapiens
caaaagctaagaagcagcatcaccaatgctgtttgtcaaaaaagatagattgtgaacagtcaagtattttgtaaaatgttcaccaatrgggaattttctgatatttttcctaaaattagacttgggttatgggttttttggaggaacagcattgaggtcaaacactagtctcatcaccatcctatcaaatgtacgttatgtaaacattacttgtcactgttgacgttaaccctgatctcctatttgaaatagtgagtgtcatatttcactacaataagctatgtttttccccttttccaaacaatactctttggaagaaagtcattatgtgtagcccacagttaagagtaggaagttatgctccacttctttgaaaatagaatgtcctcataaattacttggaattcttcatggatgatttctatattctgcttcatttattttttattctatcatttatttatatgagtatggacttatggatatttattttatacttttggtacaatctaatacttctatatttattttgctgctcacatttttccaccattgaccatgggtagcacttttacttagcccttacatcccttcgacatgcactcatcattgttttgtagt

SEQ ID NO: 451332 - DNA, 553 bp, Homo sapiens
acataaaacttttgcttaaaatagccagagcctatttctgttactgtgaccaagaatacaaatttttatttttattattgttttattaacattatctttattagtcattgcttttcagcctttatataaggggaagaagaaaaaaaatacaacagaatatagcaagaatagcaaaaattctcccctagtttttgaaaaaaaaaaccccgaaaacagaatgtatcactcccagatacaccttggcatattttgagatggctgttcagagagcctgcaaacctaagtagccacttaaagtagtcttttgtggggaagatttctatcagtagagaaaatctgcattgatgcagctaggctttatctgaggccctcccttgtcctgatctagaaaagattaatctagagtctgacacctttaaatgtstgaaagagacatatgtattctctctgagggctgctacttgtgaagtttcacctatgtaacaagaccacctttactagccaggtctccacttttccccctcccagcagaacctgttttgccacactctaa

SEQ ID NO: 451333 - DNA, 369 bp, Homo sapiens
cattaagaatattttgtctcagatagcaaaatataaaaccacagaagaacattcaatcattttcygggtgttaagagatcaatttgtgaaatcacttttgagaaaacttcagtttctgccatgagcaatacagtagtttccttctacctgcatgtcgcataatcttaaatttcacaggagatatgaaagaaaaaatattgttagatcagatgaaactctggaataggaaaagttatataattacaaaatagccttaaaaagcttttttgtatgattttcacaaacttaaaatgtaatttgaaataatatgtgcacatttcccctaggaattgttttacatttatgattattttatgcctaacactattc

SEQ ID NO: 451334 - DNA, 608 bp, Homo sapiens
cacacacacacatacacacctcaaacaaaatcaactactgctagtctacttattttatgcagacatttttattttaataaagatagtaagaaaaaactcattgttttttcttcttataaccctcaattatttagaaaacccatgaggatcttttcagagttcttccctcgtgatagagcatatataccactgacttgtcatacaggtttattatggatagtttataattttctcattcttccacctttttattctttcttttcctattttgttattttttaagatagaactcaaaaccttttttaatattttagttttctagcacaagtgtgattctgtaggtattttgtaaaatgagctacatcaatataattctaagataaatttacataagattgtataatggagtttataatttttatgacagcatgtatatgatttctytagtcccaatggttatagaaaaccagaaattaagataaagggagatgatttaaataatttaaataaagattttatctacatatctacagatattattggctaaagaattaaattgtgattgctaatttttgtgattttttgcataaatatatatgtttatgttt

SEQ ID NO: 451335 - DNA, 226 bp, Homo sapiens
atttggaagttatatacaagtactcctcactttacataatcatctactkattttttatatattttaaattaatttatcttatgaattcttattttgctgatacacaacttaattgaattttatttcttccctttgacaggaattaacctgaattttgaggagctgatacagtgactgtgagtcaggcagggacttctgttcaccagagtagattcctgtgttcaca

SEQ ID NO: 451336 - DNA, 410 bp, Homo sapiens
ttttaggcccttttctgtcagaggaaaagttaaatgaattaatcacgcagaattgaaactgtcacttgctcatctttgactattgacctggccaggtattcttagatctgtttcctaaattgtgcatcctccatttcagcaaacttcatctccatttcaacaactaattccccactttagaccttgttatcaatatgaactcttcgagggttgaaatataaaactccatacttctcttgtccttggataggcttacrtatctctcagtttcactatttttgtgctcatatattattatgctcttctagtcccttagcttttctttccccttgctcttatgtttctattccctctgcccttttctttcttttctcccgacgtgtacactttgaggcattgctttaactaag

SEQ ID NO: 451337 - DNA, 496 bp, Homo sapiens
atacaaaaagaataatgataacatttgtatgcacatgtagatcaaaacagatatagatacagaaaaaagaggaagagagggagaatgaaagaaaataagagatgaagaaagcccagtaaagtgttaacatttgrggaattttgctgaagtttcagggcaatttttgtactatttttagaactttgaaagtctgaaattatttcaaaataaatatttgaaaaataaaatatattatcttaaggaaacaacaaaaatgtgtatatataaatatatccagaatccatattttttcttagtctattcactgctaaccgtcttgactaagcaatcatcactctcacaattatagcaatggttttcttacttgtttcttcagacctgtttatccttccccgacaattgctacagtttattatcaacatagctaccataatgatctttcaaaagtataattgacagcatgtcaaccctctgcaataaactgcaatgattcccc

SEQ ID NO: 451338 - DNA, 589 bp, Homo sapiens
tgtgtgccatagtaaactatgtgcatattcagggaagtaaaggacgacaaagtgtttttaaaggtaaaatgaagataattcataattgtttagagataattaagctggacaggcagttgcttggcacatgtctttgcagaagtaatttttgggtaagagtgatgaaatttatgcaaggttgcagtatttgcagtcttgtgatactttttgctatcacacatgtatgcatgagaagcctatacttacagccttccctgactgtcagttttgktttttttctaacacaagtgactccatgttaattctgactactttctcattttccacttttgatcaagatctttctctgaaagcataactgattcatcattctgtaattaggttttgaggactcttggtgccaggatggacctatcccaggttgcttacctggtcctgttagagagagtgaatggcagctaggagtcagtgttaaaaccattttagccgcatttgacaaacaagggaggtgtgaagagaatggctgtcaggaaaagtctgatgagagtttattatttagttttatttttatatgttgtagccttttgtt

SEQ ID NO: 451339 - DNA, 469 bp, Homo sapiens
ataactgattcatcattctgtaattaggttttgaggactcttggtgccaggatggacctatcccaggttgcttacctggtcctgttagagagagtgaatggcagctaggagtcagtgttaaaaccattttagccgcatttgacaaacaagggaggtgtgaagagaatggctgtcaggaaaagtctgatgagagtttattatttagttttatttttatatgttgtagccttttgttatctcaatgtgctggaccaacaytattttgtcaggagttacacttctgcaaaaaattaacaagtaacaggtgcaaagtttaaaaacagaaaatatgaagttaaacttagtaatatgacaattccaatttacacaatagttttgagccatatacctcaacttaaaagccgccaattaaaaaaaaaaaaaagataggcattaagagggataagagtttcagtatggagtcctgttc

SEQ ID NO: 451340 - DNA, 628 bp, Homo sapiens
ctctgaaaaaaagtaaaagtatgtgaaatctcctggttacacagaagaattcagacatatccagaaaagccaagcatacagaatcaagttatactgtaggaaaacattgcttttctattcctttaaaacaaacatctcagtggtaggtaatgacattttagttagaaccagggggagaaatgctacataagcagatgaaaaagttcaaagtgagttattatcacagaacttctcaaggagaaaaatacctgaagaaaatgatgcatgacttacaaatcatatactacaaaatactgccaaagtagaacttcttttattttattttaggttcaggggtacgtgtgtaggtttgttataaaggtaaggtaagcttgtgtcacagggggtttgttttacagattatttcaccacccagtactcaatagttattttttctgttcttctccctcctccacccttcaccctcacatacaccccagtgtatgttgttcccctctatctttccatttgctctcatcatttagctcctgcttataagtgagaacaggcagtatttgrttttctattcttgtatttgtttgctaaggataatggcctccagctccaaccatgttcctacaacggatat

SEQ ID NO: 451341 - DNA, 594 bp, Homo sapiens
agtctacctcaaaacattgaattactattttgaatgaaaagacagcatttctaaactgaaactagaaaaattaaattgatcttacgaagaaatatggcacaaaatagaaactgtctgcaggctagaagatggcatgccaaaaaaattttcagaattaaaaattaaaacttcttgtaacatgtactaagagcaaatcatatactttaagaaaaacttgttgttctaatrtaggggaccatatttttagttttgtatgtgtatttttgacataaaagctcaaatatttagaaagaattagaaataattccctcctattataaccaacttgatcacacacaaattatttttataaattcatccttcaccaacctttttacaacctactgagacttttgacatcatgtttatactttcttctatgtcctatacttacttattcttaaataactagtcattttactttaggacaaaaatgtaccacataagattttttcctcatacaaaattttactcttttcttattaatcttactagtcaaatataacatttttgtactcatgacttgcttaacatctgtctctcctacttactagt

SEQ ID NO: 451342 - DNA, 594 bp, Homo sapiens
agtctacctcaaaacattgaattactattttgaatgaaaagacagcatttctaaactgaaactagaaaaattaaattgatcttacgaagaaatatggcacaaaatagaaactgtctgcaggctagaagatggcatgccaaaaaaattttcagaattaaaaattaaaacttcttgtaacatgtactaagagcaaatcatatactttaagaaaaacttgttgttctaatataggggaccatatttttagttttgtatgtgtatttttgacataaaagctcaaatatttagaaagaattagaaataattccctcctattataaccaacttgatcacacacaaattatttttataaattcatccttcaccaacctttttacaacctactgagacttttgacatcatgtttatactttcttctatgtcctatacttacttattcttaaataactagtcattttactttaggayaaaaatgtaccacataagattttttcctcatacaaaattttactcttttcttattaatcttactagtcaaatataacatttttgtactcatgacttgcttaacatctgtctctcctacttactagt

SEQ ID NO: 451343 - DNA, 564 bp, Homo sapiens
aacaatattagattattaaagaactgcacaaataaagatcattctggtttagccyaggtttgtagttttataaactttgtgtcaaatcctgacacctttaaacacctaatgagaaaaacataaaactgtctagatgggcatggtggtgcatgccagtagtcccagctactcagtggtctgagatggtaggattgcttgagcccaggagttcaaggctagcctgggcaatatagcaataccttaccacttaaaaaacaaaataaaaccccaaaattgcctgaccaataagtaaacctatacaaaaatgcatgctgacaattttgaagacatttctatttttatgttactgactacattacaacaagtttatttatcaaagatttacttaattcatgtaaactaaaagaaagttgagttaattactatatattttatatgaacattcttttatgtaatccaagctgcataaaccatgtttagggaattctgaatgtctatgctagattctactacgtagacacaatacacaatgaaatatgcacatagatgtaaacacacctgtat

SEQ ID NO: 451344 - DNA, 564 bp, Homo sapiens
aacaatattagattattaaagaactgcacaaataaagatcattctggtttagcctaggtttgtagttttataaactttktgtcaaatcctgacacctttaaacacctaatgagaaaaacataaaactgtctagatgggcatggtggtgcatgccagtagtcccagctactcagtggtctgagatggtaggattgcttgagcccaggagttcaaggctagcctgggcaatatagcaataccttaccacttaaaaaacaaaataaaaccccaaaattgcctgaccaataagtaaacctatacaaaaatgcatgctgacaattttgaagacatttctatttttatgttactgactacattacaacaagtttatttatcaaagatttacttaattcatgtaaactaaaagaaagttgagttaattactatatattttatatgaacattcttttatgtaatccaagctgcataaaccatgtttagggaattctgaatgtctatgctagattctactacgtagacacaatacacaatgaaatatgcacatagatgtaaacacacctgtat

SEQ ID NO: 451345 - DNA, 564 bp, Homo sapiens
aacaatattagattattaaagaactgcacaaataaagatcattctggtttagcctaggtttgtagttttataaactttgtgtcaaatcctgacacctttaaacayctaatgagaaaaacataaaactgtctagatgggcatggtggtgcatgccagtagtcccagctactcagtggtctgagatggtaggattgcttgagcccaggagttcaaggctagcctgggcaatatagcaataccttaccacttaaaaaacaaaataaaaccccaaaattgcctgaccaataagtaaacctatacaaaaatgcatgctgacaattttgaagacatttctatttttatgttactgactacattacaacaagtttatttatcaaagatttacttaattcatgtaaactaaaagaaagttgagttaattactatatattttatatgaacattcttttatgtaatccaagctgcataaaccatgtttagggaattctgaatgtctatgctagattctactacgtagacacaatacacaatgaaatatgcacatagatgtaaacacacctgtat

SEQ ID NO: 451346 - DNA, 564 bp, Homo sapiens
aacaatattagattattaaagaactgcacaaataaagatcattctggtttagcctaggtttgtagttttataaactttgtgtcaaatcctgacacctttaaacacctaatgagaaaaacataaaactgtctagatgggcatggtggtgcatgccagtagtcccagctactcagtggtctgagatggtaggattgcttgagcccaggagttcaaggctagcctgggcaatatagcaataccttaccacttaaaaaacaaaataaaaccccaaaattgcctgaccaataagtaaacctatacaaaaatgcatgctgacaattttgaagacatttctatttttatgttactgactacattacaacaagtttatttatcaaagatttacttaattcatgtaaactaaaagaaagttgagttaattactatatattttatatgaacattcttttatgtaatccaagctgyataaaccatgtttagggaattctgaatgtctatgctagattctactacgtagacacaatacacaatgaaatatgcacatagatgtaaacacacctgtat

SEQ ID NO: 451347 - DNA, 373 bp, Homo sapiens
ttactatgattttacttttaaatgccctcccagttttactaaagttctaaagtagctaataacttgtcctcagaactgaggccagattttggagaatatctttcggaatattgtcctacacagcagtattctacacgtatttgttaatgtgtcaatcaccatgatattgaacttctctttatactttgtttccatgtacattgtattatgtttttcactgagaagcatctagaaaaatcagaatacttaaaatgtcattaatttggtttttatgcaagattccgaagtgttgataataattcttggtatcaaagctcagctatctcagcttagtatttgtggtcaygcacaataaactccagctgttgtatca

SEQ ID NO: 451348 - DNA, 372 bp, Homo sapiens
caataatggtcctgactaaatcactcttcgtctgtctacaacccagtaagttgattgctgctgagtagccattttcccacgtctaatacctgaactggccttgtgactcacacagaccaacacaaagtcgcaaaatgatgttgtstaactttgaggccttatgaggtcttatagtttccattcttgcttccttgcaatgattcaccctaaaggttttctatcaattgcatgagtctgctgagacagaatactggcacaacaagtcaagcgaagtatacatatcattcgcagataggcatcaaggataaacaagccctaggatccattgcaagctgaactccaaagttcaggaaaactgcctaggttaaatag

SEQ ID NO: 451349 - DNA, 609 bp, Homo sapiens
caagtcggatttgagaatttgcctctcgcactctctcattttggccaaatcaaataatgcctttctctcttcctaagcgctgatgtatcagtgtttggcttattgtgcattgggtactcaaacttaaatttgggggttttgtaacaatttcactcttctgcaatcaattgaaataaattttctcctttgatttctgtttgttctttcactcaccygcaatgattctaccagaaatgttttaatcagtaaagatatagcttgaatttttatacttaacccaaatttacatgtcaaaataaaaaatgaaaacaataaaaaaaactatgcatgcctctccatctacacattaatggcaaaagtgcaagatatagaaagcatggcttgagtgctgtgtgtgtactgattatttcatacatatgtactctttaaactttatctatgtagagaaataaattctaagattactgctctttctcaaataataaaaagctcaagaactgctaatcacaggaataaaaaaatccctatataatatttcattagtgatattttcagcccgagtgcttctattacctatattttttggtaagtatatttttatatagttat

SEQ ID NO: 451350 - DNA, 609 bp, Homo sapiens
caagtcggatttgagaatttgcctctcgcactctctcattttggccaaatcaaataatgcctttctctcttcctaagcgctgatgtatcagtgtttggcttattgtgcattgggtactcaaacttaaatttgggggttttgtaacaatttcactcttctgcaatcaattgaaataaattttctcctttgatttctgtttgttctttcactcacctgcaatgattctaccagaaatgttttaatcagtaaagatatagcttgaatttttatacttaacccaaatttacatgtcaaaataaaaaatgaaaacaataaaaaaaactatgcatgcctctccatctacacattaatggcaaaagtgcaagatayagaaagcatggcttgagtgctgtgtgtgtactgattatttcatacatatgtactctttaaactttatctatgtagagaaataaattctaagattactgctctttctcaaataataaaaagctcaagaactgctaatcacaggaataaaaaaatccctatataatatttcattagtgatattttcagcccgagtgcttctattacctatattttttggtaagtatatttttatatagttat

SEQ ID NO: 451351 - DNA, 569 bp, Homo sapiens
tcccagcagccagagaatcatcaacaaatccccacaggggctattgcttgtcccatgcacggaaagacagaatacggacctatctgatccagcccccacctggctttgcccctgagcctgccctggtagtttaccacaacagacagaaacttttgggagctctatgtccctggtcattccttgagaatccagaataactccctaggtaacataaggcaaacacaaatcscactgttaccatcataactggcactcttttgcaactgtcatcttctggctggaggtcagctggcacagttcattatgtcatctccaggcagattaatgcagtgctcaagaaggagaaaatttgtgcataacctcagctatcatcattgccttcaacaccctggctaaccaggaggtcctgagtctttccacatgaccagttaattcctactacaaccagcattggagaaatccaacacactaaggctatttataaccaaggaatctcacagggtctatgtcactaacctgtcacctccatcagagctggtgttggtacccactgctgtgggtacctgcag

SEQ ID NO: 451352 - DNA, 643 bp, Homo sapiens
aattcctctctatttgaatgtcctctcgatattcctacagatgataagaggtgcctgtctgatctgaacagccagaatactgggccaagagaatgactgtgatatggtttggctctgtatccccatccaaatctcatttcaaattgtaatcttcacatgctggggaggggcctggtgagaagtgattgaatcatacaggaggacttcccccttggtggtctcctgacagtgagtgagttctcatgagatctggtttgaaagtgtgtgacacttacccctttgtgctctctctctctctgtgtctctctcctgctgccaytgtgaagaaggtccttgcatctcttccaccttctgccatgattttaagtttcctgaggcctcacagtcatgcttcctgttaagcctgtggaactgtgagtcaattaaaccttttttcttcatgaattacccagtctcaggtagttctttatagcagtgtaaggatggattaatacaactataagatggatcactttcctgctggcctggcaggagagttgaggtggctcccacttttccctctgataagacctcaacgtgttacattgggagatccctcagtcaccctcaaggctgtgacctctgtctatcattgcatattgca

SEQ ID NO: 451353 - DNA, 559 bp, Homo sapiens
ctaaaactatgtcacctgaaggactgcctttttactccatcttaaaatttttatcatgtaccatttgcaaatgatataaggaatattaatataagtatgttaaaggtatttttccctttagaggcttttcaatgcagtagaatggataagacatattcacaaatgtttgtgtataagtagatttattgtagaagccaaaatgctcttctagtaatttatctttcagtcacattctctatgcctcctgaagacaaataaagggtggggggaggcagttcgtaacgtccttgtgagctaatcatttgatttaataaatataactggaaagaaagrgagtatattaatttcaacatctccagtggatcaggcacagcataatatcacactgtatattcagatagagctaatacaagctgtagtaaaagtaatcctgaaataccagtgactaaacaaaatgaaagtttacatctcattaacatgaaactttcagttttttttaagacttactttggaatctatccctcatgtagtagctcactatctgtctctatccatgaca

SEQ ID NO: 451354 - DNA, 559 bp, Homo sapiens
ctaaaactatgtcacctgaaggactgcctttttactccatcttaaaatttttatcatgtaccatttgcaaatgatataaggaatattaatataagtatgttaaaggtatttttccctttagaggcttttcaatgcagtagaatggataagacatattcacaaatgtttgtgtataagtagatttattgtagaagccaaaatgctcttctagtaatttatctttcagtcacattctctatgcctcctgaagacaaataaagggtggggggaggcagttcgtaacgtccttgtgagctaatcatttgatttaataaatataactggaaagaaagagagtatattaatttcaacatctccagtggatcaggcacagcataatatcacactgtatattcagatagagctaatacaagmtgtagtaaaagtaatcctgaaataccagtgactaaacaaaatgaaagtttacatctcattaacatgaaactttcagttttttttaagacttactttggaatctatccctcatgtagtagctcactatctgtctctatccatgaca

SEQ ID NO: 451355 - DNA, 624 bp, Homo sapiens
ttgaatggaatgtaatttttttcgatagcaccccagaatacacaaaagataacaaacaataaagtatctgtttagtgacaaatgtccctaaggagaaagggataaaaatacatcacctcatgagaaatgttttacattcctttttggcctgagtgactcgatcatatgcttaaaactccagccacagtggtagtgatgtatttaatgaagaattaggaaaccctgctggggattatgggtttgtttttgtacatgcaaaagaccctttttaattttattttatttgcttttttgagaaagggtctctctctgtcacccaggctggaatgcagtggtgtgatcatgactcactgcagcctcaacctcctgggctcaagcgatcattccacctctgcctcccgagtagctgagattacaggtgcgtgtcaccatgcccagctaayttttgtagtttttgtagagacggggttccacctttgttgcccaaggctggtctcaaactcctgagctcaagcgatctgcccgccttggcctcctaaagttccgggattataggtgtgagccaccaagcctggcaaaagtccctttttaaaaaaaattgaaattttttggttttaccaaatt

SEQ ID NO: 451356 - DNA, 624 bp, Homo sapiens
ttgaatggaatgtaatttttttcgatagcaccccagaatacacaaaagataacaaacaataaagtatctgtttagtgacaaatgtccctaaggagaaagggataaaaatacatcacctcatgagaaatgttttacattcctttttggcctgagtgactcgatcatatgcttaaaactccagccacagtggtagtgatgtatttaatgaagaattaggaaaccctgctggggattatgggtttgtttttgtacatgcaaaagaccctttttaattttattttatttgcttttttgagaaagggtctctctctgtcacccaggctggaatgcagtggtgtgatcatgactcactgcagcctcaacctcctgggctcaagcgatcattccacctctgcctcccgagtagctgagattacaggtgcgtgtcaccatgcccagctaatttttgtagtttttgtagagayggggttccacctttgttgcccaaggctggtctcaaactcctgagctcaagcgatctgcccgccttggcctcctaaagttccgggattataggtgtgagccaccaagcctggcaaaagtccctttttaaaaaaaattgaaattttttggttttaccaaatt

SEQ ID NO: 451357 - DNA, 654 bp, Homo sapiens
gggcagtgttaattgtattcattttttcaacacatttgattgtgcatataccatggacaagaaagtttgttaaaaactgaatgtataaggctgggtgcagtgactcacgcctataatcccagcacttcaggaggctgaggcggacagatcacttgagcttaggagtttgggaccagcctggacaacatggtgaaaccccatctctacaaaaaacaaaaaaattagctgggcgtggtagcttatgcctgtagtcccagctacttggggggctgagataagaggatcgcttgaacctgggaggtcaaggccacagtaagccgtgatcgcactaccgcactccagcctgggtgacaaaataagaccctgtctcaaacaaccaacaacagcaacagcaacaaaaaccctaatgtacaggaaattattttggggagtagtggaagatagctggcaagttggagactctaacttgagatgtggtactacttgtctgtacattttttttctcatttctstctacccaaaggtgttatgtttttattgtcttaagggggcccttcatttgatggcataaaaagttatgaccagccatctgtagttcagttaataggtcaagaatatcagcagctattgttatgttgaggtcattatttatca

SEQ ID NO: 451358 - DNA, 595 bp, Homo sapiens
  misc_feature (1)...(595): n = A,T,C or G
nnnnnnnnnnnnnnnnnnnnnnnnnnnnnnnnnnnnnnntgatttctacattgaaataatacagatggcgagaatattgtcaggtgaggaggcaaagatgtggaggctggaggtgagagctgggtggaaggaggaagcaattaggcaagcagaacatcatgttcagggtcaggaaagtggagcataaagcccaggtgaggaaagcagcacagtctggccgaagacagaatttattcaagaaatgagattggaaaggaaagcaggagtgtataacaaggatggtaaaccactttagggarttggcactttatccttggggcaatgtggaatcattgaatgattttaggcagagagtgatgggatttgagttatattttagaaagatcactgtctgaaataatgcaatcaattcaaagagaatattctaaagtcagagaccagtttgaaaggctgctagagttgtgcaggccatttttgcaatgacttaaacaaggattgtgggagtatgaacagagagagaagtggttgcttcccagagctatttaggacatagcccctttgggaaattgtgatcaatggtatattgggcaaaggg

SEQ ID NO: 451359 - DNA, 595 bp, Homo sapiens
  misc_feature (1)...(595): n = A,T,C or G
nnnnnnnnnnnnnnnnnnnnnnnnnnnnnnnnnnnnnnntgatttctacattgaaataatacagatggcgagaatattgtcaggtgaggaggcaaagatgtggaggctggaggtgagagctgggtggaaggaggaagcaattaggcaagcagaacatcatgttcagggtcaggaaagtggagcataaagcccaggtgaggaaagcagcacagtctggccgaagacagaatttattcaagaaatgagattggaaaggaaagcaggagtgtataacaaggatggtaaaccactttagggagttggcactttatccttggggcaatgtggaatcattgaatgattttaggcagagagtgatgggatttgagttatattttagaaagatcactgtctgaaataatgcaatcaattcaaagagaatattctaaagtcagagaccagtttgaaaggctgctagagttgtgcaggccatttttgcaatgacttaaacaaggattgtgggagtatgaayagagagagaagtggttgcttcccagagctatttaggacatagcccctttgggaaattgtgatcaatggtatattgggcaaaggg

SEQ ID NO: 451360 - DNA, 374 bp, Homo sapiens
aatgtgagccctgatcctaatgtttgtagagtatttagaaatttgagaattccctccaaataaagagttttttaaaacattgttagacaaaaagtttgaattacaaaatgtggtagtagctcaggtctaactcaaatgcagggaaaaaaactattaactctaaaaaaaattaaatacacatttgatggtaatgagaaacataaaacaggcagaaatagtagaatattcaaccactgatgaagtatttgaccattgaataaagaaaattgcaatgatttaaatttgcatcaatgtaacttcacacctgatgacacttcccagtctgtgcamaattagatgtctaagagtaaagcggtgagttttactagcttgag

SEQ ID NO: 451361 - DNA, 493 bp, Homo sapiens
agtttgaattacaaaatgtggtagtagctcaggtctaactcaaatgcagggaaaaaaactattaactctaaaaaaaattaaatacacatttgatggtaatgagaaacataaaacaggcagaaatagtagaatattcaaccactgatgaagtatttgaccattgaataaagaaaattgcaatgatttaaatttgcatcaatgtaacttcacacctgatgacacttcccagtctgtgcaaaattagatgtctaagagtaaagcggtgagttttactagcttgaggaataagagtacagagttccaggctgacagaaaagaagaaytgggaaatttgaatgacatgggaggaaatctcacacaactgaaagtcacagaggagaatgtcacagagtaaaaatctaaaatcagcacttaaacttcattcagatatatgatggctgctacatttcacattcataaaaagagactccatagaatccagcagaaaacaaca

SEQ ID NO: 451362 - DNA, 493 bp, Homo sapiens
agtttgaattacaaaatgtggtagtagctcaggtctaactcaaatgcagggaaaaaaactattaactctaaaaaaaattaaatacacatttgatggtaatgagaaacataaaacaggcagaaatagtagaatattcaaccactgatgaagtatttgaccattgaataaagaaaattgcaatgatttaaatttgcatcaatgtaacttcacacctgatgacacttcccagtctgtgcaaaattagatgtctaagagtaaagcggtgagttttactagcttgaggaataagagtacagagttccaggctgacagaaaagaagaattgggaaatttgaatgacatgggaggamatctcacacaactgaaagtcacagaggagaatgtcacagagtaaaaatctaaaatcagcacttaaacttcattcagatatatgatggctgctacatttcacattcataaaaagagactccatagaatccagcagaaaacaaca

SEQ ID NO: 451363 - DNA, 491 bp, Homo sapiens
gttctggaatcctaggtgtgggaaaaacattcagaacctagtagcagtgttctggaatcctatgtgagggacatacattcagaccayggcagcagtgttctggaatggtatgtgaaggacaaacattcagacccttgtagcagtgttccagaattctatgtgagggacaaacattcagaccacagcagcagtgttctggaatcctatatgacggaccaacattcagacccttgcaacagtgttctggaatactaggtgagggagaaatattcacacccttgtagcagtgttctggaattctatgtgactgacaaacattcagactccagcagcagtgttctgtaatcctatgtgagggacaaacattcagaccccaagagcagtgttctgaaatcctatgttaagggaaacattgagaccccagcatgaatgttctggaatcctatgtgagggacaaacattcagaccacggcaggagtattctggaatcc

SEQ ID NO: 451364 - DNA, 491 bp, Homo sapiens
gttctggaatcctaggtgtgggaaaaacattcagaacctagtagcagtgttctggaatcctatgtgagggacatacattcagaccatggcagcagtgttctggaatggtatgtgaaggacaaacattcagacccttgtagcagtgttccagaattytatgtgagggacaaacattcagaccacagcagcagtgttctggaatcctatatgacggaccaacattcagacccttgcaacagtgttctggaatactaggtgagggagaaatattcacacccttgtagcagtgttctggaattctatgtgactgacaaacattcagactccagcagcagtgttctgtaatcctatgtgagggacaaacattcagaccccaagagcagtgttctgaaatcctatgttaagggaaacattgagaccccagcatgaatgttctggaatcctatgtgagggacaaacattcagaccacggcaggagtattctggaatcc

SEQ ID NO: 451365 - DNA, 491 bp, Homo sapiens
gttctggaatcctaggtgtgggaaaaacattcagaacctagtagcagtgttctggaatcctatgtgagggacatacattcagaccatggcagcagtgttctggaatggtatgtgaaggacaaacattcagacccttgtagcagtgttccagaattctatgtgagggacaaacattcagaccacagcagcagtgttctggaatcctatatgacggaccaacatkcagacccttgcaacagtgttctggaatactaggtgagggagaaatattcacacccttgtagcagtgttctggaattctatgtgactgacaaacattcagactccagcagcagtgttctgtaatcctatgtgagggacaaacattcagaccccaagagcagtgttctgaaatcctatgttaagggaaacattgagaccccagcatgaatgttctggaatcctatgtgagggacaaacattcagaccacggcaggagtattctggaatcc

SEQ ID NO: 451366 - DNA, 491 bp, Homo sapiens
gttctggaatcctaggtgtgggaaaaacattcagaacctagtagcagtgttctggaatcctatgtgagggacatacattcagaccatggcagcagtgttctggaatggtatgtgaaggacaaacattcagacccttgtagcagtgttccagaattctatgtgagggacaaacattcagaccacagcagcagtgttctggaatcctatatgacggaccaacattcagacccttgcaacagtgttctggaatactaggtgagggaraaatattcacacccttgtagcagtgttctggaattctatgtgactgacaaacattcagactccagcagcagtgttctgtaatcctatgtgagggacaaacattcagaccccaagagcagtgttctgaaatcctatgttaagggaaacattgagaccccagcatgaatgttctggaatcctatgtgagggacaaacattcagaccacggcaggagtattctggaatcc

SEQ ID NO: 451367 - DNA, 402 bp, Homo sapiens
cagtgttctggaattctatgtgagtgacaaacttccagactccagcagcagtgttctgtattcctatgtgaaggacaaacattcagaatccaggagcagtgttttgaaatcatatgttaagggcaaacatacagaccctagcatcaatgttctagaatcatrtgtgagggacagacattcagaccctcgcagcagtgttctggaatcctagatgggggacaaacattcagaccccagcagcaggcttctggaatcctatgtgggggacaaacattcagacaatggcatcagtgttctggaatcctatgtgagggacaaacactcagagccttgtagcagtgttctggaatcctatgtgagtgagagtgcctggagcctacccaacctgacgcccccaaagcc

SEQ ID NO: 451368 - DNA, 402 bp, Homo sapiens
cagtgttctggaattctatgtgagtgacaaacttccagactccagcagcagtgttctgtattcctatgtgaaggacaaacattcagaatccaggagcagtgttttgaaatcatatgttaagggcaaacatacagaccctagcatcaatgttctagaatcatatgtgagggacagacattcagaccctcgcagcagtgttctggaatcctagatgggggacaaacattcagaccccagcagcaggcttctggaatcctatgtgggggacaaacattcagacaatggcatcagtgttctggaatcctatgtgagggacaaacactcagagccttgtagcagtgttctggaatcctatgtgagtgagagtgcctggagcytacccaacctgacgcccccaaagcc

SEQ ID NO: 451369 - DNA, 559 bp, Homo sapiens
accacggaccaagtcctctctgaccaggacactacagattaggtcccgctgacaaggctgccctgaccagggccccactgacaagggcctcactgatgaggacacgcccaccagggtctgctgactaggtcccatgtgcccagtcctccactgaatagcaccccttgacctggtcaccagtgccccagcccatgctgaccaggccagcactaacctcagctgaccaggtctccactgatcaagccccacagcccaggtttgcactgaccagacaccaaacaactggcagccaataggtcsccactcaccaaaacccccactactagaccccactaatgagaccctctctaagcagacgcctgctgaccacgatcccactaaatagtcctcactgacctaggtccactgaccaggcccacactgatcaggcccctcctaaccacactggaaatccaagcggcaatgacatgtttcatatggcaaaagttggaacaagacagagagacgaaagaggttccacagccttttaaactactagatctcatgagaactcactatc

SEQ ID NO: 451370 - DNA, 559 bp, Homo sapiens
accacggaccaagtcctctctgaccaggacactacagattaggtcccgctgacaaggctgccctgaccagggccccactgacaagggcctcactgatgaggacacgcccaccagggtctgctgactaggtcccatgtgcccagtcctccactgaatagcaccccttgacctggtcaccagtgccccagcccatgctgaccaggccagcactaacctcagctgaccaggtctccactgatcaagccccacagcccaggtttgcactgaccagacaccaaacaactggcagccaataggtcgccactcaccaaaaccyccactactagaccccactaatgagaccctctctaagcagacgcctgctgaccacgatcccactaaatagtcctcactgacctaggtccactgaccaggcccacactgatcaggcccctcctaaccacactggaaatccaagcggcaatgacatgtttcatatggcaaaagttggaacaagacagagagacgaaagaggttccacagccttttaaactactagatctcatgagaactcactatc

SEQ ID NO: 451371 - DNA, 559 bp, Homo sapiens
accacggaccaagtcctctctgaccaggacactacagattaggtcccgctgacaaggctgccctgaccagggccccactgacaagggcctcactgatgaggacacgcccaccagggtctgctgactaggtcccatgtgcccagtcctccactgaatagcaccccttgacctggtcaccagtgccccagcccatgctgaccaggccagcactaacctcagctgaccaggtctccactgatcaagccccacagcccaggtttgcactgaccagacaccaaacaactggcagccaataggtcgccactcaccaaaacccccactactagaccccactaatgagaccctctctaagcagacgccygctgaccacgatcccactaaatagtcctcactgacctaggtccactgaccaggcccacactgatcaggcccctcctaaccacactggaaatccaagcggcaatgacatgtttcatatggcaaaagttggaacaagacagagagacgaaagaggttccacagccttttaaactactagatctcatgagaactcactatc

SEQ ID NO: 451372 - DNA, 559 bp, Homo sapiens
accacggaccaagtcctctctgaccaggacactacagattaggtcccgctgacaaggctgccctgaccagggccccactgacaagggcctcactgatgaggacacgcccaccagggtctgctgactaggtcccatgtgcccagtcctccactgaatagcaccccttgacctggtcaccagtgccccagcccatgctgaccaggccagcactaacctcagctgaccaggtctccactgatcaagccccacagcccaggtttgcactgaccagacaccaaacaactggcagccaataggtcgccactcaccaaaacccccactactagaccccactaatgagaccctctctaagcagacgcctgctgaccacgatcccactaaatagtcctcactgacctaggtccactgaccaggcccacactgatcaggcccctcctaaccacacyggaaatccaagcggcaatgacatgtttcatatggcaaaagttggaacaagacagagagacgaaagaggttccacagccttttaaactactagatctcatgagaactcactatc

SEQ ID NO: 451373 - DNA, 604 bp, Homo sapiens
ggaattagaagatgagaaatttaaaataagctattataagcatattcaaggatttaaggaatagatggtcataagagagaatatatggagaatctcaacagagaagtaaaaatgataaagggataataggacaaattttagaactgagagacagaatatcttatataaaagtgtcattttatgcacataccagtaaattaaagatggcagaaaaaactatcagtgcacttaaaaacagatcaagaacaatttcccaatacagctaatacaaaggagaaaaataataaaaatatgaccagtagcactaayataattggactcctagaaagagtagagaagaaaatgagacagaaaaagctatttgaaaaagtaaagaccaaaagttttcctaattgtcagcatatatcaacttacaggtttaagaaactcaaagaacagaataaaaatatacagaaccaaatgtagacataccatagtcaaaccactgggcaaaaaaagagtaaatcttgaaagtagctaaagggagggagaaaataatttacatacgtggaaacaaataggtcatctacctgtcatcagaaatgacactttaaaaagcaatgaa

SEQ ID NO: 451374 - DNA, 355 bp, Homo sapiens
agtagtgggatcatagctcactgttatctcaacctgccaggctcaagcaatcctcctgcctcatcctctctagtagctgggacaataggcatgcaccaccatgcctggcaattttttatcttattcttagtagagattggttctcactatgttgcccaggctggtctcaaactcctgagctcaagtgatcctcttgcctcagcctctcaaagtgctgggatacaggcatgaaccactgtgcccagacaaaagagttcttttataaatacaaataatttaaaaagtattgataaaataaaaatagaaatctcttcagacttgtcagcayacatttttgactgtgttttatatttac

SEQ ID NO: 451375 - DNA, 614 bp, Homo sapiens
tggtcaacacattcataagcccatgggtggttgatccagggaccacacagsgtccctgacagactctgaaagttaaggctttggtttactggtaacagagacaggttaaagtacatgtcttcagtcttgagtagagtgtaatcagtctcatttttttttaatgagacaaacatcaggtaaagacgttgacaagaaggaagagaaatcccgagattctataatcataataatcgaattgtaattgctagtttaagtagtccttcaaaaatacatctcattcctgacaggataaaacaagtttttaaaaatatattatattcagattcactagggaacacttggagccaggaaataattcagattcagcccaaattataggcaaataataaaaactctaaaacaatgatcagggttggaatctaataacatatgtcatagttttcttttggaatataaattttctctctagtccatcattttatcaaaaacaaatcatagtaggaccaattttgtgtgcaaaataagttttagtcttatcatactgggcctgattatttccataaagggcagcaagaatatttattggccatataggcttcttaaaattggctttg

SEQ ID NO: 451376 - DNA, 614 bp, Homo sapiens
tggtcaacacattcataagcccatgggtggttgatccagggaccacacagcgtccctgacagactctgaaagttaaggctttggtttactggtaacagagacaggttaaagtacatgtcttcagtcttgagtagagtgtaatcagtctcatttttttttaatgagacaaacatcaggtaaagacsttgacaagaaggaagagaaatcccgagattctataatcataataatcgaattgtaattgctagtttaagtagtccttcaaaaatacatctcattcctgacaggataaaacaagtttttaaaaatatattatattcagattcactagggaacacttggagccaggaaataattcagattcagcccaaattataggcaaataataaaaactctaaaacaatgatcagggttggaatctaataacatatgtcatagttttcttttggaatataaattttctctctagtccatcattttatcaaaaacaaatcatagtaggaccaattttgtgtgcaaaataagttttagtcttatcatactgggcctgattatttccataaagggcagcaagaatatttattggccatataggcttcttaaaattggctttg

SEQ ID NO: 451377 - DNA, 553 bp, Homo sapiens
ctagatacaagaaatgcaaacggaaattttttagactaaagaaagataacaacagatggaaattctgacctacaggaagtaaggagaagctctaggaatggcatgtgcataaacaggaaaaactaaggcttttttcttttagttttataacaaacaactgatggtttaaataaaaaattaagagtactattgataacgtatgtagagtaaaatattctaaattaatagctctgacaggagwctaaatgcaacaattttgccacaacttttctttatgttccatgaaaacgttgactattaacagtaagtggactgcgataagcccaggatgtttattacaatccctagagaaccaccacattatatgaagatattcttctaaaatgccaataaaggaattaaaatggaacgctgaatattgttcagttaatataaaaaggcatgaaagaaagaacagaggagcaaaaaatgatggaacaaatagaagataagagcaaaataggctgggcgcggtggctcagcctgtaatcccagcactttgggaggccgaggc

SEQ ID NO: 451378 - DNA, 553 bp, Homo sapiens
ctagatacaagaaatgcaaacggaaattttttagactaaagaaagataacaacagatggaaattctgacctacaggaagtaaggagaagctctaggaatggcatgtgcataaacaggaaaaactaaggcttttttcttttagttttataacaaacaactgatggtttaaataaaaaattaagagtactattgataacgtatgtagagtaaaatattctaaattaatagctctgacaggagtctaaaygcaacaattttgccacaacttttctttatgttccatgaaaacgttgactattaacagtaagtggactgcgataagcccaggatgtttattacaatccctagagaaccaccacattatatgaagatattcttctaaaatgccaataaaggaattaaaatggaacgctgaatattgttcagttaatataaaaaggcatgaaagaaagaacagaggagcaaaaaatgatggaacaaatagaagataagagcaaaataggctgggcgcggtggctcagcctgtaatcccagcactttgggaggccgaggc

SEQ ID NO: 451379 - DNA, 519 bp, Homo sapiens
attaaaccattgtaccgacaataacagagccctttttctgctgtgtgatggaatttagtgtttactaaggaagaaaaaaaatgcaagatatcttaaatttggtactttccaacaaatttaagaaatgtgtacacacttgaggagacttaagaagtctctgaytaaaacactagaaaagaaaagcagcgaaaagccaaataactattactcaacaataacaacatttgttactattatattaatattaaacacactattaaacaacaacatttcagttactcactgagcccaaagtcatttttcatgaaccattcacaacactgataacctattgaaaaatgattgaaaacaaaaaagcttattgctttccaagtccttttaaagccttctcttgtgtcatttcatataatccttataacaaatctatggagtatatactgactttacctctgtacagaaaagaaaactgagtcatattcagaataagttgcaaagttccccagataatcagtgtcatag

SEQ ID NO: 451380 - DNA, 389 bp, Homo sapiens
aaaaatgcaagatatcttaaatttggtactttccaacaaatttaagaaatgtgtacacacttgaggagacttaagaagtctctgattaaaacactagaaaagaaaagcagygaaaagccaaataactattactcaacaataacaacatttgttactattatattaatattaaacacactattaaacaacaacatttcagttactcactgagcccaaagtcatttttcatgaaccattcacaacactgataacctattgaaaaatgattgaaaacaaaaaagcttattgctttccaagtccttttaaagccttctcttgtgtcatttcatataatccttataacaaatctatggagtatatactgactttacctctgtacagaaaagaaa

SEQ ID NO: 451381 - DNA, 389 bp, Homo sapiens
aaaaatgcaagatatcttaaatttggtactttccaacaaatttaagaaatgtgtacacacttgaggagacttaagaagtctctgattaaaacactagaaaagaaaagcagcgaaaagccaaataastattactcaacaataacaacatttgttactattatattaatattaaacacactattaaacaacaacatttcagttactcactgagcccaaagtcatttttcatgaaccattcacaacactgataacctattgaaaaatgattgaaaacaaaaaagcttattgctttccaagtccttttaaagccttctcttgtgtcatttcatataatccttataacaaatctatggagtatatactgactttacctctgtacagaaaagaaa

SEQ ID NO: 451382 - DNA, 653 bp, Homo sapiens
ctatatcaaaatatgtgggataagttaagcagacccagagtaaattttttgtataaatgcttattctaaaaaacagaagttcaaaacaagtgcactaattttctaccttaaaaagaaaatctaaaacaagagagcaaattaagtccaaaacaagtagaagaaagaaaataaaacagaaattagaaatcaatgagacagaaaacagacacaggagaaaattaacatggccaaaagttagttctgtgagaaagaaagaaaacgcaaattataaatatcagggattaatgagattgtacagttgtagacacaagagacattaacaagataatagaatattgtgaaacattttatactaattttcattacttggatgaaagggtgaattccttgaaaagaaacttataaaaaawttcacaagattaaatggaatatatgaagtaattgacatttattaaagtaattaaattgtcaaatacctgcacataaaaacataaaactaaagaaataaaaaaataagcaaactccacatccaaagagttttgctggtgaattctttcaaacgttttaaaaaaataaaatttttaaattatttcagaagaaggggggaattccaaacttgttttatgagtcagaatcctgatagcaaaactaca

SEQ ID NO: 451383 - DNA, 544 bp, Homo sapiens
tgtctttttacataaaacaaattcagcccttaccttycttgtcgattacatcttccactagcagtaataaaaaagtaacaatatgcataagtcaaagtatcttcttagatcctctgtagtgttttattattttgttgtgttaattaaagtaactgtctcaaaatttcaaggaatgcctgagaagcaattcgtgttcaaaggctgccctcttgcgacaatgtgttgtatgttttactgtaaaagtaatcttattttaccttataacctctacaatccaattcataacaacataaaaaggaaataaaaccttacataattttgaattttaaaaagtaccttgtttatatggctcctttagctaatgaatagtcaatttggtaaatattccagtgagttgaaggcttgaatccatctcacttaactagcttgatggatgtatttctaaacctatacaacccactcctctgcttttaaaaaatcaaagttagctgtagattgagatgtcagtgacacagtttatagaacataacttagattgtcatct

SEQ ID NO: 451384 - DNA, 578 bp, Homo sapiens
gaatagtcaatttggtaaatattccagtgagttgaaggcttgaatccatctcacttaactagcttgatggatgtatttctaaacctatacaacccactcctctgcttttaaaaaatcaaagttagytgtagattgagatgtcagtgacacagtttatagaacataacttagattgtcatctacattactgtaactacaattaccaccctcagatggaagaatcagttttatcagtgaacatctctaattgaacgataaatggtgtatgtcttctggcttttacaagctcttggtctaacacaggggatatatgatgtaaaacttacaaagcagggtcactcacggtggctcatgcctgtaatcccagcactttgggaggccaaggcgggcggatcacagattcaggagatcgagatcatcctggctaacacggtgaaaccccatctctactaaaaatacaaaaattagctgggtgtggtggcacacgcctgtagtcccagctactcagtaggctgaggcaggagaatcacttgaacccaggacgcggaggttgcagtgagcagagatcgcaccactgc

SEQ ID NO: 451385 - DNA, 587 bp, Homo sapiens
tagtgttttattattttgttgtgttaattaaagtaactgtctcaaaatttcaaggaatgcctgagaagcaattcgtgttcaaaggctgccctcttgcgacaatgtgttgtatgttttactgtaaaagtaatcttattttaccttataacctctacaatccaattcataacaacataaaaaggaaataaaaccttacataattttgaattttaaaaagtaccttgtttatatggctcctttagctaatgaatagtcaatttggtaaatattccagtgagttgaaggcttgaatccatctcacttaactagcttgatggatgtatttctaaacctatacaacccactcctctgcttttaaaaaatcaaagttagctgtagattgagatgtcagtgacacagtttatagaacataacttagattgtsatctacattactgtaactacaattaccaccctcagatggaagaatcagttttatcagtgaacatctctaattgaacgataaatggtgtatgtcttctggcttttacaagctcttggtctaacacaggggatatatgatgtaaaacttacaaagcagggtcact

SEQ ID NO: 451386 - DNA, 587 bp, Homo sapiens
tagtgttttattattttgttgtgttaattaaagtaactgtctcaaaatttcaaggaatgcctgagaagcaattcgtgttcaaaggctgccctcttgcgacaatgtgttgtatgttttactgtaaaagtaatcttattttaccttataacctctacaatccaattcataacaacataaaaaggaaataaaaccttacataattttgaattttaaaaagtaccttgtttatatggctcctttagctaatgaatagtcaatttggtaaatattccagtgagttgaaggcttgaatccatctcacttaactagcttgatggatgtatttctaaacctatacaacccactcctctgcttttaaaaaatcaaagttagctgtagattgagatgtcagtgacacagtttatagaacataacttagattgtcatctacattactgtaactacaawtaccaccctcagatggaagaatcagttttatcagtgaacatctctaattgaacgataaatggtgtatgtcttctggcttttacaagctcttggtctaacacaggggatatatgatgtaaaacttacaaagcagggtcact

SEQ ID NO: 451387 - DNA, 587 bp, Homo sapiens
tagtgttttattattttgttgtgttaattaaagtaactgtctcaaaatttcaaggaatgcctgagaagcaattcgtgttcaaaggctgccctcttgcgacaatgtgttgtatgttttactgtaaaagtaatcttattttaccttataacctctacaatccaattcataacaacataaaaaggaaataaaaccttacataattttgaattttaaaaagtaccttgtttatatggctcctttagctaatgaatagtcaatttggtaaatattccagtgagttgaaggcttgaatccatctcacttaactagcttgatggatgtatttctaaacctatacaacccactcctctgcttttaaaaaatcaaagttagctgtagattgagatgtcagtgacacagtttatagaacataacttagattgtcatctacattactgtaactacaattaccaccctcagatggaagaatcagttttatcagtgaacatctctaattgaackataaatggtgtatgtcttctggcttttacaagctcttggtctaacacaggggatatatgatgtaaaacttacaaagcagggtcact

SEQ ID NO: 451388 - DNA, 578 bp, Homo sapiens
gaatagtcaatttggtaaatattccagtgagttgaaggcttgaatccatctcacttaactagcttgatggatgtatttctaaacctatacaacccactcctctgcttttaaaaaatcaaagttagctgtagattgagatgtcagtgacacagtttatagaacataacttagattgtcatctacattactgtaactacaattaccaccctcagatggaagaatcagttttatcagtgaacatctctaattgaacgataamtggtgtatgtcttctggcttttacaagctcttggtctaacacaggggatatatgatgtaaaacttacaaagcagggtcactcacggtggctcatgcctgtaatcccagcactttgggaggccaaggcgggcggatcacagattcaggagatcgagatcatcctggctaacacggtgaaaccccatctctactaaaaatacaaaaattagctgggtgtggtggcacacgcctgtagtcccagctactcagtaggctgaggcaggagaatcacttgaacccaggacgcggaggttgcagtgagcagagatcgcaccactgc

SEQ ID NO: 451389 - DNA, 604 bp, Homo sapiens
gtaagtgcaaagaaggaatttgctaaaaaaaattatatagggtaaaatgagttttttccaggttagaaaatatccactccctaccctcctacattcctttcccatggttaagrataggaaaaaacaaaggcctcttggtgagcagtggtgacttaggcaatttcttagaaatattctagaagacatagtcatctttaaaaaaaaaaaatagctacaaggatatgtctaagcagaagggaccatgggccaaattacgtgtagatttttgcattccaaatatggtaaagaagaagcaggaagctggggggcctaaacaggccacacagaaatggacaaggaagaggccagcagcagcttgtggggacaagatgtcaagccccaaattttaaacccaccaaccatcctccaaagtctggctctgtttaacaaggctgtggtctgacactagatgccgcctcagtgactaaagcataatttcccgtctcctgggagtgttgacagctgactcctggcaacaatactcacagcacagtaaagttccttcatccaagttcatgtcccttctcagggcatcccacatccgagaactgcttggtacagaaat

SEQ ID NO: 451390 - DNA, 604 bp, Homo sapiens
gtaagtgcaaagaaggaatttgctaaaaaaaattatatagggtaaaatgagttttttccaggttagaaaatatccactccctaccctcctacattcctttcccatggttaaggakaggaaaaaacaaaggcctcttggtgagcagtggtgacttaggcaatttcttagaaatattctagaagacatagtcatctttaaaaaaaaaaaatagctacaaggatatgtctaagcagaagggaccatgggccaaattacgtgtagatttttgcattccaaatatggtaaagaagaagcaggaagctggggggcctaaacaggccacacagaaatggacaaggaagaggccagcagcagcttgtggggacaagatgtcaagccccaaattttaaacccaccaaccatcctccaaagtctggctctgtttaacaaggctgtggtctgacactagatgccgcctcagtgactaaagcataatttcccgtctcctgggagtgttgacagctgactcctggcaacaatactcacagcacagtaaagttccttcatccaagttcatgtcccttctcagggcatcccacatccgagaactgcttggtacagaaat

SEQ ID NO: 451391 - DNA, 604 bp, Homo sapiens
gtaagtgcaaagaaggaatttgctaaaaaaaattatatagggtaaaatgagttttttccaggttagaaaatatccactccctaccctcctacattcctttcccatggttaaggataggaaaaaacaaaggcctcttggtgagcagtggtgacttaggcaatttcttagaaatattctagaagacatagtcatctttaaaaaaaaaaaatagctacaaggatatgtctaagcagaagggaccatgggccaaattacgwgtagatttttgcattccaaatatggtaaagaagaagcaggaagctggggggcctaaacaggccacacagaaatggacaaggaagaggccagcagcagcttgtggggacaagatgtcaagccccaaattttaaacccaccaaccatcctccaaagtctggctctgtttaacaaggctgtggtctgacactagatgccgcctcagtgactaaagcataatttcccgtctcctgggagtgttgacagctgactcctggcaacaatactcacagcacagtaaagttccttcatccaagttcatgtcccttctcagggcatcccacatccgagaactgcttggtacagaaat

SEQ ID NO: 451392 - DNA, 364 bp, Homo sapiens
tgtggggacaagatgtcaagccccaaattttaaacccaccaaccatcctccaaagtctggctctgtttaacaaggctgtggtctgacactagatgcygcctcagtgactaaagcataatttcccgtctcctgggagtgttgacagctgactcctggcaacaatactcacagcacagtaaagttccttcatccaagttcatgtcccttctcagggcatcccacatccgagaactgcttggtacagaaatataatggcctggttttcttgctccaattcgaggtcattaggtaaactcaccaagatccctgtagagtggactgcagccatgatagtgattgcattctagccgacttcctgctccgc

SEQ ID NO: 451393 - DNA, 364 bp, Homo sapiens
tgtggggacaagatgtcaagccccaaattttaaacccaccaaccatcctccaaagtctggctctgtttaacaaggctgtggtctgacactagatgccgcctcagtgactaaagcataatttcccgtctcctgggagtgttgacagctgactcctggcaacaatactcacagcacagtaaagttccttcatccaagttcatgtcccttctcagggcatcccacatccgagaactgcttggtacagaaatataatggcctggttttcttgctccaattcgagktcattaggtaaactcaccaagatccctgtagagtggactgcagccatgatagtgattgcattctagccgacttcctgctccgc

SEQ ID NO: 451394 - DNA, 364 bp, Homo sapiens
tgtggggacaagatgtcaagccccaaattttaaacccaccaaccatcctccaaagtctggctctgtttaacaaggctgtggtctgacactagatgccgcctcagtgactaaagcataatttcccgtctcctgggagtgttgacagctgactcctggcaacaatactcacagcacagtaaagttccttcatccaagttcatgtcccttctcagggcatcccacatccgagaactgcttggtacagaaatataatggcctggttttcttgctccaattcgaggtcattaggtaaactcaccaagatccctgtagagtggactgcrgccatgatagtgattgcattctagccgacttcctgctccgc

SEQ ID NO: 451395 - DNA, 569 bp, Homo sapiens
tgacattgcacgctcatatgagcttatggatcaaaccatgtgtatgatttctaagatccctcgtgcagtatatatttgcactgtttataaatgacatcccyttgaattgaattcagtgcaattcaaaacagtaatttgtgggaaaaagtagatatgcagatagcctggactctagagaggcaaacatcatttggaaaataatagtgaaccggctggtctatgagggaagaaaacagagtgaatatagactattagtgaacaaggatattttcccatgtatattcaaattaaggtgaacttctttagagaattgtgccttagaaagaaaaagtatttccctatatttgagtcctcacaagttttcctacgatgagtgcttttgtgattattttgaataacaaagtaatatttaaagaaactctcttaccctgaatgtactttacatcaattgatgttgcatatagagagcatcagaatcaagccacaagaaaaggaggaacataacttagcaaagacttagaggattagtcctaatagtgtgaaatcaaaagttcaagtgagggaataaa

SEQ ID NO: 451396 - DNA, 569 bp, Homo sapiens
tgacattgcacgctcatatgagcttatggatcaaaccatgtgtatgatttctaagatccctcgtgcagtatatatttgcactgtttataaatgacatccctttgaattgaattcagtgcaattcaaaacagtaatttgtgggaaaaagtagatatgcagatagcctggactctagagaggcaaacatcatttggaraataatagtgaaccggctggtctatgagggaagaaaacagagtgaatatagactattagtgaacaaggatattttcccatgtatattcaaattaaggtgaacttctttagagaattgtgccttagaaagaaaaagtatttccctatatttgagtcctcacaagttttcctacgatgagtgcttttgtgattattttgaataacaaagtaatatttaaagaaactctcttaccctgaatgtactttacatcaattgatgttgcatatagagagcatcagaatcaagccacaagaaaaggaggaacataacttagcaaagacttagaggattagtcctaatagtgtgaaatcaaaagttcaagtgagggaataaa

SEQ ID NO: 451397 - DNA, 569 bp, Homo sapiens
tgacattgcacgctcatatgagcttatggatcaaaccatgtgtatgatttctaagatccctcgtgcagtatatatttgcactgtttataaatgacatccctttgaattgaattcagtgcaattcaaaacagtaatttgtgggaaaaagtagatatgcagatagcctggactctagagaggcaaacatcatttggaaaataatagtgaaccggctrgtctatgagggaagaaaacagagtgaatatagactattagtgaacaaggatattttcccatgtatattcaaattaaggtgaacttctttagagaattgtgccttagaaagaaaaagtatttccctatatttgagtcctcacaagttttcctacgatgagtgcttttgtgattattttgaataacaaagtaatatttaaagaaactctcttaccctgaatgtactttacatcaattgatgttgcatatagagagcatcagaatcaagccacaagaaaaggaggaacataacttagcaaagacttagaggattagtcctaatagtgtgaaatcaaaagttcaagtgagggaataaa

SEQ ID NO: 451398 - DNA, 522 bp, Homo sapiens
caaaacagtaatttgtgggaaaaagtagatatgcagatagcctggactctagagaggcaaacatcatttggaaaataatagtgaaccggctggtctatgagggaagaaaacagagtgaatatagactattagtgaacaaggatattttcccatgtatattcaaattaaggtgaacttctttagagaattgtgccttagaaagaaaaagtatttccctatatttgagtcctcacaagttttcctacgatgagtgcttttgtgattattttgaataacaaagtaatatttaaagaaactctcttrccctgaatgtactttacatcaattgatgttgcatatagagagcatcagaatcaagccacaagaaaaggaggaacataacttagcaaagacttagaggattagtcctaatagtgtgaaatcaaaagttcaagtgagggaataaatgcagcttttaatgattacttaaatgaagtttaactctagcaggatctacaagaaattggcaacctttggcttcag

SEQ ID NO: 451399 - DNA, 643 bp, Homo sapiens
gaattgggaagctatgttaaattgagaaggggaagggaaaccctctaagagcatcgattaatcaatgaccgaaagctgatgagacttgtctggaattttttttttggagactctgatacttaaaattttgacaaaataaggagatgaactgagtagtgtggaacagacattttgtgaagtcagcagagaaaggagagacaaatatggtaaggggaaaatggtatgaagtaataatatctatgaagtgctttctaaagtataacacatgtaagttgtgttaaatgtaaastatcatgattatatcattactgtctgactgatacaactatatccacctcagttagccacataagatcaattttcctataccttagagaataccagtaacctccagttcagaaacagcataaatatctatccacagctgagcagacacatacagctagctaccagatgaaatgggctatatcttcaaatactattgttttctgttttttaattgtggcaaaacacactcaacaatttgcatcttaaccactgttaattatacaattcggtgtcattaaatgtattcacaatgttgtgcaagcatcaccaccacccatctccataattctttttgtcttttaaaattgaaatcctg

SEQ ID NO: 451400 - DNA, 410 bp, Homo sapiens
aaaaaggagacactgcaactgatactgcagaaattcaagtaatcattagaaactattatgaccaactatattccaataaattgaaaarcctgcaagtaatggccaggcaccgtggctcatgcctgtaatcccaacactttgggaagccaaggcaggtgatcacctgagatcaggagttcaaaaccagccaggccaacatggtgaaaccccatctctactaaaaatacaaaaattagccaggcatggtggtgtgcacctgcactcccagctactacagaggctgaggcaggagaatcgcttgaacctgggaggcagaagttgcagtgagctgagattgtaccaagctccatcctgggtgacagagcaaaactccatctcaaaaaaaaaaaaaaaaaaaaaacacaaccaaa

SEQ ID NO: 451401 - DNA, 410 bp, Homo sapiens
aaaaaggagacactgcaactgatactgcagaaattcaagtaatcattagaaactattatgaccaactatattccaataaattgaaaaacctgcaagtaatggccaggcaccgtggctcatgcctgtaatcccaacactttgggaagccaaggcaggtgatcacctgagatcaggagttcaaaaccagccaggccaacatggtgaaaccccatctctactaaaaatacaaaaattagccaggcatggtggygtgcacctgcactcccagctactacagaggctgaggcaggagaatcgcttgaacctgggaggcagaagttgcagtgagctgagattgtaccaagctccatcctgggtgacagagcaaaactccatctcaaaaaaaaaaaaaaaaaaaaaacacaaccaaa

SEQ ID NO: 451402 - DNA, 410 bp, Homo sapiens
aaaaaggagacactgcaactgatactgcagaaattcaagtaatcattagaaactattatgaccaactatattccaataaattgaaaaacctgcaagtaatggccaggcaccgtggctcatgcctgtaatcccaacactttgggaagccaaggcaggtgatcacctgagatcaggagttcaaaaccagccaggccaacatggtgaaaccccatctctactaaaaatacaaaaattagccaggcatggtggtrtgcacctgcactcccagctactacagaggctgaggcaggagaatcgcttgaacctgggaggcagaagttgcagtgagctgagattgtaccaagctccatcctgggtgacagagcaaaactccatctcaaaaaaaaaaaaaaaaaaaaaacacaaccaaa

SEQ ID NO: 451403 - DNA, 410 bp, Homo sapiens
aaaaaggagacactgcaactgatactgcagaaattcaagtaatcattagaaactattatgaccaactatattccaataaattgaaaaacctgcaagtaatggccaggcaccgtggctcatgcctgtaatcccaacactttgggaagccaaggcaggtgatcacctgagatcaggagttcaaaaccagccaggccaacatggtgaaaccccatctctactaaaaatacaaaaattagccaggcatggtggtgtgcacctgyactcccagctactacagaggctgaggcaggagaatcgcttgaacctgggaggcagaagttgcagtgagctgagattgtaccaagctccatcctgggtgacagagcaaaactccatctcaaaaaaaaaaaaaaaaaaaaaacacaaccaaa

SEQ ID NO: 451404 - DNA, 512 bp, Homo sapiens
gaagttgcagtgagctgagattgtaccaagctccatcctgggtgacagagcaaaactccatctcaaaaaaaaaaaaaaaaaaaaaacacaaccaaaccacaaacctagaagaactggataaatgagattgaacccataataaaacatctcctagcaaagaaaagcctggatccaatggcttcactgattaattttaccaaacaytgaaggaagaattactatcaatcctactcaaactattccaaaaaacagagaagtctgtaatatttccaaaatcattctatgaaaaaggccattcatcatgtctaagtgggattcatcccaaggatgccaacatggttcaacatatgcaaatcaatcaatgtgacacatcatatcaacagaatgaaggacaaaaaccatatggtaatttcaattgatgctgaaaagcatttaataaaatccaacatccctgtgataaaaagaaacccccaaaataactagatttagaaggaacataccacaacacaata

SEQ ID NO: 451405 - DNA, 512 bp, Homo sapiens
gaagttgcagtgagctgagattgtaccaagctccatcctgggtgacagagcaaaactccatctcaaaaaaaaaaaaaaaaaaaaaacacaaccaaaccacaaacctagaagaactggataaatgagattgaacccataataaaacatctcctagcaaagaaaagcctggatccaatggcttcactgattaattttaccaaacattgaaggaagaattactatcaatcctactcaaactattccaaaaaacagagaagtctgtaatatttccaaaatcattctatgaaaaaggccattcatcatgtctaagtgggattcatcccaaggatgccaacatggttcaacatatgcaaatcaatcaatgtgacacatcatatcaacagaatgaaggacaaaaamcatatggtaatttcaattgatgctgaaaagcatttaataaaatccaacatccctgtgataaaaagaaacccccaaaataactagatttagaaggaacataccacaacacaata

SEQ ID NO: 451406 - DNA, 512 bp, Homo sapiens
gaagttgcagtgagctgagattgtaccaagctccatcctgggtgacagagcaaaactccatctcaaaaaaaaaaaaaaaaaaaaaacacaaccaaaccacaaacctagaagaactggataaatgagattgaacccataataaaacatctcctagcaaagaaaagcctggatccaatggcttcactgattaattttaccaaacattgaaggaagaattactatcaatcctactcaaactattccaaaaaacagagaagtctgtaatatttccaaaatcattctatgaaaaaggccattcatcatgtctaagtgggattcatcccaaggatgccaacatggttcaacatatgcaaatcaatcaatgtgacacatcatatcaacagaatgaaggacaaaaaccatatggtaatttcaattgatgctgaaaagcatttaataaaatccaacwtccctgtgataaaaagaaacccccaaaataactagatttagaaggaacataccacaacacaata

SEQ ID NO: 451407 - DNA, 512 bp, Homo sapiens
gaagttgcagtgagctgagattgtaccaagctccatcctgggtgacagagcaaaactccatctcaaaaaaaaaaaaaaaaaaaaaacacaaccaaaccacaaacctagaagaactggataaatgagattgaacccataataaaacatctcctagcaaagaaaagcctggatccaatggcttcactgattaattttaccaaacattgaaggaagaattactatcaatcctactcaaactattccaaaaaacagagaagtctgtaatatttccaaaatcattctatgaaaaaggccattcatcatgtctaagtgggattcatcccaaggatgccaacatggttcaacatatgcaaatcaatcaatgtgacacatcatatcaacagaatgaaggacaaaaaccatatggtaatttcaattgatgctgaaaagcatttaataaaatccaacatccctgtgataaaaagaaacccccaaaawaactagatttagaaggaacataccacaacacaata

SEQ ID NO: 451408 - DNA, 450 bp, Homo sapiens
aaaatcctaaaatttatatgaaatcataaaagacccagaatacccaaagccatccrtagcaaaaagaacaaaactggaagaatcacatcacctgacgttaaattatactacagagcaattgtaagctaaacagcatggtactggcataaaacagacacatagaccaatggaacagaatagagaacccagaaataaatccttacatttacaactaactcattttcaatgaaggtgccaagaatatacatgggggagaggacagtctcttcaccaaattgtgctgggaaaactagatattcattggcagattttttttcttttttgagatggagtctagctccgttgctcaggctgcagtgcagtggcgcgatctgggctcactgcaagctccacctcccgggttcacaccattctcctcctcagcctcccaagtagctgggagtacaagtg

SEQ ID NO: 451409 - DNA, 450 bp, Homo sapiens
aaaatcctaaaatttatatgaaatcataaaagacccagaatacccaaagccatccgtagcaaaaagaacaaaactggaagaatcacatcacctgacgttaaattatactacagagcaattgtaagctaaacagcatggtactggcataaaacagacacatagaccaatggaacagaatagagaacccagaaataaatccttacatttacaactaactcattttcaatgaaggtgccaagaatatacatgggggagaggacagtctcttcaccaaattgtgctgggaaaactagatattcattggcagawtttttttcttttttgagatggagtctagctccgttgctcaggctgcagtgcagtggcgcgatctgggctcactgcaagctccacctcccgggttcacaccattctcctcctcagcctcccaagtagctgggagtacaagtg

SEQ ID NO: 451410 - DNA, 532 bp, Homo sapiens
gcatagtaaagaaaacaatggacaaagtgaaaagacaatccacagaatggaagaaaatatttgcaaactatatatctgacaagggattaataaccagaatatataaggatttcaaacaactctataagaaaaaaactaataatccaattatttaaatggrcaaaaaatctgaacagacatttctcaaaagaaggcatgcaggtcaggcgcagtggctcacaactgtaattccagcattttggggagccaagacagttggaccacttgagcccaggagttcaagaccaacctgaaaaacatagcaaataattttaaaacctacctgggcatggtgatgcatgcctgtggtcccggctactcaggaggctgaggtgggaggattgcttgaaccctggtagtcatgtagcttactacagtaagccatcattataccactgcactccagcctgggtgacagagtgagccactgtctcaaaaaatgagcaaaaacaaaaaagaagatatataaatgtcaaataggtatatgaaaaga

SEQ ID NO: 451411 - DNA, 532 bp, Homo sapiens
gcatagtaaagaaaacaatggacaaagtgaaaagacaatccacagaatggaagaaaatatttgcaaactatatatctgacaagggattaataaccagaatatataaggatttcaaacaactctataagaaaaaaactaataatccaattatttaaatggacaaaaaatctgaacagacatttctcaaaagaaggcatgcaggtcaggygcagtggctcacaactgtaattccagcattttggggagccaagacagttggaccacttgagcccaggagttcaagaccaacctgaaaaacatagcaaataattttaaaacctacctgggcatggtgatgcatgcctgtggtcccggctactcaggaggctgaggtgggaggattgcttgaaccctggtagtcatgtagcttactacagtaagccatcattataccactgcactccagcctgggtgacagagtgagccactgtctcaaaaaatgagcaaaaacaaaaaagaagatatataaatgtcaaataggtatatgaaaaga

SEQ ID NO: 451412 - DNA, 532 bp, Homo sapiens
gcatagtaaagaaaacaatggacaaagtgaaaagacaatccacagaatggaagaaaatatttgcaaactatatatctgacaagggattaataaccagaatatataaggatttcaaacaactctataagaaaaaaactaataatccaattatttaaatggacaaaaaatctgaacagacatttctcaaaagaaggcatgcaggtcaggcgcagtggctcacaactgtaattccagcattttggggagccaagacagttggaccacttgagcccaggagttcaagaccaacctgaaaaacatagcaaataattttaaaacctacctgggcatggtgatgcatgcctgtggtcccrgctactcaggaggctgaggtgggaggattgcttgaaccctggtagtcatgtagcttactacagtaagccatcattataccactgcactccagcctgggtgacagagtgagccactgtctcaaaaaatgagcaaaaacaaaaaagaagatatataaatgtcaaataggtatatgaaaaga

SEQ ID NO: 451413 - DNA, 532 bp, Homo sapiens
gcatagtaaagaaaacaatggacaaagtgaaaagacaatccacagaatggaagaaaatatttgcaaactatatatctgacaagggattaataaccagaatatataaggatttcaaacaactctataagaaaaaaactaataatccaattatttaaatggacaaaaaatctgaacagacatttctcaaaagaaggcatgcaggtcaggcgcagtggctcacaactgtaattccagcattttggggagccaagacagttggaccacttgagcccaggagttcaagaccaacctgaaaaacatagcaaataattttaaaacctacctgggcatggtgatgcatgcctgtggtcccggctactcaggaggctgaggtgggaggattgcttgaaccctggtagtcatgtagcttactacagtaagccatcattataccactgcactccagcctgggtgacagagtgagmcactgtctcaaaaaatgagcaaaaacaaaaaagaagatatataaatgtcaaataggtatatgaaaaga

SEQ ID NO: 451414 - DNA, 518 bp, Homo sapiens
taaaacctacctgggcatggtgatgcatgcctgtggtcccggctactcaggaggctgaggtgggaggattgcttgaaccctggtagtcatgtagcttactacagtaagccatcattataccactgcactccagcctgggtgacagagtgagccactgtctcaaaaaatgagcaaaaacaaaaaagaagatatataaatgtcaaataggtatatgaaaagatgctcaatatcactgatcatcagagaaattcaaatcaaaactacaataagatatcatcttacccccattaaaatggcttttatgcaaaagacaggcaataacaaatgcttgcaagaatgtagggaaaagagaacactcttactctgttggtgggaatgtaaattaktacattcactatggagaacaatatggaggtccctcaaaaaattaaaaatagaactatcatatgatacagcaatcccactgctgggtatatacccaagggagggaaaattagtatatgaaagagatatctgca

SEQ ID NO: 451415 - DNA, 518 bp, Homo sapiens
taaaacctacctgggcatggtgatgcatgcctgtggtcccggctactcaggaggctgaggtgggaggattgcttgaaccctggtagtcatgtagcttactacagtaagccatcattataccactgcactccagcctgggtgacagagtgagccactgtctcaaaaaatgagcaaaaacaaaaaagaagatatataaatgtcaaataggtatatgaaaagatgctcaatatcactgatcatcagagaaattcaaatcaaaactacaataagatatcatcttacccccattaaaatggcttttatgcaaaagacaggcaataacaaatgcttgcaagaatgtagggaaaagagaacactcttactctgttggtgggaatgtaaattattacrttcactatggagaacaatatggaggtccctcaaaaaattaaaaatagaactatcatatgatacagcaatcccactgctgggtatatacccaagggagggaaaattagtatatgaaagagatatctgca

SEQ ID NO: 451416 - DNA, 562 bp, Homo sapiens
gttcccaaaaaagactgtgactgtttctgtgtccatcctgaactggttaccatgagtgtgtgtgtgtgtgtgtgtgtgtgtgtgtgtgtgtgtktgtgtgtgtgtgtgtgaattaaaagaggagttacatgctggggcatttctggtatctcaactggcatctcagctgctggtgatgatggctatacattttcctcagtattcaatgtgcgtattttgagttaacagtccacccattggctgaggcaggtggatcatctgaggtgaagagtttgagaccagcctggccaatatgtgaaactctgtctctactaaaaatacaaaaattagccaggcatggttgcagcacctgtaatcccagctactcgggaggccaagacaggagaattgcttgaatccaggagacagaatttgcagtgagctgagatggaccactgcactccagcttgggcagcagagtgagacttggtctcaaaaaaaaaaagttattgtgacatgctgtacacattcacaaattcagtgtctcccagaagcctgagattctttctttctttctttcttt

SEQ ID NO: 451417 - DNA, 562 bp, Homo sapiens
gttcccaaaaaagactgtgactgtttctgtgtccatcctgaactggttaccatgagtgtgtgtgtgtgtgtgtgtgtgtgtgtgtgtgtgtgtttgtgtgtgtgtgtgtgaattaaaagaggagttacatgctggggcatttctggtatctcaactggcatctcagctgctggtgatgatggctatacattttcctcagtattcawtgtgcgtattttgagttaacagtccacccattggctgaggcaggtggatcatctgaggtgaagagtttgagaccagcctggccaatatgtgaaactctgtctctactaaaaatacaaaaattagccaggcatggttgcagcacctgtaatcccagctactcgggaggccaagacaggagaattgcttgaatccaggagacagaatttgcagtgagctgagatggaccactgcactccagcttgggcagcagagtgagacttggtctcaaaaaaaaaaagttattgtgacatgctgtacacattcacaaattcagtgtctcccagaagcctgagattctttctttctttctttcttt

SEQ ID NO: 451418 - DNA, 562 bp, Homo sapiens
gttcccaaaaaagactgtgactgtttctgtgtccatcctgaactggttaccatgagtgtgtgtgtgtgtgtgtgtgtgtgtgtgtgtgtgtgtttgtgtgtgtgtgtgtgaattaaaagaggagttacatgctggggcatttctggtatctcaactggcatctcagctgctggtgatgatggctatacattttcctcagtattcaatgtgcgtattttgagttaacagtccacccattggctgaggcaggtggatcatctgaggtgaagagttygagaccagcctggccaatatgtgaaactctgtctctactaaaaatacaaaaattagccaggcatggttgcagcacctgtaatcccagctactcgggaggccaagacaggagaattgcttgaatccaggagacagaatttgcagtgagctgagatggaccactgcactccagcttgggcagcagagtgagacttggtctcaaaaaaaaaaagttattgtgacatgctgtacacattcacaaattcagtgtctcccagaagcctgagattctttctttctttctttcttt

SEQ ID NO: 451419 - DNA, 562 bp, Homo sapiens
gttcccaaaaaagactgtgactgtttctgtgtccatcctgaactggttaccatgagtgtgtgtgtgtgtgtgtgtgtgtgtgtgtgtgtgtgtttgtgtgtgtgtgtgtgaattaaaagaggagttacatgctggggcatttctggtatctcaactggcatctcagctgctggtgatgatggctatacattttcctcagtattcaatgtgcgtattttgagttaacagtccacccattggctgaggcaggtggatcatctgaggtgaagagtttgagaccagcctggccaatatgtgaaactctgtctctactaaaaatacaaaaattagccaggcatggttgcagcacctgtartcccagctactcgggaggccaagacaggagaattgcttgaatccaggagacagaatttgcagtgagctgagatggaccactgcactccagcttgggcagcagagtgagacttggtctcaaaaaaaaaaagttattgtgacatgctgtacacattcacaaattcagtgtctcccagaagcctgagattctttctttctttctttcttt

SEQ ID NO: 451420 - DNA, 543 bp, Homo sapiens
cattatgttaagggaaataagccaagcacggaaaggcagacattgcatgttctcacttatttgtgggatctaaaaatcaaaacaattgaactcawggacatagtaagtactagggggctggggggggagacagggcacgggtaatgggtacaaaaataggcagaaggaatgaataagacatactatttgatagcacaacagggggactctagtcaataattgtacatttaaaaataactaaaagaatctaattggattgtaacacaaaggaaacatgcttaaaaggatggatacccactctccatgatgtgattagttcatgctgcatgcctgtatcaaaacatctcatgcaccccataaatatatatgcttattatatactcacaaaaatgcttgaaaataaaaataaaggaactactgaaggtcaggtcagagtggaaatgtaaaaatactaattagagaataatgtgaatacaacaggaatcctgttggtattctatttatattgtaagcagcagttcaattgttttgtaaaagtaattt

SEQ ID NO: 451421 - DNA, 543 bp, Homo sapiens
cattatgttaagggaaataagccaagcacggaaaggcagacattgcatgttctcacttatttgtgggatctaaaaatcaaaacaattgaactcatggacatagtaagtactagggggctggggggggagacagggcacgggtaatgggtacaaaaataggcagaaggaatgaataagacatactatttgatagcacaacagggggactctagtcaataattgtacatttaaaaataactaaaagaatctaattggattgtaacacaaaggaaacatgcttaaarggatggatacccactctccatgatgtgattagttcatgctgcatgcctgtatcaaaacatctcatgcaccccataaatatatatgcttattatatactcacaaaaatgcttgaaaataaaaataaaggaactactgaaggtcaggtcagagtggaaatgtaaaaatactaattagagaataatgtgaatacaacaggaatcctgttggtattctatttatattgtaagcagcagttcaattgttttgtaaaagtaattt

SEQ ID NO: 451422 - DNA, 543 bp, Homo sapiens
cattatgttaagggaaataagccaagcacggaaaggcagacattgcatgttctcacttatttgtgggatctaaaaatcaaaacaattgaactcatggacatagtaagtactagggggctggggggggagacagggcacgggtaatgggtacaaaaataggcagaaggaatgaataagacatactatttgatagcacaacagggggactctagtcaataattgtacatttaaaaataactaaaagaatctaattggattgtaacacaaaggaaacatgcttaaaaggatggatacccactctccatgatgtgattagttcatgctgcatgcctgtatcaaaacatctcatgcaccccrtaaatatatatgcttattatatactcacaaaaatgcttgaaaataaaaataaaggaactactgaaggtcaggtcagagtggaaatgtaaaaatactaattagagaataatgtgaatacaacaggaatcctgttggtattctatttatattgtaagcagcagttcaattgttttgtaaaagtaattt

SEQ ID NO: 451423 - DNA, 543 bp, Homo sapiens
cattatgttaagggaaataagccaagcacggaaaggcagacattgcatgttctcacttatttgtgggatctaaaaatcaaaacaattgaactcatggacatagtaagtactagggggctggggggggagacagggcacgggtaatgggtacaaaaataggcagaaggaatgaataagacatactatttgatagcacaacagggggactctagtcaataattgtacatttaaaaataactaaaagaatctaattggattgtaacacaaaggaaacatgcttaaaaggatggatacccactctccatgatgtgattagttcatgctgcatgcctgtatcaaaacatctcatgcaccccataaatatatatgcttattatatactcacaaaaatgyttgaaaataaaaataaaggaactactgaaggtcaggtcagagtggaaatgtaaaaatactaattagagaataatgtgaatacaacaggaatcctgttggtattctatttatattgtaagcagcagttcaattgttttgtaaaagtaattt

SEQ ID NO: 451424 - DNA, 624 bp, Homo sapiens
attcattatttaaaactgcaaagtgaaaataattgtaacaagaacatattcactagcaatctgagcactcatgatattaatgtctgttctggagagaattatgtccccccagaattcctaacctgaagccctatctcccagtgtgactgtatttggagaaggagcttttaagaagttaaaggttaaataggggcaaaagggtaaggccctaatctgttaggactggggtcatcatccaaaaaggaagagacaccagagatacatatctctctcttctctctctctctgcctcccttcttctctctctctccctctctccctctccccacatacatttgttaaattgaggttttttgttagaacatatatagtggcattttaatatagtattactctacttaaaacatacacacacacacacacacacacacacaattttgataaattcttttttgaggataaggccgggcatggtggytcacacctgtaatcccagcacttggcgggattatcatatgaggtgggtggatcatctgaggtcagaggttcaagaccagcctggccaacatggtgaaacccttctctattaaaaatacaaaaaattagctgggcgtggtggcgggc

SEQ ID NO: 451425 - DNA, 506 bp, Homo sapiens
gtctacagtattcagtacagtaacatgctgcacaggtttgtagcctaggaggaataggctataccacctaacctagatatgtaatcagctatagcatctaggtttgtgtaagtaaactctgtgatgttcacacaataataaaatcgtccagcaatgcatttctcagacacacccctgtcattaagtgacacatgactgtattagttaacacyatgggaacttcatgggaaatggacactctagctccaccataaatagaaactgtttatgtcaaaaaacacataaaagcatagttgcaagattacatttccttccagatatttcatttagtatctccacagatcactaacttcctgaatagcattcttgtgtctccactgcctcacatttgatttcaggtcattccatcaattgtcaaagacgcatccaacattaacttcccaactactggtttggattgtgtcaacattgtcattctgggccacaacaacacaaaaggctaactc

SEQ ID NO: 451426 - DNA, 506 bp, Homo sapiens
gtctacagtattcagtacagtaacatgctgcacaggtttgtagcctaggaggaataggctataccacctaacctagatatgtaatcagctatagcatctaggtttgtgtaagtaaactctgtgatgttcacacaataataaaatcgtccagcaatgcatttctcagacacacccctgtcattaagtgacacatgactgtattagttaacactatgggaacttcatgggaaatggacactctagctccaccataaatagaaactgtttatgtcaaaaaacacataaaagcatagttgcaagattacatttccttccagatatttcatttagtatctccacagatcactaacttcctgaatagcattcttgtgtctccactgcctcacatttgatttcaggtcattccatcaattgtcaaagacgcatccaacattaacttyccaactactggtttggattgtgtcaacattgtcattctgggccacaacaacacaaaaggctaactc

SEQ ID NO: 451427 - DNA, 560 bp, Homo sapiens
gggccccagtgccatctgcttttcctcaggactctgctccatcagccatcaggtggcagctactcatgctgttggaacctggccatctgggcttccttgagtgggtgaggttgctggcttgtccacctgcttaaaggtactatggggatagaacacaaataataataatgcatttttcaaacaaattaattccttgattttcaaacaaattgaagacaaaggaaactcatgattcaaatgaatacatatggctcattttattcaatatttatgcttacagaatatatgtaaataagacattcccatgattaatattagtatttaagactgataamcttttgggtgggcagttaaagcttatcttctactattttctaacttcagaaatgcttttgtttgaaagttgggtgacaaagtttcaaggagattaagtcccaatattcctattttaaatctctcagcttgtgcagcagggcaggtaaacatgaagtttttaaggatagaagggacctgagagatagcagaatatgtctgctacataacaggtactcaggttatgt

SEQ ID NO: 451428 - DNA, 420 bp, Homo sapiens
tactatataaaatgtccagaaaatctagtgttaatgaggctgtgcagcctggacatttgatgtctcctctgtgggaatgtgaactaacccaaccattctgaataattattggctctgtgtgttaacagtctagagtcctgaaacaaggatcttaattctaaaataaaatcctattctaagaatataccaagggttgataatcaaggaagtttcaaagttatagagaagaaccttmatcctagcattatatatgtaatcacccatataaaccagatagtgttgaatgaaactgcagaaaaacaaagagcctacagaatatgtttctctttgtgtacaactgtaaatgtacacatctatccatgtaaaattttacatctcaggaggataggtaccaacatgttaacatgctatatctataag

SEQ ID NO: 451429 - DNA, 420 bp, Homo sapiens
tactatataaaatgtccagaaaatctagtgttaatgaggctgtgcagcctggacatttgatgtctcctctgtgggaatgtgaactaacccaaccattctgaataattattggctctgtgtgttaacagtctagagtcctgaaacaaggatcttaattctaaaataaaatcctattctaagaatataccaagggttgataatcaaggaagtttcaaagttatagagaagaaccttaatcctagcattatatatgtaatcayccatataaaccagatagtgttgaatgaaactgcagaaaaacaaagagcctacagaatatgtttctctttgtgtacaactgtaaatgtacacatctatccatgtaaaattttacatctcaggaggataggtaccaacatgttaacatgctatatctataag

SEQ ID NO: 451430 - DNA, 420 bp, Homo sapiens
tactatataaaatgtccagaaaatctagtgttaatgaggctgtgcagcctggacatttgatgtctcctctgtgggaatgtgaactaacccaaccattctgaataattattggctctgtgtgttaacagtctagagtcctgaaacaaggatcttaattctaaaataaaatcctattctaagaatataccaagggttgataatcaaggaagtttcaaagttatagagaagaaccttaatcctagcattatatatgtaatcacccatataaaccagatagtgttgaatgaaaytgcagaaaaacaaagagcctacagaatatgtttctctttgtgtacaactgtaaatgtacacatctatccatgtaaaattttacatctcaggaggataggtaccaacatgttaacatgctatatctataag

SEQ ID NO: 451431 - DNA, 420 bp, Homo sapiens
tactatataaaatgtccagaaaatctagtgttaatgaggctgtgcagcctggacatttgatgtctcctctgtgggaatgtgaactaacccaaccattctgaataattattggctctgtgtgttaacagtctagagtcctgaaacaaggatcttaattctaaaataaaatcctattctaagaatataccaagggttgataatcaaggaagtttcaaagttatagagaagaaccttaatcctagcattatatatgtaatcacccatataaaccagatagtgttgaatgaaactrcagaaaaacaaagagcctacagaatatgtttctctttgtgtacaactgtaaatgtacacatctatccatgtaaaattttacatctcaggaggataggtaccaacatgttaacatgctatatctataag

SEQ ID NO: 451432 - DNA, 452 bp, Homo sapiens
acacacacaccgaggttatatacacacacaaatatatatataaacatacatgtttatataggtacacacacacatacatatacacagatggtcaacaactgataatggttcaatttatgattttttttactttatgatgaagcaaaagtgatagctttgaatagaatataaccattctgcttttcactttcagtacaatattcaacaaattacataaaatatccaatactttattataaagcaggttttgtattcaacgattttgcycaattgtcagctgatgtaagtgttctgagcacattaaaggtatgccaggctaagctgtgatattcagtaagttagatattaaatacatttttaacttactgtattttcaatttataatcagcttatcaagacttaaccccattgtacattgaaaagcatttgtattgcattaaacatgttatata

SEQ ID NO: 451433 - DNA, 446 bp, Homo sapiens
tggttaaaatgtttttgggcagggtcagtggcttacacctgtaatcccagcactttggtaggctgaggtgggcagatcacttgaggtcaggagtttgagaccagcctggcaaacagggtgaaaccccatctctactaaaaatacaaaaattatctgagtgtggtggcatgtgcctgtaatcccagctactagggaggctgaggtgtgagaattgcttgaactakgcaagcagaggttgcagtgagccaagatcatgccattgcactccagcctgggcaacagagtaaggttctgtcaaaaataaaaaagaaagaaagaaaagaaaaaaatgtttttagcttcaagtaacagaatagtcaactaattgaagaaaaaaacaaggagcaactttgaccaaatcgcacaacaaatagatggtatcaatgcttagttaattcaacatgatc

SEQ ID NO: 451434 - DNA, 446 bp, Homo sapiens
tggttaaaatgtttttgggcagggtcagtggcttacacctgtaatcccagcactttggtaggctgaggtgggcagatcacttgaggtcaggagtttgagaccagcctggcaaacagggtgaaaccccatctctactaaaaatacaaaaattatctgagtgtggtggcatgtgcctgtaatcccagctactagggaggctgaggtgtgagaattgcttgaactaggcaagcagaggttgcagtgagccaagatcatgccattgcactccagcctgggcaacagagtaaggttctgtcaaaaawaaaaaagaaagaaagaaaagaaaaaaatgtttttagcttcaagtaacagaatagtcaactaattgaagaaaaaaacaaggagcaactttgaccaaatcgcacaacaaatagatggtatcaatgcttagttaattcaacatgatc

SEQ ID NO: 451435 - DNA, 446 bp, Homo sapiens
tggttaaaatgtttttgggcagggtcagtggcttacacctgtaatcccagcactttggtaggctgaggtgggcagatcacttgaggtcaggagtttgagaccagcctggcaaacagggtgaaaccccatctctactaaaaatacaaaaattatctgagtgtggtggcatgtgcctgtaatcccagctactagggaggctgaggtgtgagaattgcttgaactaggcaagcagaggttgcagtgagccaagatcatgccattgcactccagcctgggcaacagagtaaggttctgtcaaaaataaaaaagaaagaaagaaaagaaaaaaatgtttttagcttcaagtaacagaatagtcaactaattgaagaaaaaaacaaggagcaactttkaccaaatcgcacaacaaatagatggtatcaatgcttagttaattcaacatgatc

SEQ ID NO: 451436 - DNA, 446 bp, Homo sapiens
tggttaaaatgtttttgggcagggtcagtggcttacacctgtaatcccagcactttggtaggctgaggtgggcagatcacttgaggtcaggagtttgagaccagcctggcaaacagggtgaaaccccatctctactaaaaatacaaaaattatctgagtgtggtggcatgtgcctgtaatcccagctactagggaggctgaggtgtgagaattgcttgaactaggcaagcagaggttgcagtgagccaagatcatgccattgcactccagcctgggcaacagagtaaggttctgtcaaaaataaaaaagaaagaaagaaaagaaaaaaatgtttttagcttcaagtaacagaatagtcaactaattgaagaaaaaaacaaggagcaactttgaccaaatcgsacaacaaatagatggtatcaatgcttagttaattcaacatgatc

SEQ ID NO: 451437 - DNA, 507 bp, Homo sapiens
gctatggcattcccagccttacaacttcatgtgacaaaattcaatggcaggaaataataagtgacggcattttggaactttaaggaaaaactttaaggattggaaaacagggatgccatatgtccagtaacatgggatagccgctcctaattaaggattgctgtatgtcctgaatgactttctaatgtaaygaaggtgaataacctgctttgtttaattatacaatcccaaatgtaactgcctaagtgccaagtacttttgcatggttttaatatgccatgaattttgcaagaatgaaactactatgtatatgagaaaagatggtagattttttcatttagatactcatttcagagtctcaataggaaaaatagaacacacacaaactaagataatttaacttgggtttatttccaaagagactacttacgaaaatgtcaggggagaagggtgaaggaatcacagaaatcacaccccacaataactctggtttagcagtggcaggca

SEQ ID NO: 451438 - DNA, 507 bp, Homo sapiens
gctatggcattcccagccttacaacttcatgtgacaaaattcaatggcaggaaataataagtgacggcattttggaactttaaggaaaaactttaaggattggaaaacagggatgccatatgtccagtaacatgggatagccgctcctaattaaggattgctgtatgtcctgaatgactttctaatgtaacgaaggtgaataacctgctttgtttaattatacaatcccaaatgtaactgcctaagtgccaagtacttttgcatggttttaatatgccatgaattttgcaagaatgaaactactatgtatatgagaaaagayggtagattttttcatttagatactcatttcagagtctcaataggaaaaatagaacacacacaaactaagataatttaacttgggtttatttccaaagagactacttacgaaaatgtcaggggagaagggtgaaggaatcacagaaatcacaccccacaataactctggtttagcagtggcaggca

SEQ ID NO: 451439 - DNA, 507 bp, Homo sapiens
gctatggcattcccagccttacaacttcatgtgacaaaattcaatggcaggaaataataagtgacggcattttggaactttaaggaaaaactttaaggattggaaaacagggatgccatatgtccagtaacatgggatagccgctcctaattaaggattgctgtatgtcctgaatgactttctaatgtaacgaaggtgaataacctgctttgtttaattatacaatcccaaatgtaactgcctaagtgccaagtacttttgcatggttttaatatgccatgaattttgcaagaatgaaactactatgtatatgagaaaagatggtagattttttcatttagatactcatttcagagtctcaataggaaaaatagaacacacacaaactaagataatttaacwtgggtttatttccaaagagactacttacgaaaatgtcaggggagaagggtgaaggaatcacagaaatcacaccccacaataactctggtttagcagtggcaggca

SEQ ID NO: 451440 - DNA, 507 bp, Homo sapiens
gctatggcattcccagccttacaacttcatgtgacaaaattcaatggcaggaaataataagtgacggcattttggaactttaaggaaaaactttaaggattggaaaacagggatgccatatgtccagtaacatgggatagccgctcctaattaaggattgctgtatgtcctgaatgactttctaatgtaacgaaggtgaataacctgctttgtttaattatacaatcccaaatgtaactgcctaagtgccaagtacttttgcatggttttaatatgccatgaattttgcaagaatgaaactactatgtatatgagaaaagatggtagattttttcatttagatactcatttcagagtctcaataggaaaaatagaacacacacaaactaagataatttaacttgggtttatttccaaagagactacttacgaaaatktcaggggagaagggtgaaggaatcacagaaatcacaccccacaataactctggtttagcagtggcaggca

SEQ ID NO: 451441 - DNA, 545 bp, Homo sapiens
acagtaacacacacaagtcagttgcatttccataaactaacaatgaacaatctgcaaataaaattttaaaaagagaggccaggtgcagtggctcacacttataatcccagcactttgggaggccaaggygggcagaccacctgaggtcaggagttcgtgaccagctgggccaaacccatctctaaaataaatagtaaaactctgtctctattaaaaatacaaaaattcgctgggcgtagtggcagacaactgtagtcccagctacttgggaggctgaggcaggagaattgcttgaacttggaaggtggaagttgcagtcagctgagattgtgccactgcgctccagcttaggaaactgagtgagacgccatctcaaagaaaagaaagaaaggaaagaaagagagagaaagaaaagaaaagaaagataaaagaaaagaaatttttaaaaagaatgacatttggctgggtgcagtggttcatgcctgcaatcccagcagtttaggaggccgaggcgggcagatcacctgaggtcacaagttcaagac

SEQ ID NO: 451442 - DNA, 545 bp, Homo sapiens
acagtaacacacacaagtcagttgcatttccataaactaacaatgaacaatctgcaaataaaattttaaaaagagaggccaggtgcagtggctcacacttataatcccagcactttgggaggccaaggtgggyagaccacctgaggtcaggagttcgtgaccagctgggccaaacccatctctaaaataaatagtaaaactctgtctctattaaaaatacaaaaattcgctgggcgtagtggcagacaactgtagtcccagctacttgggaggctgaggcaggagaattgcttgaacttggaaggtggaagttgcagtcagctgagattgtgccactgcgctccagcttaggaaactgagtgagacgccatctcaaagaaaagaaagaaaggaaagaaagagagagaaagaaaagaaaagaaagataaaagaaaagaaatttttaaaaagaatgacatttggctgggtgcagtggttcatgcctgcaatcccagcagtttaggaggccgaggcgggcagatcacctgaggtcacaagttcaagac

SEQ ID NO: 451443 - DNA, 545 bp, Homo sapiens
acagtaacacacacaagtcagttgcatttccataaactaacaatgaacaatctgcaaataaaattttaaaaagagaggccaggtgcagtggctcacacttataatcccagcactttgggaggccaaggtgggcagaccacctgaggtcaggagttcgtgaccagctgggccaaacccatctctaaaataaatagtaaaactctgtctctattaaaaatacaaaaattcgctgggcgtagtggcagacaactgtagtcccagctacttgggaggctgaggcaggagaattgcttgaacttggaaggtggaagttgcagtcagctgagattgtgccactgcgctccagcttaggaaactgagtgagacgccatctcaaagaaaagaaagaaaggaaagaaagagagagaaagaaaagaaaagaaagataaaagaaaagaaatttttaaaaagaatgacatttggctgggtgcagtggytcatgcctgcaatcccagcagtttaggaggccgaggcgggcagatcacctgaggtcacaagttcaagac

SEQ ID NO: 451444 - DNA, 545 bp, Homo sapiens
acagtaacacacacaagtcagttgcatttccataaactaacaatgaacaatctgcaaataaaattttaaaaagagaggccaggtgcagtggctcacacttataatcccagcactttgggaggccaaggtgggcagaccacctgaggtcaggagttcgtgaccagctgggccaaacccatctctaaaataaatagtaaaactctgtctctattaaaaatacaaaaattcgctgggcgtagtggcagacaactgtagtcccagctacttgggaggctgaggcaggagaattgcttgaacttggaaggtggaagttgcagtcagctgagattgtgccactgcgctccagcttaggaaactgagtgagacgccatctcaaagaaaagaaagaaaggaaagaaagagagagaaagaaaagaaaagaaagataaaagaaaagaaatttttaaaaagaatgacatttggctgggtgcagtggttcatgcctgcaatcccagcagtttaggaggccgaggcrggcagatcacctgaggtcacaagttcaagac

SEQ ID NO: 451445 - DNA, 577 bp, Homo sapiens
caataatttttaggatatgacattaaaagctcaggcagtaaaagcaaaaatatatcaaacctaaaaacttctgtaccacaaaggtcacaaccaacaggktaaaaggcaaactgtagaataaaagaaaatgccagttgagtgtcccttatttgaaatgcttgggatgtgtttcagattttgtaatatttgcattattcttactggttgagcatctcgaattcaaacacctgagtctgcgatgctccaataagcatttcctttgagtgtcatgatggcactcaaaaagtttcagactttggagcatttgggatttcagatttttggatcagagacattcaacctatagttgcacatcatgtatctcataagaagtgaacattcagaatacgtaaagtactcctacagagagactaccagaagcagagaggagcagacacattttcacactagggcacctcctatctctcccggattccaattagggcagagtaagtgctagttctctgccaacccaggattaggccctgcagctgcagtgaaaataatcacagaagaaaactaagaaataaaaaaatgg

SEQ ID NO: 451446 - DNA, 577 bp, Homo sapiens
caataatttttaggatatgacattaaaagctcaggcagtaaaagcaaaaatatatcaaacctaaaaacttctgtaccacaaaggtcacaaccaacaggttaaaaggcaaactgtagaataaaagaaaatgccagttgagtgtcccttatttgaaatgcttgggatgtgtttcagattttgtaatatttgcattattcttactggttgagcatctcgaattcaaacacctgagtctgcgatgctccaataagcatttcctttgagtgtcatgwtggcactcaaaaagtttcagactttggagcatttgggatttcagatttttggatcagagacattcaacctatagttgcacatcatgtatctcataagaagtgaacattcagaatacgtaaagtactcctacagagagactaccagaagcagagaggagcagacacattttcacactagggcacctcctatctctcccggattccaattagggcagagtaagtgctagttctctgccaacccaggattaggccctgcagctgcagtgaaaataatcacagaagaaaactaagaaataaaaaaatgg

SEQ ID NO: 451447 - DNA, 577 bp, Homo sapiens
caataatttttaggatatgacattaaaagctcaggcagtaaaagcaaaaatatatcaaacctaaaaacttctgtaccacaaaggtcacaaccaacaggttaaaaggcaaactgtagaataaaagaaaatgccagttgagtgtcccttatttgaaatgcttgggatgtgtttcagattttgtaatatttgcattattcttactggttgagcatctcgaattcaaacacctgagtctgcgatgctccaataagcatttcctttgagtgtcatgatggcactcaaaaagtttcagactttggagcatttgggatttcagatttttggatcagagacattcaacctatagttgcacatcatgtatctcataagaagtgaacattcagaatacgtaaagtactcctacagagagactaccagaagcagagaggagcaracacattttcacactagggcacctcctatctctcccggattccaattagggcagagtaagtgctagttctctgccaacccaggattaggccctgcagctgcagtgaaaataatcacagaagaaaactaagaaataaaaaaatgg

SEQ ID NO: 451448 - DNA, 577 bp, Homo sapiens
caataatttttaggatatgacattaaaagctcaggcagtaaaagcaaaaatatatcaaacctaaaaacttctgtaccacaaaggtcacaaccaacaggttaaaaggcaaactgtagaataaaagaaaatgccagttgagtgtcccttatttgaaatgcttgggatgtgtttcagattttgtaatatttgcattattcttactggttgagcatctcgaattcaaacacctgagtctgcgatgctccaataagcatttcctttgagtgtcatgatggcactcaaaaagtttcagactttggagcatttgggatttcagatttttggatcagagacattcaacctatagttgcacatcatgtatctcataagaagtgaacattcagaatacgtaaagtactcctacagagagactaccagaagcagagaggagcagacacattttcacactagggcacctcctatctctcccggattccaattagggcagagtaagtgctagttmtctgccaacccaggattaggccctgcagctgcagtgaaaataatcacagaagaaaactaagaaataaaaaaatgg

SEQ ID NO: 451449 - DNA, 538 bp, Homo sapiens
tgacagttatgtgttgagggactgtgagaaaactatggccacaacatggaaactgaaagggcactgcaccatctcagggatctgcctaaggagacatctgggaagaacatggaaagtgctatcagcttaccctaactgtcactgaataaatgtgacaggagagggacatgatctaaagaaggaagttcagttttcaaacaaaatttagagaaaatataaagaaataatttcttgtctcaaaaggccaaagaaaaaaaaaaagaaaagaaaaaaattataaagaagccattgaataccctattgaccataagaaaaaggcagagaaagttggtcaacggcaacccaggcactgaaggaaaaagaacatggggaatgacaaaagcccagaggaaggagtaaaaggacacaaacgccgttctcagggacaaggactgggcgccgttctgagggacccggactgggcactaatcacagaactgtaacaggcgccccatgggaatgacmaactgttagacggggcctgcagggcagcacctcc

SEQ ID NO: 451450 - DNA, 225 bp, Homo sapiens
gtgtcagaagtgggatccgtgggagcaggactgctagggcctctggagctatactgtggtgagcagtgttgctaaggcttctaatgacccccagagtgctgaggtacaaggaaggaacctgaaaggacccgtttgtgatggcagcagtggcccacgtggagcagttgctatggagaygctggctgcagtggggaggagtggctggggctgtgcactcctcaaagc

SEQ ID NO: 451451 - DNA, 225 bp, Homo sapiens
gtgtcagaagtgggatccgtgggagcaggactgctagggcctctggagctatactgtggtgagcagtgttgctaaggcttctaatgacccccagagtgctgaggtacaaggaaggaacctgaaaggacccgtttgtgatggcagcagtggcccacgtggagcagttgctatggagatrctggctgcagtggggaggagtggctggggctgtgcactcctcaaagc

SEQ ID NO: 451452 - DNA, 581 bp, Homo sapiens
agtctgtcgacaggaaacttaaacagtttaggttaaggaaaggtctgcgaaagtcatattaattagcaggttcacaggaaactgacatttattgtataaattccatggtcaaatgtattagggctccacacacacaaatgtgcaccatatatgttaccacacagtgcttacttctttcagtctttattcatttctctcctaatggtctgtatggtattattacatagttctaaaaaccttccatgaggcagaaatttcatttaatgatatagctttgaaaataatgaaaaacagtagaaactttctacttttttatgaarcagaattgttgaattttcagtttcatttatttaatgttacaagatgacaaacaaatttctttaattccttctagttattttagtctaacatcaaccaaagccatttctttcattagaaagtgaaaacagctcatcaaaatccagtttaagctgagaaacaaagaactaaattttgcatgagatattatacactgcataagtataaaacaagaccagaaacaatggaggattcacaatttttaaaaagacaaaagcaagtta

SEQ ID NO: 451453 - DNA, 604 bp, Homo sapiens
atgacaaacaaatttctttaattccttctagttattttagtctaacatcaaccaaagccatttctttcattagaaagtgaaaacagctcatcaaaatccagtttaagctgagaaacaaagaactaaattttgcatgagatattatacactgcataagtataaaacaagaccagaaacaatggaggattcacaatttttaaaaagacaaaagcaagttatcattaaatcaattcttaccaacacaccaatttcacctctaagccagataattagccgcttacccacgggataacattgattgaagacaaatttcaccagtgaaagttggttatttattttccatccttrcatcaactaaaatgatatctacagttcctcttaacacttttcttactttcaaatatgtgggtatgcttcattagctgaggccatgttcgatatgcacatctggctacaagggaaactgggaatgtgagccctgatcctaatgtttgtagagtatttagaaatttgagaattccctccaaataaagagttttttaaaacattgttagacaaaaagtttgaattacaaaatgtggtagtagctcaggtctaactcaaa

SEQ ID NO: 451454 - DNA, 604 bp, Homo sapiens
atgacaaacaaatttctttaattccttctagttattttagtctaacatcaaccaaagccatttctttcattagaaagtgaaaacagctcatcaaaatccagtttaagctgagaaacaaagaactaaattttgcatgagatattatacactgcataagtataaaacaagaccagaaacaatggaggattcacaatttttaaaaagacaaaagcaagttatcattaaatcaattcttaccaacacaccaatttcacctctaagccagataattagccgcttacccacgggataacattgattgaagacaaatttcaccagtgaaagttggttatttattttccatccttacrtcaactaaaatgatatctacagttcctcttaacacttttcttactttcaaatatgtgggtatgcttcattagctgaggccatgttcgatatgcacatctggctacaagggaaactgggaatgtgagccctgatcctaatgtttgtagagtatttagaaatttgagaattccctccaaataaagagttttttaaaacattgttagacaaaaagtttgaattacaaaatgtggtagtagctcaggtctaactcaaa

SEQ ID NO: 451455 - DNA, 604 bp, Homo sapiens
atgacaaacaaatttctttaattccttctagttattttagtctaacatcaaccaaagccatttctttcattagaaagtgaaaacagctcatcaaaatccagtttaagctgagaaacaaagaactaaattttgcatgagatattatacactgcataagtataaaacaagaccagaaacaatggaggattcacaatttttaaaaagacaaaagcaagttatcattaaatcaattcttaccaacacaccaatttcacctctaagccagataattagccgcttacccacgggataacattgattgaagacaaatttcaccagtgaaagttggttatttattttccatccttacatcaactaaaatgatatctacagttcctcttaacacttttcttactttcaaatatgtgggtatgcttcattagctgaggccatgttcsatatgcacatctggctacaagggaaactgggaatgtgagccctgatcctaatgtttgtagagtatttagaaatttgagaattccctccaaataaagagttttttaaaacattgttagacaaaaagtttgaattacaaaatgtggtagtagctcaggtctaactcaaa

SEQ ID NO: 451456 - DNA, 610 bp, Homo sapiens
ttgttactgttttctattcattctcctcagtcttcattcttttgtctaccactctttttctgccttttgcagttttcattgatgattttagatgactacattttccctgtctttcttagcatgtacttctctttttaaactttttttttaactagttgccacaraatttgcaatatacatttacaaccaattcaagtccacttttcaaataacactatcccactatcccacaaataagactacctgcttaacaaacaaaacacctaattcctcagtaacatttacaacaaattgaagtccactttcaaataacgctatcacactatcccacaaataagactacctgcttaacaaagaacacacctaattcctcagtatacatttacaaccaattcaagtccactttcagataacactatcccacttcacgggtgactacctgcttaacaaagaaaacacctgattcctccctcccatccttcctttccattccttgtattattgttccttatttcactaatgtataagcatacataatctatctgtgtgtatttattattatctacaaacttattggtcagatcaattatgaataaatacatgtttttat

SEQ ID NO: 451457 - DNA, 604 bp, Homo sapiens
atgacaaacaaatttctttaattccttctagttattttagtctaacatcaaccaaagccatttctttcattagaaagtgaaaacagctcatcaaaatccagtttaagctgagaaacaaagaactaaattttgcatgagatattatacactgcataagtataaaacaagaccagaaacaatggaggattcacaatttttaaaaagacaaaagcaagttatcattaaatcaattcttaccaacacaccaatttcacctctaagccagataattagccgcttacccacgggataacattgattgaagacaaatttcaccagtgaaagttggttatttattttccatccttacatcaactaaaatgatatctacagttcctcttaacacttttcttactttcaaatatgtgggtatgcttcattagctgaggccatgttcgatatgcacatctggctacaagggaaactgkgaatgtgagccctgatcctaatgtttgtagagtatttagaaatttgagaattccctccaaataaagagttttttaaaacattgttagacaaaaagtttgaattacaaaatgtggtagtagctcaggtctaactcaaa

SEQ ID NO: 451458 - DNA, 610 bp, Homo sapiens
ttgttactgttttctattcattctcctcagtcttcattcttttgtctaccactctttttctgccttttgcagttttcattgatgattttagatgactacattttccctgtctttcttagcatgtacttctctttttaaactttttttttaactagttgccacagaatttgcaatatacatttacaaccaattcaagtccacttttcaaataacactatccmactatcccacaaataagactacctgcttaacaaacaaaacacctaattcctcagtaacatttacaacaaattgaagtccactttcaaataacgctatcacactatcccacaaataagactacctgcttaacaaagaacacacctaattcctcagtatacatttacaaccaattcaagtccactttcagataacactatcccacttcacgggtgactacctgcttaacaaagaaaacacctgattcctccctcccatccttcctttccattccttgtattattgttccttatttcactaatgtataagcatacataatctatctgtgtgtatttattattatctacaaacttattggtcagatcaattatgaataaatacatgtttttat

SEQ ID NO: 451459 - DNA, 610 bp, Homo sapiens
ttgttactgttttctattcattctcctcagtcttcattcttttgtctaccactctttttctgccttttgcagttttcattgatgattttagatgactacattttccctgtctttcttagcatgtacttctctttttaaactttttttttaactagttgccacagaatttgcaatatacatttacaaccaattcaagtccacttttcaaataacactatcccactatcccacaaataagactacctgcttaacaaacaaaacacctaattcctcagtaacatttacaacaaattsaagtccactttcaaataacgctatcacactatcccacaaataagactacctgcttaacaaagaacacacctaattcctcagtatacatttacaaccaattcaagtccactttcagataacactatcccacttcacgggtgactacctgcttaacaaagaaaacacctgattcctccctcccatccttcctttccattccttgtattattgttccttatttcactaatgtataagcatacataatctatctgtgtgtatttattattatctacaaacttattggtcagatcaattatgaataaatacatgtttttat

SEQ ID NO: 451460 - DNA, 485 bp, Homo sapiens
atcaattatgaataaatacatgtttttattgtaccacaattcctccctcccatccttccattccattccttgtattagtgttactcatttmacttttgtataagcatacataatctatctgtgtgtatttgttattgtctatgaacttcttggtcagatcaattaagaataaatacataggtttttattgtaccacaattctttaatgctctttttaaaaaaatgttgatccagatttcagttatatatcttttgtttccctctaaagaatttcatttaacatttcttgcaagacaggtctcctggcaacaagtttcttgaatttttatttttctgaggaaggccttaattctccttcacttttgaagggtggtttcagtgggtacagaaacttaggttggtgggtttttttctgtcaacattttgaatttttcatttcactgtcctcttgctttcacagtttctgcaatgttgaatgcagttct

SEQ ID NO: 451461 - DNA, 312 bp, Homo sapiens
accacaattcctccctcccatccttccattccattccttgtattagtgttactcatttaacttktgtataagcatacataatctatctgtgtgtatttgttattgtctatgaacttcttggtcagatcaattaagaataaatacataggtttttattgtaccacaattctttaatgctctttttaaaaaaatgttgatccagatttcagttatatatcttttgtttccctctaaagaatttcatttaacatttcttgcaagacaggtctcctggcaacaagtttcttgaatttttatttttctgaggaaggc

SEQ ID NO: 451462 - DNA, 312 bp, Homo sapiens
accacaattcctccctcccatccttccattccattccttgtattagtgttactcatttaacttttgtataagcatacataatctatctgtgtgtatttgttattgtctatgaacttcttggtcagatcaattaagaataaatacataggtttttattgtaccacaattctttaatgctctttttwaaaaaatgttgatccagatttcagttatatatcttttgtttccctctaaagaatttcatttaacatttcttgcaagacaggtctcctggcaacaagtttcttgaatttttatttttctgaggaaggc

SEQ ID NO: 451463 - DNA, 312 bp, Homo sapiens
accacaattcctccctcccatccttccattccattccttgtattagtgttactcatttaacttttgtataagcatacataatctatctgtgtgtatttgttattgtctatgaacttcttggtcagatcaattaagaataaatacataggtttttattgtaccacaattctttaatgctctttttaaaaaaatgttgatccagrtttcagttatatatcttttgtttccctctaaagaatttcatttaacatttcttgcaagacaggtctcctggcaacaagtttcttgaatttttatttttctgaggaaggc

SEQ ID NO: 451464 - DNA, 312 bp, Homo sapiens
accacaattcctccctcccatccttccattccattccttgtattagtgttactcatttaacttttgtataagcatacataatctatctgtgtgtatttgttattgtctatgaacttcttggtcagatcaattaagaataaatacataggtttttattgtaccacaattctttaatgctctttttaaaaaaatgttgatccagatttcagttatatatcttttgtttccctctaaagaatttcatttaacatttcttgcaagacaggtctcctggcaayaagtttcttgaatttttatttttctgaggaaggc

SEQ ID NO: 451465 - DNA, 530 bp, Homo sapiens
gaatttttcatttcactgtcctcttgctttcacagtttctgcaatgttgaatgcagttcttatctttgtgtctctgtargtaaggtgttttctgccccacctctggtttctttcagagttttcctttatcttttatttcatatagtttgaaaattatatgtccaaatgtaggttgttggcatttattctgcctggtgttctctgagcttcctggatctttggtttggtgtctgacattaatactggaagttctcagacatggttgttgcaggactttcttctatttcttctcctcctggtattctcattactctgtttcaccttttgtagttgtcccacagtcttggatatcatcttctgttattttcagtgtttcttttctttagttttcgaagtttctgatgataaatcctcaagctcacagattctttactcagctgagtccagtctactaataagccatcagaggtattcttcagttatttaccacattttttaccactacattatgttgaagtttcttacgatgt

SEQ ID NO: 451466 - DNA, 530 bp, Homo sapiens
gaatttttcatttcactgtcctcttgctttcacagtttctgcaatgttgaatgcagttcttatctttgtgtctctgtaggtaaggtgttttctgccccacctctggtttctttcagagttttcctttatcttttatttcatatagtttgaaaattatatgtccaaatgtaggttgttggcatttattctgcctggtgttctctgagcttcctggatctttggtttggtgtctgacattaatactggaagttctcagacatggttgttgcaggactttcttctatttcttctcctcctggtattctcattactctgtttcaccttttrtagttgtcccacagtcttggatatcatcttctgttattttcagtgtttcttttctttagttttcgaagtttctgatgataaatcctcaagctcacagattctttactcagctgagtccagtctactaataagccatcagaggtattcttcagttatttaccacattttttaccactacattatgttgaagtttcttacgatgt

SEQ ID NO: 451467 - DNA, 557 bp, Homo sapiens
tttaacccttgtgccactaacttacaaataaatacgaacatttaatactgaaacttttgtggtttttgttttataagtgctttccatgaaattatatttctacctattgtacagataatagatattttcgtaatctaaatatccctgtgtcatccataagtgtgcttaactgaaagagaccttagcatactaatgtcatactgcttacctcatattactgttttaagacaaaaacagaacttaatacaggcaatattactaagttagtttaaaagatgataactatgtgggaaaagatttaaataagtaaacactaaagcaaatttgataaactttagtaactattttaatgattaattatgacttgttctgatctgaagtatgtttctaagcttgagaaatataaatctttctaacatgaaagtgttcattwtaaaatgaacatacaaaaggctgaatggattttatggagaacacaggtatatccaatacctagattatgatggggatgttaatgttccaccactgacattttactatgcttgtcttatcacaca

SEQ ID NO: 451468 - DNA, 603 bp, Homo sapiens
taacattagtgtggcgtgatttggcccctgtcccaatgaatacacaaagtatatacgtaagcaattcataagcaagaaaaacacaaatgtcattaacaaacatttaagaaaatacctgacctcatttcacattraagcaacgaggtatgtatcaaattttagctataacgtcagaaaagttgagacaaagaggagagagagcttgcctactgttggaaacccctgcacagtctgtatgtctgaagactgcaccctttttggaaagaaatatggcaatgcatattaaaagcctgaaaaacagtcatacatttttatccattaattctactcctgggaatctatcctaaataaataacctaaaattcagaaaaggcattaggcaaaaatatttccattacagcatggtttatcataatgaaaacttcgaaacaactttcctacccaacatcaaagagatggttaatccaaatagtacaatccaggggtgatattcaaaataattcctagctgtatttcataaagcatggcatgtccagttggaacacatgccagcccatcagcatggacaccagcctgacagccacacagatgtgcactgtgaga

SEQ ID NO: 451469 - DNA, 603 bp, Homo sapiens
taacattagtgtggcgtgatttggcccctgtcccaatgaatacacaaagtatatacgtaagcaattcataagcaagaaaaacacaaatgtcattaacaaacatttaagaaaatacctgacctcatttcacattaaagcaacgaggtatgtatcaaattttagctataacgtcagaaaagttgagacaaagaggagagagagcttgcctactgttggaaacccctgcacagtctgtatgtctgaagactgcaccctttttggaaagaaatatggcaatgcatattaaaagcctgaaaaacagtcatacatttttatccattaattctactcctgggaatctatcctaaataaataacctaaaattcagaaaaggcattaggcaaaaatatttccattacagcrtggtttatcataatgaaaacttcgaaacaactttcctacccaacatcaaagagatggttaatccaaatagtacaatccaggggtgatattcaaaataattcctagctgtatttcataaagcatggcatgtccagttggaacacatgccagcccatcagcatggacaccagcctgacagccacacagatgtgcactgtgaga

SEQ ID NO: 451470 - DNA, 484 bp, Homo sapiens
ctggtattcaagattaaaagatgttaggccttgtttaaaaatagtgagattaccaagcttagtgatttcaagtcaaatcatttgacattgacwctttggggatattaatattcacaacgtgccaagaaatttgatatatggtgtcccttaactgctcttaagggaatggggtttttttaagtatatctatctatctatctatagatagatatatataccatatacatatatactatatagatagtatatgtatacacgatatatatagtgtatatatacactatatatatatatatactatattatctatatagtatatatatagagagagatacataatatatgtattcattcacatgtaagctcactgtgtatttaaggccgcgataaataatgctgagtgctttgatacatgaaccacattcatctgaggtttctaggaattaaatttaaatcaaatattgcatagaaagtggcagcattt

SEQ ID NO: 451471 - DNA, 607 bp, Homo sapiens
  misc_feature (1)...(607): n = A,T,C or G
tgtcaaatagtaaaattgtacggcgacagaagggccttagcgtatggggaatgaaatagcctggacctacttgtgaccccttcagagcactaagctttcctctgtggggcactcacagctatttggagtgtgaatatgggagttcacacgtgctacacatgcaaatggtaaactttgaaatgaaaagttttctgttaaggctgacagcatggagaacttaaattagtttgaattttggtgaatgagacctgggattctggggccagccattattttcctgtaaatcccaggcatcgtttcctcgggacccagggtctggtctgcacagtccatcctcagcatcccctgcacaaaagtcctctgcccgggtgtcaaagccacagtcaaaatctcacacattacttggtgagaggggccacctnccccacgtccccccatctccacccccaggctccatgtcattctcaggctcacaggcacatccctctccctgccatcgtgggataactcttcctgttccctgtgtctcrtgtcttcctgtacacacactcccttgctatttgcttttaagacctacacaaaatcctcactcttttattattcgggg

SEQ ID NO: 451472 - DNA, 552 bp, Homo sapiens
taactgcatttggggtaatttataaaaatctactttctcaagcaatggttttcttcaggctatttcgaattggctattatcattaaattttacttctacaacatttcagtgtttggtagaatttatctataagatccacctgaagctgatgttttctttgtgggactaagtaaatatctttagtgggctgatgactattcagacatttgaaatttgttcttgagttggttttgacagttggtatttttctacgaatttgttagttttccatttgtcaaatgtgttggaaaaggttgtttaaaatttaatttttaaagmttttcttctcaacacattcttttattatttaaaaatatacacttaaaaatattgaacacgtttattttggttctttagaaaattgttttaatatctgcaatttctgtgggttttattctacatataaagagtgtgttcactgactcttcctcataatttttttccttatatgttttgtaatatttgcttgtgacttcatgatctttgtaactgtatttatgaaaaattataagg

SEQ ID NO: 451473 - DNA, 560 bp, Homo sapiens
tttatcttttgctagctctgataaatcctgcttagaacactatatgctttaacgttttaatgtaatagctttagacattaaccagaatattcacttctgggcctgtcagctcgaagaaactttttatttgcaataaaagattaaaatgtaacaytattggtgttgtaagagaagaaagacaactggatttatgaatctattgctggcaaattactattttgagtaatatatgaaaaacagattggaaatgaggtttaggggcaaatgttgctttgaaagcaggtgtcatgtatcaccccctgcccctagtgagaacaattacttggtttccagtggagcttttgcttccaaagtgaaaggagaaatgtggaagacattccagagtttagctgtttattttatgtatttatcccttagttgtctttcctaatcatggagaaacccctgtctgattaataaacaatttctggctctgtttcagaatctggctgcagtgcatttgctatttgatatttgagatatgtacaacatgttcacagtgaattctccaactgaaaaca

SEQ ID NO: 451474 - DNA, 589 bp, Homo sapiens
ggagggtgcaaaagcagcatcgacttcttttttaaaatttaatttaatttaatttaaagttctgggatacatgtgcaggatgtrcaggtttgttacataagtaatcatgtgccatggtggtttgctgcacctatcaacctatcacctaggtattaaaccccacatgcattagctgtttatccttaagcagcatcaacttctttatcttctatgctaagaactaggctctgccccattcaatatttataagatggggaacactccaaacataggaagggggatagaaaaataagtcatgaaaggagtgtcaagtgtcctttaccagtaacttagccaaagtcatgatgctgagagctatccagtaagcatttgctaagacacaggaattcacatgctgcctccaaggctagaactgggagctagtaatgagaaatatttaagcaaaaccatggaattctaaaattctaaagttggaagtctccttagaagtaactttgattggaattccttttagagtcccaccccacctgcttcaaacacactgtcttgtttaacgtcaaatctggctatttctgttcctgcacacttg

SEQ ID NO: 451475 - DNA, 602 bp, Homo sapiens
cctttggctcatgttactgtttccttgtagatagctttctctttggttagtagacgtgctgtttatttatctatttgtttgtttgtttgtttttacttgctgaggcagagcgtccatgacgctgcttctgtctatgcttgactgccagtgatggctgggtctcggcccacctttatgtgttttctgaacaaacagagtctcctgttatctctcaggctctttcacatatattatytcatttaatccttagaacaaatctgtgagagagacactattatcgccatgttgcagataaaaacattaaggtttagagagattagttttcccaaattatgatgtcttataaatagaagatcttggatttaaactcagcattgcctgacttctgagggtgctcttagtctgacatgtcatcccactgcatcttctagttacttaatttcactgaatgctatttacagttagtaaagttacttcattctctgagggctccccttgactctattcccttcatccattacctggtatgtttctgttttcagctccttatgttctgacacatgttcatatctgagagataaacatttattcttcatcttcat

SEQ ID NO: 451476 - DNA, 602 bp, Homo sapiens
cctttggctcatgttactgtttccttgtagatagctttctctttggttagtagacgtgctgtttatttatctatttgtttgtttgtttgtttttacttgctgaggcagagcgtccatgacgctgcttctgtctatgcttgactgccagtgatggctgggtctcggcccacctttatgtgttttctgaacaaacagagtctcctgttatctctcaggctctttcacatatattatttcatttaatccttagaacaaatctgtgagagagacaytattatcgccatgttgcagataaaaacattaaggtttagagagattagttttcccaaattatgatgtcttataaatagaagatcttggatttaaactcagcattgcctgacttctgagggtgctcttagtctgacatgtcatcccactgcatcttctagttacttaatttcactgaatgctatttacagttagtaaagttacttcattctctgagggctccccttgactctattcccttcatccattacctggtatgtttctgttttcagctccttatgttctgacacatgttcatatctgagagataaacatttattcttcatcttcat

SEQ ID NO: 451477 - DNA, 593 bp, Homo sapiens
aggaagcagtgcagtgtgatgtattcagcagatagcttgttggaggtgcttgtttggccttgcagaatgcctctggagaggctgtaaagagaaagcacaccagagaacagtacttgagaagaaggaagagggagtttatctgtttggctctctccaatcttttccttttccctactattcaaactttgcccccaaagatatcaattcctctgcgctttccaggtacattatttgtcttcctgggtggcttttgggaaactagatcctgaattctatggtagggtrtttcatctaagggcagaaatggctggagagacagaaacactggacacatggctggtcagcctggttgtgtggtgtctgttacagaagagagtccagctttcctgagcaagtatatgtttagcttcatttggtagaaccacacagacctgtactaagtgtgtcaatacaacaatgccaatgcaaaacaaatatccaaaggcctctgagatgggtgaagccaagggaatctaaatctgacccaagatgtcccatctgttcccctcctgggccattccaatccccccttgccctcttatatctggctcttg

SEQ ID NO: 451478 - DNA, 593 bp, Homo sapiens
aggaagcagtgcagtgtgatgtattcagcagatagcttgttggaggtgcttgtttggccttgcagaatgcctctggagaggctgtaaagagaaagcacaccagagaacagtacttgagaagaaggaagagggagtttatctgtttggctctctccaatcttttccttttccctactattcaaactttgcccccaaagatatcaattcctctgcgctttccaggtacattatttgtcttcctgggtggcttttgggaaactagatcctgaattctatggtagggtatttcatctaagggcagaaatggctggagagacagaaacactggacacatggctggtcagcctggttgtgtggtgtctgttayagaagagagtccagctttcctgagcaagtatatgtttagcttcatttggtagaaccacacagacctgtactaagtgtgtcaatacaacaatgccaatgcaaaacaaatatccaaaggcctctgagatgggtgaagccaagggaatctaaatctgacccaagatgtcccatctgttcccctcctgggccattccaatccccccttgccctcttatatctggctcttg

SEQ ID NO: 451479 - DNA, 601 bp, Homo sapiens
cggaccactgatttaagtcttttcctgacaggggctctagtttatcaatctttatgtctccagtgcctgctgcaaaacctagagatayttgtgggtatatgatgctatatgatgtacttaggttctttttgggtgtatggtgtatttgtgttatgaagtatggtgtatggcatatttgtgttgccacacttagcacttgtcatgggaagaattatgcttcccccaaaccaacttcatatgttgaaagttttaaaccctagtacctcagaatgtgactgtatttggagatatttttaaacaggtgactatgttaaagtcatgtaattagggagggccctaagccaatacaactgatctcataagaagaaaaaatttacacacagccatgcacagaaggaagactacatgaagataccgggagaagacagccatctatgagccgatagaggggcctcagaagaagccagctctgctacaccttgatcttgaacttccagcctccagaactgtgagaaaataaatttctgctgcttgagccatgcagtttgtggtactctggtaggcagccctaataaactaacacagcaactataaaagtaac

SEQ ID NO: 451480 - DNA, 535 bp, Homo sapiens
aagaaaaaatttacacacagccatgcacagaaggaagactacatgaagataccgggagaagacagccatctatgagccgatagaggggcctcagaagaagccagctctgctacaccttgatcttgaacttccagcctccagaactgtgagaaaataaatttctgctgcttgagccatgcagtttgtggtactctggtaggcagccctaataaactaacacagcaactataaaagtaacttatttttatattagggcctatctrtctgtgagctatcaacttcattactttgaaatatctgactatgctttcaataagattattatatcatttcaaatatgtaacatattcttagaaaaaaatgaaggaaatatagaaaaatgtgaattatgcttatctctgactgtgagattttgggttattgtacttttttctatgtctcttccagtgttttccagattttctataataagcatgattacttttctaaataaggaaagtagctatttaaaagttatattaaggtgctattgtgt

SEQ ID NO: 451481 - DNA, 481 bp, Homo sapiens
ctttttgaactgtgagatttttgttgtcacgattggtgcccttggttgccggtgcagtgcatagcacatggcaaagactcagtgtctgttgaatgaatacatgcttgggcagatggatggacagatacaggatagacatgaggccaactgtgtgtgatatagggtctaaatgccaggaccgaggggcaaaaaagagtaaaagaaaaataaataggcattttcactaggtgaggagtgggtgctggatggtaaactggcctcaggcattgggagaaagtccagtcaataacttcaagcacaaatcagaaatatgtggtttggggcaayagtctaagcaagggatgagtaggtcttcagagctgagggatctgggagttgtcttcaggtccttcaggcaaatactcatgagtctgctaggctagacatttctggcctaaaaaggtgctgatttagtaaaaagtcatgtatctaaaatgtttgg

SEQ ID NO: 451482 - DNA, 546 bp, Homo sapiens
tgtttaaatctctgggctgccaaatttgtgctattttgccaacaacattttctctactccaagtgttactggaaagctaatcagaggcagtaattgatttaatgacagaatgattcaatagttgcaatcttccataaaatatccccttttttgggtaaggtaaattatcaatttatagatcttctcagaaaagcagttctttttgctcccttaaaaagaagaattctttgcagtcaaatttgtttggggatagaatgtttcacctattttgtgctggagcataaacacagtccttcgttgacagtgaagtctctcttgattcggttgtcctgcataataatyacatggctgcttaaaatggcatgtaatcaaaatgacacaatcttgataaaagacgaccgtgtccagggctctctgagaagaatttaatagtagaatttttgtgtttggccgttgctgtgataaacagtctagggttttgcttttaagagccttctgtctctctgaactgcctttcttagctcctagcttcagtagttgatgaac

SEQ ID NO: 451483 - DNA, 600 bp, Homo sapiens
tctagaacttgtcttctctactgactcctgaataattaccagcttccccaccccagccttgccaagcagcagaaattagacccttatctcgtgctacacacaaaaatcaactcaaaatgarttaaagagttcaaacaggggaaattgacatagacaatgattttgtggatatgaaccccaaagtgtaggcaacacaaaaaaatatagataaatgggactacatgaaactgaaaagcttttacacagaaaaaaaaaaatggaaaaccaaaaaacaaacaaacaaacaaaaagagtaaaaagatggcctatggatggggagaaaatattggcaaatgaaccatacatccaaaaaggagttagtatccaaaatacataaggaattcaaacaactcgatagcccattaaaagaaagggcaaataacttgaatagacattttccaaatgaagacatacacatgggatacaacatacaacagggatttccttggtgtttgcatgccaacagtgttgctcagttgtcccacagcttccaacttgtacgtttaaataattgtattaggaatgtaatatgtgtattaatgataaaatttgagtagtaca

SEQ ID NO: 451484 - DNA, 600 bp, Homo sapiens
tctagaacttgtcttctctactgactcctgaataattaccagcttccccaccccagccttgccaagcagcagaaattagacccttatctcgtgctacacacaaaaatcaactcaaaatgaattaaagagttcaaacaggggaaattgacatagacaatgattttgtggatatgaaccccaaagtgtaggcaacacaaaaaaatatagataaatgggactacatgaaactgaaaagcttttacacagaaaaaaaaaaakggaaaaccaaaaaacaaacaaacaaacaaaaagagtaaaaagatggcctatggatggggagaaaatattggcaaatgaaccatacatccaaaaaggagttagtatccaaaatacataaggaattcaaacaactcgatagcccattaaaagaaagggcaaataacttgaatagacattttccaaatgaagacatacacatgggatacaacatacaacagggatttccttggtgtttgcatgccaacagtgttgctcagttgtcccacagcttccaacttgtacgtttaaataattgtattaggaatgtaatatgtgtattaatgataaaatttgagtagtaca

SEQ ID NO: 451485 - DNA, 510 bp, Homo sapiens
ttccttagcattttgatgtttctctactatttcctgattgctgtagttgctgatgaaaaaatacagtctaacatcacacttcacatcttaatagtctctctttcatcttcattttcttgtttacagtttcaatacttctgtctctagttwtgtatttatttttatttaacttttttggtacttagggcctatttccattcaatatctttctataattcttggaaattcttacctactactcttcaaatgttgccttggtagtctttccctagatcctggaatttctattagataagtgatataacctctcagtctgtgcccttttatttttaaatatatattttttatttctaatatgtcaaaacagatctttaaaaaatctgcttttcttgttttattgccatcagttttgtttcatagtttattgttgtgggtggtttataaacatagtttatatggatttcatgtcttcatttatctccctttaaagtttgttttgactgtttcata

SEQ ID NO: 451486 - DNA, 629 bp, Homo sapiens
gagattgtttctttttatactactaagactstgattaatatcattatacatgtatctttgcgtgtttctctgcttacttaagctaaattcctagaagtgtagttacaggattaaaaggcttaagactttggaaaaatgacatcaggttgcctttaagtacatttgtaatgatttcccattactgatatatgagaatacagtatacattttgttgtaaacatcccaaagtagagaaaaatgagtttaaaattttaaatcaacataaaagatgaaaaatgacacttcatggctagggagataacagacttatgtttattgacaacttgttttcctgttttttttttctttttttgtggagtctcgctctatcgcccaggctggagtgcagtggcaccatctatgctcactgcaacctccgcctccgaggctcaagcaattctcctgcctcagcctcccaagtagctggaattacaggtgcccacctccatgcctggctaatttttgcattttcagtggagatgggattttgccatgttggccaggctggtttcgaactcctgacctcaaatgatccacccacctgagcctcccaaagtgttgggataacaggcgtgaaccagcacacccag

SEQ ID NO: 451487 - DNA, 568 bp, Homo sapiens
ttctacctaggcagactatcatggaccaaaatgttcttctctaaaaatgcatgttagaaaatattatcatggtccttttggtgtttaacagcttctttggaataataatttaaattgtgttgaccactctacacatcatattttcagttaatatagaagttatgctctaaaatagtcagtttctaaggtttggtttaatttctttgtgtcttaggagcctatgttgatttgaatggtgatattaatatcattattagctatccttacataagaccacccaataaaactttttggtatctgtaataaagtttgactttaatttttgccaaaatatgtgatgtaattctggagttgaagacatcctaaaaaagagtcaacttagattactgtatgccccagcaaaataatgcctcatgatcacctatttccacctctagacaatttcatttataaccttgacttcaaacytaattcacatctgcttagctcagaactttcttctgaattcaaacttgcttatacacttttcattttaggtaccccatccagctgtttcataggcacctca

SEQ ID NO: 451488 - DNA, 563 bp, Homo sapiens
tatccttacataagaccacccaataaaactttttggtatctgtaataaagtttgactttaatttttgccaaaatatgtgatgtaattctggagttgaagacatcctaaaaaagagtcaacttagattactgtatgccccagcaaaataatgcctcatgatcacctatttccacctctagacaatttcatttataaccttgacttcaaacctaattcacatctgyttagctcagaactttcttctgaattcaaacttgcttatacacttttcattttaggtaccccatccagctgtttcataggcacctcacctttaatatgtgcaaatctgaaattattagtcttttttcattccaccagaacttctctgccttctatatttcctggcaaagggattgatgccagctagtcgtccaagttcaggatctgaacatatcctagacttctaccttttctccatatccaatcagttgctaagaccaaccttctaaatacatatttccccttccccgctatcctgtttgttattatattgctgaagcgttcatgatgtttcagctgga

SEQ ID NO: 451489 - DNA, 596 bp, Homo sapiens
atttttaaaagaaatctctttgtggacattaattttgagctgcacttttgaggctgagctgaatagactgatagaatgaacgagggtttgggagtgggtggcataagaggcgggatatgaaggggactgggaggtacagccttataaaaaggacttccccaaagatgaaagtagaggtcatgggaatccaacaattggttacttcctctccatcttgtttgcaccaaacactttacytctctctgctttcaatttataattagttaaatgaaaaagatattggaatccccatatcatggaactactgtaagaatagtctgtcctggtattggaaaaaaattctaaattttatcgataaaaattcaatgtaggtatattaactactttaagcccagaattattccactgatgttcacaagtcacccatagggaagtggctcttgttccctaagggatgaaaaatatgagtcttggttttgcttagaaaattaaaacgaaaaggtatgaattccactgacacctttgtaacttaacaaaaaccttaaggatctttttggattcatggcattcataatagcttctacctacccaattct

SEQ ID NO: 451490 - DNA, 493 bp, Homo sapiens
gggaccattctgtatggaaagaaaatagtgttttatggtgtttgcaacttttttcttcctaygattttaaggaagtatttctcttaattttttctaccatttgaactaaatttaactttcagtctttctaagttctcatggggttttaaattcatctttttacagttttcttagtggttacttttctgtagtattaacctctataaagtttctaggatttgggggagagtaaaactaatttgtttgtaaaaagtaagcctagtatttgagcatgagtttggtttttttttttttagacaaatcatattttttatttgaaacttcagattacatgtttattttatttattttattttttattatactttaagttttagggtacgatggattaaagacttaaatgttagacctaaaaccatagaaaccctagaagaaaacttaggcaataccattcaggacataggcatgggcaaggacttcaagtctaaaacac

SEQ ID NO: 451491 - DNA, 349 bp, Homo sapiens
atacatagttatatttttttcatttaatatttttaacgttgcttttcaaaaaatagacattttaaaattacactttaagttctggggatacatgtgcagaacgtgcagttttgttacatargtatacatgtgccatggtggtttgctgcactcatcaacctatcatctacattaggtatttctcctgatgctatccctcctctagaccccccacctcccgatgggcccttgtgtgtgatgttcccctctctgtgtccatgtgttctcattgttgaactctcacttatgagtgagaacatgcagcatttggttttctgatcctatgttagtttgctgagaatgatggttt

SEQ ID NO: 451492 - DNA, 489 bp, Homo sapiens
tgtataatagctgacactagattattaaaaatgtgttaatttgcagtaacttactgcttcaattatcatttttggttgttagaaagactgaatctttgtccttgtatattttccagttgcattttgtcttttataaattgttctttgttacttggcagtttactgcattttaaatatttttcagtatatctatatattcctgattgttccttatcatgataaggaaaaacacattttttctttcatatgtttttatcatgtaacatttaatatgaaacattgatgtagacatgtgaattataaaaataattctttattattataatgccaacttcactggaacctcccaacttwgtaggaacccaacttaatgagaacatcagcacctaacttaatggagtcttacttggaccaatctctgcacttatgttttcttccctgccctccccttatcttcccttcattggaaagcactattcttactttaga

SEQ ID NO: 451493 - DNA, 575 bp, Homo sapiens
gattttctgcgtgcctgctgattttatttgttgttacatatttcattttcttgtatctttttcagccagttcttgtttaacacattattttttcatattgggttcaaaaagtagatatctttagaaatgtttttttttctatttcttcaaatccaagaaggaaaatggtgagcagtgaggaggcagatgattttcctttaagccattattctttgcttttcttgggcagacagaatttatggatagatattgattaattaattcagcacatatttatcgagcacctactatgtgccaggtactatttcaggccctgaggatatagtagtgaacaaaacaggcaaaaaaagtccctactttcatggcggttatattatactgaggggaatagggaatacacatacaaataaataaaacatttgtacatcagatagagggatgtgccctagagaaaagtaaagtagggaaaggagagaagaatttttggatcaggtgcatgggttgcttttaaactgagaaggtaaagaatgattggataaagaaaatatgayatatatgcacaatgaaatactatt

SEQ ID NO: 451494 - DNA, 565 bp, Homo sapiens
aaccccccttttcagcatctcagagatgacatcagtaggttgcttcaggagacactggtctgtaagcacataggctgtacatgcagagccagctctgggtggcctgagctgccagccactcccaggatgggggtcagtggtatacgagttggtgaaagttcatgcctccctctgcttaaatttagtgggagagccaaacatcaaacaaatccacatgtaatctaggtgataaagcagaataggggctagggatataggcacaggggatagagctctgttgtggataggtagagcaacactaagaggtggccttgaaatggtrtaagaatgaaacaagtgatgggatgaggccatctggggatatggagtccaggcacaggaagtcaggagtctttgggtgatttatgagcaggtgagtgatgtagtttgatttattctttaaaaccatcactcaatgctctagagaactgaccttaggggcaggcaggccaattaagggctaatgtaatggtggcgcaggtaggaagcaatgggacttggactgagtgatagtgccaggaagtca

SEQ ID NO: 451495 - DNA, 565 bp, Homo sapiens
aaccccccttttcagcatctcagagatgacatcagtaggttgcttcaggagacactggtctgtaagcacataggctgtacatgcagagccagctctgggtggcctgagctgccagccactcccaggatgggggtcagtggtatacgagttggtgaaagttcatgcctccctctgcttaaatttagtgggagagccaaacatcaaacaaatccacatgtaatctaggtgataaagcagaataggggctagggatataggcacaggggatagagctctgttgtggataggtagagcaacactaagaggtggccttgaaatggtgtaagaatgaaacaagtgatgggatgaggccatctggggatatggagtccaggcacaggaagtcaggagtctttgggtgatttatgagcaggtgagtgatgtagtttgatttattctttaaaaccatcactcaatgctctagagaactgaccttaggggcaggcaggccaattaagggctaatgtaatggtggcrcaggtaggaagcaatgggacttggactgagtgatagtgccaggaagtca

SEQ ID NO: 451496 - DNA, 548 bp, Homo sapiens
atttgcttgtgaacatagtcaatcaaaaatcaaagagctacctacctgtttcttagttgaagctgtaactgtaatagttttataagatttaggatgcaagctaggaattgaatttggagctcttacagactgtgttcaattgggttgactcaacttgctataatatattttcaaaacatttgggagtaggaatctcactgattgaagcaagagttatccagacttctagtttctattgaatgctggagtacaaattgggggtctayttgataataagcaaattaatctgttttaatgattaaaaataacattatgtctaaaatccaaactaatctcaacagtttatcaatgaaaagtaattaagaacttttgaagaaccatcacgtctcctgtgatttttaaacatctatttttagaacttagagaaaatcatagatcttaaaactttgattctcgctttcaactttgccttaagatctggattattctaaccctcctagtcctcctgagaaattcctactttcttgctagacccagctcaaaaatac

SEQ ID NO: 451497 - DNA, 530 bp, Homo sapiens
tagtctcaactcagtctccacgcaggcataataatcttgtccaagtctgttaacctctgtcatcttcagtgatcataaaagtccctaatattgctaaaattcaatacttctgttatacagtcctattggtaagagtatatagaatgtgcaatgtagagatgaatgtaaayggtcttttctcccctggtggcctcgagtgaggagcaaaatacttataattctgtgaatgcaaagcaaaaacaaacgaggaatgaaaagagaagagaaacagaacacaagcctagggggagaagacttaataggttattgtggaaggaaaaaatagaaatgtcaatagtcaaaataagaagtttgactgtgctgtgtatcactgagagcctgctgaacaggttgcgagctaataattacaagaatccagttaacctcaagtaagcatctatgcctcatgttcaggattgtgaaccagtactttatttcactgatactttattttactttctaatcttccacatatatttatgtgcgatatc

SEQ ID NO: 451498 - DNA, 530 bp, Homo sapiens
tagtctcaactcagtctccacgcaggcataataatcttgtccaagtctgttaacctctgtcatcttcagtgatcataaaagtccctaatattgctaaaattcaatacttctgttatacagtcctattggtaagagtatatagaatgtgcaatgtagagatgaatgtaaatggtcttttctcccctggtggcctcgagtgaggagcaaaatacttataattctgtgaatgcaaagcaaaaacaaacgaggaatgaaaagagaagagaaacagaacacaagcctagrgggagaagacttaataggttattgtggaaggaaaaaatagaaatgtcaatagtcaaaataagaagtttgactgtgctgtgtatcactgagagcctgctgaacaggttgcgagctaataattacaagaatccagttaacctcaagtaagcatctatgcctcatgttcaggattgtgaaccagtactttatttcactgatactttattttactttctaatcttccacatatatttatgtgcgatatc

SEQ ID NO: 451499 - DNA, 548 bp, Homo sapiens
ccttcttaccttccagcctgtcagcccctgaaaactgctcatctactttctgtttctatggatttgctgattttggacatttcatgtatatggaatcataacagtatttatccttttgtgattggcttctttcactctgcgtaatgttttaactgttcatctgtgttgttgcatgtgtcattaattcctttctttttattgccaaataaaagttcattgtatggatataccacattttattgtccatttatcagtttatggacatctaggttgcttccaatgtttggctattatgaataatgctgctataaagactaaaatacaagtctttttatgggtatatgtctgtatttctcctggatagacccctagtagtggagttattgggtgatatgataactatgtttagcattttaaagaactgtcaaactggtttccagagcagctgcatcatcttacattcttgcygtcaatatgagggttccattttcctcacatctttgccaatacttaactctttttttgaggatagtcatctttctggattt

SEQ ID NO: 451500 - DNA, 548 bp, Homo sapiens
ccttcttaccttccagcctgtcagcccctgaaaactgctcatctactttctgtttctatggatttgctgattttggacatttcatgtatatggaatcataacagtatttatccttttgtgattggcttctttcactctgcgtaatgttttaactgttcatctgtgttgttgcatgtgtcattaattcctttctttttattgccaaataaaagttcattgtatggatataccacattttattgtccatttatcagtttatggacatctaggttgcttccaatgtttggctattatgaataatgctgctataaagactaaaatacaagtctttttatgggtatatgtctgtatttctcctggatagacccctagtagtggagttattgggtgatatgataactatgtttagcattttaaagaactgtcaaactggtttccagagcagctgcatcatcttacattcttgctgtcaatatgagggttccrttttcctcacatctttgccaatacttaactctttttttgaggatagtcatctttctggattt

SEQ ID NO: 451501 - DNA, 516 bp, Homo sapiens
ctttttattattgagtgagttgttaagtgttctttattttaggtacaagtttcttgcaaatattttctctcttcctgtaggttttcttttcagtttcctgatggtttattttgcaacacaaaagttttaatatgttgatgaagtacaattatctgttttttttcttttgttgcttgtgcaacaaatgcagattcattaagatttattcctgtgttttcttctaaaagttttrtaattttagctctcttaatttgtctacattttattttaagtaaagatttttgtatatggtgtgaggaagggattcaactttatttttatgcatgtggatattcaattgtcccagcaacatttgtgaaaagtaatcaaattttcttgacagccttgttgaaatcaattgaccataaatgtgagggtttatttatggggtcttaatgttattttattgatctgtatgttcatttttatgccagtaccacattatcttggatactgtagctttgaaataagttttta

SEQ ID NO: 451502 - DNA, 579 bp, Homo sapiens
tattttgctctctcaaaacattatttcaatccaagccattcatttatgtatcaagcatactggtaagtcttgatgctattttgtgatgtttatattagatatagtatccctggccactgtacaacagataaacttttaaatgttaaggcacaatagaattttattggtcaggtacataatgtgttctgattagtgggcrgtgcccctccaagcaatgatttggagatccagctttctttcatcttgtggcttttttgatacaacacttccaccattacctcagaaggggaaagaacatgagggattgcatgtgtttaagggtcagtcttggaagtggcacatatcacttttgactcagctagaaatcaatcatatgcaaagaagccaagaccaaagcccagtggtgtgcccagggggacaaggatactgctgtggtcaacagctagcccacctctgctgcaattatcttctgtattcctctatatcctcttcctttctttgcaatttgtctttttaaattctataatgtaaagcttggcagtgaacctcaagtgttgaacatttaagaaagaatctaaa

SEQ ID NO: 451503 - DNA, 568 bp, Homo sapiens
ttgagtcccccattagactttgggcactttatggagaaggactgtcttgaagtgttcatctattttatttttcatcactttgaatttcaattaaaamcttgtaaatatgcacatgtatacatgcacacatacatacctacaaatacctcacttttaactcccctctgccacttgttttctgaacatggacatgttatttaaccataagaccttagcttcctcatgaaaaggttgggctttggtagattttaggagcttagaggagtcattaaaaattgtaaccaaggattcatcaagagtaaggtcattttttctatccttagcactcagaaatatatgtagtaatttgttgaataaattaaaggaagtaaggaaggaaaaggggctggagtaaaagagttgaggagaaaagagtaaaggagaaagaaaaaaaggaacatgaagccatatggggtgagtgggatacataaacaacatcagaattctgttggaaataaagaaaaaggaggagaccaatgctgggcagacaagtaaagtattcacactaaaaataaatcagacataaaag

SEQ ID NO: 451504 - DNA, 568 bp, Homo sapiens
ttgagtcccccattagactttgggcactttatggagaaggactgtcttgaagtgttcatctattttatttttcatcactttgaatttcaattaaaaccttgtaaatatgcacatgtatacatgcacacatacatacctacaaatacctcacttttaactcccctctrccacttgttttctgaacatggacatgttatttaaccataagaccttagcttcctcatgaaaaggttgggctttggtagattttaggagcttagaggagtcattaaaaattgtaaccaaggattcatcaagagtaaggtcattttttctatccttagcactcagaaatatatgtagtaatttgttgaataaattaaaggaagtaaggaaggaaaaggggctggagtaaaagagttgaggagaaaagagtaaaggagaaagaaaaaaaggaacatgaagccatatggggtgagtgggatacataaacaacatcagaattctgttggaaataaagaaaaaggaggagaccaatgctgggcagacaagtaaagtattcacactaaaaataaatcagacataaaag

SEQ ID NO: 451505 - DNA, 568 bp, Homo sapiens
ttgagtcccccattagactttgggcactttatggagaaggactgtcttgaagtgttcatctattttatttttcatcactttgaatttcaattaaaaccttgtaaatatgcacatgtatacatgcacacatacatacctacaaatacctcacttttaactcccctctgccacttgttttctgaacatggacatgtkatttaaccataagaccttagcttcctcatgaaaaggttgggctttggtagattttaggagcttagaggagtcattaaaaattgtaaccaaggattcatcaagagtaaggtcattttttctatccttagcactcagaaatatatgtagtaatttgttgaataaattaaaggaagtaaggaaggaaaaggggctggagtaaaagagttgaggagaaaagagtaaaggagaaagaaaaaaaggaacatgaagccatatggggtgagtgggatacataaacaacatcagaattctgttggaaataaagaaaaaggaggagaccaatgctgggcagacaagtaaagtattcacactaaaaataaatcagacataaaag

SEQ ID NO: 451506 - DNA, 469 bp, Homo sapiens
ttcatgcagaagaacatctgaactttctacagccaccagttctcatgaatcctagaaggagatttaaacttggaggaacaatagattgtaagatctttagggactctgccacytatagcattccaagaggtcattaattctttttttagtcacaagttcaatggggtgctcaaaaaagaaattattccttgttttgcctcttccattcaaacaatggtctctggagtgtgatgtgcaagagagtcaatcaggttgtagagggaaaatattaggcaggaagaggaagttgccagtccctcaaggcctggcctatgaaccagcattttgcattctatgggtgagattgtcatagcatccatccaagctcaagaggaagacacagagcttaccctcgatggaagcaatatcacggaatttctgtccattttaaatcttcttcaagctgcattatttttgtaaaaatgatccc

SEQ ID NO: 451507 - DNA, 312 bp, Homo sapiens
gggcacctcggggctagggacagaggtttggagcaactcaccccggagactccgttgatactgccccagaatctcctccagggtagagttctccggggacttcgccatgcacgcactctaggcccagagctgggagttacgtggggaaatgtccwgctttctcccttccgagaacaacaggcctgtggccggggagcgcccgcctgcttcctgccgcggctgtcacaggggagcctagaatcccgcacagagctcttgggggctcttcccacccactggccctcgctttgcacgtcgggagttgtagtcctc

SEQ ID NO: 451508 - DNA, 468 bp, Homo sapiens
cctaggattcagatgtagggttttggtacgtttcgcttccattttatgcaagcgatgaaaaaataacatttgcagctgcctaacacagggcgggaagacgtgggatttgtatactaagtcacagaatctctgttcggtggtgtttcgtagagttttatttatttatttatttatttatttatttattttgaggaatgtaaggaagacagggactatgcctgctggagtccaagcactgccaaggtgatcaatataaaattactaggtgacgttggagcctgggctagagagggcctgacaacgaagctgttgtgtcagggaaatgaacaagcagaattgttttttcattgggcrggtaatgcatttatgttcctgagggaatggatacatctttccgtttattttttaagcaagtaaaacaaacaaaacaactggcccagtacatttctgttaccgaagttgttaact

SEQ ID NO: 451509 - DNA, 547 bp, Homo sapiens
gaatagcaacttatgtatttttctgtyattattttttaaaaagtaaaactagggctgcctttagctcttcctaactttgtagataacacggaagagcccaagtgcacttgacagaggaagacactaaaactcagaaagttaactgacttgtctgcccaagccagacagttaatcgaaggcagagccaaacgaaactcaaggtccattctgcagagtgatctttcctgtgtccccctagcccttttaccttgtgaaaatgtatggaaagcttctctatgtgctccctgagtaggctgtgactatcactgaacttgattctcaccgtgattaatctagttcttgcctttgtgatgtaaaagtagtaatcctcctaaaatggacctttactttcataaagtaacttactacatgaggaaagatgtcctaacatgtgcttttcataaaaacgaagtgttgcagtgttttccctactacctaatggtagctacttaacggtaggttttaatattatttcttgaaaatcaatagtattttataatagtatgat

SEQ ID NO: 451510 - DNA, 547 bp, Homo sapiens
gaatagcaacttatgtatttttctgttattattttttaaaaagtaaaactagggctgcctttagctcttcctaactttgtagataacacggaagagcccaagtgcacttgacagaggaagacactaaaactcagaaagttaactgacttgtctgcccaagccagacagttaatcgaaggcagagccaaacgaaactcaaggtccattctgcagagtgatctttcctgtgtccccctagcccttttaccttgtgaaaatgtatggaaagcttctctatgtgctccctgagtaggctgtgactatcactgaacttgattctcaccgtgattaatctagttcttgcctttgtgatgtaaaagtagtaatcctcctraaatggacctttactttcataaagtaacttactacatgaggaaagatgtcctaacatgtgcttttcataaaaacgaagtgttgcagtgttttccctactacctaatggtagctacttaacggtaggttttaatattatttcttgaaaatcaatagtattttataatagtatgat

SEQ ID NO: 451511 - DNA, 547 bp, Homo sapiens
gaatagcaacttatgtatttttctgttattattttttaaaaagtaaaactagggctgcctttagctcttcctaactttgtagataacacggaagagcccaagtgcacttgacagaggaagacactaaaactcagaaagttaactgacttgtctgcccaagccagacagttaatcgaaggcagagccaaacgaaactcaaggtccattctgcagagtgatctttcctgtgtccccctagcccttttaccttgtgaaaatgtatggaaagcttctctatgtgctccctgagtaggctgtgactatcactgaacttgattctcaccgtgattaatctagttcttgcctttgtgatgtaaaagtagtaatcctcctaaaatggacctttactttyataaagtaacttactacatgaggaaagatgtcctaacatgtgcttttcataaaaacgaagtgttgcagtgttttccctactacctaatggtagctacttaacggtaggttttaatattatttcttgaaaatcaatagtattttataatagtatgat

SEQ ID NO: 451512 - DNA, 590 bp, Homo sapiens
taaaaaacatctgtctggtagtgtggttgattaaactggatatattgtccagtttagcagaaatgttttagccaaagccagtgacatagccaatgtgtgttgctgttaaagcccacttttatatcaaataaaggtggaaaaacaaaacagcaaaagcaaagttaaagaaaacctcataaaatctacttacatacaaacaggaattgcagaaagtatagaagtggaaaagaatcccaagcatgcattgttgaggtctgaaaaacaaatgacacatagcagagaacaagtcattttttaagtatatccataagtaataaatgatatagaaaatattaccctttgaaacacaatatttattgaatcgttgaataatacctaccaaattttgaacatttcctaggtgccaggaagtttatgtgtgtgtggtgtgtgtgtatttaatttctgcaacaaacttctaaattaaggtattatttttacacattgaaaaaatttgaagcatagagttagtgaataactttgcctctgcgttacacattcctaagtgatagggcctataaytgaacctttgtctttttggctaaagccaa

SEQ ID NO: 451513 - DNA, 520 bp, Homo sapiens
ttctaatgtttgccaatcacctgggagacaaataaatataaattacttgaacctatccctagaggtgtagattcagcaggtctaggtgaaaacctgcatttttaacaatcccttaatcttctccaaatgattttaatacagataatcctgtagtcattcagcaatctaaaggaacaggatcagaattctaaaagacccttataagagtggaatcaggaaggaaaaaagggatgacattcattaaggacaaatgtaaaascatttactattgaaagaacaatacaatacagattgtcactgcataagtgtacaagaaaaatactagaaagccctaattaataaaatatggatccggcaaaatggggataaatattagaaaccattaaaacagtgatctcccaactttttttatcacatagcaataaaaatgataagtatttataagcagtggttcaatgcttaacaacaggaatacattctgagaaatgcgttgttgtgatgatttcctcattgtctgaac

SEQ ID NO: 451514 - DNA, 617 bp, Homo sapiens
taataataataataccactgtggaaatattaggccacatgcaaaatatgcgcaattccagatctaccacaagttgtttctatcccaggtattggggataatctaaaaagagctctaaaaagagctcaggggaaaggttatcagaagaacaaagcatctagaagctgtcaggtgaaaaacagttcagtgaattgactatttggctcacagacaagaagactaaggagagagacatcataagtgtttgcaaatatctggaaggctttcttgtagaagaggaagcagacttagttttgctgtagaggcagagccaggaccagtggatttaggagcaaggagacaaaattcaaaatacaagagaattgttaaacttttaaattagagctctcccacaatagagtagactgataagattgtgagctgtctgtcaacacagacacagtcaagaatgccgtaggaaggaaaatacaaatgagatctgaaagrttctcgttctgaccattgtctctcaggctggagtgcagtcggcacaatctcagctcactgcaaccactgcatcccgggttcaagtgatgctcctgcctcagtctccagagtagccgggactgcaggcaagcg

SEQ ID NO: 451515 - DNA, 696 bp, Homo sapiens
ctgagggtgcgcagcataaaaatacagacatagtctggttcctaccttcatgggtatacatgggcaatgggaagcrcagacaattgaacaaggtcttatagtagagttgcaatgaataggattttagcagaagagtaaggagctatgaaaacatatagcaggctgacctcacctactgtagagatcagggaaaatcttcctgggaagattgtgtctaagctaactgaggaaggagttaactaggtagaaagaagagaagaatgttgtggcacagggaacaactttagattctgaatatgctacagctagggagaatatctattatctctagaatactagggagaatatttaatgtctcactagatactctctatctagagattctacatatagtatatctagaatatttatatctagagatactggatattctccctagctgtagcttattcagctacaagaccaggaagggaaaaatatagaagtgagcaacagcctttattgagtcctttcaatgtactcaagttagttttctcagaaagaacaacttttgtttttacccatatttcatcagtttccataccatctacattacattattaccaaacacaaaacagacataaagagatatgtgcaaaaataaaactgacttatgttaagcttgaatgtcacttgttgggagcagaattgagtgtc

SEQ ID NO: 451516 - DNA, 590 bp, Homo sapiens
tttgaatttgatctttatatttagcctttggcaagcttccagcagcagcattgtttaacctagcttctctcaaatttattttgctattgaagacttttttttacttaactgtagtttatattctgcatcctataaaacaagtaggaacatacttgggaaacactgctgtatacaggcagaaaggagcaacagaaggaatttatagagtagtcatatgattagcttttagtttaaaaggtgcttytgttagtcctgaacagacaagattccagagaggggtgacaggatgtttgggagaccaactagatgccctgtgataatccaggagaaagttgatgggggtctgaatttaggcagtgccggtggagtggaaaaaggacagttcattatatgttttgggagaagtgacatgatttggtagctagatatgagaggtaaggaaggaggagtctaagatgactctggtttctgtttgggtgactagggggatgagttgtacagccactatgcagattagggaatagaggaggtcgtgcaagtttggagggaaggtgatgaattcagttttggacatgtagtatgtaggtgta

SEQ ID NO: 451517 - DNA, 451 bp, Homo sapiens
tgcacaatagggttactacagtcaagagtaatgtcttatatatttaaatagggaggggaagaaataattttgaatgttctcaccacaaagaaatgacaagtgtttgaggtmatagatatgctatttaccctgatttgatcattttacaatgtattcaaatatgaaaatatcacactgtaccccattaatatgtacaattatatgtcaattaaaacagaacttaaaaagtaaagatgggatacacacagacacactgttgttgaaaatgtagttttcactaataaacattttctgacacttctaatttgcttaaataaggaatattgttatatggttagttactaacagtttgtacttaatataaaatgtgtaaaatacatttcgaagatactatttagttcaattttcataattttctaaagtaatatgctttaaaatttactttccttaa

SEQ ID NO: 451518 - DNA, 535 bp, Homo sapiens
tttatattaataattaggttgtccattacaatggtggaaaaacggaatattacaaatctaggttagtggttgttttcatggtctctaatagaaatatgaaacaacttctacatacttacctctcagcctcacctatgggcatcagcccttgaatgatctctagaatgtcctcatctgtcagctatagctgtcaaacaagaaaaccaatatgtgtcatactgaaggtataatgcattcacagatgtaagtgaccaggatattggaacagaaagagtaatgagaaaaaaatttatggccaccaccttttgcttagggaaccgtamattttataccccttcagtgaagattttattctcaatctgcactaaagacaaagaaaaaaagtagaataagaattaggcttcacaaggtgaaaatagttcatgtcagcaattcttccactacattcagcattaagtattagtcaagcttttataaagaatggtaagtggcagcatatttgttctttctatctcaaattcattcaacttgaaag

SEQ ID NO: 451519 - DNA, 598 bp, Homo sapiens
aaagccaaattctcattaaaaacagtataagcaagaacacagtgaagtgacatgtttaaagtattaaaggaagaaactacactatgccaacttcaaattccatattcagtgaaaatatcctgcaaaagtataagaaaaatgaagactttcctatgcaaaaaattgatgaaattaattgttaggrtatatgtgctgcaaataataaaacattcttaaagcagaataaatattttacaggtcagaatctggaaaggaaagaaatgaacaaaatcagaaattgaataaattaagggaatattcttactttacattctttaaaagaaaacaggatgttggaagcaacagtaataaatatgttttgggtatttatagtgtatgtaaaaataaacatgacattagagattggaggaaagaatggtgactaatctgtcataagggccttataatacacatgaaacaaacaaatattaactttgatgactttataaacactattataacatcaagttttaaaaacttttaaaaatgcacctatcacaattaaatatatgagagcagtagaaacttaaacaaaatcaattaaaataagagaaggcag

SEQ ID NO: 451520 - DNA, 208 bp, Homo sapiens
attatgacaaatatatttttagtttcacaaaaagctttattgcccattaaaatttattaaacatattgctttgtattaattgttcattgataatgagtactacttgcattcttagactgaagccctctaagataatttttwaagcctagctaaaatatacatgttaatatttatttttaacactttatttttctcttggtatgcattt

SEQ ID NO: 451521 - DNA, 634 bp, Homo sapiens
atttagtctatttacattcaagatttttactgataagtaagaacttactcctggcactcggttataggttttctgtttattctgtcrtcttctcttccttctttatttccttcctgaattccttttagtaaaggcgatattctctggtgatatcactcaggttcgtacttttaatttttgtgtatccattgtatgtttttgttgtttgaagttaccacaaggaggcttggaaatactgtcttataacccattattttaagctgctgacaacactgtttgcataaacgaacaaacaatcaacaggaaaactaataaaaactctatacgttaacttcataccctcattttttaacaattttttgtttctatttatatattattgtgccgtctatgtcttgaaaagttgttgcagttattatttttgattggttaagtgtttagtctttctacttaagagtagtttacacaccacagttacagtgtcatagcattctgtgtttttctatgtacttactgattatttcttattacgcattaatatcctttttttctgattgaattactacctttaacatttctagtaggacatgtctggtgttggtgaaatccttcagattttgtttgtcttggaaac

SEQ ID NO: 451522 - DNA, 624 bp, Homo sapiens
aacctaaaatagaagttgaaagaaaaaaaccaaaaccaaaagtaaaataaaataaaacaaaacaatctgttagatactaaaacaagaacaaaacgagttatgaattaaagaagaaggagggcatatctgaggccaattttggggaaagcatgaagaaacaacttttacatgtagagttggggaaagattactattttactagggagtaatgagggctcaactaaatcataattagaaatagatcagactgaatagttttatataataaagaaatttttaataaaaaatgattgactgcttattaatataaggatgatgtgggatactttgaaaatcytactttgaagtttacgtatcaatttttattacacaaaactctttctccatagatatattcctcctcacaataaaattggggatatcaaccttaaattgtagttaactggcagaaatatcaagagcatccaattcatagatgaaagttctgggaatttatgtcaagtctatctgcacccaaagttattttaaataaaaattctctcaaagacaaaaccaataagacttctgttatctataatctataaattaaatgtggagaacatatttttgctttgaaatatgtta

SEQ ID NO: 451523 - DNA, 496 bp, Homo sapiens
tgacttgggcaaaatggaaaattacatacagaaacttaaggagaaaccacccagccttctaaggtttattttgattgtttatggacattttgtcctctcctcttggacttcaagaggcatggttaactggaatttgggcccattctgttaatttaaacctgttgatagtagattttattaaatggtgcaaaacacaaaggtttctaactaagaatatgttgctaagcttaatcataatggttgatgagtayatataagtagaaaaaattattcaaagtcaactccatacagaaacaagcattaagtataacaagaaactattctcaggtccatttatgcatgttttctaagcaaaggcatggatgatatttttattctataccatcttttaaataatatttgtatagcaaacagctctgaacaataaagataatacctctctctagggaagagagatgatttgtttgctctctagcataataaagataatatctcc

SEQ ID NO: 451524 - DNA, 569 bp, Homo sapiens
cagaggcttggaagtatgagattaaggtgccagtagatctagtgtccagtgarggcccactttctggtttgcagatagctgtctttttcttataccctcacatgacggagagcaaagagagagaaagtaagttctctttagtcttttaataaaggcactactcccactcataagagctctacttttgtgacctaattacatcccaaagtccccatctcttaatacgatcatattgggggttagatttttaatatgtaaattttgaggggacagaaacatactgtccatagcagagattctctcctgtaatacaacccactgtttgtgctaagcatcagctaacctctttccatttggaaattttggcttaaggaaccaacacgatgttactctggctattgctattgctgtgagtgatgaatgattctttttctctgaacaatgactttcacatttactaccaacatccaataaccctgtgcttttgcaatcaggataaaatctcagaccctggactcttcttggcacaaaagtgtatgcattagtcaaagtacagtacatttaattgc

SEQ ID NO: 451525 - DNA, 569 bp, Homo sapiens
cagaggcttggaagtatgagattaaggtgccagtagatctagtgtccagtgagggcccactttctggtttgcagatagctgtctttttcttataccctcacrtgacggagagcaaagagagagaaagtaagttctctttagtcttttaataaaggcactactcccactcataagagctctacttttgtgacctaattacatcccaaagtccccatctcttaatacgatcatattgggggttagatttttaatatgtaaattttgaggggacagaaacatactgtccatagcagagattctctcctgtaatacaacccactgtttgtgctaagcatcagctaacctctttccatttggaaattttggcttaaggaaccaacacgatgttactctggctattgctattgctgtgagtgatgaatgattctttttctctgaacaatgactttcacatttactaccaacatccaataaccctgtgcttttgcaatcaggataaaatctcagaccctggactcttcttggcacaaaagtgtatgcattagtcaaagtacagtacatttaattgc

SEQ ID NO: 451526 - DNA, 600 bp, Homo sapiens
ataaaactgacattttgaaaaatattatatatatatataactatgtcccaagtcatattaatgaaataatcacacaacacatatgttttaattgccatttgaatttttttcatatggataattatcaaatgctaggaatgaaaaggagaatgaatgctgagtcatctataagagacattacaaagaaacataaacaaatttatccaaatttaaaatttggataaatggacattttcttagaaaaatgtaacttaaacggagcataaagcagatacctgtcgtgcatttgaaactcttctgtgtcctgtactccctcatttaaggaaagcatattttactcttcatgaaagcttatttgtctccatttcacaaagtttggtcagtcacaaaagtttctcaacattttctttttctggcatccaattccattgctctgttcctccaaaactacggacacctatcatgcactgtgcattttttgcttaaaatcatarttcttgacacacaggtgcagtgctagtcaaacttcactactttatagcactccagcaattatctccaaataaattatctctcatggcttccttatattcactactt

SEQ ID NO: 451527 - DNA, 605 bp, Homo sapiens
tcaaacttcactactttatagcactccagcaattatctccaaataaattatctctcatggcttccttatattcactacttttatccccttcatgtgtattttaaacgaagkttcaagacgaagagatatacactgttcatagaatgtgcatttattcttctatacttccacatcaccttgaaattagtttgccacaaaaagtctgctgaaatgtgtggcacgtgagagagacacaaaaaacaaatggtagctgtggtaattcactgaaagcttgcccccaaattctgtatttcattcttaaaaatgcataatataagctgcacaaggcaggagaatcacttgttttgaggagttcgagttcaagactggtctggacaacattatatatatattttttaagcattatgtggtatctttaatgatatgtttttgtaagaaatacttaaaatgtgttgtagtggcctaaccatcagatgatgatagaaaaaacaatgaattccttcagctagaaggcagatttttaattttatgcactggcaatatggtaaaatggttattaccaacatggtaataacttgggaggcagatgccacacataataagca

SEQ ID NO: 451528 - DNA, 619 bp, Homo sapiens
gattagatagataaaaagacttaaaaatatctttagaatttctgtaagaaagctgtttacatgctgtttggtgataatacatttttctacatctaagtatttaacagagggtatataatgactaaaatgtaaatattaccaaggtttaaaaataaatgtaattgtctctttattgctactcttgtctgacatctcaagaccatgatggagagacagaaagagagagaaagggaaagagtgtgtgtgtgtgtgtgtgtgtgtgtgtgtgtgtrtgtgtgtttgtgtgtgtgtatttaagtttcttctgtaatcttctagaaaataccccaaccataagtgttctaccctctttactccacatttcttgtagcttagtatttgagaccacaaatttttcacatcctccaggcagatctacctgtctttttcaataccattttatttatgaaacatactctattcatttcatttcttcttaaaaattacttaggctgtttgtcatttttaacatgcaaaaaatgctgcaataaatttttgcaggtttttagtatgcttccaatcaatataaagactatataaagttgttcataaaataacaaaataacaaaaatttgttatt

SEQ ID NO: 451529 - DNA, 588 bp, Homo sapiens
agcaatattacattattcttgtttattatcttattctttgtatcaattttggcaaattgtatttccttaaaaactgataatatgcactgtttttcaagtttatgackaaaaattgtataaattatttttagtttaaaaatatctaacattatttatttatttcaagcctttttattttatacatgtgccttacaatcaatatatccaaataaggccaggtgtggtggctcactcctgtaatcccagctctttaggaggctgaggtgggaggattgcttgagctcaggagttcaggaccaacatggcaagactctgtctctattatatatatatattatttcaagatatagatatataataattttacttgatatgcttttagtaatttctttattaaaatagcattctaaaatatatatcaaaatgattgtttattttatggtaacttcaatcatattatattttaatatgtgatctatgttgcaataaagacacatttttctcaaagaacatatcccaatattttctcatctacaaatgaagaaaaacagaactcactttttaaaaaatgaaacattattagcttag

SEQ ID NO: 451530 - DNA, 500 bp, Homo sapiens
aacaagaaaaccaaaacaacagcactgaaaaaactttagcatgttatattttcataaagtttttgtttgtttgtttgtttgtttgagaaggtctcactctgtcaccctggctggagcacagtgacatgatcaaagctcactgcagcttgtaactcctgggctcaagagattctcccacctccacctcccaaggtgctgaaagtacaagcgtgaaccacatrtccagggtatttaaataaagttattaagcaattgttaaaaattcatattgcaaattttagtgtatctcaacacgacctgaaatcagtcatacacttgtcaatatttattgactgtccctgaactccagccctcttctcattggtaaaacacaacagtgcataaataagacagatatttccaatttctttctttctttcttttctgagacagaatttcactcttgttgtccaggctagagtgcagtggcatgatctcggctcactgcaaccgtggcctcc

SEQ ID NO: 451531 - DNA, 500 bp, Homo sapiens
aacaagaaaaccaaaacaacagcactgaaaaaactttagcatgttatattttcataaagtttttgtttgtttgtttgtttgtttgagaaggtctcactctgtcaccctggctggagcacagtgacatgatcaaagctcactgcagcttgtaactcctgggctcaagagattctcccacctccacctcccaaggtgctgaaagtacaagcgtgaaccacatgtccagggtatttaaataaagttattaagcaattgttaaaaattcatattgcaaattttagtgtatctcaacacgacctgaaatcagtcatayacttgtcaatatttattgactgtccctgaactccagccctcttctcattggtaaaacacaacagtgcataaataagacagatatttccaatttctttctttctttcttttctgagacagaatttcactcttgttgtccaggctagagtgcagtggcatgatctcggctcactgcaaccgtggcctcc

SEQ ID NO: 451532 - DNA, 618 bp, Homo sapiens
aaaaaaaaaaaaaaaaaaagggaaaaaatcctggcacctaagtacaaattaggacagagacaaaagttccaaggagatacataggcatagtaagtacatatttaactgctatatgaccttcctgggttggcagtaatgagcaatgcagccactatgtaggatttttatccaacacgggcccacacttgtgcaccaacaaaatagtaacagagggtcccagaagcatgggggagggcactaggcaggtgcaggaaaactaaacaaaggaaagcagcagagatgtgagatagaggaggaaatttgaagtccaacatgataaaaactccctgcacaggaccctcagtatggttttctcgctggatcagcccactcctcccttgaaaygcacctatttttcctacaataagctctttacactatattctttttcaatacaattatttatctttgtactgtccccttggttgaaatctttcatccaaagttagataagaactgggacatctgctttccccggtaacacatagaccaatggaacaggatagagaaataaggagagccaacatcacctggtggccatcaagcagaccatccacaggcaaaactccttatctgagg

SEQ ID NO: 451533 - DNA, 618 bp, Homo sapiens
aaaaaaaaaaaaaaaaaaagggaaaaaatcctggcacctaagtacaaattaggacagagacaaaagttccaaggagatacataggcatagtaagtacatatttaactgctatatgaccttcctgggttggcagtaatgagcaatgcagccactatgtaggatttttatccaacacgggcccacacttgtgcaccaacaaaatagtaacagagggtcccagaagcatgggggagggcactaggcaggtgcaggaaaactaaacaaaggaaagcagcagagatgtgagatagaggaggaaatttgaagtccaacatgataaaaactccctgcacaggaccctcagtatggttttctcgctggatcagcccactcctcccttgaaacgcacctatttttcctacaataagctctttacactatattcyttttcaatacaattatttatctttgtactgtccccttggttgaaatctttcatccaaagttagataagaactgggacatctgctttccccggtaacacatagaccaatggaacaggatagagaaataaggagagccaacatcacctggtggccatcaagcagaccatccacaggcaaaactccttatctgagg

SEQ ID NO: 451534 - DNA, 589 bp, Homo sapiens
aattttactacttcttaataaatgttatttagctatagttttgaaaatcaacttacttatttttcccatccatacgctacacagctttaaccctgtggactcaggattcctagctgcaatctgcaaagtatcctttgcctaactttagcagaaaatacatttaaaatatgattttagttcaccaaatttccaggataaattactgcaggctgacaagctaagaatactgtctgcccaaaccaagaaaggagtttctccagccaaaatgcctttgtcaccaccactcagagctaatgctgcagcatgaagagtcygcaaactctggtgactcttgggaccctaccaaatggtgcccctaaagagaactagtacttcaagaaaggattctctgagcaacttctttttagtgttgtttcttcatgatttaagtatcatttggttgaggttgattgaagttggctttgccttagtgctaaggtaatatgagatctgtgttttaatgtggggaaatggaacctctaataaagaaaatttacatctgcacaaagtatttttaaattattgggcaaagaaaagtgtgtctgatagt

SEQ ID NO: 451535 - DNA, 589 bp, Homo sapiens
aattttactacttcttaataaatgttatttagctatagttttgaaaatcaacttacttatttttcccatccatacgctacacagctttaaccctgtggactcaggattcctagctgcaatctgcaaagtatcctttgcctaactttagcagaaaatacatttaaaatatgattttagttcaccaaatttccaggataaattactgcaggctgacaagctaagaatactgtctgcccaaaccaagaaaggagtttctccagccaaaatgcctttgtcaccaccactcagagctaatgctgcagcatgaagagtccgcaaactctggtgactcttgggaccctaccaaatggtgcccctaaagagaamtagtacttcaagaaaggattctctgagcaacttctttttagtgttgtttcttcatgatttaagtatcatttggttgaggttgattgaagttggctttgccttagtgctaaggtaatatgagatctgtgttttaatgtggggaaatggaacctctaataaagaaaatttacatctgcacaaagtatttttaaattattgggcaaagaaaagtgtgtctgatagt

SEQ ID NO: 451536 - DNA, 463 bp, Homo sapiens
tttttgaaaggcagccaagcatttgagacaaaccaagcagtactaagtacattatcttgtctaagcaaagcatgagaagtaaattaagatccctactgacctcactgactaaagaaaaaaaaaaaacaactctgcttttacctaatgtatgctcatggccataaagagaatctcctcctttccattaaaattatatttagcctaaggagattcagtactctctgcagtgttattttatttcttttttaaatagtttccacttttattttagatatgggggcacakgtgcaagtgtgttacatgggtatatcatgtgatgctgaggtttgtgatacaaatgatcctgtcacccagatactgaacataatacccaacagttagtttttcaggctttgctccctccctccccctatattagtctccagtgtctattattgccatctttatgtactcaatatttagc

SEQ ID NO: 451537 - DNA, 514 bp, Homo sapiens
aagtcatatgtatatatcttcacagggaattttgggtaaacatgttaaaggataattgtgaaggtatattctttgrgttgacatccaatagtaatgaggagctttgcattgccaagaaaggcttgaactaaggcttttgtcttgcatgtcactttgaaaatcagttttatgaaactgaacttgtctgaaggtaataacgctttctctcttttttttaactgaaatacataagtattcaatttacatacctcattctacctcgatttttgctgacattcccgtgatttcttgccttatttagttaatggcaagagaattttttggatttaatattttataacattgcctgtattagcacatgctttttattgctgacctagaattgtttataataaaatattgatcatttggcacagaaatgtaatatagtagtttgacttgggatacttaatgaggcccaaagcagatacatatctaatcaaaaacagtctttgttagaataacacattctgat

SEQ ID NO: 451538 - DNA, 438 bp, Homo sapiens
ctccctcagtttcaattacagtacttatctgatgactmccaatctatatctttacataaagttttgttagaaattgtatttcttatatttttttacttccatgggacatttccatttagatgatttcataggtaccttaaaccaatatacatataagaatcacctggagatcttcttaaaatacagagtataattctataaatttgggatgggtcctgagagtctatatttcttacagtcctacagactgtggtccacatttttaatacaaaggctttaaacacagcatgtccaaaaactgtattaatcctcttctctgttaaaagtataccatcttccctgtttctataaatggcattatgatcaggcaaaggcataagcatgaaacacaagaatcatgattgatctttcacacgttatatccagttagtcaccatg

SEQ ID NO: 451539 - DNA, 438 bp, Homo sapiens
ctccctcagtttcaattacagtacttatctgatgactcccaatctatatctttacataaagttttgttagaaattgtatttcttatatttttttacttccatgggacatttccatttagatgatttcataggtaccttaaaccaatatacatataagaatcacctggagatcttcttaaaatacagagtayaattctataaatttgggatgggtcctgagagtctatatttcttacagtcctacagactgtggtccacatttttaatacaaaggctttaaacacagcatgtccaaaaactgtattaatcctcttctctgttaaaagtataccatcttccctgtttctataaatggcattatgatcaggcaaaggcataagcatgaaacacaagaatcatgattgatctttcacacgttatatccagttagtcaccatg

SEQ ID NO: 451540 - DNA, 602 bp, Homo sapiens
caagcacatgtattttttaatctctcctcctcccaacaattttcatctacacacctccagttgggatcactgataatagagctctatgaaggtaactgaagctgattttaatagtttccaaacagatttcatacttccaggttttcagacctttgcttgtggattctctaattcattcatcaaacatttcacttatacatcaagtatagtactactctgtatatgtgtcactagagataaaacagtcaacaggaaagacagggtacttccctttgggagtgggtaggagaatgccaaagaacaagaaattattaaagaaaactatggaacgtatctcagagaataaatattgatcaccactggagcacayagaaagactcttaatccaaacttgagggatagcgaagctttgttggaggaagtgatttctctactaagaacagaaagagagtaagtagaagacagccatttttgttgtagggtaggagaaagggaggaaaggatgagacgctgggaagcggcttctaggtaatgaaaacaccatgctcaaaggtctggtgagggagaatacagtatgtgaaataagctaaacaagtgatgcc

SEQ ID NO: 451541 - DNA, 602 bp, Homo sapiens
caagcacatgtattttttaatctctcctcctcccaacaattttcatctacacacctccagttgggatcactgataatagagctctatgaaggtaactgaagctgattttaatagtttccaaacagatttcatacttccaggttttcagacctttgcttgtggattctctaattcattcatcaaacatttcacttatacatcaagtatagtactactctgtatatgtgtcactagagataaaacagtcaacaggaaagacagggtacttccctttgggagtgggtaggagaatgccaaagaacaagaaattattaaagaaaactatggaacgtatctcagagaataaatattgatcaccactggagcacatagaaagactcttaatccaaacttgagggatagcgaagctttgttggaggaagtgatttctctactaagaacagaaagagagtaagtagaagacagccatttttgttgtagggtaggagaaagggaggaaaggatgagacgctgggaagcggcttstaggtaatgaaaacaccatgctcaaaggtctggtgagggagaatacagtatgtgaaataagctaaacaagtgatgcc

SEQ ID NO: 451542 - DNA, 381 bp, Homo sapiens
gcctacttcggggctaccctttggctagggaagcccaaccttgcaacctctgccccgtgacctcgcgagcccagcacgccgctcaagcttaattcaacccattcttggagctcgtgctctcgctgccccttgttcccggttctctttgaaaccgctttcagcccccgagccagaccccaggttagatgaacgcccacttgctccggcggcagcgcctcctcggccccttccacagcactcagcccggggcagttcagytcctcacctagcttcgagcgggactcctccagtttctggatctggttttccaagaagagcatcgccaccgcgaaggccaccaccgccagcagctgcaacttgggcggcatcataatcctgagg

SEQ ID NO: 451543 - DNA, 601 bp, Homo sapiens
atctacttatcattattactaccttagttcagaccaccaacaccccctctcacctaaattacctcgatgcctccattttccccaaccccaacatattctcatatggttcccagaataatttgtccaacaaaacatttgatggtgtcaatgttgtaaagaaaagcgagttatcttttaaaatctttaatacattccctcagaactcacagcaaagtcctaacatggtaaagcttaaaagaccctttgtgatctaccttctgctcatttttccaggctcatctcttgtccctggcctccctggagatgtccagagatgcccccttctctctactcatgcttctcacaattacaggaataygctcttctcatcccttcatctgttaattctcattagtcttcaaagtcttagcctaggcatgaattcctgtaggaagcgtcctctgactcaaggctgggttagagtccctcctggagttgacacctttggaagtatctaattagcccatgagccacacctccttctttaagaactgagcctcacttgcccactcccccaatttacagtcactggccccagagccatgtttttactatgaccttg

SEQ ID NO: 451544 - DNA, 617 bp, Homo sapiens
gtctgacatgaatgattaaaggggaactatttagtattgcaaaatgaattaaatctctaaaatgtctccgcgcaattatgggtagaggcaaaactgttaaaactggagtgataaattgggaaattgtcacttccaaaaagaaaaggaaaaatctgaaagttatccttctgcaaacaaaatgctcttaatggggatgggcccagaaggcaggggtctaagccttaagggtaggcattgataggatgtgcagcccgagcctcctaacaggcactgtggtcyggcagagggaaggcaacagcatcgtgactggtaccatggcttcctctttctctttctcctcccctgactccagctgtgctcttccttctagacatgcaatttctgttgagcacattcaccgcttctcacaggtgtgatggctccatcatcatacatttaatagttttccaaaatcaatacctcttcaacatagtgcttttgaagtcatagttctccactgaaaagtactcatgatggtccgtacttgataataacttcacccaccagggaacatattataaagtgggcttgagagcatggttataacacacggtgtccattttcttcatctgcagcta

SEQ ID NO: 451545 - DNA, 617 bp, Homo sapiens
tcctcttggaggggtcaacacctctttgaaaatctgaggaaagcttctctacacccttttgccggaaagacatcctcccagctctcagcatttggggaattacttcagagaccccatgggccacaggttggaatcctttgctctgaggccctacactccccaccttgagtttgccagtgttcggtctcaacaccccagtcacattgatagtgatgcatgcccccatccttgtttgtcaagtgaactcgtgcgtgaagcagagcatgagcctcaatgtgtctgtttgtgtacccaaatcatgagtaggtccattggctcatcttaaaacacacagttgaatcctccactttttccatccctactgcagtcactcctacccagccactgccaccattaggcctcccctggactctgacagtatcttcccagaggcctcccacttcctctcccacayacttacaaaccatctccacacagaagctggacagagattcaaacattagtgaatctgttcatgtcacaccccttcctaaaaacctgcaaaagtgttccataacatgtggaataaaatctgaactccccgcagtgatcctccaggcctcctgaggccttgcctg

SEQ ID NO: 451546 - DNA, 617 bp, Homo sapiens
tcctcttggaggggtcaacacctctttgaaaatctgaggaaagcttctctacacccttttgccggaaagacatcctcccagctctcagcatttggggaattacttcagagaccccatgggccacaggttggaatcctttgctctgaggccctacactccccaccttgagtttgccagtgttcggtctcaacaccccagtcacattgatagtgatgcatgcccccatccttgtttgtcaagtgaactcgtgcgtgaagcagagcatgagcctcaatgtgtctgtttgtgtacccaaatcatgagtaggtccattggctcatcttaaaacacacagttgaatcctccactttttccatccctactgcagtcactcctacccagccactgccaccattaggcctcccctggactctgacagtatcttcccagaggcctcccacttcctctcccacacacttacaaaccatctccacacagaagctggacagagattcraacattagtgaatctgttcatgtcacaccccttcctaaaaacctgcaaaagtgttccataacatgtggaataaaatctgaactccccgcagtgatcctccaggcctcctgaggccttgcctg

SEQ ID NO: 451547 - DNA, 427 bp, Homo sapiens
atcttttcctgggtcagaatgaaaatttcagggcatcaagtctacagctcctccttgaatgaggcagagttctccagagcatcaggccttgtattctttctaaatcaaactctgattttatctggatattaggcttatcttggctagtcactagactgcattgggcttttttgcaatgtgatattgtaaagacacctcaacccacgactgcctgttgctcacagggagaatgagaggggcaggcagggagccagcacttggggctgggctgagacccacactctcctaggctagatgcgggtaggctgttatgtctttgactcctgcctctccaytgccctgcagatgtttccagggtccccatctctgcctttgcccccatgtttcctggctcagactattgcagtagtcttctaagtggtaccct

SEQ ID NO: 451548 - DNA, 552 bp, Homo sapiens
catctgccgggcagaaaaggtgggggtttgctaagggagtagcctctggtccatttgttacttagatgtggaaagttagggttttcctttcaatttagttctaggaagtcagcgtgaaatggccttargttccctgcctccagaccctattctcctgcctcactatgtggtcggggccctgactacaccagcagcctcatggcatcatcatctactaatttaattctgatattcacccttcagatctcacctcaaaggacatagcatacaggaggcaggggaacacagtggtttgatgcatggcctctaaagccaaccgcctgggctgaaatccaagctgcacttgattggcctaatttgggtcaggtgcccatggataagccaatcactggctggtatgatggcatatgctgattagcttagccaagcttccagtgctatgtcctagggccccagaggaaaatcaactttattgggaacctgtgggctgagagttggggagagatgattcaccgaagcagattaggaaattttgccccaagaaggaagagt

SEQ ID NO: 451549 - DNA, 553 bp, Homo sapiens
cttcctttcaacagatgtctcatcctgcacctagctcagtgcttctggtatctgtcacagaacctggctcacgccaggcactcaataaatacttactgggggaatagtgggatggatggatgatatgatgtccatctgggtataattttatctcagagtagcttgttgttctagggtgtatgcatgtggggatagaggagcccacaagaaaggtctgagactcattaattcatctatttttccccctctagcacctacaccatggtcttgtacataataagagtttaataagtgtgtgctaaatgaaagaagataagctttgatcagaaatatgagtccaaggrttcaggttttcccatgaaactttaatgccataaaggatttctgcatatgaaatttacccttctctgctcacctttacataattcaagcagcatgtggctccttggggacttctttggacattaagttctctctcaacagtcctaggattgaacagctgcatgtaagcaattaccatctatttgtcattaccagggggttatggggagct

SEQ ID NO: 451550 - DNA, 530 bp, Homo sapiens
gcttacatcccatttggctgtaagtaagtcacatattctggaaggccatgtgtcactctgaaagtggggttcctttactaaggagaaagagggaatgcatatttggtaccaatcgacaatctctgtagtatggaggaacgtataacacaggactgaggaagtcctcccaaaggagggaggctgggagaaggatttgaagccctggaggaggagtttgaaggctgagagctgatttctctgcttcaggtgacctctccctttcttatggagaatccaccgctgcttccctgacctcctcggcccctgcctcctactttcttatgacactggctcatactggaaaatgactcagaagtcttagttgtctgaaaatttaatagccatgaaccatatggtataagttccaacaaagttcattcactgcgggctgtgttatgagraacagggaaggaccaggaaaagtgggtaagaatgttggctcactgcgtgacctgaaacaagatattcactgtgaaccttagtttctgcac

SEQ ID NO: 451551 - DNA, 343 bp, Homo sapiens
cattgatacctgctgaatgaatgatcaagaaaaaaatgttgaactttgtttaagcccaaggtgtcccaaactttactaaactctttcccctacagcaccatagaagatcagattcagggaaaggtgagggacctcgccaagaagttgagctgtctatgctgttttccaagcttgaatacagacctctatctgaagagccctttggcccaaagagactctgctgtctctctctgggaaagaaagatgctcatgagsccatgcaaccccaatgaacacacctgtgggatctggggggtgaggagaaacagttgagatgatttagagtctacttggaaaaataacc

SEQ ID NO: 451552 - DNA, 456 bp, Homo sapiens
tgcccaccattcttgccataaggaaatcttgtgacctctgtcaaagaaatattaaaacagcacatacattttaacctggcamtctgtcttctaggaacttatctttcagatatgctcatgcttgtgccaaagacacatataattacaggatttgtagcaatagtagaaaatgaaaagtaatttaaatgtcaatcaatggaaaactagttagataaattataggacatcatacaatggaaaattaggcagccgtgaaaaaagatgagacagatgatatagacatatccaagatatattattttttaaaaaagcgaggcactgaatgttccatcactgatgcattgaaaggatcacatgtacctagaatatttctagaagaaaaatcatcagtgcaaaaggtgtacagtaacaggatctgtccatctcactgcagacgaatcccaccgtaactcaaag

SEQ ID NO: 451553 - DNA, 456 bp, Homo sapiens
tgcccaccattcttgccataaggaaatcttgtgacctctgtcaaagaaatattaaaacagcacatacattttaacctggcaatctgtcttctaggaacttatctttcagatatgctcatgcttgtgccaaagacacatataattacaggatttgtagcaatagtagaaaatgaaaagtaatttaaatgtcaatcaatggaaaactagttagataaattataggacatcatacaatggaaaattaggcagccgtgaaaaaagatgagacagmtgatatagacatatccaagatatattattttttaaaaaagcgaggcactgaatgttccatcactgatgcattgaaaggatcacatgtacctagaatatttctagaagaaaaatcatcagtgcaaaaggtgtacagtaacaggatctgtccatctcactgcagacgaatcccaccgtaactcaaag

SEQ ID NO: 451554 - DNA, 574 bp, Homo sapiens
tcattgtagggagcataaagaggccaatcttttcaatgtttatattcttgagtgtggaaaaaaattcattatcatacttaaaccttttttgttttcagttactgaacatctgaaatgaaagaaaaaagaagggtaagcaaaaatagggtaagagagcctgattgttgaatcactgaggcatgggactatgactaygaatgaaggacagaagatggtctgaatgatacattctcagggagcactggggaaggggagctatgaagcccagaaagaggctagagctggtgagagccacagttattttccacggtattttacggtatgtaatctcaaatgtctaccttggcacaaccagatccatgtcgtggtgatagaatacgacagcttcattataggttattaaataattgaccccagggcatgtggttggaactagaacccagaccctgtggacccttcccaagcccagggctctttgctccataaaacgtaagtttatgatgcaatatgactttgtagtattaaggtttcttaggaaattaatcaaattatgcgacatgattatgacctgtgt

SEQ ID NO: 451555 - DNA, 617 bp, Homo sapiens
gattgagaacccctacatgtgtttattcccccaagtccaggatctttaaaatgtacatataaattctggtactctggactgtgataatttgatgttattcatactgaacactttatrccatactggaaagtacagagaaagcaaaagcaattcattcattgaatagcaatttggagctgggaacctcatatacttcgacttattttatcctcaaaataattttgctaggctgatgttgttatccttattttgcaaataaggaaattggggctctgaggttaaggaagttacccaaaagcaaatatactgcttaagttcattaaatgttagaactgactctcaaaccatgcctgtgtgcttccaaagcccagattctttccagtaactatgttttctcctaagaaataacctttgcaggagcaaaataatattcaatattcttttgtaaaatcattgtattaaaaactacatcaaaataatttcaaagatagcccagttaatagaactaattaaataactgcatccataggtcagtttttcctttcacactccgaaatcaaattcattaatatttaaagaaatgaaagggtctttgatatttgacgggatttcccata

SEQ ID NO: 451556 - DNA, 522 bp, Homo sapiens
  misc_feature (1)...(522): n = A,T,C or G
tacttagtggtgaggactgcttagaacttatacttctagttactttgtccagagcccagcacacagtgtgatgcctccagggatgaggagactggtctctgatgtagtttgctgtctagaatgtgtagtgttaaaacatccatatcaaggtagtgggggagccattatttttttcactctgcaggaaaaaattggaccacaaacacaaaattggacttacaaacacatcgttactgggtataaggktggagaagatcaataatcatttcagcaccaagcttccgctgtgattttacagtgatttcaccttttctcccaagcttctagacaacagtcataccttagggcccacagncttcaaaggtagccaattaaaatccggtaagcagaagagtctggcttcttagtcaaataatgaatcagcatctcaaagatgagtgggagaggtgatctcccatgctacttctcagttgggcagtgaattgtaggtaataagcacatggctcccaagcaggcttattg

SEQ ID NO: 451557 - DNA, 445 bp, Homo sapiens
aggctggcttttataatgcctgcgatttaggctagggatgatagaatcattctttaattaacctgctgctaccagaggatcctatataaaccagagtactcatcttttaaacagatgagcttttcacacctactaaaatgaatccaaagtaattgctgttatcttggcggttggggagaggcttcagtttactgtgaccaaataactccatttctgaggggatytgtgcaccatcccacactcagctggtgccatcaaatgtaaaaaaaaaaaaaaaaaaggaagaaaaaagaaaacctacaactgacaaaatgcaaacttaaaaataacttcaactgctcttattctcttagctaaacaaattatcgccataatgatgttgggcagcaattatgaccaagttcacaaacagacacactctataatcatttgtgcaaaatgagaa

SEQ ID NO: 451558 - DNA, 445 bp, Homo sapiens
aggctggcttttataatgcctgcgatttaggctagggatgatagaatcattctttaattaacctgctgctaccagaggatcctatataaaccagagtactcatcttttaaacagatgagcttttcacacctactaaaatgaatccaaagtaattgctgttatcttggcggttggggagaggcttcagtttactgtgaccaaataactccatttctgaggggatctgtgcaccatcccacactcagctggtgccatcaaatgyaaaaaaaaaaaaaaaaaaggaagaaaaaagaaaacctacaactgacaaaatgcaaacttaaaaataacttcaactgctcttattctcttagctaaacaaattatcgccataatgatgttgggcagcaattatgaccaagttcacaaacagacacactctataatcatttgtgcaaaatgagaa

SEQ ID NO: 451559 - DNA, 513 bp, Homo sapiens
ccattttaaatgactttgttcagatgtcactgctgcactattgataaaactaaaactggaaactacctaaatatccaataatcaagtattgacatatactgagtatagagttttaggcaatattaataatgatactgtggttttaaatgtgttgacatggggagatgttcataataaacttgaaggatttaaaacatatgaaagattaagtatagtataattgcatttgtaatgtgtatgtatttatcacatatataaaattatacatatatcacataaatacacatacacacatgggtatgaatatgtgtccctaagtctctttyttcttcctccattccctctcacctgaaattcctcacaaaagcttaatataacctgtctctcaaggcaggacaaagggaaggaaaaggactagacaagtgaaaccagaactcttcagcaagcagaaggagaaaaaaacaaggaacacatataattcttgtctcctcataaaagacaactatagacggt

SEQ ID NO: 451560 - DNA, 648 bp, Homo sapiens
ttgccaaaacggtaaattgaactgtaaagtataaattcatacacaccaatttgacaacttttttaaatgctgacaaaaccaagtgttggcaaagatgtggaaaaacaggagttcttatattctacttatattgaaaatattattctattttggaaaataattttgcattatatagtaacattaaagactgttcatggtttcattcggcaatgccattcttawatatgtatgtacatttgggcaccccttccatgcaggcacaacaatgtataagagaagattggcagcattactcctaacactcccaaactagagccgacttaacagtttatcaacaacacatagataagtaaactgtggcttaatcacacaatggaatactatatcacagtacaaattaagaaatagattcatccaccagcatggatgaatctcacaaatcatgtggaatcaaaaaggcaagtggcagaagaaatacacatagatgatatcattatcacaaaatctaaaatcatgcaacactaaaaaatatattgtttaggattgtatacataaagggtaaaattatacaggaaagcaaaatattgataaacacaaagaaacgttgcccctgtcaggggatataggaggcattgctaaggaagttta

SEQ ID NO: 451561 - DNA, 648 bp, Homo sapiens
ttgccaaaacggtaaattgaactgtaaagtataaattcatacacaccaatttgacaacttttttaaatgctgacaaaaccaagtgttggcaaagatgtggaaaaacaggagttcttatattctacttatattgaaaatattattctattttggaaaataattttgcattatatagtaacattaaagactgttcatggtttcattcggcaatgccattcttaaatatgtatgtacatttgggcaccccttccatgcaggcacaacaatgtataagagaagattggcarcattactcctaacactcccaaactagagccgacttaacagtttatcaacaacacatagataagtaaactgtggcttaatcacacaatggaatactatatcacagtacaaattaagaaatagattcatccaccagcatggatgaatctcacaaatcatgtggaatcaaaaaggcaagtggcagaagaaatacacatagatgatatcattatcacaaaatctaaaatcatgcaacactaaaaaatatattgtttaggattgtatacataaagggtaaaattatacaggaaagcaaaatattgataaacacaaagaaacgttgcccctgtcaggggatataggaggcattgctaaggaagttta

SEQ ID NO: 451562 - DNA, 516 bp, Homo sapiens
tccaaactttctttctatgactacatttaaagagttaaaataatctttcacatgttattctaccttctttattagcctttaacattatgaaaaaattttatttatccctargcaaaaagtgttttcttttttacaatttcagagcctagcacagtgcgttgcatgtagtaaattcaacaaatgggattccatgaacttactgacttcatgaattggcagacactctgtgaaaccatttaaaggaatttgttgactaggatagtcttaggttcttgttttgccacacaggacaatgaaagacactagcatagaatcaatactttgggggccttgaaaaattagttaaatcagtaaaatagtatgtactccgtaagagctaaaagaaaatggcacataaaatacttaacacagtgactgtcatttaacctaaccactgaggtattacaattttatttatttatttctagtcattatattcaattatttttcagagatattttatttttgctagaactt

SEQ ID NO: 451563 - DNA, 516 bp, Homo sapiens
tccaaactttctttctatgactacatttaaagagttaaaataatctttcacatgttattctaccttctttattagcctttaacattatgaaaaaattttatttatccctaggcaaaaagtgttttcttttttacaatttcagagcctagcacagtgcgttgcatgtagtaaattcaacaaatgggattccatgaacttactgacttcatgaattggcagacactctgtgaaaccatttaaaggaatttgttgactaggatagtcttargttcttgttttgccacacaggacaatgaaagacactagcatagaatcaatactttgggggccttgaaaaattagttaaatcagtaaaatagtatgtactccgtaagagctaaaagaaaatggcacataaaatacttaacacagtgactgtcatttaacctaaccactgaggtattacaattttatttatttatttctagtcattatattcaattatttttcagagatattttatttttgctagaactt

SEQ ID NO: 451564 - DNA, 516 bp, Homo sapiens
tccaaactttctttctatgactacatttaaagagttaaaataatctttcacatgttattctaccttctttattagcctttaacattatgaaaaaattttatttatccctaggcaaaaagtgttttcttttttacaatttcagagcctagcacagtgcgttgcatgtagtaaattcaacaaatgggattccatgaacttactgacttcatgaattggcagacactctgtgaaaccatttaaaggaatttgttgactaggatagtcttaggttcttgttttgccacacaggacaatgaaagacactagcatagaatcaatactttgggggccttgaaaaattagttaaatcagtaaaatagtatgtactccgtaagagctaaaagaaaatggcacataaaatacttaacacagtgactgtcatttaacctaaccactgargtattacaattttatttatttatttctagtcattatattcaattatttttcagagatattttatttttgctagaactt

SEQ ID NO: 451565 - DNA, 551 bp, Homo sapiens
ttgttactattttattaagaatttttgcctctatattaatggaggatattagtctgtagttttctttttttgtatgctgtactygtctggttttaggatcagtatgacactggcgtcgcaaaatgtactgggaagtgttccctctttttttattttctggaaaaaatgtagaattggtggtaatccttcttcaaacatttggtagagttctccagtgaaactatctgagccttgaacaattcttttctgagagatttttaattataaattaaacttccttaatagttatacagctcatatcatctatgttatattggttgagctatggtagtttgtgggttttgaggaaatggtccattttgtctaagttgcaaagtgtatgtgtagagttgctcacaagattcccttattattgctttgatgtccacagggtctgtagcgatatatcctgtttcattcctgatattggtaatttatgtcttctctcttttttttcctttgtcagccttcctagaggtttgtaaattttaaattttgttgatcttttcaaa

SEQ ID NO: 451566 - DNA, 629 bp, Homo sapiens
tggcgattcttcaaagacctaaaaacagaactaccattccacccagtartcccagtactgggtatatacccaaaggaatataaatctatcaaagacatgttctgtcaaagacacatgcatgcaaatggtcattgcagcactactcataacagcaaagacatggaattggaactcgaaagaggcagggctcccgcttgtccctgtctcctgcctgcttcctggagggggaggcccaggtctgcagtggcaggttcggcagctgcagctgcacctgggagagcagatcctgactgttcccagctcccccaagagcacagggaagcttggatccacagctgcagtttggccagctgtagccccatccaggagctccatgaagtatgcagccccagtcgagcctccgtgctgcagctggcataatgtcagtgccatcattcccccctctgaagaggtacacctaactgctgttaggatagagatgatgactgctcttaactgcttcatgctgacaaggggcattattttggcaaaacgagagtaatgtctctctctctcagaggcctatctaagggtccccagtacaaaggagccattgtctgaggctccattttcatgaccatttggagttt

SEQ ID NO: 451567 - DNA, 629 bp, Homo sapiens
tggcgattcttcaaagacctaaaaacagaactaccattccacccagtaatcccagtactgggtatatacccaaaggaatataaatctatcaaagacatgttctgtcaaagacacatgcatgcaaatggtcattgcagcactactcataacagcaaagacatggaattggaactcgaaagaggcagggctcccgcttgtccctgtctcctgcctgcttcctggagggggaggcccaggtctgcagtggcaggttcggcagctgcagctgcacctgggagagcagatcctgactgttcccagctcccccaagagcacagggaagcttggatccacagctgcagtttggccagctgtagccccayccaggagctccatgaagtatgcagccccagtcgagcctccgtgctgcagctggcataatgtcagtgccatcattcccccctctgaagaggtacacctaactgctgttaggatagagatgatgactgctcttaactgcttcatgctgacaaggggcattattttggcaaaacgagagtaatgtctctctctctcagaggcctatctaagggtccccagtacaaaggagccattgtctgaggctccattttcatgaccatttggagttt

SEQ ID NO: 451568 - DNA, 580 bp, Homo sapiens
ttttttggtttagtactttatartgcatattttgaattaaaaaatgaattacagagtggctatgtcagaagaactgagggtctttggacttttttttttttttaataattgcagactcaactgtgaaattgctgcttacatttccttcagaaataatgaactcctgtgacagtgactttgaatgtgtctttaacacacttgacttaatgagatcccttttctggaggatataaaatgttccccagagatgtaatgtcaccactaggggataatctaatgtcctaaaagggctaattatttcccctaaaacattacaacaaactcattactgtaaggacaaccctatgaactctttaaaagatgatgaaaatgacagcaccgagaagggagatggtcctactctttggggtaataaacgacattcagagttagaatcctttgacaatcaaatattttttaaaacttttttaaaattatactttaagttctaggatacatgtgcagaatgtgcaggtttgttacataggtatacatgtgccatgatggtgtgctgcacccatcaacccatcatctcggtttt

SEQ ID NO: 451569 - DNA, 580 bp, Homo sapiens
ttttttggtttagtactttataatgcatattttgaattaaaaaatgaattacagagtggctatgtcagaagaactgagggtctttggacttttttttttttttaataattgcagactcaactgtgaaattgctgcttacatttccttcagaaataatgaactcctgtgacagtgactttgaatgtgtctttaacacacttgacttaatgagatcccttttctggaggatataaaatgttccscagagatgtaatgtcaccactaggggataatctaatgtcctaaaagggctaattatttcccctaaaacattacaacaaactcattactgtaaggacaaccctatgaactctttaaaagatgatgaaaatgacagcaccgagaagggagatggtcctactctttggggtaataaacgacattcagagttagaatcctttgacaatcaaatattttttaaaacttttttaaaattatactttaagttctaggatacatgtgcagaatgtgcaggtttgttacataggtatacatgtgccatgatggtgtgctgcacccatcaacccatcatctcggtttt

SEQ ID NO: 451570 - DNA, 580 bp, Homo sapiens
ttttttggtttagtactttataatgcatattttgaattaaaaaatgaattacagagtggctatgtcagaagaactgagggtctttggacttttttttttttttaataattgcagactcaactgtgaaattgctgcttacatttccttcagaaataatgaactcctgtgacagtgactttgaatgtgtctttaacacacttgacttaatgagatcccttttctggaggatataaaatgttccccagagatgkaatgtcaccactaggggataatctaatgtcctaaaagggctaattatttcccctaaaacattacaacaaactcattactgtaaggacaaccctatgaactctttaaaagatgatgaaaatgacagcaccgagaagggagatggtcctactctttggggtaataaacgacattcagagttagaatcctttgacaatcaaatattttttaaaacttttttaaaattatactttaagttctaggatacatgtgcagaatgtgcaggtttgttacataggtatacatgtgccatgatggtgtgctgcacccatcaacccatcatctcggtttt

SEQ ID NO: 451571 - DNA, 592 bp, Homo sapiens
ttacttccaattatgtggtcaattttataataaatgctatgcagtgctaagaagtatgtatattccgttgatggacaatcaaatatttttcattaaccaatctgagtaagccaatttgagttccttctattggctttctcacttagtgaactayttagaaaagcctcatgtctcagagggaaatgcaggtagatgaagaacgttgagctcagtaaactcctgtttgggggaatgggtcaggtcgaaggtcattttgtgattaaaatctgacccagccttcagatgacaacctagatgtcactctctccagcagttatttcaaggcattttgcatgctcctccccacctgaggactctgttagtacctgccatgaacctttggacctactgcacgtggatgatatggtttctcaagggcagggtgcaggtatgtattgttggccgtggaatactgagtacatagctaggtacctggtacgggagagcatcacacgtttgttgaataaatgagtttttaaatgacattcatcaaaatgaaattgccaagagtcaggaggcagctagatgatctataaattaacattgcagagta

SEQ ID NO: 451572 - DNA, 592 bp, Homo sapiens
ttacttccaattatgtggtcaattttataataaatgctatgcagtgctaagaagtatgtatattccgttgatggacaatcaaatatttttcattaaccaatctgagtaagccaatttgagttccttctattggctttctcacttagtgaactacttagaaaagcctcatgtctcagagggaaatgcaggtagatgaagaacgttgagctcagtaaactcctgtttgggggaatgggtcaggtcgaaggtcattttgtgattaaaatctsacccagccttcagatgacaacctagatgtcactctctccagcagttatttcaaggcattttgcatgctcctccccacctgaggactctgttagtacctgccatgaacctttggacctactgcacgtggatgatatggtttctcaagggcagggtgcaggtatgtattgttggccgtggaatactgagtacatagctaggtacctggtacgggagagcatcacacgtttgttgaataaatgagtttttaaatgacattcatcaaaatgaaattgccaagagtcaggaggcagctagatgatctataaattaacattgcagagta

SEQ ID NO: 451573 - DNA, 592 bp, Homo sapiens
ttacttccaattatgtggtcaattttataataaatgctatgcagtgctaagaagtatgtatattccgttgatggacaatcaaatatttttcattaaccaatctgagtaagccaatttgagttccttctattggctttctcacttagtgaactacttagaaaagcctcatgtctcagagggaaatgcaggtagatgaagaacgttgagctcagtaaactcctgtttgggggaatgggtcaggtcgaaggtcattttgtgattaaaatctgacccagccttcagatgacaacctagatgtcactctctccagcagttatttcaaggcattttgcatgctcctccccacctgaggactctgttagtacctgccatgaacctttggacctactgcacgtggatgatatggtttctcaagggcagggtgcaggtatgtattgttggccgtggwatactgagtacatagctaggtacctggtacgggagagcatcacacgtttgttgaataaatgagtttttaaatgacattcatcaaaatgaaattgccaagagtcaggaggcagctagatgatctataaattaacattgcagagta

SEQ ID NO: 451574 - DNA, 501 bp, Homo sapiens
gaatattatattcagtgaaaatatccttcaagagtgaagggaaaatcagaacaatctcagatgaagggaaactaagagaatatgttgccagcagatctatccttaacaaaagaaaatgactaaagaagttctctaaacagaaatcaaatgacaaaagtaggaatcacggaaaacctggaaggaaaaaagaaaagagtaagcaacaacatgggtaaatacaattgactttccttcttctcttgagtcttctaaactaagtttgatagttgaaaaaaaatttataggtcaggtgcaatggctcatgcctgtaatyctagcactttgggaggccgaggcaggtggatagcttgagctcaggagtttgacaccagcctgggcaacatggcaaaaccccatctctacaaaaagtacaaaaaattagccaggcatggtggtgcaaggctgtagtaccagctactagggaggcaaaggtgggaagattgctttagcttgggaggttga

SEQ ID NO: 451575 - DNA, 477 bp, Homo sapiens
tttttgtgctctttattgatcattttgctgtttaaaatagctctcaagtggagcacaaaactgctgtctagtattccaaagcacatggaggctgtgatgttccttttggagaaaatacatgtgttagataagcttcatttgggtgtaagctatagtgctgctggccrtgggttcaatgttaatgaattaacaatatatattcaataaagtgtctttaaacagaaacacacatgaaacaagtttatatgtatgaactggttgaataaaaatgtgaccagatgcacacaggaacctaatcctgtatttcccctaggggaaacaattcagtatttgataagtcagtgtttgcagtgacattatagaacataattactgtgaataatgggaatcaactgtattttctcctgttatgagggttgccttttcactctcctgatggtgtgctttaaagcacagaagttttaaattgttatgaag

SEQ ID NO: 451576 - DNA, 617 bp, Homo sapiens
gtattctctaacaaatgtaaataaaaagctgttgcaagcctgctgaatgagaaagacaatgaggaaaggcacagttgtcttctcaacaattatttgcagacttcattaataaattctcctctgaagcagcaatcaagcagattcttccccttggcaagatgtttaactgcttcacagaaacagctgtaatcagaccaagattagaacagagggaggcttactttacgtatttcctcctgtagtttgtgaacaagcgtacgaggtactaggcaagtaggtttcccaacagttctgtgtatagcccctcaggagtcctcattcattgacatacttatatgtgtggttgaaagtttccctctgccctatttttgaatcttttgtgttttatcaaaaacagaatgaagtacyctctctgtatgtttacattgaaagttggggagggggtaactcaaaagaccccactgaggtgtaattcattgcaggttgtgttatagggtagggaaaataaaggggttgaggagaaaaaaagatttttttttttcaaaaaggattttgtggcttttggcactgttaataatttgtgtggaaaaataatgttttttttgtgtgtttaatcc

SEQ ID NO: 451577 - DNA, 597 bp, Homo sapiens
tcattccataccacctttattccctgataatagaaccttaattggaagggggtggcaaaatgcccatttctggaaaataaaccataattggcttattaatattgccaataatggcaatattatttccctttgcaagataatcacttttctagactccctcataaccagaagtgagcatgtgacctagttcttttatttgagctaaagaaaagcatgcttggtggcttctgaaagtaaatggaagattcttttctatccatcgcaytctttcatgctgagctactgatataagtagtacctccggttacaaccaggagacaaaaagcatagggtagaaagttctcatcttgagatgataaagcaaaactatgtaaaaagcttggaagggcttccaattttgatggttggaataccttgcatcaggccagtgctcccactgatgacagctaaaaatgtcagagaaaatgcagcaatcatttgtttaaaggcattggatagctgctgatgctatgagaactatgtgtgctaaaactgcggagagggaaagatctcaaagaggtgagcttaattctgcaaccatttttaatctggcggcat

SEQ ID NO: 451578 - DNA, 603 bp, Homo sapiens
gttgtatttatttttgtaatgtttctatctggttttggtagtagggtaatgctagcctaatagagtgatttargaattgtttcttcgcttctattttctgggagatattgtgcagaattgctataattttttttaatatgctgtttgaacaaaataaggatttgttttcatcctaactatatttatccctatagcaatgttcaccagctggactccttgccaaaatgagccagattatattaagaaaaaaattaagctattttatcctttatcatttacatttttaaacacatttattgactccatacaaaattaaatatctacatactgttaaatttaattaacatactaactacattttcctttttcattaaaatattctcaatgcctagctcaataaatagtacgcactcagtaaacagtcattgcctgatcatgcctccacacacacacaaatgcgtttggcaaaaatgtttcaacaactaaaaaatcaagttgctgacttagtataaagaagaataatcttatatctttttaatgcttaatgaaaacagtaggaaatcactacttgtagagagataaggtatggtgaaatatcttata

SEQ ID NO: 451579 - DNA, 569 bp, Homo sapiens
agataaataatttaaaggatggattgcaaggaaggccaagaagatcccaaacaaggttcaatgtaaacaccaataaacttctgaagtaattcaggaaatgaagaaagagttaatcattattttaaaaaaaatctatagagcttctggaattgaaaacctcagttaagaaatttcataatacaattgagtattttatcmatacatttcatcaagcagaagaaagaatttcagagcttgaagacaagtctttcaaactaactcagtcagacaaaaataaagaaaaaataataatttttaaaaatgaacaaagtgagaaatatggaactatgtaaataaacctaatctatgaattattacattcctgagagagatggaaaaactaaagacaaccttcacaccactcctattcagcatggtactggaagtcctagccagagcaatcaggaaagagaaagaagtaaaaggcagccacataggaaaagaagaagtcaaaccatctctcttcgctaacaatgtgattttatacctggaaaacactaaagactctgccaacaggcttcaggaattga

SEQ ID NO: 451580 - DNA, 536 bp, Homo sapiens
aatcttataatcatggcaaaggtaaaggagaagcaaggtgccttctttgcaaggcagcaggaaggagaaatgcagacccaaggaggaagagccccttataaaaccatcaaatctcacgagaaatcactcactatcaggagaattgcagacccaaggaggaagagccccttataaaaccatcaaatctcatgagaactcactcactatcatgagaacagcatgggggaaactgcccccatgattcaattacctccacctggtctctctcttgacatttggggattacaatttaagatgagatttgggtagggactcaaagcctaaccatatcattctgccccttgccactcccaaatctcatctcctcacatttcaaaacacaatcacgcctttccaatagcctcccaaattcttagctcatttcagcattaacsgaaagtccaagttcaaactctcatctgagataagacaagtctcttccacctatgagcctgtaaaatcaaaagcaagttagttacatcctacaggccccaggc

SEQ ID NO: 451581 - DNA, 567 bp, Homo sapiens
gttgagttaacaaccatgtacaattttcaatgcaaaatttaggatatttgagaaagagtgaaattctgaaatttggagtgggggtattcatgtggacccagaaaatgatggaaaggggcctttgctacccattggtgacactgagactaaatctggttgcagtttgagaggcaatgaagctggatagaagggatatgtcttgcagagtccaatcttcattttgaaataaattttaggtcattgttttattttaaaaaaggtcaaattggtgcttctgctaggtctgaggtttcaaaaaatatttatttatttttgaactttacatgtttttttcagtttgtatttcctactttttctaactttttttaaggttcagggggatacacatgcaggtttgttacatgggtaaatttcatgtagcagcatttggtatacagattattttgtcagctaggtaatgaacgtagtacccaatgagtggttttttgatcytaaccctcctcccaccctcaactctcaagaaagcccccatgtgtatagttcccaattctgggattgctgtgtcaa

SEQ ID NO: 451582 - DNA, 577 bp, Homo sapiens
taacagccttagctatccatgatgcagaagtatatactcatcaattagaagactaataccttagaaacttaagcacaaaatcagcaagaccctgtcaatgattaactagcataatactattccatctaccctcctatcttcagatttaatacatgagtttagagagtgataaatgatttcagataccactaatttaattaaaaatgtgcacataaatttaaaaatattttaactctaagttattttgtttttttcatttaaactttttgtttgagggccgggtgtggtggctcacgcctgtaatcccagcactttgggaggcctaggcgggcggatcatgaggtcaggaaattgagaccatcctggctaacacgrtgaaaccccgtctctactaaaaatacaaaaaaattagccaggcgtggtggtgggcacctgtagtcccagctactcgggaggctgaggctggagaatggcgtgaacctgagaggcggagcttgcagtgagccgagatagcgccactgcactccagccggagagacagagagagactccgccaaaaaaaaaaaaattttgtttg

SEQ ID NO: 451583 - DNA, 425 bp, Homo sapiens
ttaaaataaattatactattttattttattctagtaaaatgactagtttatttctcttaggaaatgaatgagaagaaaaaataatataacgaaattactgatgtggagttttgggtgatatttataatgtatttattgatatttaacagggattactcaagagaaaaaaaacrcaaatactatcctaagtcatgtttcaaaatagggcatttaaagaagaaacaaaacaaaaaagaaccaagaaaaccctcctttaagctgtatgtatacagttgtgtgcagggatacttattatgcagaccagacaaaacaggcatgcaatttgcttgtctcaagatagatttgaaaatggagagctccattaaaatgaaagaacaatgtttttgcagccagggtccttgaagcatggtgggtgttgattttct

SEQ ID NO: 451584 - DNA, 589 bp, Homo sapiens
tagatattatgactgtttcagtatgaacaaaattatcaatgaaaaggttgcatcaattaagtgttttttgaaaagtaatgtagaattagagataaaccagaattaaaaatatacaggttccagaaaaaaaaaaaagactgaattcggtagttaaatcagtcataattaaagacagagtaagataaaatatctaagtttttttttatttgagcaatcataatttaaaagccacaataaaaagacaactcccaggctactttcatcacagaatcattgcagagaaggcaataatgtcaaggatgtggaatatatctacttaaaaatagcaaataaaatatttcataagtgtcatggaatagtgataaaaaattcaaattgacttggataaaagcagagccttgtggatataaaactgactgaagtataacaaacaaaatgtcagmgtatttaatggagtgccacagggatcagtgtgagggctgatcttatttaacaacttaattaatgatctggaagatggagaaaacagtatgtaaatgaaatttgtagctgatatcaaattggaagttttgccaacaccaattaagat

SEQ ID NO: 451585 - DNA, 550 bp, Homo sapiens
acaaactttgatgaagaggaacttgttgggatcatgggttttatataataaaatatattatatttgtaaggaatttctgatatcacagcttaagttctctgggaagacaaccccaagagtgagatcagagtgtacaacatttattaaggtgatgcctagtgatcaaaacttgtgaaaatgaggggaaagaaacagggctgggcaaaaggagagctctggctacaaggcagttctatcaaaggccttagttcattccactgtagccactagagctagatgatccctctaggctgttcagagttggggagaagggtaggcctttttacccttgccttgatcagtaatttgtggtagggccaccttatgaaggagacgtgaatcgggcaaagcagctgtcttctgtgtaggaaataactagagaggactaatagatgagatccatctgctggcagaacttccagcatttgtggggacaagtccctaatgcagaatagagatctgaaygatgtagtaaagcatccagcacctttgatttcaatgggcagtgccc

SEQ ID NO: 451586 - DNA, 568 bp, Homo sapiens
gtttgcaagccatgtcagaataactcaggacaaggtttaagatctatataagtggtactccaagctctaggcaagtgagaaaaatcaggatgatagtttcagtgtcctaaaatatcacgagagaattaggtcatccaggagctagtagcctaaacgtggcacatgccaagttctacaattatatgtaatacatattggtacactttgataaaaggacagggtattcataatgtaatggttgtactagctacctattgctgtataacaatttatttcaaatcataatgacycaaaacaacaattgtcacttattatctcagatagtatctgttgttcaaatactttggagcagttcattgttgtggctcagtatcctaatgcagctggagacttgattaaggataatgaatcttctccaagttggcttaatcacaagtctgttggcagctggcctctacttgccatgtggacttcttcatattgcttcttgagtattttattgacatgacaactagtttctgtcaaagcaaataattcaagatacaatgctttttatgacctaggcttg

SEQ ID NO: 451587 - DNA, 595 bp, Homo sapiens
ggaaaccttacagccaggagagagtggcatgacatatttaaagtgctgaatgaagaaaaacttttatcccagaattacatatatgtaattctccttcaaacatgaaggagaaataaaaacttctacaaaaaagaaaaaaaaaaaagctaagaatttcagcaacaccagatctgtcctataagaaatgttacagggagtactacaaccagaaagaaaaggactttaatgagcaacaagaaatcatccgaaggtacaaaattaactggtaaccataagtacagagaaatacacagaatattataacattgtaattgtggtaygtaaactgctcttatctgaagtagaaagactaaacaatgaaccaattcaaaataatatctacagcaactttacaagatatagacagtataagaagatataaatagtaaaaaacaaaactaaaaagcataaggatgagataaaggcatagagtctttattagttttctttctttttgtttgtttgtttatgcaaacagtgttaagatacaatcagcttaaaataatgggttagaatatagtatttgcaaacttaatgggaatctctaaccaaaaaa

SEQ ID NO: 451588 - DNA, 635 bp, Homo sapiens
agcaactaattatgtgtaccattattttcctatcttaattttgttttatatttttagatgtgwgttgcattcatgaatcacagattgtaacagaattcttttatgaaaatatttccaaaattcaagattttccatatacttttctgtactactaataagtaagcatttcaaatatactttgtaatcataaattcttcaaatgggagccaaattggccactgagattttaccacaggcataactcatattttgattcactttattgtgctgctcagatattatatatcttacaaattgaaggtttctggcaactttacccctatgttcagcaagtctatgggcaccgtttttctagtagcaatttttcaacagtgctcactttgtgtctctgtgtcgcattttgggaattctccctttttcattattattatatctgttatggtaatctataagcagtgatattttatgttactattgtacttattttggtgttctatgaaccctgcttatatgagacagcaagcttaatctatcaatgttgtttgtgttctgacagctctactgacttgccattcacccatctttctcccaatcctcaggccttccttgaccctgaaacacaataatattgccac

SEQ ID NO: 451589 - DNA, 631 bp, Homo sapiens
caggttttgagaggattgactcccattttgaaagatgttttatagtgaataaaatcctatcaaacagcatcacattctgcagaaatatttttgtaaaagtgtcaattgatgtcttaaattttattgttggctcatttaaaaaattcccatagccattcaaccttcagcaaccaccaccttaatgagttggcacccctcaattagagcctccctcagcaaaaagatwacaactcttcaaagactcagaggtttgttaacgtttttttagaaataaagtatttttaaattaaggaatgtactcttttatagacataatgcaattgcatacttaactgactaccatgtagtataaacataccttttatatgcatgcattgggaaactaaaaaaattgtgtgactcattttattgttatattcactttattatggtggtctggaaccaaacctgcagtatctctgaggtatacctgtatttcaaacatccttaagtaattctatctctgtagcaggcagaattatgcatcaagaaaactataataaactcactaagctgtggaaagatttaatagtctgaccaatgactgatgaactcctcatcatcaaagttcctcaagtgtcagctggatgat

SEQ ID NO: 451590 - DNA, 568 bp, Homo sapiens
cttttgcttctgaatctagacctttgactacaaaaaaattctgaaacataaacgaataccctaaatatgcaaagtgttaggcttaatattatgctttccaaatatattgaaattactaaatgagagtaaaatcttttgaagatgtattttcagtagattatgggtagttttatttcttatataaaatgagtgttaaagatgtaaatttatttaataccttggtattttatttctacattttcatgttagcaaataattcaaattagcatgaaaatgaaaaataattaataaaaaggttaatcatatttttactgaaccttaatatagtcccattaatgttcagtttgaaaatgaacaaaagtgtaaaagagttattttatcaagaatacatgtttttgaatattttattcaaaaatgaccattactggaattaaaataagtayaaatacaggtaattttgagagcagagattagcttatagggatagaaatttcaatttttggtaaagagtgaacaataaaatcttagggatgaatgcaaagatagtttaaagagtgcagaattaata

SEQ ID NO: 451591 - DNA, 639 bp, Homo sapiens
cttcaaacaaacttcttaagcatagaaaattcttacattctgatagacaatggagcctttgggggtgagagggaagtggatgataaattacttaatgtgtacaatgtacattagtccagtgatgcatacattaaaagccctgattttgtcactatgcaatatgtcaatgtagcaaaattacacttgtgtcccataagttcatacaaataaaaaaaattctacagtaaaaacaaaacaaaacattgttttaatgcagggaagggtcattgatttcatttgaaacaattcccaaacaggacatggcatctcagacagctccttggcccttggtaattgtgtgcaggtttttcacatgagtgccgggcagaacacaaggtattgagacacagtgagcactgcgcatagcactggagactggctcaggacacaaggtgcttgtggcaccgagccctgtagcattccctgcatcccagaaattagactccttcacacatgcctccctctattcccccgccaacttcatttccagcctccagtatttagtagagtagawattgagttttccttcttgttatttctgttaagataaaaaccaaccacaaccccataagagaaattaacctgcagtgagcaaaaggg

SEQ ID NO: 451592 - DNA, 571 bp, Homo sapiens
ttccttatatactgaaataaaacaaaagcataaacactaagtcatcttaattatcatttaaaaattttgacttgaaatatgcctaawcggagttaatgtatgtaattcaatctgtgtttctcttcatcaagatgattctaaattaaatcctttaagaaaatatgccattatgaatagaaaatataaaacatcaacagacttccttgaattctacttatattacacaatgaaagcatgttggaggccgcacaaatgtttcttgtgattaggcacatctgaagcctgtcagtaacaatatgaacctgtgatcaattaagcagctgactaatcgttacctcctcctccttgctcttgttacccaataaataagaagggctatagaagctcaaggggggctgcctttgctcactagaagcagggagtgctcttcttgtccatgctagcctttcctttaaactgtttcttttgcctctttgttatcatttctgtgtttgtccctttgttcagtcataatgacgttctctagcagtaacagtagtaactgctgtaatgatggtctcaagcagtaacc

SEQ ID NO: 451593 - DNA, 572 bp, Homo sapiens
  misc_feature (1)...(572): n = A,T,C or G
nnnnnnnnnnnnnnnnnnnnnnnnnnnnnnnntgtaatgtaggtatttatgaaactacagtcataacaaaatctctaaataataattatgtttagacttatatttccagccaaacatacacttaaaaaaaaaccctaaaacgatcacytctttaaagattaagaagattatggtatttttaatttaacataatttgatataaaaagcttcttaagaggagaaattgtgtcttatcatttgtcattattaagcaacataatgagataaaaatataattatttaatatacataaataaagattcttagccaatgcatatattctcttgatgctacgtggtttcttagatctaccatttgcccacagaggcaggactaattcctaaatggactaagttacatattgtctttacttgcttgagtctatttgtttggcatttcaatttattataatagggaaaaagtgaaattttctttcataatttttagtgtctttaccttttggtgcatatggtctagcttttataaatttggtctgtttttataattagaattttggtaaacattgtatgaaa

SEQ ID NO: 451594 - DNA, 519 bp, Homo sapiens
gggggcctgggggccgccttgaggagctctaacattccaactgtacgtaaagaaggatgagcttgccaagaaagcagagacatttcctgatcagcaggaggaaaagcaggagattgtgctttgaatgaagtcgagggaggatcctttggactattggtgtgacatttttgtaagtctaaaattatttcaaaacaaacagtaaaaatcagtttattagggcttattaggatggaggagggcccagcttctccatgrtggataactgcttcccatcaatagggaccttccttagtaggggtcctcatcttcttccgtatcctcttcaaaaagccactttaactcctcaaatcttcttcctccttatgcccctatacttatcttttcatctaaaccagtgtcattccaggatgtaaactgtgaaaaagggatagatcatttacttttcaaccctttatatttaaagaaatgctattggcttttaaatgtatgctacattttaatatatccccacttatttat

SEQ ID NO: 451595 - DNA, 519 bp, Homo sapiens
gggggcctgggggccgccttgaggagctctaacattccaactgtacgtaaagaaggatgagcttgccaagaaagcagagacatttcctgatcagcaggaggaaaagcaggagattgtgctttgaatgaagtcgagggaggatcctttggactattggtgtgacatttttgtaagtctaaaattatttcaaaacaaacagtaaaaatcagtttattagggcttattaggatggaggagggcccagcttctccatgatggataactgcttcccatcaatagggaccttccttagtaggggtcctcatcttcttccrtatcctcttcaaaaagccactttaactcctcaaatcttcttcctccttatgcccctatacttatcttttcatctaaaccagtgtcattccaggatgtaaactgtgaaaaagggatagatcatttacttttcaaccctttatatttaaagaaatgctattggcttttaaatgtatgctacattttaatatatccccacttatttat

SEQ ID NO: 451596 - DNA, 556 bp, Homo sapiens
aatatatgtgtctcctcaatatctcccatcataagtccaagggcctttcttccagaatatgcaaacctgacctcatggcactgccaattgcttctcttcctgggttcctatcccagtgaatggcaccttatccatcagctgctgaagccagaaactcggaaatcatcttccatgtcttctttccctcayattccccaatatgcaccatcagacatctagtctatccctaaacctagtggatttttctctcctaagttgtactttttcaccattacttccctagtaccagccaccatcagctcttgcctgagctgctgtgaatcctctgttgcacacctttaatctgcacacctctaaccctgcagtctaaattttcaaagaacaaaactagccacagccctggctgactattgctcccagaataaaaagttggcatcctcaatgcagctgcaagaccccacctgattaagtccctatgagtttcccaaacctcattttatgtccctcggccctcaggctcagcgctccaaccacttggcccttcgtccagtccttg

SEQ ID NO: 451597 - DNA, 531 bp, Homo sapiens
ttacaaagttccacaatttgttttataaggctactgcaaccataattccaaacctataacaagaccattttcacttacaactatagataaaaattctaaataattaactatacttatctagcagcatatttatagactgatacaamgtaatctgatagaatattaaaaatggaataattaccacctggagaggaggaagaagatactgaaaaagtactccaagaaataatggttgaaaacttccaaaatttggtgaagtccagaaacctacaaaactccagaagttgagtgaaccccaaacaggataaacccaaagagatccacaccaaggcacaccccagtcaaacttctgaaaactaaagacagaaaagtcttgaaagcaacaagagagaaaaacacctccttacccacagggaaaaacagttcaaatgacaatagattaatcaagatcaaacctccaacactagaaagaagtggcataacaagtgctgaaaaagagaactgtcaacccagaatcttatattcagtgaa

SEQ ID NO: 451598 - DNA, 531 bp, Homo sapiens
ttacaaagttccacaatttgttttataaggctactgcaaccataattccaaacctataacaagaccattttcacttacaactatagataaaaattctaaataattaactatacttatctagcagcatatttatagactgatacaaartaatctgatagaatattaaaaatggaataattaccacctggagaggaggaagaagatactgaaaaagtactccaagaaataatggttgaaaacttccaaaatttggtgaagtccagaaacctacaaaactccagaagttgagtgaaccccaaacaggataaacccaaagagatccacaccaaggcacaccccagtcaaacttctgaaaactaaagacagaaaagtcttgaaagcaacaagagagaaaaacacctccttacccacagggaaaaacagttcaaatgacaatagattaatcaagatcaaacctccaacactagaaagaagtggcataacaagtgctgaaaaagagaactgtcaacccagaatcttatattcagtgaa

SEQ ID NO: 451599 - DNA, 531 bp, Homo sapiens
ttacaaagttccacaatttgttttataaggctactgcaaccataattccaaacctataacaagaccattttcacttacaactatagataaaaattctaaataattaactatacttatctagcagcatatttatagactgatacaaagtaatctgrtagaatattaaaaatggaataattaccacctggagaggaggaagaagatactgaaaaagtactccaagaaataatggttgaaaacttccaaaatttggtgaagtccagaaacctacaaaactccagaagttgagtgaaccccaaacaggataaacccaaagagatccacaccaaggcacaccccagtcaaacttctgaaaactaaagacagaaaagtcttgaaagcaacaagagagaaaaacacctccttacccacagggaaaaacagttcaaatgacaatagattaatcaagatcaaacctccaacactagaaagaagtggcataacaagtgctgaaaaagagaactgtcaacccagaatcttatattcagtgaa

SEQ ID NO: 451600 - DNA, 488 bp, Homo sapiens
tttgggctatatttgccttccagtatgtttctgcaatatgtagtggtaattttccttaccttcctccaactgcctcttatactcatctttcgaaaataatttgccccccttaaatagattttcttagagggtaggttgtcaggcaattaaaaaatattagatcccaagaaatctattctgtttgcattggatttttttcagattctgtgtgttcgcaacagtactaaatcaaactctgatgtgggggaaaaaagtatgtcaaccaaaaattttatatacagcaaaatcattcttcaaaaacagagatgaaattaagacrttctcaggtaaatttaagagatgaagtttgtcattagtagacctgcccccccacaatgctaaagggagtccttcaggataaaatgaaaggacactaggtagtaggtcaaatccacacgaagaaatacaagcacctcataggtaaatataaaatatggtataatgttttt

SEQ ID NO: 451601 - DNA, 485 bp, Homo sapiens
aaactgtctccatttgcaaatgacatgattagctctatagaaaatcccaaggaacctgcgagaccctcctagaaacaaagtgagctcagcaatgttgcaggacagccccatgaaggaggggttggggtatggactctggattggctgctttgcacgtgaaagktgtgtacggtcgagctgtttccaatctttaggaactggctaacgctgggaggggcagcccctttggggtcagcaaggccccagatgtcaaaaacatgagaatacagaaaataaaggatgtggttactacatccaggctcactgatggctggcttttcttcatcctgccggtctcagcttaattgtcaccttttcagagacagcttctggggaaccatgcagcccagatgcccccacccacatcatactccaagcagcaccctgtttgtttcattcacagccttcacatttttagttacttgtctgttacatgtgtgtgccct

SEQ ID NO: 451602 - DNA, 485 bp, Homo sapiens
aaactgtctccatttgcaaatgacatgattagctctatagaaaatcccaaggaacctgcgagaccctcctagaaacaaagtgagctcagcaatgttgcaggacagccccatgaaggaggggttggggtatggactctggattggctgctttgcacgtgaaaggtgtgtacggtcgagctgtttccratctttaggaactggctaacgctgggaggggcagcccctttggggtcagcaaggccccagatgtcaaaaacatgagaatacagaaaataaaggatgtggttactacatccaggctcactgatggctggcttttcttcatcctgccggtctcagcttaattgtcaccttttcagagacagcttctggggaaccatgcagcccagatgcccccacccacatcatactccaagcagcaccctgtttgtttcattcacagccttcacatttttagttacttgtctgttacatgtgtgtgccct

SEQ ID NO: 451603 - DNA, 485 bp, Homo sapiens
aaactgtctccatttgcaaatgacatgattagctctatagaaaatcccaaggaacctgcgagaccctcctagaaacaaagtgagctcagcaatgttgcaggacagccccatgaaggaggggttggggtatggactctggattggctgctttgcacgtgaaaggtgtgtacggtcgagctgtttccaatctttaggaactggctaacgctgggaggggcagcccctttggggtcagcaaggccccagatgtcaaaaacatgagaatacagaaaataaaggatgtggttactacatccaggctcactgatggctggcttttcttcatcctgccggtctcagcttaattgtcaccttttcagagacagcttctggggraccatgcagcccagatgcccccacccacatcatactccaagcagcaccctgtttgtttcattcacagccttcacatttttagttacttgtctgttacatgtgtgtgccct

SEQ ID NO: 451604 - DNA, 543 bp, Homo sapiens
caggtgtgtgtgttttctataattacttcttttcctttggtaggcctacttttagttctttgagaaatctccatactgttttccatagaggttgcactaatttaacattcccaccagcagtgtataaacattaccctttcacaacattgtgcctatatctgttgctttctgactttttaatcatggccattctggctggggtgaagtgggatctcattgtggttttaatttgcatttccctgatgattagtgttgttgagcatttttttcctatgtttattggccatttatatatctccttttgagaaatgtctgtttatataattttaaatttcatacagcttgaatccttttggttttattaacacttattttatrgcccagaatatggtctttcttggtgaatattctatgtgcacctgaaaaaatgtgtattctgctgttttgggtgaactattaatgtcaatcatgtcatgttagttgatagttttatttaggtcttctaaaattcttcctgcttttctctctctttgttttattaat

SEQ ID NO: 451605 - DNA, 583 bp, Homo sapiens
aaaactataatgtgtgagatgttacaatgaaaaatatattggatgggattaacaacagattagacattgcagatgaaaatattagggatcttaaagaaagagaaactatccaaaataagacaccaagagaaagaaaataatcaaaaattgaaatgaatagagggtgtggaacagaaaaaatatttgaagaaatatggctgaaaatttccaaattcaatcagagctataaacccatagatcaaaaaaactcagcaaactccaagcccaagaaacttaaagaaaactacaagacayctcagtattaagttgctcaaaaacagtgataaagagacaatcttaaaccagagtaaaaagacatattacatacagagacagagatgaggatgacagaagatttcttgtctgaaacaatgcaaaaataaagcaacatttttaaagtactgaatgaaaaaaggcatcagaaaaggagattagcattatgtagagctgaaaccaaaagaagacctagttaacgccggatcccatctatttcagggtgcctagaaatttaatatcagacttacagtttcaaaaatggacttta

SEQ ID NO: 451606 - DNA, 284 bp, Homo sapiens
tctctgaaatcaagatgtatcttgtaatcaatggtaagtcacaaccttaattggtagcatttttctttcttagtggtgcctattggtgcatcttctaattaatggcatcttaaatttaattgaatgtggtagaaagttttctcatcatttaatcattcatatggaattgaataaatacttatatattatctattatatgtcagacatggttaagastaatactttgatgtgtttgtgtactatacactttttaggaaactgaaaccaaaatacaaagtgtaatt

SEQ ID NO: 451607 - DNA, 611 bp, Homo sapiens
ggagaatgagagggctgaggaatgggaataagtcaacttttagctatgttgagagggagatgcctatagacaggttcagtagtcacagatggagttcaggacgaagatcaagactagagtaaaagtcataaattttcttaagagcactcaggaatgtgcatcattcaccttctcataagagggaaaatcaagaccactgcttggctttagagatcaattccagatgacacagattagagaactcagggtaaggattaaataataaaacaatatttggcataacatatgcaattctggaagatgtaatatttactaacaaagtatgaagacactgatgtgcttattgcattgtaagtagagttaacagtctgattcttctcattgcattgatatacccaaagatcaaaatcttgagacgtcaaactatagtttcatgaccaaatatggatttcaacactattaacaagctttttaaaagttagatagacagaaaactcagaaacattcatgattcttaaggattagggaaggtgttatacgcttcattaagtcaaaagtagttgacamatgtttaatattgcactatcagattaatttcaaatatattatat

SEQ ID NO: 451608 - DNA, 622 bp, Homo sapiens
aacatgcatacaaaattttgagtaagtaggataaaattatatgacttaaacacataattatttttaaagtatatgtagatgatttgtgactaaatttattatatatttttaaacaatccatgttagaaattcaaataatataaaagaatctgcaaatttttaatgtaaraagtgggcctccatactcaaaagtggttcattaaacattgatacatttatacctttgtctctttttactaaatagggtgtttactgggcacaaggacttatcttggtaacctttgagtccctaaaatttagcagattaagttatatttagtaggggctcaataaattttggcttcacttggttacaaactttacttaaaaatgtaatctctaccattatttatacactgaacaaatatatatgaagcacttactatgttacaaacacaatggtagatgctaggaataaaatggtgagcaaaacctgttgatagcttagaaggacagacagatattgattatagaatcactctaaagatgtaaattttctgttgttgtaagctctttgtattagtttgctaggcttgccaaaataaataaatcaccacaaaccaggtagcttaagaaacagaaa

SEQ ID NO: 451609 - DNA, 550 bp, Homo sapiens
ttaattggctcacagttctgcaggctgtacaggaagcatggtgttggcatctactcagcttctggggaggcctcagggagcttttactcatggtggaaggcaaagtgagagcaggcatctcacatggcgacaaccagatagggagagagagagagagagtgggatggcggagttgccacacacttttagatgaccagagctcacttatcacaaaggggatggcccaggccattcatgagggatccgccccctatgaccmaaatacctcccactaggacccacctctaatattggatgatatttcaacatgagatttgggtggggacaaacatccaaactatatcatgctggtgtttttcatttgtttgttttttgttttttttttaataaaagattgtagtgttctgccattatcctgtcattacataattctaaaattaaaaaagaaacatatatccttatcattgcctgtttctgtcaagctcaataaatgtccttaatggttcatagtattgtaaaattactgtgtcaaaaatgcttaaacatttgt

SEQ ID NO: 451610 - DNA, 550 bp, Homo sapiens
ttaattggctcacagttctgcaggctgtacaggaagcatggtgttggcatctactcagcttctggggaggcctcagggagcttttactcatggtggaaggcaaagtgagagcaggcatctcacatggcgacaaccagatagggagagagagagagagagtgggatggcggagttgccacacacttttagatgaccagagctcacttatcacaaaggggatggcccaggccattcatgagggatccgccccctatgacccaaatacctmccactaggacccacctctaatattggatgatatttcaacatgagatttgggtggggacaaacatccaaactatatcatgctggtgtttttcatttgtttgttttttgttttttttttaataaaagattgtagtgttctgccattatcctgtcattacataattctaaaattaaaaaagaaacatatatccttatcattgcctgtttctgtcaagctcaataaatgtccttaatggttcatagtattgtaaaattactgtgtcaaaaatgcttaaacatttgt

SEQ ID NO: 451611 - DNA, 594 bp, Homo sapiens
ccattcagcctaagacacccatctgcctctgtaggagatttggattgtaatagaataaatgcatagaggaaggagaggtgatgtttaacacctgacattcaaaataggattttgcagcaagactatgggcagtttgagaaacaaaaaaatttctaagggaaacccattctcttaagaaagggtttgaaagattgtaaagatgagaaaacctaaagaaaagaggaggcgaaggaaacggtctgatgtatcatgatagaagcaagtccaataggttgaggggattactagattataaattccatgcaggcaaggatttttgtgtgttttgttcattactgtatccccagtgcatagaacagtgcttagtacacagcaaacacagtgtttactgaatgcacacagggctttttgttctgctccctgttctgaactctggttgtagaatgctatactaggcaaaaagggtgcgggggttggggggggtccaaaaagagggatcctagaatgattaagagggtaaagcaagatcacttacatataggaccwgggtttcagctccagtacacattttatagatccaccatgacagagttg

SEQ ID NO: 451612 - DNA, 489 bp, Homo sapiens
ataaagacagacacagaggcctatggaacagagaacccagaaataaaccctgtatatgcagtcaaattttttttgacaagggtgccaagaccattcattggggaagggacagtttatattttttttggcaaatggagctgagtaaactggatattcacatgcaaaaaaaaaaaatggacttggacttaatatcatatgcaaaaattaactcaatatggatcaaagacctaaacacaagagttaaaactataaaattcttagacaaaaatgtatggcaaaagcttcatgacattgaatttgatgaggcttttttgcatatgatacaataggcacaggtaayaaaagtagataaattggacttaatcaaaatcagaaacttttgtttatcaaaggatacttttaagatagtgaatagacaacccacaatatgggagaaaatatttgcaaaccatatctaataagtgtttcgtatccagaatatacaaagca

SEQ ID NO: 451613 - DNA, 478 bp, Homo sapiens
gggctgtttataccagtgattttcaaccttccaagtttttccttgggggtgacatacacttttataatcaaatggaattatccagggaaggctgctgggtctgtactccaatctcattattcattaatggatggccagtcactgaccacctggcagatactggttttccgtcatctcacactcagctctgtccaaggtgggacaagacccaagtgaagctggtctgggggacatgggggaccagggggttggggatttggaactgggccatcagtaatgtggtccccaggtttcctcccactgtgggttctaggagtccctcattccaggaacctctccagcmctgctcacactccagagccgtgggtccctggttcaagcaaagctcccctcagatccccttgctggcctgggtctgacatccccgactccgggacctgatgggagcccctctgcctgcagctcccaccatgtgagg

SEQ ID NO: 451614 - DNA, 478 bp, Homo sapiens
gggctgtttataccagtgattttcaaccttccaagtttttccttgggggtgacatacacttttataatcaaatggaattatccagggaaggctgctgggtctgtactccaatctcattattcattaatggatggccagtcactgaccacctggcagatactggttttccgtcatctcacactcagctctgtccaaggtgggacaagacccaagtgaagctggtctgggggacatgggggaccagggggttggggatttggaactgggccatcagtaatgtggtccccaggtttcctcccactgtgggttctaggagtccctcattccaggaacctctccagccctgctcacactccagagccgtgggtccctggttcaagcaaagctcccctcagatccccttgcyggcctgggtctgacatccccgactccgggacctgatgggagcccctctgcctgcagctcccaccatgtgagg

SEQ ID NO: 451615 - DNA, 458 bp, Homo sapiens
agatgggagggagctgcaaggagggggagtgggctcccaggggtgaggagcaggggacacggaggaagcaggttcagagagggagggacagacagacagacactccagagagacagatgtcctgggtgaagagagccggggagcaggtgcttagctaccagaagtggtcaccccacctttgctggggggcagatacacagagagagtggggagggactgaaccycaggtaaaggcagggttcccagaccccactgtaagtgggtctcaattctctccatggctgtcctcctgggggcctggctgttgctcctctgggccaggctgccctggtgtctctgagagtccttgagttccctgagggcagacaccctgcaggggaaggtgcccacctgagtgaagtaatgaagggggagggggttatggctcccactgctggggcaggtccaccgaggcacag

SEQ ID NO: 451616 - DNA, 471 bp, Homo sapiens
actgttcccataagccaaggacccatggttcgtcctcccacccaagtgacaatcacactcacacttggtgtgttttatattttttaataaagtttgtaatccaatggacacacaaaacaaaactgcgctgagaaaaacagtttcataaattaataagtgttaggaagttgggggaagagatcaaggtaataggaagaggggttagccagtctttttgtacaggtgccgtgtgacacttcyacatcgcgggagcaggacccgtgctgtaccgaagcgcacttatacaaatgagtgggcaatacaaagtctgaatatgaaaataagatttcctctgaaaacacatttttggcacagattaaaaaaaacgtatgtcgggggatttgattttttaagtcagtattatatatatttatatatattatatatttatatatacacacatcccaagttctgcatatcccaccaagagaa

SEQ ID NO: 451617 - DNA, 280 bp, Homo sapiens
tgtgcagatttgttacatgggtatatcacacccagatagtggacataataactaataggyagttattcaacccattacctgttcccttccttccccctctagtagtccacagcgtctattaatcccatatttatgtccatgtgtgctcagtgtttagctcccacttataagtgagagcatgtagtatttggttttctgttcctgtgttggtgtgctaggattatggcctccagctccacccgtgttactgcaaaagacatgatttaattcttttttatgg

SEQ ID NO: 451618 - DNA, 614 bp, Homo sapiens
ctacacactagcaatgaacaatctgaaaaagaagttaagaaaagcagttccatgtacagtagcattcaaaagaacaaaatacctggcaataatttaaccagagaagttcaagataatacactgaaaactaaataacatttctgaaagaaagaaaatctaaataaatggaaatacatcctatgttcattaattggaagataatattaatatgccgataccaccmaaagcaatttatagagtcaatgcaatccttatcaaaatgttgattttttttcataaatggaaaagctaattctcaaatttatatgtgatttcaagatgccccaagtagccaaaacaatattgtaaaagaaaagcaaaattggtggactcacactttccaatttcaaaactgatacagatatggtaatcaaaacagtgtggtactggcataaagataaacttatagatgtctatatgaaattaaattgagagtccataaataaacccaaacatttatggccaggtgatttttgacaagagtgctaagatcattcaatagggagagaatgctctctttaacaaatggtgctgggacaactggatatccacattcaacagaatgaagttgggcc

SEQ ID NO: 451619 - DNA, 594 bp, Homo sapiens
atatttcatctctccctttccttcttgatttatttcttcctacccaatacactattttacttgtttatctttttttacagtttgtctcctgctaaaatgttaactccatgagggcaggaatttttgcttgctttgttcatgatgtattcatgcaaactagaagagtgccaagcattcagtaggtgctcaatgaatatttattcctttctcattccaatkaccaattactctacttaactccatattgatggcatctcttgcttcagtctcttctttctcttatgctgctgccacacttgttgaactgttattttttctcataactattacaagagcttgtcgcatgctggctaatgaaatttgggcaaattatttaaattaagttcacctcagttcttcattttaaaatggagatattaatagtataaattcatagaattctcatgagactcataacgtgtgtacagcacctggcacaatacttgaaatacaataagtgctcagtgaatgcttcctacttttatctgctaccctgggctagctctggactagatttccattggtctcctggactatctctgcctgaatgctaca

SEQ ID NO: 451620 - DNA, 545 bp, Homo sapiens
ttcccaaaacaatctacgaattaacagaattcttattaatttaccatcatttttcacagaattagaaaaaaaacaattctaaaattcacatggaaccaaaaagagcctggctagccaaagcaatcctaagcaaaagaacaaagccagaggtaccacattacccaacttcawactatactacaaggtcatggtaacccaaacagcatggtactggtacaaaaatgaacacatagatcaatagaacagaacatgaaacccagaaattaagccataaacctacaaccaactgatctttgacaaagtcgacaaaagtgaacaatggggcgaggacacgctattcaataaatggtgctgggaaaacagtctagtcatgtgcagaagaaagaaagtgaacccctacccctccccatatacaaaaattaactcaagatgaattaaagacttaaatgttagacttcaaactataataatcctagaagaaaagctaggaaaaactcttctagacattaatctaggcaaagaatttatgactaatatctcaaaca

SEQ ID NO: 451621 - DNA, 586 bp, Homo sapiens
tggaccttttagcgggtgttcaggcarttggtttccctctcttcgtctcaagacgtcaatgtacttatgtgagaatctttgatggggtcggtcagtctctttaacccagactgcttgcctgcatcctagcccctatcagaaagaatttaaggaaaaggttaggggagaaataggatctgataacaacattagaattttctaataacctggaacccacagaaggatagaattaatagcatggatttaaaaaatctggttttaattgttccctttaaaaaaggaaagaagccctatccactcaggctaaacacactaagtaatgatgatggggctagtgtgagttgaattcccagggagtgattccagcctaaaagccagggtcttagctggtagatgactaaagagcttcttaggaccacatgtttgcactctgcccgcatttcctaggattcccaggggagaagaaaattgcttgctatggaaacttcatatttagtgatccattgtatttgctcttgcactatttcctctttcagaacaaatcttcactttttcctgacatgcaccctccatattaaataaatac

SEQ ID NO: 451622 - DNA, 458 bp, Homo sapiens
ttatccacagaaaatatgttaaggagaatgtgtttgagaaacagaattaaggcaaaggagcctcataactaagggagatcaagggaagaggaaaagtgagacaggtgctggagccagacagtcaacagaggactctggggaccatggtggggagtttgggctgcgctctcagtgagatgcagagccattggagggttttaagcaggccagttccaaggtctgactcgcatgtttagaggaccactctgctctatggagggtggattggagaatggcaagagtgaacctcctgagccagttggaaagtgattgcaaaaggccaggcaagggatggtggagatcacaactggattgattcagaatgtcttttasaagttgaatcagcagaatctactaggagtaaagaaaacaaggacttaaggacaacttataggttttgatcttgttatattgggtgg

SEQ ID NO: 451623 - DNA, 531 bp, Homo sapiens
cttcatttggcccttttaatattttatcatactatcccaggagtataaagatatagccacatatttagcaaagacaatagcctagggattatcaacaagtaatattaattatccacttttgtagccagacttgaaatcctggtcttcataaattaaaaaatatatgtattttttattttttcagagtttaccaatgactaagagatggggtagtttgtcagtatcttattcattttcmtaggtcacctttaatcaatcctcctattttaattttggcgtgaggcaaaaataaagcacacgtaagcagggttccagagccaccaaatgggtgtagttcttaattatggcagagaatacacattaactacttaagagggtgacagacttcagagctcaatcctcagccactactggcaggagcctgcagtgacagttcagcatcacatctatagagcgttccatttttccttcctctggatttgttttcttcctgcttctgtcactcggggaaggtttagttttgagtaatga

SEQ ID NO: 451624 - DNA, 640 bp, Homo sapiens
tatgctattgcatacacgatggacaagaacatgataaagtccagaagctcttctctaagtggggaaaattagattaagcaggttgtatttgtgtgtgcatgtgtgcctatgagcacttgctttgtgtatactttaacttcctaaaataccctggtcattcagtatgctctgtccacctttccctagacaggaagctacagacgtagaaaccaaggcagtgagtgaagtctgtctggtggcagaggaggaggaaggaggcaggtgtgtatgtgtgtgagtgcatgtgtagattcaggttgcttccagggttytaacatatattaactttgtgtcaatatttgtccttcctgtcgtgaaatgaggattttccacctcatttcacgtttgaaaagaaaatatgccaaaggggtcgtctttgctagaaaaaaaaaaaaattaaaagaaaagaaaaaaaaaaacttctattctttatttagaaaaatggatctgaaggaaagaaaaaaatttaaataaatgttctgactcaaatgcacatagaatccttccatatttctgttttcaacaaaaaagaaaaatttatatgtttaaaattgaatgaaatacatcaacattaatgattttttccttgaggttaacacca

SEQ ID NO: 451625 - DNA, 553 bp, Homo sapiens
gtaacaactagaatgagcataaaaggcattatgctgagtaagggaagcccatctctgaatggtacacatttgtaggattccatttatataacactgtagaaaagacaaaactatagagttaaagaacagatcagtggttgccaacgatgaatggtggagaaaggctacatgtatgtgagaacagatttttggggtgatgaaatggtccttatcctgactgtggggatggttacatggatctatacatgtatttgaagtaataaaaccacatacaaaaatgtcaattttaaagtacattcattttaaaaataaatkgtttgaaaacttgcctttaattttgggggtgatgaatatattcattattctaataatgaggatgctttcatgggagtaggcattcatcaaaatgtatcaaatggtatgctttaaatatgtttatcatgtgtcaatcatatctcaatacaaacaggtttatttaaaaaaaaaaaacttgtttatgaacagttacagccagcatttttaaagcagctcattcaaaacaaacaagcaaact

SEQ ID NO: 451626 - DNA, 553 bp, Homo sapiens
gtaacaactagaatgagcataaaaggcattatgctgagtaagggaagcccatctctgaatggtacacatttgtaggattccatttatataacactgtagaaaagacaaaactatagagttaaagaacagatcagtggttgccaacgatgaatggtggagaaaggctacatgtatgtgagaacagatttttggggtgatgaaatggtccttatcctgactgtggggatggttacatggatctatacatgtatttgaagtaataaaaccacatacaaaaatgtcaattttaaagtacattcattttaaaaataaatggtttgaaaacttgcctttaattttgggggtgatgaatatattcattattctaataatgaggatgctttcatgggagtaggcattcatcaaaatgtatcaaatggtatgctttaaatatgyttatcatgtgtcaatcatatctcaatacaaacaggtttatttaaaaaaaaaaaacttgtttatgaacagttacagccagcatttttaaagcagctcattcaaaacaaacaagcaaact

SEQ ID NO: 451627 - DNA, 388 bp, Homo sapiens
cagccggcttcacctctcagtggcacaggcagtgagactttgcggcacctagcctgggcactctggcagccaagagggaactcgtcacctgatcaagcccagcaggagccggaaggcagcgctgagtgtggcgcccaccaggaacctgtgtcagcccacgaggtccgygtgcagccccggttcccaccagcgccgccccctccacacctccccgcaagcagagggagctggctccagcttctgccagccccagagaggggcccccacagcgcagtggccggctgaagggctccttgagcccagccagagcagacgcccaggccaaggaggctccgaaggccagcgagggctgctagcacgttgtcacctctcagtgagtgatatggtt

SEQ ID NO: 451628 - DNA, 388 bp, Homo sapiens
cagccggcttcacctctcagtggcacaggcagtgagactttgcggcacctagcctgggcactctggcagccaagagggaactcgtcacctgatcaagcccagcaggagccggaaggcagcgctgagtgtggcgcccaccaggaacctgtgtcagcccacgaggtccgcgtgcagccccggttcccaccagcgccgccccctccacacctccccgcaagcagagggagctggcyccagcttctgccagccccagagaggggcccccacagcgcagtggccggctgaagggctccttgagcccagccagagcagacgcccaggccaaggaggctccgaaggccagcgagggctgctagcacgttgtcacctctcagtgagtgatatggtt

SEQ ID NO: 451629 - DNA, 617 bp, Homo sapiens
aaatgaatgacatacaacttggaaaaaaaaggaataaacaaattgttcctatgcacaggaacatgatttcctgtgtaataaaacccagggtagctttataaaattcctagaggttgttggatacaaggttagcacacaaaaaaactatatttctatataccagcaatgcacagtctgaaagcaaaattgaacaaaamcaatgttatatataatagattccataaaaataaatatttaggtataattttaacattgcatgtacaaaagctttatgctaaaaactgcataatgctgacaaaagtaataaaaaagacataaatcaatggaggtagataggatgttcttggtttgaaacactcattataataaagtgccaattctccacaaattaatctatagatttatcacaatatcagtcaaaattctcagaaggattttgcattggtataggcaagatgatttttaaatgtttatggaagagcaaaataaacagaatagttagaacaatttttaaaaagaataaagttgaagaaatcaccctactgtactataaagctgcaatagtcaggacagtgtgcattgtgaaaagtaatgctacataaatcaatggaataaat

SEQ ID NO: 451630 - DNA, 591 bp, Homo sapiens
aatatgcaatcaagatatttgcatttctgctataatatgacttttgaatatattcatttgagactacagataaggctgattcaaaattctctggcatatyacagttattcttagtttaaaaaacaaaaaaacccccaaaaaccctcaagatacttcattgtcagatctccgtgtggtaggaatgtgcagttgatatactaagattttttggctttttgttttttctccctcctcatggtgtatcttttcagtgtttcccatctagtacttatgtatatggtcaaattttcatttttgtggcatttgtagtggagagtgatggctggaggaatcttgagtcctgtggacctcagtcagaggtgtgctcataagcaagctcctggagacagagaagaaaagacaccctgatttgtagcatttgtcaattaccatgaggtaaacacttctaccagggccaatttcaaggaggtgggaagagacgtgtgcagtcagctcttgctaggtggggatagcagctccagcagtgcaccacaggcggtttgcatttttaacacttgagcctaacataagaaagttcctcataggctgtaa

SEQ ID NO: 451631 - DNA, 509 bp, Homo sapiens
gataggaggaacagcaaacagtttgttcagctgggcaagtatagtgcaggcacgaagatttcaatagagacccagaccccagggagctggttctttagcctactggcattttctaaacaggacaaagacaagaccagaaatgctggtgttactggaagattaatctgacagctggtgtggattgaagaagagaagagggattaggacagtgattcctaacccctatcctacactcccaacggccccttgttttgaatttttgaactaatcaaactacatttgtggtaattagttttatttctttccattaaagacatataaaactgccaatttgagcttctgatgattctaagaacatcagtgttaccktccttagtatcaaataaatgcaggcaaaagcacaagactacggagttttatttagcctgaacagcctagtagtgttggatttaggaggtgtttaatgctgactcaagctctcaggactcttatcacttgaaccttcttgg

SEQ ID NO: 451632 - DNA, 557 bp, Homo sapiens
tttttgcctttgcctgtgtgcaaaattcaccctccgactaaaacagactagaccttaagccttgcattctagtcaatagatgcatagtgaggtatgtaggaataaagtaaactgatgtctgaagcttactttggaatatatcaaaatataagatggatttatgaatgaacagagagctggattgatgggtggtaatcaaayacaagacaaattaatctagttgatgttcactgtaaaactctttcaatttatattggaaaagtgtttaaaataaaatatgaggcagagggtgagaaatggcctataaaaaatgttttttcagagcctgaatacctgcatacacttgagttgagacaggcatgtacacaacacaagacaaacctgattattttgtgaaaattctacaataatgctgatctgaactcccaagaaaatctcttcactagatggcccaatgggtagacatttgtcttccaaactctgaccacaatgtttcagacaggatgctctgtatttttcatccacacttcttaaacagtagttctttaccaattgca

SEQ ID NO: 451633 - DNA, 604 bp, Homo sapiens
gttgcaaaacttgagaatgttgtgggttcagacagtctggagctgaggaaggattttgtttattatatcctcattcctgccacagtcagccaataagacttccaattgtcatccaatacactgataataagtcagcagatcaacagtgggttccagagaaatgcctgcagttgggtccacaatggctgtaacttctgcatagcttaattctaaacctgatttaagctacatttccttttaaatatgaataaaagaagattcagacactcatactgccaatgagagtaaaattggtagagcaattttggagaataattttaccacagctcttagaatttcaaatgatcttattatataacctagtaattctatttctcccctggaaaacatgcaagtgaataagatcataataaaggtaagaaagcatgtagaaggttggttactgtgatgtttataatactgaaagattggaaacaaactaagtgcccatcaactgagaatggttaaataaacgtatatactcayacttaggaatacttgtcgcatgcagcagttgaaatgaaagtaaccactatgtactaaggtggctagatttctaaggcac

SEQ ID NO: 451634 - DNA, 494 bp, Homo sapiens
cttttcccctaaagaccatgacattcttaatcaaggttcctcttctgaaatacacaacacagagcagaaacagtagctctgagtgactactttctctctttcaagaaaagtacctaattagtcctattcatatttagtactattctccatgcataggaaagaaattgcatcattgcatacaatgtatgccctayacatcagggcttagttgtctcactgaaccctaattgagaaaggctaatgaaggcctcaagatttatacagctgtagaattaggtcatgaaatctcacaacagaaaagcctctgactacttttccagttcaacacccccttctttgccatgaattcccagcactaccctgaaaaataagcaactgacttctacctgaacaactcagccatcaaagacagccaacaccattaaagagagccctggctgctagaagtttttcctctgaatatggtagaaagaggccagatggcgagggtcctt

SEQ ID NO: 451635 - DNA, 615 bp, Homo sapiens
cagctcagggggttgtcacttgtggctagatccactgtcacatatttcaaaggtgttaaatcattccagtaatgtataaaatggaagagctatcaaagctgtttggcactaaggaggtcataataaatggagagggaataataggacccctttggggcttactcatccctatgttcaaaccatagaagggacatcttgttgacttgtgcaaccatatgacaggacgcatgycacccaccctccaaggacaaaaataagaatgtacaagacaacttctatttgtcagacatggggaggtaggagtaaaaatatgtattattttagcaacaagttttctccatctcagtcaaccactgaccattgtgtgacctcctccatcttatttctaataaatactctccaactaaatatagtatatctatctttcctataggtgttttaaagtaccttgtgtcattatcctccttgtgtcattatctgccttgtataataagctcctaaaattcagcccccatgtatgacatttaattagtattatacaaaatatagtaccaaaaacaaaatgaataaagcccttgcttctccatccctaactctgcccttatgttgctgtag

SEQ ID NO: 451636 - DNA, 598 bp, Homo sapiens
gttatgataaatgttagcaatgactgggggtttcagtagtctaggttacaggaatttgtggcagtgatggtggctgcatgggttatttgggtaagggatttaggaatcctcctgtttttgtcttcctcacagtggggacttatctgagaagatctctcttggtrttggtctgacatggctcacaggtagtgacagcagcactagaatccagggcacaggtgctcatgggtgctatggagctgggtttctgaactcagggtcttgtgaaactactacagcacttgagacttgaggtacaggttcactctccaaggtatgagtgaatgcagttctcccactaagccagagtcggtcattctgcagcatatctcagcagcttgagcccaggaggcacgatatagctgtgattctgaccctgggaggtgggacaaagtaatggcattgatccagggaaaaaagagtgctctggaggctcaagctctggggagcagagcacaactgcaattcaggtcccagaaccaacagggcacagtgacagcttagactccaggggatgaagtaccacacaatgttgactctgggttcagagataatggga

SEQ ID NO: 451637 - DNA, 609 bp, Homo sapiens
cgaggaataatgaatgctagcaaggatatggagaaatgggaatttcgtacactgtgtttgggaatgtaaattagtacagccagtataacaattgtattgagtttcctcaaaaaactaaaaatagaactaccatatgatacagcaattccactactgggtatatatctaaaagaaatgaaatcagtatattgaagagatgtttgcactcttatgtctattgcagcattattcacaataaccaaaatatggaatcaacataagtgcccatcagtgaatgaatggataaaaaaatgtggtatatataaacagtggaatgctattcagccataaaaagaatgaaattctgtcatttgcagcaacatggatggaaggtcattatgtgaagtgaagtgaagtaagtcaagcacagaaagacaaatatcacatgttctcattcatatgtgggagcaaaaacagtgaatttcatgaagatagagagtaaattggtgrttagcagatgctgggaaaggtagtgagtaggagcagatgaagagaggttgattaatgagtataaatatgcagtttgacataggaaataagacctagtgtttgataggtgagtagtacgac

SEQ ID NO: 451638 - DNA, 591 bp, Homo sapiens
actgtcctttttttttttttttgagatggagtttcactcgtgttgcccaggctgtagttcagtggtgccatctcagctcactgmaacctccgcctcccaagttcaagtgattctcctgccatggcctcctgagtagctgggattacaggtgcccaccatgcctggctaatttttgtttttttagtagagacagggtttcaccatgttggccaggctagtcttgaactcctgacctcgtgatcctcctgcctcagcctcccaaagtgctggaactacaggcgtgagccagcacatccagccatgaagtatacttttaatcaatataaatatgtctcatttttccttttatgcatttggccttaaattccattttattttatattgatactctaaaattagcttatttaaacttaattttaaatttttgaatagtgttatattcacagagttcaaccttgaaaatgtacaaaagcatatctaaagaagtaggctcttcactctggtatcccccagacacagaatttccctcccaagacacagtgttatctgtatgttgaatatatatctggattggggtttgggcagggaaag

SEQ ID NO: 451639 - DNA, 591 bp, Homo sapiens
actgtcctttttttttttttttgagatggagtttcactcgtgttgcccaggctgtagttcagtggtgccatctcagctcactgaaacctccgcctcccaagttcaagtgattctcctgccatggcctcctgagtagctgggattacaggtgcccaccatgcctggctaatttttgtttttttagtagagacagggtttcacmatgttggccaggctagtcttgaactcctgacctcgtgatcctcctgcctcagcctcccaaagtgctggaactacaggcgtgagccagcacatccagccatgaagtatacttttaatcaatataaatatgtctcatttttccttttatgcatttggccttaaattccattttattttatattgatactctaaaattagcttatttaaacttaattttaaatttttgaatagtgttatattcacagagttcaaccttgaaaatgtacaaaagcatatctaaagaagtaggctcttcactctggtatcccccagacacagaatttccctcccaagacacagtgttatctgtatgttgaatatatatctggattggggtttgggcagggaaag

SEQ ID NO: 451640 - DNA, 560 bp, Homo sapiens
tcaatataaatatgtctcatttttccttttatgcatttggccttaaattccattttattttatrttgatactctaaaattagcttatttaaacttaattttaaatttttgaatagtgttatattcacagagttcaaccttgaaaatgtacaaaagcatatctaaagaagtaggctcttcactctggtatcccccagacacagaatttccctcccaagacacagtgttatctgtatgttgaatatatatctggattggggtttgggcagggaaagcaggcatgtgcttgagccaccatcttgattcagactgtgaatattattccagtggtgtgaatatagctagaatacgttctcttgcatcagcctagagttgcaaattcacatgttgggcccaaggagaatgtcccgtggtctatcttaggccctgtagtctagggaagccattctgtattccagaacccacgccattttctagcttgttggtggggaagggaagtaggaaggtggtagtgggtgcagaatcagggaggtgttgacatggatttgggccttgaaatta

SEQ ID NO: 451641 - DNA, 591 bp, Homo sapiens
actgtcctttttttttttttttgagatggagtttcactcgtgttgcccaggctgtagttcagtggtgccatctcagctcactgaaacctccgcctcccaagttcaagtgattctcctgccatggcctcctgagtagctgggattacaggtgcccaccatgcctggctaatttttgtttttttagtagagacagggtttcaccatgttggccaggctagtcttgaactcctgacctcgtgatcctcctgcctcagcctcccaaagtgctggaactacaggcgtgagccagcacatccagccatgaagtatacttttaatcaatataaatatgtctcatttttccttttatgcatttggccttaaattccattttattttatattgatactctaaaattagcttatttaaacttaattttaaatttttgaatagtgttatattcacagagttcaaccttgaaaatgtacaaaagcatatctaaagaagtaggctcttcactctggtatcccccagacacagaatttccctccmaagacacagtgttatctgtatgttgaatatatatctggattggggtttgggcagggaaag

SEQ ID NO: 451642 - DNA, 560 bp, Homo sapiens
tcaatataaatatgtctcatttttccttttatgcatttggccttaaattccattttattttatattgatactctaaaattagcttatttaaacttaattttaaatttttgaatagtgttatattcacagagttcaaccttgaaaatgtacaaaagcatatctaaagaagtaggctcttcactctggtatcccccagacacagaatttccctcccaagacacagtgttatctgtatgttgaatatatatctggattggggtttgggcagggaaagcaggcatgtgcttgagccaccatcttgattcagactrtgaatattattccagtggtgtgaatatagctagaatacgttctcttgcatcagcctagagttgcaaattcacatgttgggcccaaggagaatgtcccgtggtctatcttaggccctgtagtctagggaagccattctgtattccagaacccacgccattttctagcttgttggtggggaagggaagtaggaaggtggtagtgggtgcagaatcagggaggtgttgacatggatttgggccttgaaatta

SEQ ID NO: 451643 - DNA, 594 bp, Homo sapiens
aatgcaaggtaagtgcatacagctcaggcaagcaggctgaggagcagaccacygcttcaggctttggattttcacaaacaatcctgcctcccccaagctgagacaatgccctgcattcactgagttctcaggagctaccatagtgtgccgaggagcaggaaaaaagttagacttgaattgaggatagattggtattcactaaatggcacttctgaatttactgcagccttcgcctttagagagaattgccaaggtgctcataaaaggagaaatgatgaatattcaggatgtcttttgaatccattaggcaaccgggatgaggtctccatatgtagacttctcgttctttccttaagctgttaaggaaactgccaaaatggccgtctgcaggataaaatggagcctgggtttgccaatggggagaaagtctaaacgccaaaggtcaagtctgtggaaataaaattggtttaggagcattttgcaagtgaagagatctataaattttggatttctggacatggtgaatgagggaatgtgtctgtctgcttgtaggaacactgatcaaaatgcagtagcagcctatttatcgtactg

SEQ ID NO: 451644 - DNA, 550 bp, Homo sapiens
tgcatacagctcaggcaagcaggctgaggagcagaccaccgcttcaggctttggattttcacaaacaatcctgcctcccccaagctgagacaatgccctgcattcactgagttctcaggagctaccatagtgtgccgaggagcaggaaaaaagttagacttgaattgargatagattggtattcactaaatggcacttctgaatttactgcagccttcgcctttagagagaattgccaaggtgctcataaaaggagaaatgatgaatattcaggatgtcttttgaatccattaggcaaccgggatgaggtctccatatgtagacttctcgttctttccttaagctgttaaggaaactgccaaaatggccgtctgcaggataaaatggagcctgggtttgccaatggggagaaagtctaaacgccaaaggtcaagtctgtggaaataaaattggtttaggagcattttgcaagtgaagagatctataaattttggatttctggacatggtgaatgagggaatgtgtctgtctgcttgtaggaacactgatc

SEQ ID NO: 451645 - DNA, 487 bp, Homo sapiens
ttgggtttatgatgccactgtttcctagttcatttttaattattttggcattccttttcagtctcccttgacagtttatcgttaccttccagtcttaaggttcctatcatcaggttacttctcttgctacattcttctttcttcctgggcaatctagctagggctgttggtccaattattccttgtgcatgagtgactcccttcagctcaaagttctctcttgagtttcaactcacatatacattcacctgatagaaatacatttactcagagtcccacagactttcctaacccaacaacaccgaatctgaacacttcatattcttctccaaactcatttccctttttgggttccaacccttagygaatgaggccaccatttgctaaatgttcatgatggaaacctatgagtcataataaatttctctttttttctttttgttgccccatctactcgtcaagtctattaaattctatgtcctgaaat

SEQ ID NO: 451646 - DNA, 613 bp, Homo sapiens
actctagcaggataggtctgaccagaagaggccagggcatgaaccaatctttgcccgctggactgggagggagatgatttgaggaaattaaatccaataggtagatttaaggtggtaaactggcaggtaccaggcataggaagagccaacagaaggtgacraagagtctagccaggccagtggggcaaggctatggggattaacagacagggatcacaataataaccagcatttattgaggcccccactatgtgctgggcactgttagatggtttctttgcagtatctgtgactctgacataaaactgatgctctagcaaatttaacaccctttaatgctcatatcaatcattcaaagtaaagattattattaatgtgattgtacagaatggaacaaagcattgagaggttaagtcccagaccacacggctactaagtggtaaggctgtaagtgaagtccagagttgactccaaaggccgtgatcttcctcaccacaggcacacacaggcacacacatgcacacacagacacacacatgcacacacagacacacacatacacacacatgcacacacatacacatacacaaatatacacattatgcctggatag

SEQ ID NO: 451647 - DNA, 551 bp, Homo sapiens
agttatcctccagccctctaggaaaatgcaatctatggaagagaagactgaagcagagcatttcaacacagcagtatttctcaatcagtctgcaatgacacactgatatatgtctcgcgcttcaaaggtacactgtcccattgtgaacaatggacaataggaatgtttgctacactgaacrtaagtactccaacagctatgttcatcagctaaatcactgagctgaatagagagacaatattgtataaagaaggaacaatgtcaagtttgcaccaaagaaaaatcacatattactggaaaatgtcacataagaaaacgttactgggccacaaatagttctgtttaaacagcaaaagtacccaagggtactttttgtctgttattgacagcacacccaactagaagggataaaatataagaacatttattatcttccataacaaaatgccttgaggaaggcaattccaatattggttcagcagctcaattatgtccttaaatccctggttcattccactttttcaatttttaaacctaagcacattgactta

SEQ ID NO: 451648 - DNA, 551 bp, Homo sapiens
agttatcctccagccctctaggaaaatgcaatctatggaagagaagactgaagcagagcatttcaacacagcagtatttctcaatcagtctgcaatgacacactgatatatgtctcgcgcttcaaaggtacactgtcccattgtgaacaatggacaataggaatgtttgctacactgaacataagtactccaacagctatgttcatcagctaaatcactgagctgaatagagagacaatattgyataaagaaggaacaatgtcaagtttgcaccaaagaaaaatcacatattactggaaaatgtcacataagaaaacgttactgggccacaaatagttctgtttaaacagcaaaagtacccaagggtactttttgtctgttattgacagcacacccaactagaagggataaaatataagaacatttattatcttccataacaaaatgccttgaggaaggcaattccaatattggttcagcagctcaattatgtccttaaatccctggttcattccactttttcaatttttaaacctaagcacattgactta

SEQ ID NO: 451649 - DNA, 509 bp, Homo sapiens
tgtcatccaccaaagtgcaaagcagcaagtgggagctgaaaatattttactcaattatatgttttaacgtattctttgaaggggtaatggaggatggtggaccyacatgtagtgagcaatcattcttaaggtacagtgtattcagtggatgagtccctttggataggaagttcagttgataagctccgttggtccttgatagtcctcagcttttaagtctaatgagtctctacataaccaagtggatgtatcatatttttctatcacctggtagtcatttggtgaagactttggagggatgtaaatagaacagcttgatcttggaaacccaggaagagcccagcatcctggggatttgtcccagcatgcttcatgggagatattacacatgaagcccaaaccaccttccatcacaggctaaaatagagatctgcttagttttatgtctgagacctagattcaatgttatagtccatctatgtggtccaccttctccctgccaaaagggt

SEQ ID NO: 451650 - DNA, 624 bp, Homo sapiens
ccacatatataaatatatacttttttacctaataaataatcaacgcagtctcccagcaactcaaaaaaccatctgctttttgagctctgccttcacagatgtccttcctgagttttaaaccacgacctcggcctaggcttcctgctaggaaggatgggtagtttgccacttgtcagggaagagcctccacacatgtttttttattgccagtctaaaaacgtggcatgttacccatacatcaaagcatccatatgtctctggcatattctctcctatgtgcttactataggggggttgatataattgaaagtagtggaaaaatagactacggaaggaggggaaacagatggagggaaaaagttctccttcacaggctaaaagggtatgtgtccgcggtgctatgtctcctgaactgagaaaagtaaragaaagaatttggggaaaggccaagcaaagtgcagcccagtgtggtccattatcattcaagctgttgtcattcaaggccagcactgataggaagaagggtcttcagaattgatgatttcatggcaaacttcaaaagcaaactgcggctttgctgcttgtcctagtcagctcagactgccataacaaaatgccacagat

SEQ ID NO: 451651 - DNA, 509 bp, Homo sapiens
tgtcatccaccaaagtgcaaagcagcaagtgggagctgaaaatattttactcaattatatgttttaacgtattctttgaaggggtaatggaggatggtggacccacatgtagtgagcaatcattcttaaggtacagtgtattcagtggatgagtccctttggataggaagttcagttgataagctccgttggtccttgatagtcctcagcttttaagtctaatgagtctctacataaccaagtggatgyatcatatttttctatcacctggtagtcatttggtgaagactttggagggatgtaaatagaacagcttgatcttggaaacccaggaagagcccagcatcctggggatttgtcccagcatgcttcatgggagatattacacatgaagcccaaaccaccttccatcacaggctaaaatagagatctgcttagttttatgtctgagacctagattcaatgttatagtccatctatgtggtccaccttctccctgccaaaagggt

SEQ ID NO: 451652 - DNA, 576 bp, Homo sapiens
actaaaacaaggccaacctgctcttcatcggtgattttattcttagagttattttgtacagctccattttttttcatttaaagaaaaatagtgctccaaagccatggagaggaaaaggctagggttacatctgcctctcaaagtccacatatatcctgttcaactcagccaatattttctaagcagctacaacaggtcaaagatcattctaggcactgacaaagcgaaggcttagggagttgatcatttgccacactaaaaggtctttccttctctctaccccaaaccctatgagtcttgaggttgtgcttggaagctgcacagaaccagactagtgcatccaaatggcaattacccatcctggaactgtgcaactgccttgtatccagcaccatggcattctccacctccagcccatcaatgycacgtagaatactttagggtttctctactagctagggcagtttttcactgagccatctacactcaagattgttgaccatggaaccatacttacaagtcggttttctggagcaggaataaggcaaagcttatgtgccagtagaggagtcaatc

SEQ ID NO: 451653 - DNA, 576 bp, Homo sapiens
aattttgtgaagtaactaggaagtaatgtgacaggaaatattactgggagcagaatgtttattggttgtgatattcaaataagagaagttgtgattatttttcttacataaaaataactattttttattttaataatatttacatattaatggggtacatgtgacattttgttacatatgtagaatgtgtaatgatcaagtcagtatttgaggcatccatcactttgrgtatccttccttttgacagaaaatacagcaaattcataatacggatctatttttgtcccgtctactcatatgacatagagacccagcctaagacgcaggccttaatcagaccccccaggtgacttagagccattccacactttatccacctggtcagcagtacctcatatcctctgaggcccagcgcccatgtcgcctccctgaagccaccgtcgtcctttctgcttctccacaggccaagcagatttcactgcagctctgactagtgtccctgaggcacacagtcactacacaacccccacatgttgtggcattcactggtgtgctatgatcagctgtctgctcatc

SEQ ID NO: 451654 - DNA, 600 bp, Homo sapiens
tgagtcatttgtcaacagagtggctgattccccgtgtctaggtaagcatgggaggcatttcatcaagacatttgacaccttcctttgaaaggtgaatgacagaacatatgaatacctctgattaacatctaaaggcagccggggcccccctgaaattgcccctccatggagtagctctcaagtaaatccactgtagggacctctaccatttcaactcatttatcagcaattccatctgcttcaatttggggcactccatgtgtctgtggttctgtcatgtctctctggagttgctccctcaacggtttctggcctccatgcatggcctaatccaggctgtcatctttccctgtgatatagctggggcagctgttgcttcttcctcgatagtagrggggtggttgccagaaagcctgaggggcccaccatccaatttccatgcttggagctaaatatgcatgtgcatgatctttccttgaaactggaggaggggactcagtccctctaccttttacaccaaattgatttgatgtcttcttaaggagtggtgaggtcatccctgctcctattcaacttcaaaggccaacttctcattaacct

SEQ ID NO: 451655 - DNA, 436 bp, Homo sapiens
acccagtctatgtactttgttttagcagcctgaactgacaaagaaagaatagtattttagtttcataccaacaaatgagtatgccttaatagagagaaatactgtgaagattattccagttgggaatagcaaaacaaaggctttaagagtggaaagcatgaagcatgttgggaggtgccagagtgaaatagacaaaaacacactccaaagacagtctcacaggtcagaatcctgagcagggtcttgtctgctttcctactcaccctggtagaccctcaatgataacccctacctagcaggggcagaagaaattttacattgactttatcmccaaaaaaaaaaaaaaaaaaaaaaccacagataaggtctgaacataatcaaaggcctggaatagcaccccaatcaatgacaccctgaacatgccagtgggacgttt

SEQ ID NO: 451656 - DNA, 579 bp, Homo sapiens
tttcacttggcagcaataaatacataattacattggcttctttctccttcctcacccactttttctgttccattacttttgtttcctagaatcacctcccagattaactacctggtttcttttctcaggctcagcttttgaggaaactccmactcaatccatttggattatattatttagtccatagaaactgtttaatattttcccttaaattcttcatctgatttaagagagtaaacctcgatttttttcacatttgtttgatagatcatggacagtttattttaggtatgtttcctttaaacaatctgaggttgtattttctatcataactcaagatgagagtttttttgatgtggatggaagcttaattaatttctctaatttacataatttgtgtttcttgtatcatcttatatttttttcctttgtgtaagaatttttcttattttgctttatatgcagtgtttgattttattatttttaattgacacataataattgtatgtatttatggggtacagtataatattttgacataagtaaacaataatcctcctatctagctatatatttgta

SEQ ID NO: 451657 - DNA, 579 bp, Homo sapiens
tttcacttggcagcaataaatacataattacattggcttctttctccttcctcacccactttttctgttccattacttttgtttcctagaatcacctcccagattaactacctggtttcttttctcaggctcagcttttgaggaaactcccactcaatccatttggattatattatttagtccatagaaactgtttaatattttcccttaaattcttcatctgatttaagagagtaaacctcgatttttttcacatttgtttgatagatcatggacagtttattttaggtatgtttcctttaaacaatctgaggttgkattttctatcataactcaagatgagagtttttttgatgtggatggaagcttaattaatttctctaatttacataatttgtgtttcttgtatcatcttatatttttttcctttgtgtaagaatttttcttattttgctttatatgcagtgtttgattttattatttttaattgacacataataattgtatgtatttatggggtacagtataatattttgacataagtaaacaataatcctcctatctagctatatatttgta

SEQ ID NO: 451658 - DNA, 634 bp, Homo sapiens
cccacactcatgtctctctgggcctgataaattttgcatagctcacatagctcaaattgctctatttttcttttcttaaaggtaaatatattttttatttgttggtcatctaatgccagcttttctaaaattacaaaagcttagaaataaggttgctagatttaactgatattaattatatagcgtggctttaagctcaatttttagaaaaagcttcattttgaaagggcttaggagctaattatctaatatttatctctagatttcagtcctacctttgtagttctcaagctgtgctaaggggagaatttttattggcttgtgaaatctgttttttcttaattacttcgttgtcagctaccccttgagctattaaatagatgttacacagtcaaaactggcaagctgtctttgcatggctcaagggattatggttgtatacatttatagacagaggatttacytctgcaggagagagaaaatgacaaggtacaagattaggttaaccccacagtggaaaaatgtaaatacttgtcagcaatgaagagaaatattcttgtcacattataaaaacacctaggtgacttcattgttttgaagcagttacatggccctacctacctatcagagagtg

SEQ ID NO: 451659 - DNA, 503 bp, Homo sapiens
gacagtgatctctggatgtatcatctatttttccagcctttagcctctttagttattaacgtctttattatctatttcatatgtaattaattttcagttgattcttcttataaattcaagtatgttgagacaaactaaattcccaacagttggtagattactgaaataaaytatggaagtttacaacaaaattgatatagtatgttccaatttttgcgagaaaacagtttgtgtatttgtatgcataaaaaagaatcagaaaaactttccaccaagttgctgacagtcattatctccctcacttcattaaggtctctgctcaaatgttcttcctcaaagttcttccttgaccagtctgtttgagaaagaagtcctctttatctctgttccaggtcactttctagtctcttatcttgctttatttttcttattggtctttccgcctccatgatactgtttatttatctgttgagtatttttctccccctagagtgtgtggctca

SEQ ID NO: 451660 - DNA, 512 bp, Homo sapiens
tgaagttggagagattttctagctggtgccagttctgcatgagccgttgatcttggggactgagcccagcttgttcatgagtgtgcataagacaatcccttccttcagactcttctggaagtcggggctgaaagagaggcgggtgagtccctcgatccagctgcagagcgccgcctgcttctgagggtcgcatttgaacaggagctggttcttgatctcggcaaaaagctggtragaaggccccttgttgaactgcgtggaactcatggctgatgggaagggacagggtaagagggacccattagcattttaaaatctaattgaattacagcgccaattccagaaactctagaaccaattcagaaaacatattctcagaaaaaacattcttaaatttcttcctctggaatcattcttagtaccaaaatctatactggtttgagttctccagagaaatagaactaaaggaaatatctacatatctatatatttattgatatataaagttgttt

SEQ ID NO: 451661 - DNA, 594 bp, Homo sapiens
gataatgcattcctttggtctttcattccttgtcttgctctcccactcacctactgagatatcttctatcttccaagaaaaaaaaaaaaagaataggtattggcattaaatccttgttttagggtctgcttctgagagaaccaaaataaaaccaagtgaaaattttaagtaggcaattgaagayatatttatggagttcaaaggggagctcccagatagagataaaaatttaaagacgtcagagtataaatgttatgtaaagttgtaaaagcagatgagattgcccaaggagtgggtgtagttagaagagaccaaggaaagagtcctggagaactgcaacatttagaggtctccaagatgaagacgaaccataaagaaactcaggaagtgcaatgagaaagagaaaaggaaaaccaggcaagtggagtgtcctggaagccaaaagaaaggagtcatcatctaggggaaaactgcagatatgtcaattaagacgaggatttacaaaatcccataggatcagcagctagcttggaggtcactgacctcagaaagagcaatttcataaagttgtggggtaaaaacctgattagaata

SEQ ID NO: 451662 - DNA, 651 bp, Homo sapiens
tatatagaaaatttttcctggtcttttttagtttagttttttacagatgtcttcagaatgttgcactttcttcatttttctgattgttcctgatgattaaattcaagttaaacattttttgcaatgatactagataggyaatgttggacttctcattgcgtcatgttaggagttgcaaaatttcaggttggccttctattaacagtgctgtttgatcacttagttaagatgataactgtcagattttcccattgaaaagacacatcttccttttgcaataaatatgttatctgtggggtgataatttgagaccatacagtgtacttttgagctttactctggtttaattttgcctctacccttttaaaaattgaataccacttttaattactgttcattgtcatattatatgtaaatctgtaaatacttcaaattactactaaaataaagaagagataagatacacattttcaaacctctcttcatataaagcatttagaaaaatcattatcagagtaattttttttcatttaagtattcatatatgagctagtctatccaataaatgtcttctcccatataattaactgtcttcattttgatataattcaaataaaaatgagctgttcttctctagttccttaaacatct

SEQ ID NO: 451663 - DNA, 651 bp, Homo sapiens
tatatagaaaatttttcctggtcttttttagtttagttttttacagatgtcttcagaatgttgcactttcttcatttttctgattgttcctgatgattaaattcaagttaaacattttttgcaatgatactagataggtaatgttggacttctcattgcgtcatgttaggagttgcaaaatttcaggttggccttctattaacagtgctgtttgatcacttagttaagatgataactgtcagattttcccattgaaaagacacatcttccttttgcaataaatatgttatctgtggggtgataatttgagaccatacagtgtacttttgagctttactctggtttaattttgcctctacccttttaaaaattgaataccacttttaattactgttcattgtyatattatatgtaaatctgtaaatacttcaaattactactaaaataaagaagagataagatacacattttcaaacctctcttcatataaagcatttagaaaaatcattatcagagtaattttttttcatttaagtattcatatatgagctagtctatccaataaatgtcttctcccatataattaactgtcttcattttgatataattcaaataaaaatgagctgttcttctctagttccttaaacatct

SEQ ID NO: 451664 - DNA, 587 bp, Homo sapiens
tatgagtacacaaaggcagacagagtgatattatgagctatggagactgagaaggaggagggagggattgggaggtgagaaatcaaaaactacatattgggtacatgtacactattcaggtgatgggtacactaaaatctcagacttcaccactatacaattcacccctgtagcgaaaaaccacttgtaccccaaaaactattgaaatacaaaataaaataaaaaataaaactaaggaaaaaaacatggtcaaaggcacttgatgaaattcaacatrcgtttctttgcataagataggaagagaaggatactttctcagcctccagtagacagtatcatacctaatggtgaaatactagaggtgatctcaacaaaatcagtaacaaagcaagaataggtatagtcttctctattatctaagatcatcctgtaagttacagccaaggtagtaataccagaaaaaagaaataaataaaaggaaagaagagtctaaattacagttattttcatggtctactcagcaaatctaagataatcaaataaatattataatcagcaaaaatttaaagtaaaatgttattacaaaa

SEQ ID NO: 451665 - DNA, 606 bp, Homo sapiens
atttaggtgtaaagtacataatgagaaaaatcaagtatctctgtctaagtaggcttcatttactttaaccaacaattaagtttcttactcttttgccattttctttttcctcctgttgatgtcagctatcatggcacttgtggagagtaattttttcagtmctaagaaagagatagaaataagaggattgtcaggaaagctggagaaaacaagtaaatgaaaacagtggttttgaaagaacacagttataataatcaggtctttatggaacatataaccaaagccttttataaaaaaaaattctcaaggaagatattttcctttctatcattctcgggttgtggaagggaagttagccttcccttaagaaaagtatgtttggagttgtttctcagtttaaatctgcaatcaaaattcttaaatattaagaattcccttgatataatttttaatttcccagagatcttcaaactgtactgtgatctgcctcaaaagtccctctcattatgtgaataggtcctggcattgatcttacatctcaaaaatgatttttctcagttctcagagcaattggaaaaactcagttctcacttatacattcatgaa

SEQ ID NO: 451666 - DNA, 556 bp, Homo sapiens
gttaaacaacaatttctcttgtcttcccatttagtatattgacagaaatattttagggctcttggttttgatggctgtagtgagcagtttcttagagagtgtactcatttcttgttgtgtcaaagctaaacatctctacctggctttcaaggctcttggtaaatctggattcaccctattacttgatcttagtgctcattctttgacatcaccctgccatcttgcatgtcatccttatactacccaacacaatgtgacctttttatttgagtatcttcstgcctgttattcgttttgttcagaaagtcttttccatatatacccaattacgtctatttatcaagactcatttctgtcaattgagagaaatgctgttgaagctcaggtgttttattgcctctttgaagtttttcttgacaattttaactctttttgaccttcttttacccattcatacttggcagtacacaatttaaaacttcactacagttttctataatattgcattatttcgggtgtgccatatttcttcttcagcttgatagtgatgttgtga

SEQ ID NO: 451667 - DNA, 556 bp, Homo sapiens
gttaaacaacaatttctcttgtcttcccatttagtatattgacagaaatattttagggctcttggttttgatggctgtagtgagcagtttcttagagagtgtactcatttcttgttgtgtcaaagctaaacatctctacctggctttcaaggctcttggtaaatctggattcaccctattacttgatcttagtgctcattctttgacatcaccctgccatcttgcatgtcatccttatactacccaacacaatgtgacctttttatttgagtatcttcctgcctgttattcgttttgttcagaaagtcttttccatatatacccaattacrtctatttatcaagactcatttctgtcaattgagagaaatgctgttgaagctcaggtgttttattgcctctttgaagtttttcttgacaattttaactctttttgaccttcttttacccattcatacttggcagtacacaatttaaaacttcactacagttttctataatattgcattatttcgggtgtgccatatttcttcttcagcttgatagtgatgttgtga

SEQ ID NO: 451668 - DNA, 610 bp, Homo sapiens
tcattagttctgggtgtagcagtagactctagtagaaagtatgttagacattcactttctgccaatatacagcagctcagtgtaaaggtgatgaaggaatattgtctggactaggtggataaaagttttcagtgcccttggtccacagtcacctaagagggctgtttcaaaatgttttatttttatccttaacagagrtgtataaaatcagcaatcaaaagatgcgattctgtccacttaaaggtctttcatgggtgaaggttttatacagtatttaaatctcatcttgatctttgaattgcctcattgtttcattgtttccctacattatgaaggaaaatatattctcagggctcttctgcctctcttcatatgccttagaatagattaataaatggaggacagttggtagttttaatatacacctacaaaatgtctttttttccccctattagtcctgtttatctattgcatactgtgaacaggcatgttttctgaagggttgcagggttccagacctcctagattctcaggtgattaagatcctggcagggtactataattccgccatgacctgggaatgcactactatccacttccaaccgttagg

SEQ ID NO: 451669 - DNA, 610 bp, Homo sapiens
tcattagttctgggtgtagcagtagactctagtagaaagtatgttagacattcactttctgccaatatacagcagctcagtgtaaaggtgatgaaggaatattgtctggactaggtggataaaagttttcagtgcccttggtccacagtcacctaagagggctgtttcaaaatgttttatttttatccttaacagagatgtataaaatcagcaatcaaaagatgcgattctgtccacttaaaggtctttcatgggtgaaggttttatacagtatttaaatctcatcttgatctttgaattgcctcattgtttcattgtttccctacattatgaaggaaaatatattctcagggctcttctgcctctcttcatatgccttagaatagattaataaatggaggacagttggtagttttaatatacacctacaaaatgtctttttttycccctattagtcctgtttatctattgcatactgtgaacaggcatgttttctgaagggttgcagggttccagacctcctagattctcaggtgattaagatcctggcagggtactataattccgccatgacctgggaatgcactactatccacttccaaccgttagg

SEQ ID NO: 451670 - DNA, 610 bp, Homo sapiens
tcattagttctgggtgtagcagtagactctagtagaaagtatgttagacattcactttctgccaatatacagcagctcagtgtaaaggtgatgaaggaatattgtctggactaggtggataaaagttttcagtgcccttggtccacagtcacctaagagggctgtttcaaaatgttttatttttatccttaacagagatgtataaaatcagcaatcaaaagatgcgattctgtccacttaaaggtctttcatgggtgaaggttttatacagtatttaaatctcatcttgatctttgaattgcctcattgtttcattgtttccctacattatgaaggaaaatatattctcagggctcttctgcctctcttcatatgccttagaatagattaataaatggaggacagttggtagttttaatatacacctacaaaatgtctttttttccccctattagtcckgtttatctattgcatactgtgaacaggcatgttttctgaagggttgcagggttccagacctcctagattctcaggtgattaagatcctggcagggtactataattccgccatgacctgggaatgcactactatccacttccaaccgttagg

SEQ ID NO: 451671 - DNA, 600 bp, Homo sapiens
actactatccacttccaaccgttaggactcaggaaacagtaacaacaaaacttcccaagccctacccagtctctgataaattgaaggcataggccagagtcggtgtgatggaatactataaaacccaaattgattattttcagaacttttaacttcatgtttctctgtgcttcttctctacaccattcttttattcctttccacctgacctgtgtgagtgactgaccttcacattccttccctcgtgaccttattkaaaaattcttttagaaaaatatcgggttaacatatttacatgatgcctgaagtttcaaaattgtattaagggaaatctctttgggagatgttaatagctgcaaaaaggtgaagtcattttttttaacttttattttaagttaaggggtacaagtgcaggtttgttatataggtaaactgtgtcatgggggtttgttttacagattattttatcatccaggtattaagcaaggtacccattggttatttttcctgatattctccctcctcccaccctccaccctccaataggccctacagtgtgttgctcccctctttgtgtccacctattttccccagttagct

SEQ ID NO: 451672 - DNA, 573 bp, Homo sapiens
tgggaacaaactggaaatacccaggaaaactgtcctgacaggaagagaggtctctctggtaccaactcttttctgaatttcctggcttctggtatgtccacctctctggtatgtccctgaggtggagtgctgtacacagtgtgccttgacctcaacttataaaatcatgtggcttcccccgacttcatttacttctttctatgttaattctctacagattattacyggatcaagaaccacctgttagtctcctgctacacttgaattgattaaattaattaatggactcattccttttatttaaaaaacacttgctaaatgcttcctggtttaccaggtattacactagggaatgtagataaagagatgataaaacatcttttacccttaagcaactcaaagcctagcagaggataagacatacaaacacatggatttaagggaggagaccacccctcatattgtcttatgcccaatttctgcctccaaagaaagaagaagtaaaaactaaaaggcaaaaatggaatccacaggcagatagcccagcaccatgccctgggcctggtagttaaa

SEQ ID NO: 451673 - DNA, 573 bp, Homo sapiens
tgggaacaaactggaaatacccaggaaaactgtcctgacaggaagagaggtctctctggtaccaactcttttctgaatttcctggcttctggtatgtccacctctctggtatgtccctgaggtggagtgctgtacacagtgtgccttgacctcaacttataaaatcatgtggcttcccccgacttcatttacttctttctatgttaattctctacagattattactggatcaagaaccacctgttagtctcctgctacacttgaattgattaaattaattaatggactcattccttttatttaaaaaacacttgctaaatgcttcctggtttaccaggtattayactagggaatgtagataaagagatgataaaacatcttttacccttaagcaactcaaagcctagcagaggataagacatacaaacacatggatttaagggaggagaccacccctcatattgtcttatgcccaatttctgcctccaaagaaagaagaagtaaaaactaaaaggcaaaaatggaatccacaggcagatagcccagcaccatgccctgggcctggtagttaaa

SEQ ID NO: 451674 - DNA, 567 bp, Homo sapiens
taccaggtattacactagggaatgtagataaagagatgataaaacatcttttacccttaagcaactcaaagcctagcagaggataagacatacaaacacatggatttaagggaggagaccaccyctcatattgtcttatgcccaatttctgcctccaaagaaagaagaagtaaaaactaaaaggcaaaaatggaatccacaggcagatagcccagcaccatgccctgggcctggtagttaaaaatcaacccctgacctaactgcttgtgttatctatagatttcagacattgtagggaaaagcatcgtgaaaatccctgtcctgttcagttctgttctgattactggtgcaggcagcccccagtcacgtactccctgcttgctcaattgatcacaaccctctcacttggacccccttagagttgtaagcccttaaaagagacaggaattgctcacttgggcagcttggtttttggagacgtgagtccgccgatgctcccagctgaataaagccctttccttctacaactcggtgtctgaggggttcctgtctgtggctcctcctgtg

SEQ ID NO: 451675 - DNA, 567 bp, Homo sapiens
taccaggtattacactagggaatgtagataaagagatgataaaacatcttttacccttaagcaactcaaagcctagcagaggataagacatacaaacacatggatttaagggaggagaccacccctcatattgtcttatgcccaatttctgcctccaaagaaagaagaagtaaaaactaaaaggcaaaaatggaatccacaggcagatagcccagcaccatgccctgggcctggtagttaaaaatcaacccctgacctaactgcttgtgttatctatagatttcagacattgtagggaaaagcatcgtgaaaatccctgtcctgttcagttctgttctgattactggtgcaggcagcccccagtcacgtactccctgcttgctcaattgatcacaaccctctcacttggacccccttagagttgtaagcccttaaaagagacaggaattgctcacttgggcagctyggtttttggagacgtgagtccgccgatgctcccagctgaataaagccctttccttctacaactcggtgtctgaggggttcctgtctgtggctcctcctgtg

SEQ ID NO: 451676 - DNA, 567 bp, Homo sapiens
taccaggtattacactagggaatgtagataaagagatgataaaacatcttttacccttaagcaactcaaagcctagcagaggataagacatacaaacacatggatttaagggaggagaccacccctcatattgtcttatgcccaatttctgcctccaaagaaagaagaagtaaaaactaaaaggcaaaaatggaatccacaggcagatagcccagcaccatgccctgggcctggtagttaaaaatcaacccctgacctaactgcttgtgttatctatagatttcagacattgtagggaaaagcatcgtgaaaatccctgtcctgttcagttctgttctgattactggtgcaggcagcccccagtcacgtactccctgcttgctcaattgatcacaaccctctcacttggacccccttagagttgtaagcccttaaaagagacaggaattgctcacttgggcagcttggtttttggagaygtgagtccgccgatgctcccagctgaataaagccctttccttctacaactcggtgtctgaggggttcctgtctgtggctcctcctgtg

SEQ ID NO: 451677 - DNA, 499 bp, Homo sapiens
aaaaaacatggaagtaagagcaattttggactagggtaagatatgagtttaattttagataattttgtaacagacagataaaagtgtcctagtaggcagttgattgtatagatttcaaggtcagtgraaatattcacctacatagaagggcctgttaaagccatgacatccccaggaagaggatttaaagtgcaaacagtgctgaaaaagacctctggggaacatcaccttccaagaggagggctgtaagggagacatgagagagaattgtttcaaaagaatgaaggattttctttgtgaggtcaatagagacaatatttatgtagtaatatttcatttgtttgtttgtttgtttaccctgcatccattacctctcattcttgtaaaatgagaggtaatttccctttggtgaaacattctggtttccttttgggaaacaatctcttctccattgtgtgtggtctcaatggaaatgtcagactcctgggctgccatgttc

SEQ ID NO: 451678 - DNA, 612 bp, Homo sapiens
atgaggaagacagatctgataaatgtttaggaggtaaaatcaacaagatgccaacacattgggtaaggaaagtgtctaggattgcttgcaagtttctgaatgaaagataataaatggcaatctgtgtcaccaatcattataaaaaacatggaagtaagagcaattttggactagggtaagatatgagtttaattttagataattttgtaacagacagataaaagtgtcctagtaggcagttgattgtatagatttcaaggtcagtggaaatattcacctacatagaagggcctgttaaagccatgacatccccaggaagaggatttaaagtgcaaacagtkctgaaaaagacctctggggaacatcaccttccaagaggagggctgtaagggagacatgagagagaattgtttcaaaagaatgaaggattttctttgtgaggtcaatagagacaatatttatgtagtaatatttcatttgtttgtttgtttgtttaccctgcatccattacctctcattcttgtaaaatgagaggtaatttccctttggtgaaacattctggtttccttttgggaaacaatctcttctccattgtgtgtggtctcaatggaa

SEQ ID NO: 451679 - DNA, 612 bp, Homo sapiens
atgaggaagacagatctgataaatgtttaggaggtaaaatcaacaagatgccaacacattgggtaaggaaagtgtctaggattgcttgcaagtttctgaatgaaagataataaatggcaatctgtgtcaccaatcattataaaaaacatggaagtaagagcaattttggactagggtaagatatgagtttaattttagataattttgtaacagacagataaaagtgtcctagtaggcagttgattgtatagatttcaaggtcagtggaaatattcacctacatagaagggcctgttaaagccatgacatccccaggaagaggatttaaagtgcaaacagtgctgaaaaagacctctggggaacatcaccttccaagaggagggctgtaagggagacatgagagagaattgttkcaaaagaatgaaggattttctttgtgaggtcaatagagacaatatttatgtagtaatatttcatttgtttgtttgtttgtttaccctgcatccattacctctcattcttgtaaaatgagaggtaatttccctttggtgaaacattctggtttccttttgggaaacaatctcttctccattgtgtgtggtctcaatggaa

SEQ ID NO: 451680 - DNA, 461 bp, Homo sapiens
tgagtctacatgagatctcattctgcctttcaggtccgacgccctcccctctcctcaacttcctgtgccacttcagtactcagtatatgaatcatgggcaaaactagttgtgtatctgagatctctctatagtctaatctgtcatgccagcaaatgtctccagggaagaaaaggctgatgatttctgttcacctaaaaagggctctttcaactctggaattgcaattcatttagaaccctttgttttcaagctcttcaatgtctaagatttttgtgacttgtctatttttttttcctagttgttgaagtgggagtgatgaactgctgatatttgtgtatcccacctggaagcaaaagttcttagtgacttttaaagacagtaagtactggccctggtacatgacttttcatatggcccttgctcatatactyattgttatattacatatatttctatataa

SEQ ID NO: 451681 - DNA, 580 bp, Homo sapiens
attatagtgtatatataatgctatgtatacagcaggcatttaattcattatagtttgacatttttttcagatggttctgttatctccaaaaaagtttatctgacctgtcacccagttattttttgtcatcttccaacatacctcttactctacaacttttctactgtcattcctaatacaggataaaaaaatcacagctcaagaactcattctaaaaacacctacataatacatacttgtgtgaatttatgcttgaccagttagccaagcatgtctgtagttataagttgtaattatatagaattggaagaataatatgggaattttttctagaattattctaggtctaagaaataacagtcaactttgtataacttcatttcgaccctttcatatgatcagattttaatttcaatgggattgtatttgaatgtgggattgagaaaagggttgagagatgagaatttttacttttgtccaaactgtttactagaataataataatwattattattttagagatgagggtcttactgttgcccaggctggagtgcagtggcacaatcatagctcattgtaa

SEQ ID NO: 451682 - DNA, 575 bp, Homo sapiens
ctggctgcaggaagccagtgaaaacaagtgttgccttctccagctaggagggaacacaaaattcagcatggagcactggctgtccaggattgctgagccatcctccaagaaaagaaaagacaaggtgtagtctgtggtgaagataataacattaatgttctcttcagtgccatccgcaaagatggtctatgtccaggtgaactccttcacattcagttttaccggcactcttctagaaattatgtggttgggcagatcatcactaacagtaacytgatgggtgagaaatctgtaagacaaagtgagattctagggagtgaatgtaaattttatttagaaaggagctaagtaaatgtctctgggaagaataacaatgcatcaaattatattcctccacagggaactttgggttaaaatattttaatagaatacatagatttgcatcagtctatccttccagtgtttgtggtaacctgttgtggacagtgggaaattccaaaggattaaccagctttgggtgagtttgttctctgagaaatattgatatctagcaattaaaagtgactttgggccag

SEQ ID NO: 451683 - DNA, 616 bp, Homo sapiens
caaagggctgggattacaggcataagtcactgcacctggccaaattatgtaagtttttcttgatgaattatgtattagtccattttcacactgctatagagaaccacctgagactgggtaatttataaagaaaagaagtttaattgactcacagttccacatggctgggaaggcctcagraaacttacaatctggcaaaaggcaaagggaaagcaagacgtgtcttacatggtggcaggagagagagagagaggaaggaactaccaaacacttttaaaccatcagatctcatgagaactcacccactgtcgtgagaatagcatggcagaaactgcccacatgatccaatcgcctcccactacgtccttccctggacacctgcagatttgagatgagatttgggtggggacacagagccaaaccatatcaaattagttaagtgaaaatttactgagtgctaagtgcatgataggtgttgaggttacagaggtgtttatctctcggagttacaatatagtaataagtatcatgatgggagatataaagttgtgtgtgcgtccatcttttgtgccaacaaccaaaaataaataatagccaagggggaacaaaggtagta

SEQ ID NO: 451684 - DNA, 616 bp, Homo sapiens
caaagggctgggattacaggcataagtcactgcacctggccaaattatgtaagtttttcttgatgaattatgtattagtccattttcacactgctatagagaaccacctgagactgggtaatttataaagaaaagaagtttaattgactcacagttccacatggctgggaaggcctcagaaaacttacaatctggcaaaaggcaaagggaaagcaagacgtgtcttacatggtggcaggagagagagagagaggaaggaactaccaaacacttttaaaccatcagatctcatgagaactcacccactgtcgtgagaatagcatggcagaaactgcccacatgatccaatcgcctcccactacgtccttccctggacacctgcagatttgagatgagatttgggtggggacacagagccaaaccatatcaaattagttaagtgaaaatttactgagtgctaagtgcatgataggtgttgaggttacrgaggtgtttatctctcggagttacaatatagtaataagtatcatgatgggagatataaagttgtgtgtgcgtccatcttttgtgccaacaaccaaaaataaataatagccaagggggaacaaaggtagta

SEQ ID NO: 451685 - DNA, 629 bp, Homo sapiens
cagtatgatgctaactgtgggtttgtcatatatattttgagatgyggttcttctatgtctattttgatgctaagttttatcaaatgttttttctgcatctatgagaagatcatatggtttattgtccttgattgtttatgtgatataacacatttattgacttgcatatgttgaaccatccatgcattgatttttaaaaatttgctgagacttgttttgtagccaaacatgtggtctatcttggagaatgactcatgaactgattgttgaaaagtatgcatattctgcagttgttcagtagaatgttttgtaaatgcctcttaaattcatttggtctaaattacagtttaaattcaatgtttttgttaattttctgtctaaatgacctgcctaatgtgagtggggtattgaagtcctctactattattgtgttgctcgctatctctctctttaggtcttataagatttgttttatgaatctgggttctccaatattgggtgcatataatttagaattgttccatactcttgatagattgatccctttatcattctataatcaccttctttgtctttttttcattactgtttttgacttgaagtctgttttatctggtataaacgtaggt

SEQ ID NO: 451686 - DNA, 629 bp, Homo sapiens
cagtatgatgctaactgtgggtttgtcatatatattttgagatgcggttcttctaygtctattttgatgctaagttttatcaaatgttttttctgcatctatgagaagatcatatggtttattgtccttgattgtttatgtgatataacacatttattgacttgcatatgttgaaccatccatgcattgatttttaaaaatttgctgagacttgttttgtagccaaacatgtggtctatcttggagaatgactcatgaactgattgttgaaaagtatgcatattctgcagttgttcagtagaatgttttgtaaatgcctcttaaattcatttggtctaaattacagtttaaattcaatgtttttgttaattttctgtctaaatgacctgcctaatgtgagtggggtattgaagtcctctactattattgtgttgctcgctatctctctctttaggtcttataagatttgttttatgaatctgggttctccaatattgggtgcatataatttagaattgttccatactcttgatagattgatccctttatcattctataatcaccttctttgtctttttttcattactgtttttgacttgaagtctgttttatctggtataaacgtaggt

SEQ ID NO: 451687 - DNA, 629 bp, Homo sapiens
cagtatgatgctaactgtgggtttgtcatatatattttgagatgcggttcttctatgtctattttgatgctaagttttatcaaatgttttttctgcatctatgagaagatcatatggtttattgtccttgattgtttatgtgatataacacatttattgacttgcatatgttgaaccatccatgcattgatttttaaaaatttgctgagacttrttttgtagccaaacatgtggtctatcttggagaatgactcatgaactgattgttgaaaagtatgcatattctgcagttgttcagtagaatgttttgtaaatgcctcttaaattcatttggtctaaattacagtttaaattcaatgtttttgttaattttctgtctaaatgacctgcctaatgtgagtggggtattgaagtcctctactattattgtgttgctcgctatctctctctttaggtcttataagatttgttttatgaatctgggttctccaatattgggtgcatataatttagaattgttccatactcttgatagattgatccctttatcattctataatcaccttctttgtctttttttcattactgtttttgacttgaagtctgttttatctggtataaacgtaggt

SEQ ID NO: 451688 - DNA, 629 bp, Homo sapiens
cagtatgatgctaactgtgggtttgtcatatatattttgagatgcggttcttctatgtctattttgatgctaagttttatcaaatgttttttctgcatctatgagaagatcatatggtttattgtccttgattgtttatgtgatataacacatttattgacttgcatatgttgaaccatccatgcattgatttttaaaaatttgctgagacttgttttgtagccaaacatgtggtctatcttggagaatgactcatgaactgattgttgaaaagtatgyatattctgcagttgttcagtagaatgttttgtaaatgcctcttaaattcatttggtctaaattacagtttaaattcaatgtttttgttaattttctgtctaaatgacctgcctaatgtgagtggggtattgaagtcctctactattattgtgttgctcgctatctctctctttaggtcttataagatttgttttatgaatctgggttctccaatattgggtgcatataatttagaattgttccatactcttgatagattgatccctttatcattctataatcaccttctttgtctttttttcattactgtttttgacttgaagtctgttttatctggtataaacgtaggt

SEQ ID NO: 451689 - DNA, 545 bp, Homo sapiens
tgagtggggtattgaagtcctctactattattgtgttgctcgctatctctctctttaggtcttataagatttgttttatgaatctrggttctccaatattgggtgcatataatttagaattgttccatactcttgatagattgatccctttatcattctataatcaccttctttgtctttttttcattactgtttttgacttgaagtctgttttatctggtataaacgtaggtgctcctgctcgcttttagtttctgcattcctgatatgaaacctacttgatcatgatacattatctttttgatgtgcttttaatttagtttgcggctattttgttgaggatttttgcatctatgttcatcagagacattggcctgtggttttccttttttgttttgtccttgtctggttttagtatcagggagataatggcatcatagaatgagtaagggagaattcccttctcctcagttttgtggaacaattacccaatgattggtattagttcttctttgtatgtttggaagaatttggctttgaatcca

SEQ ID NO: 451690 - DNA, 595 bp, Homo sapiens
catttgcgttaaaaaagtcagtttcacctaagtgcccttgatgaattattaattaaatcttgacccttgagtcttaacattctgtgtaatagaaagagaagtgtgcatacagcactctgatacattctgaaatatgatgtctatctccaggaaaaagcacttatgcaattgtttaagttataaactgaactagtggcttttctcatggaacaccattttttactggaaaaaaatgactcttacacaaactctggttattctgattcgggtatttggcagacattttctgaaaaacgaatgaagtcagcctgtcaattcaaggaaagcaactgacagcatttgtcgtcaataataaaattagagcattcaagcaaaarttagaatgtagaaaaacttgtgtctgctactccaagcttgatagcttcccaatacataaaggctttactgctgagcaatgtgatcctctgatattgtataatattatagtgtcaacatttggaaaatcttcataactcaggaaactaatgttttctaaatgaccaatgcatgatgttgcagaattatgaatggtgaaaatgtatgttcaaagtgcaag

SEQ ID NO: 451691 - DNA, 595 bp, Homo sapiens
catttgcgttaaaaaagtcagtttcacctaagtgcccttgatgaattattaattaaatcttgacccttgagtcttaacattctgtgtaatagaaagagaagtgtgcatacagcactctgatacattctgaaatatgatgtctatctccaggaaaaagcacttatgcaattgtttaagttataaactgaactagtggcttttctcatggaacaccattttttactggaaaaaaatgactcttacacaaactctggttattctgattcgggtatttggcagacattttctgaaaaacgaatgaagtcagcctgtcaattcaaggaaagcaactgacagcatttgtcgtcaataataaaattagagcattcaagcaaaagttagaatgtagaaaaacttgtgtctgctactccaagcttgatagcttcccaatacataaaggctttactgctgagcaatgtgatcctytgatattgtataatattatagtgtcaacatttggaaaatcttcataactcaggaaactaatgttttctaaatgaccaatgcatgatgttgcagaattatgaatggtgaaaatgtatgttcaaagtgcaag

SEQ ID NO: 451692 - DNA, 504 bp, Homo sapiens
ataccttattacaaggcatatcaaatctaagctagtattagtgttcttaggaaaagctggtcattactactcgcttttttttttcctaagagctatagctttgcagatgacactatggaccaactgtccatgttctctgcttcctagtgatccttcctgacagtgttcttgagcttttttgagctccatgcataaggggctttagccccatcrtggtcatcatacgggacatagccatttgcatatgttttaagcaacttgggtgggttcacatctaaccattaggacctcctgaggataccatttcccttcagggtatcccaaaatgacaatcttctttccaaacacaggttttgtccaaattcattttaaatctcgggttattttgttcttcctatagtgatgtttaaaaaaatttttaggcaatgaactttttaaaagcctcttatcttgatcaggctcaggtaatgtaaaaatacaaggatgttattccatttgaaattt

SEQ ID NO: 451693 - DNA, 504 bp, Homo sapiens
ataccttattacaaggcatatcaaatctaagctagtattagtgttcttaggaaaagctggtcattactactcgcttttttttttcctaagagctatagctttgcagatgacactatggaccaactgtccatgttctctgcttcctagtgatccttcctgacagtgttcttgagcttttttgagctccatgcataaggggctttagccccatcgtggtcatcatacgggacatagccatttgcatatgttktaagcaacttgggtgggttcacatctaaccattaggacctcctgaggataccatttcccttcagggtatcccaaaatgacaatcttctttccaaacacaggttttgtccaaattcattttaaatctcgggttattttgttcttcctatagtgatgtttaaaaaaatttttaggcaatgaactttttaaaagcctcttatcttgatcaggctcaggtaatgtaaaaatacaaggatgttattccatttgaaattt

SEQ ID NO: 451694 - DNA, 599 bp, Homo sapiens
atttaccactttatgttactgcatgggaaataaaccttatttaacaggcctgttaaaaatgcattaaagcagkcagttcttgaaaaaaactccaaacccccaaaacagaattgccacatgagccagcaattctactcctgagtatgtacccaaaataatggaaagcatgatctcaaacaaatacatgtacataacagcattattcgcaatagccaaaacataaaagcaacccaagtgtccatcaatggatgaatgaataaacaaaatgtggtatatacatataatggaatattattcagccttaaaaaggaagaaaattctggctcattctacaacatggataaaccttgaagacattatggtaaatgacataagccagtcacaaaagaacagctatgcatgatttcactctagtcaaattcatggacacagaaagtagaataatggttgccagggctgggcggggaggaaggaatggggcattattatttaatccgtacagagttttagttggggaagataagaaagttctggagatggatggtgattatggttgcataatgtaaatgtacttaatgtcacagaactgtgcacatgaa

SEQ ID NO: 451695 - DNA, 599 bp, Homo sapiens
atttaccactttatgttactgcatgggaaataaaccttatttaacaggcctgttaaaaatgcattaaagcagtcagttcttgaaaaaaactccaaacccccaaaacagaattgccayatgagccagcaattctactcctgagtatgtacccaaaataatggaaagcatgatctcaaacaaatacatgtacataacagcattattcgcaatagccaaaacataaaagcaacccaagtgtccatcaatggatgaatgaataaacaaaatgtggtatatacatataatggaatattattcagccttaaaaaggaagaaaattctggctcattctacaacatggataaaccttgaagacattatggtaaatgacataagccagtcacaaaagaacagctatgcatgatttcactctagtcaaattcatggacacagaaagtagaataatggttgccagggctgggcggggaggaaggaatggggcattattatttaatccgtacagagttttagttggggaagataagaaagttctggagatggatggtgattatggttgcataatgtaaatgtacttaatgtcacagaactgtgcacatgaa

SEQ ID NO: 451696 - DNA, 602 bp, Homo sapiens
gtgctgctggattcagtttgcaagtatttgttgargacttttacatcgatattcatcaaggatattgacttgaagttttcttttattgttgtgtctctgctaggttttggtatcagtatgatgcagaatgagttgggttagaatctcttctcctcagtttttgggaatagtttcaataggagtggtaccagctcttctttgtatatctggtagaatttgggtgtgaatcagtcaggtcctcaacttttttggttcatgggctatttattactgttacattttcagagctcattataggggtctgttcagggaattagtttcttcctagttcagttttgaaagggtggatatgtccaggaatgtagccatcactgctaggttttctattttgtgtgcatagaagtatttgtatttatttctcttggttatttttatttctgtggggtcaatggtaacactccctttgtcatttctaattgtgattttttggatcttctctcttttcttcttcagtaggctagctagcagcttattatttttttcaaaaaaaaaactggattcgttgatcttttgaatggtttttcgcgtctcaatctccttca

SEQ ID NO: 451697 - DNA, 602 bp, Homo sapiens
gtgctgctggattcagtttgcaagtatttgttgaagacttttacatcgatattcatcaaggatattgacttgaagttttcttttattgttgtgtctctgctaggttttggtatcagtatgatgcagaatgagttgggttagaatctcttctcctcagtttttgggaatagtttcaataggagtggtaccagctcttctttgtatatctggtagaatttgggtgtgaatcagtcaggtcctcaacttttttggttcatgggctatttattactgttacattttcagagctcattataggggtctgttcagggaattagtttcttcctagttcagttttgaaagggtggatatgtccaggaatgtagccatcmctgctaggttttctattttgtgtgcatagaagtatttgtatttatttctcttggttatttttatttctgtggggtcaatggtaacactccctttgtcatttctaattgtgattttttggatcttctctcttttcttcttcagtaggctagctagcagcttattatttttttcaaaaaaaaaactggattcgttgatcttttgaatggtttttcgcgtctcaatctccttca

SEQ ID NO: 451698 - DNA, 583 bp, Homo sapiens
ggatttgatcctgtcattgtgttgttagctggttattatgttggcttgtttgcgtcgttgctttatagtgacactggtgtgtgtatttaaatgctaacatcttataaaaagtatttttcatcattttatctctatttgtttcattctgtataatctccactgatgtatcttccagtcctctatatcttttttcagctacatttagtctaatttttatgactatctttttcatatatggaaattctttttttcacagtcatttccttatgacttaggtttcttctatatctttaataatttaaaactttatatattctttgagattgctctttttattccattttcttgcattagagattggtctgttaacccaatatgtggagagctattcatcaggttttttttttgtgtgtgactgctgatactgtctcattttgtatcattttcatgtatatgatttgtaattttttgttatgatctcatyttcagtaattattttttccttacctgtgggagtctatactgcaacctgaagtatagaagagcagttttacatctgcttttgctaggtactctagcatgt

SEQ ID NO: 451699 - DNA, 642 bp, Homo sapiens
ctgtgttttctttctgtgtttttatctggttttagtatcagaataacgcgggcctggaacaatgaatttagaagaattccctgcttttcaagtttttggaatagtctgagaagaattagtgttagttctttaaaattttgatggacatcatcagtgaagtaatcaggtcttgggcttttatttgtttggaggctttttattactgattcaatcttattgtttgttattggtctgttcaggttttctatttcttcctaattcaattttggtaggttacacatgcccaggaatttatccatttcctctagcttttccaatttgttggcatatagttatttgtaataatctctaataattctttatatttctgtggtatcagctgtaatgtatcctttttcacttttgattttatttattttggtcttgtatcttttttcttcatcaatgtagttaatggtttgtcaatttcgtttatctttgaaaaaaacccttcattttgttgattgcatatttttagtctctatattgtttatttctggcttgatatttatactttatttccttctgctaattttkgattctgtctgtttttgcatttctggatccttgagatacatagttagattgtttatttgaaatata

SEQ ID NO: 451700 - DNA, 574 bp, Homo sapiens
tgatttgacctttatggaataatcaaatttaagagtttatgcagcaggcttcttttcctctgtagtaggtttcttttctgctggcttctttccaggggctggtttcttggtagctgctgccccttttttctaccagaagcttcttctgcttcttaacaccaacagcagccttctttcctttcttacctaccacaggcttcttgcctgcaacccccttctcatcygatttggcttctagtgctgcagctgttgctgctgccttatccactcagagcttgtgattcctggcctggtgaagaatggtgttctgacgcgtgcatggtctttgcatatgggtttagcttcaacatgattctcaggtttttcagtgggttcttctttaggactctgcaatgaatctttttgcatggtgctcaaagggctctttggatctctgggcttttcaagattctgctaaagatctgtattgaacatcttgtgcatgggaagattgtagttactcttgagggaagcagctttatgccaagtgctatacaattcatctaacttctggaaagcacttttggtccaaatg

SEQ ID NO: 451701 - DNA, 574 bp, Homo sapiens
tgatttgacctttatggaataatcaaatttaagagtttatgcagcaggcttcttttcctctgtagtaggtttcttttctgctggcttctttccaggggctggtttcttggtagctgctgccccttttttctaccagaagcttcttctgcttcttaacaccaacagcagccttctttcctttcttacctaccacaggcttcttgcctgcaacccccttctcatccgatttggcttctagtgctgcagctgtygctgctgccttatccactcagagcttgtgattcctggcctggtgaagaatggtgttctgacgcgtgcatggtctttgcatatgggtttagcttcaacatgattctcaggtttttcagtgggttcttctttaggactctgcaatgaatctttttgcatggtgctcaaagggctctttggatctctgggcttttcaagattctgctaaagatctgtattgaacatcttgtgcatgggaagattgtagttactcttgagggaagcagctttatgccaagtgctatacaattcatctaacttctggaaagcacttttggtccaaatg

SEQ ID NO: 451702 - DNA, 550 bp, Homo sapiens
attgaacatcttgtgcatgggaagattgtagttactcttgagggaagcagctttatgccaagtgctatacaattcatctaacttctggaaagcacttttggtccaaatgcagaaatgtcccacatgcccaccaggagcaagcttcaaaatgttcagtttgcttacattaagcagagtaattccagggatgtttctgaaggccttgatgataccgttatcctcattatagatgatgcaggggcccctgcactggatacagtgacgrtttctcattttgctgttgccagctctcatttgctgagaggcatagacctttttgatatcattccagcctttaagtttcttaagaagcgaaacagcctccttgatcttgtagccttcaactttatcttcaactaccaaagaaagttcaggaacttcctcaatatgatgatctttagacatgaccagcgctggtaaggctgaggcagccagggcagaacagatggcatatcgtttttgggttgtgttcactctgtgatgccaatggcaccaggttttggttggtgca

SEQ ID NO: 451703 - DNA, 641 bp, Homo sapiens
ctttttttttcttcaaatttctgtatmtgcctgctactgagttttatacttttgcatgttttatgatggtagtcatcatccttttacttctagatgtaggactcccttaagcatttcttgtggggccagtctagtggtgacaaatttcctgtttttcttgtctagcaaagacaatctttgctgggtatagtattcttcgctgctgtttctcttttagcactttgaaaatatcatctcattctctcctcatctttaagatttctgctgaaaaatctgatgttagtctaataatgattccctcatatgggacttgacatctttcccttgtgataaattttagaattcccttgttgtctttgacttttgactgtttgactgtaatatttcttggaaaggatattttttgggttgaatctatttgggacctttaagcttcctgaatctggatgtctatacctttcccaaaacttaaaaagtcatcacttattaattcattaaataggttttctatgcctttttttcatttcttctttttctagaattcttataatgaaaatatttgttcacttaattgtgttccattagtctcataaactcccttcattcttttttatcctttattttttgtctgactggcttat

SEQ ID NO: 451704 - DNA, 566 bp, Homo sapiens
ttagtctgttgttgcgctcaattgtattttttattttattcattgaattcttcaactccacactttttgtttggttctttttatgatatctagttctttgctgaatttgtcattaaaatcacaaattgttttcctgatttcattgaattatttacctttattctcttgtrtcttgcttagttttcctaagattactattttgaattccttttcaggcatttcatagattttctttgctttgaagtctgttactggagaattattgtgttcctttggcgatgtcacgttcccttgctttttcatgttttatgggtccctacattgaaatccgggtatctgctgaaacagttacctcttccaattttatctagtagatttcataaggaaagacttttttttctgtaagtgcatcctattgtgtcagttgggtaaagtactttggctttggttgtgggtgagcacagtgctgtaatcatgtaaatctttttttgactgtaatcaatgccagcagtatctgtgagtgcctcagtggccaagaccgtaggtgtttgtggaggcagtggcat

SEQ ID NO: 451705 - DNA, 607 bp, Homo sapiens
cacgtgttgtgtatgtgtgtgtgtgcctgtgtgtgtaaaatcattcaagaatactatgacccaaggaaagagcttcagaactagaggaaataaagttttcttggggcactcgtgtcccaagttcttatgaatttttagatttaaaataataatttgcatctgggggcaaaaaataattactggcacttagcagggactaccattaacatagaagaaaaatgttaactggtatgtgcaagagtacttgaacagataattgaattaaagctctgtgggcttatttatacaaaagagaggaccagtcctgcggacatgattttgtgacttggatttcagggccaaatctgctcctgtraagactctggtccttgttgatgggagcagcaatactgaaaaggcaaaaagtaaaccaactgtggttagtaagcatactaattttatagtttttgtctgacgcattattttaggttgattcattcaacaaatatatatataattgacatatattacatatttatattaatatgcatgtttatatttaaaatttatattatatttaatataattatattaagatacatttacttactacataacaatatattat

SEQ ID NO: 451706 - DNA, 607 bp, Homo sapiens
cacgtgttgtgtatgtgtgtgtgtgcctgtgtgtgtaaaatcattcaagaatactatgacccaaggaaagagcttcagaactagaggaaataaagttttcttggggcactcgtgtcccaagttcttatgaatttttagatttaaaataataatttgcatctgggggcaaaaaataattactggcacttagcagggactaccattaacatagaagaaaaatgttaactggtatgtgcaagagtacttgaacagataattgaattaaagctctgtgggcttatttatacaaaagagaggaccagtcctgcggacatgattttgtgacttggatttcagggccaaatctgctcctgtgaagactctggtccttgttgatgggagcagcaatactgaaaaggcaaaaagtaaaccaactgtggttagtaagcatactaattttatagtttttgtctgacgcattattttaggttgattcattcaacaaatatatatataattkacatatattacatatttatattaatatgcatgtttatatttaaaatttatattatatttaatataattatattaagatacatttacttactacataacaatatattat

SEQ ID NO: 451707 - DNA, 565 bp, Homo sapiens
ttctgttcttgcattagttcacttaggataatggcctccagctccattcatattgatgcaaaggacatgatttcattctttttatggctgcatagtattccatagtgtatgtgtaacacattttctttattcagttgaccattgatgggcacctaggttgattccatgtttttgctattgtgagtagcatggtgatgaacatcggtgtscatgtgtctttttggtctaaggatctattttccttcagatatacacccagtaatgggatttctaggtccaatactagttctgagttatttgagaaatctccaaatcgctttccacagtggctgatctaatttacattcccaccaacagtgtataagtgtttccttctccacagcctcatcagtatctgttgttttttgactttttaataatagccattctgattggtctgagatggtttctcgctgtgattttggtatgcattctctgatgattagtgatgatgagcattttttcatgtttgttggctgcatgtatgtttttgagaagtgtctgtcttttatttatttttttttga

SEQ ID NO: 451708 - DNA, 565 bp, Homo sapiens
ttctgttcttgcattagttcacttaggataatggcctccagctccattcatattgatgcaaaggacatgatttcattctttttatggctgcatagtattccatagtgtatgtgtaacacattttctttattcagttgaccattgatgggcacctaggttgattccatgtttttgctattgtgagtagcatggtgatgaacatcggtgtccatgtgtctttttggtctaaggatctattttccttcagatatacacccagtaatgggatttctaggtccaatactagttctgagttatttgagaaatctccaaatcgctttccacagtggctgawctaatttacattcccaccaacagtgtataagtgtttccttctccacagcctcatcagtatctgttgttttttgactttttaataatagccattctgattggtctgagatggtttctcgctgtgattttggtatgcattctctgatgattagtgatgatgagcattttttcatgtttgttggctgcatgtatgtttttgagaagtgtctgtcttttatttatttttttttga

SEQ ID NO: 451709 - DNA, 617 bp, Homo sapiens
tttttgctattgtgagtagcatggtgatgaacatcggtgtccatgtgtctttttggtctaaggatctattttccttcagatatacacccagtaatgggatttctaggtccaatactagttctgagttatttgagaaatctccaaatcgctttccacagtggctgatctaatttacattcccaccaacagtgtataagtgtttccttctccacagcctcatcagtatctgttgttttttgactttttartaatagccattctgattggtctgagatggtttctcgctgtgattttggtatgcattctctgatgattagtgatgatgagcattttttcatgtttgttggctgcatgtatgtttttgagaagtgtctgtcttttatttatttttttttgagatgcagttttactttgtcacccaggctggagtgcagtggcatgagcttggctcactgcaacctctgcctctcagcttcaaggggttctcctgcctcagcctccccagtaggtgggattacaggtgcataacaccacacccagctaattttggtatttttagtagagatggggttttgctatgttggccatgctgttcttgaactgacctcaagcaatcc

SEQ ID NO: 451710 - DNA, 484 bp, Homo sapiens
ttctctgcggttcttttgtaaattctgtgggatcggttggaatgacgtctttgtcatttctgattgtacttatttagatctctctttttttctttgttaatcgaggtagggggggtctatcaatctttttttttttttttttaraataaactcttggtttccttgatcttttgaggttggtttgttccttttttctttcttcctttaggtgcaaagttagattgtgaattcaacttcctaccttcttaatgaaggtgtttaatgctataaacttttctctaaacattgctttaactgtatctgagagattttaacatgttgtattcctatttttattaatttcatatcagtttttgatttctgccttaatttttatgttcacccaggagttagtcaggaccatgttgtttaatttccatgtttttgtgtagttttgagaaatctccttggtattaatttctatttttatttgcactgctgtttg

SEQ ID NO: 451711 - DNA, 484 bp, Homo sapiens
ttctctgcggttcttttgtaaattctgtgggatcggttggaatgacgtctttgtcatttctgattgtacttatttagatctctctttttttctttgttaatcgaggtagggggggtctatcaatctttttttttttttttttagaataaactcttggtttccttgatcttttgrggttggtttgttccttttttctttcttcctttaggtgcaaagttagattgtgaattcaacttcctaccttcttaatgaaggtgtttaatgctataaacttttctctaaacattgctttaactgtatctgagagattttaacatgttgtattcctatttttattaatttcatatcagtttttgatttctgccttaatttttatgttcacccaggagttagtcaggaccatgttgtttaatttccatgtttttgtgtagttttgagaaatctccttggtattaatttctatttttatttgcactgctgtttg

SEQ ID NO: 451712 - DNA, 687 bp, Homo sapiens
tgtcatcattacgttagctggttgttatatagacttgattgtgtgattgctttatagtgtccttggggtgtgtgcttaagtgtgtttttgtgctagcaggtgctgtcctttcaatcccatgtttagcactccctgaaggacctcttgtaaggctggtctagttgaaatgaattcctgggcatttgcttgtctgagaaggattttatttctccttcacttatgaagcttagtttggtgggatatgaaattcttggttgggatttcttttctttaaggaaactaaaaatagaaggaaacctcttctggcttgtaaggtttctggtgacaagtccgctgctagtatacagactgctacagattgggctccttctgtatgtgacttgacccatctatctgcctttaaggtttttgtttgtttgttttktgttttgcattgactttggtgaatctgatgactatgtgccttggggatggtcatattgtatagaatctagccagggttctctgtattttttggatttgcatgtcaacctttctagaaagattagggaaatttttatggactatatcctcaaatatattttccaaattgtttattctctcttcttgtttccaaggaatgccaatgaatcatagattttgtctctgcataattccatatttattggaggtttgttcatttgaaaa

SEQ ID NO: 451713 - DNA, 687 bp, Homo sapiens
tgtcatcattacgttagctggttgttatatagacttgattgtgtgattgctttatagtgtccttggggtgtgtgcttaagtgtgtttttgtgctagcaggtgctgtcctttcaatcccatgtttagcactccctgaaggacctcttgtaaggctggtctagttgaaatgaattcctgggcatttgcttgtctgagaaggattttatttctccttcacttatgaagcttagtttggtgggatatgaaattcttggttgggatttcttttctttaaggaaactaaaaatagaaggaaacctcttctggcttgtaaggtttctggtgacaagtccgctgctagtatacagactgctacagattgggctccttctgtatgtgacttgacccatctatctgcctttaaggtttttgtttgtttgttttgtgttttgcattgactttggtgaatctgatgactatgtgccttggggatggtcatattgtatagaatctagccagggttctctgtattttttggatttgcatgtcaamctttctagaaagattagggaaatttttatggactatatcctcaaatatattttccaaattgtttattctctcttcttgtttccaaggaatgccaatgaatcatagattttgtctctgcataattccatatttattggaggtttgttcatttgaaaa

SEQ ID NO: 451714 - DNA, 582 bp, Homo sapiens
aatgggcctgtttgttacctctgggacctatgtcctagagaaatggagagccgtaattggccagaatgatcaggctggggtagggtggctgtgctgggggcccaggcctgagggccttgctcggtaaggtacagcagaggtggggcctaaagtccatttactcctcagcactgtggatgtggcccctatactaggggtgtacaagggagtctggcctcccttgttggtgaggctacagcagctggcacttgggtgctcagggatccaaggcctgtggggctcaaaatgggctgaattgtggctctgtccagactccaggcagctctccatgttggtgtggaggtccaggagggtcaaaggagatctcctgtgctcatgattgaaaaggtccatggtggagatgtgggtcyccagggcctctcactcaccctttccccatggtatggagcctgctctggttctgtgccaatccagggtgggtggctgtcctgcttcactccactctgctctccatggtttgccatgcttcctggatgaatcccaatgtgaccttctggatgaactacttgaagaactagtgct

SEQ ID NO: 451715 - DNA, 620 bp, Homo sapiens
gcccttgcacgtccaaactccaggctgtttagcctttgaactccaagacttacaccagctgttataagatcaccaggtttgattacccattgcacaataacataccaatacactgaaatagcagsggttgaagcagagaaagagtttaataatcatagggcagccaaatgagggtatgggaggaaacctcaaatctgccaccctgaggggttttgaactggagtttttaagataatttcgatgggtagagtacaaaggaggtggggtcactgattggttggggaatgggggaggaaatcataaagacatagaaactgcattcttgcactgagtcagttcctcggagagggttttcaaactggctggtgtcagtggacccattggaatacagaatttggaaaatatctcaaatggaaaagttgaggtttctttaaagatgttatctgtagaaacatttaagggaagttagaacctagtgacaaggagtatgtgacttttaagcagtaagaagctataaggaagtgccaccggtagagtgtgtccaggttcttgacatcttgacaaagaattagaccacatgcacaaacaaggcaagaaaagaataaagaaaccaaaacaga

SEQ ID NO: 451716 - DNA, 620 bp, Homo sapiens
gcccttgcacgtccaaactccaggctgtttagcctttgaactccaagacttacaccagctgttataagatcaccaggtttgattacccattgcacaataacataccaatacactgaaatagcaggggttgaagcagagaaagagtttaataatcatagggcagccaaatgaggrtatgggaggaaacctcaaatctgccaccctgaggggttttgaactggagtttttaagataatttcgatgggtagagtacaaaggaggtggggtcactgattggttggggaatgggggaggaaatcataaagacatagaaactgcattcttgcactgagtcagttcctcggagagggttttcaaactggctggtgtcagtggacccattggaatacagaatttggaaaatatctcaaatggaaaagttgaggtttctttaaagatgttatctgtagaaacatttaagggaagttagaacctagtgacaaggagtatgtgacttttaagcagtaagaagctataaggaagtgccaccggtagagtgtgtccaggttcttgacatcttgacaaagaattagaccacatgcacaaacaaggcaagaaaagaataaagaaaccaaaacaga

SEQ ID NO: 451717 - DNA, 584 bp, Homo sapiens
cttgacaaagaattagaccacatgcacaaacaaggcaagaaaagaataaagaaaccaaaacagagatttattgtaaatgaaagtacattccatagggtgggagtgggcccragcacaggggctcaagagccctgttactgaattttctggggtttaaataccctctagacatttccattggttacttgatgtatgccctacgtaaataaagaggatatttcctgtcatagctgatgtgtttccatttgatttcattctaggaagtctttaggttccctgtctccaggccctattcgccttccttttttcccccctgaaagatgtgatctccataaatctttatgggaggtggcaggtctgatgctctttcttctgtaactgcttcatgctggcttggagcatagtccctacctattggggatcacagaactctcgccatgctctgtctagtggaggcagtgtactccttgatggccaggggtggtgtcttcacctggaactggctggtacccttgtcgcatgatcatgtgaagcttgatggtgcgataagatgaatttggttaaaagatttaatggaatttcag

SEQ ID NO: 451718 - DNA, 603 bp, Homo sapiens
aatctgctatagagcctattatgagggatacattctaatcattgactgttttactccaaaccatggaaaaaggtcctaacaaatgatgcccttctacaagagtgaaggcctcctggcaatgttctctttaacccataatgtgggttaagaggggtgaaccaatgttctgtttctgactgattatgaagcagcatatgtaccrttaaagtttctgacctatactgggccttaatcttttctctatcagattataagtttatccatgcataaggctgccggcaaaatccttcacaaataaaaatataccccgtaagtgcacacaagagacctctttttcatttctattgttcatagaagcataaacaagaaaaaatattcatagataagtgtctcatgatagtagaagccttgatccatgatcttgagaaaagctgttcacatcaagaatgtccatcttcttctgaggagagacttccctggttagttttaccttaagggttccagtgggtgtacagttccaagagcgtagagggacacttctcagtttgagattatgaacctaaagttcaagtttccaaagtttggctgcaatgtggatggaaa

SEQ ID NO: 451719 - DNA, 613 bp, Homo sapiens
atgattataaagttattagaaacttgtattcaagagtgctttttagggttcttttcttcctttcatgaaccttctcaaagacaccatattctaggatttttgtgcttgtgaaattttcagaaactgcatcagtattaagtaattaactgtagaaatgactttaaataattatagttaaaaatacaattgacaaggaaatttggttatttctgtggtttacaataacataatatccataattatgatttatagcatataatcagacatattagaattttagaaatcttatrcaatttttaacatatattaatatcactcactaaaacccaatgagaaaattaaacgtttttaaaaattatttttgatggtgcttctcatgtaactaaacaggtcaagtaattctgtttacctctcttttggaagcttcaggggccttctgcagcatctcaaagttaaaagtcagaaaaagacaaccttgaagctgaaatttgatttgggaagcctatcaaatatgttaaaggtttaaaacacttgatattatgaaatagaataccagattacaagtcattcatttagccaaaataatgactcaaaatttttttaaaaggcaaaa

SEQ ID NO: 451720 - DNA, 613 bp, Homo sapiens
atgattataaagttattagaaacttgtattcaagagtgctttttagggttcttttcttcctttcatgaaccttctcaaagacaccatattctaggatttttgtgcttgtgaaattttcagaaactgcatcagtattaagtaattaactgtagaaatgactttaaataattatagttaaaaatacaattgacaaggaaatttggttatttctgtggtttacaataacataatatccataattatgatttatagcatataatcagacatattagaattttagaaatcttatacaatttttaacatatattaatatcaytcactaaaacccaatgagaaaattaaacgtttttaaaaattatttttgatggtgcttctcatgtaactaaacaggtcaagtaattctgtttacctctcttttggaagcttcaggggccttctgcagcatctcaaagttaaaagtcagaaaaagacaaccttgaagctgaaatttgatttgggaagcctatcaaatatgttaaaggtttaaaacacttgatattatgaaatagaataccagattacaagtcattcatttagccaaaataatgactcaaaatttttttaaaaggcaaaa

SEQ ID NO: 451721 - DNA, 613 bp, Homo sapiens
atgattataaagttattagaaacttgtattcaagagtgctttttagggttcttttcttcctttcatgaaccttctcaaagacaccatattctaggatttttgtgcttgtgaaattttcagaaactgcatcagtattaagtaattaactgtagaaatgactttaaataattatagttaaaaatacaattgacaaggaaatttggttatttctgtggtttacaataacataatatccataattatgatttatagcatataatcagacatattagaattttagaaatcttatacaatttttaacatatattaatatcactcactaaaacccaatgagaaaattaaacgtttttaaaaattatttttgatggtgcttctcatgtaactaaacaggtcaagtaattctgtttacctctcttttggaagcttcaggggccttctgcagcatctcaaagttaaaagtcagaaaaagacaacyttgaagctgaaatttgatttgggaagcctatcaaatatgttaaaggtttaaaacacttgatattatgaaatagaataccagattacaagtcattcatttagccaaaataatgactcaaaatttttttaaaaggcaaaa

SEQ ID NO: 451722 - DNA, 516 bp, Homo sapiens
tatgaaatagaataccagattacaagtcattcatttagccaaaataatgactcaaaatttttttaaaaggcaaaagcctttactcaatgagagatggaaggctttccaaacaatctgtctcttgtctttccctgctttgtttcagcagttttatttaaagggctaacacaaatctttaattatcttttttttttttttgagacagagtctcactcttgttgcccaagatggagtacagtggcatgatcttggctcactgcaacctctgcctcccaggttccagcaattctcctgcctcagattcccatgtagctgggatttcaggcatgtaccaccatgcctggctaattgctgtatttttagtagagacagggtttcaccatgttggccaggctggtctcaaattcctgaccacaggtgatctgcccaccttggcctcccaaagtgctggaattacaggtgtgagccaccacacccagacattaycttttaatattacatgaaaatcttgttcaa

SEQ ID NO: 451723 - DNA, 580 bp, Homo sapiens
tttcatttaaccagttcacacaagagagagagagaggccagagtctgaatggtaagaaatttttacccttttgccagcatgttgcatttctgggttctctcctcctgagcagacctagcaaccttgcttgactgtatgcaaacaaacacattgatatgaattaagaacattcacaaatcatttacaaattttggagaaattagagagagagagagagatgactcaaattctatttacaaaagtatactcaacatacctaacatattaggaagtttaaactccaaaaagttaaaaagctgctaattcctgcaggcctgacaaaggtagcctagggatcccagataaatagaacaaatgatgacctgctagaaatgcataggagacaaaataactattcacagaaccaaatraaaaccttccattagaacctaaaaaaaaaaaatcatggttttgtatatatacatacacaagcaaagcccaaaggagaataaagagcaaatgaatgaaaattaaaaacaaaaacaaacaggaaaccaacattaagtttttcctattcaatctaccttggaggttacagtgt

SEQ ID NO: 451724 - DNA, 565 bp, Homo sapiens
atatatacatacacaagcaaagcccaaaggagaataaagagcaaatgaatgaaaattaaaaacaaaaacaaacaggaaaccaacattaagtttttcctattcaatctaccytggaggttacagtgttacccagggcccccaaaaatccacacagtgaatgttttattcctgatacacaattcaatagccttaagcctaccaatattaccatacatcttgtacaatcaagaaattcactgtaggcacatgaccaataagcactcaggtgccagcactatccacacaaaactgtaaacatagtgtaaagcaatgcgaacgtgtatgtgaaatttggctccacactaaatctggcttcatgcttaactatgtttaaaaaaaggattgccaaactgccaatgcatttctttataatatttctcattttactttaatcaagactaaaagctttaactatgaaaatgttaattaagcaaatatattcaattctctgtcaggttttaaggaatattttattatctaaacttttccacattgtcctcccctacttactggtcccttaatacat

SEQ ID NO: 451725 - DNA, 621 bp, Homo sapiens
atagccttaagcctaccaatattaccatacatcttgtacaatcaagaaattcactgtaggcacatgaccaataagcactcaggtgccagcactatccacacaaaactgtaaacatagtgtaaagcaatgcraacgtgtatgtgaaatttggctccacactaaatctggcttcatgcttaactatgtttaaaaaaaggattgccaaactgccaatgcatttctttataatatttctcattttactttaatcaagactaaaagctttaactatgaaaatgttaattaagcaaatatattcaattctctgtcaggttttaaggaatattttattatctaaacttttccacattgtcctcccctacttactggtcccttaatacattgtttcaaaaataaccttttcaaatctgtaatttgaactaacttttagataactactcagttaggcaaaagtattctttttctcactaataacacaacactttctgacacattttgtatacagaattacctattaactagaattctgatccttagtaacctaaaactttagcgaaaccataagaagccagaagtcccgaactgtcacatgtgggcatttatagataagaacaattccac

SEQ ID NO: 451726 - DNA, 432 bp, Homo sapiens
gattaaggtgaatgggaaattacaacaacctaatccaggcaagactatgaatggccaagaccctttaggaatgaaggtttgcatcgccccagcaagtaaagaaccacaatcagctgaggtgcctgttgaagacacaggaaatacaaaatagctcgtagaagaaggtagttataaatatcagctactaccctctgaccagttgcagaaattmggactaattggcatgcatatttcctccttgttttgttagattacgtttgtgtttatgtatacatatattaagcaaatatctttgtttttattcctcttactattttttcgtgcaacataagatatattggctttatatcagtacttagctattgttaattttacatcatggtatttaagttatgggatatcaggagaagaaagaacacccaaagaacttta

SEQ ID NO: 451727 - DNA, 531 bp, Homo sapiens
ttctgaattctgtgtctgtcatcccagaagctcagactagtaagcaccattgctggggagctagagggctcatttggaggtaagggaacactctggctttttgaattaacagggttcttgcatggattctctttcacctggragggctggtatttctttaactgtggtgaaaattgatagtgatttggctttgtttctggaagttttcagagggctaatactctgtacagggtttttgtttgttgttggattcttgcccttggtttcacagcagggaaaattagcaacatgattattggtgttgcggtttgggctgcaatccagtagatagtatttcagagcagtgagcagtacataggctcttactcagccatgcagttcatttgtatatccttgtgtttgcagttatgttgtgtgatgtgatgggaaaggggtgactccctcaccaggtcagctcatgggccttaggggagctatctccaatcactggtactgtgcccatgatttttatctttgttgttgttgttatta

SEQ ID NO: 451728 - DNA, 510 bp, Homo sapiens
aaatgctgtgaacattgttgaaatgacaacaaataaaattacataaacttagttaataaatcagtagcagagtctgggaggattggctycaattttgaaagttctattgcaagtaaaatgctgtggtaaaagcatcacatgctacagataattctttagtgaaagaaataaccaagtaaggaggcaaacttcattatcatcttgttttaagaaattgtcacagccatttcaaccttcagccaccaccaccctggtcagtcagcagccatcagcatcaacaaaaaattattacttactaaaggctcagatgatttttagcatcttttagcaataaagtatttttaatcaagatatatacatcattttgtttagacaaaacataatgctattgtgcagtgaatagatcacagaatagtgtaaacatcccttttacgtgcactgggaaaccaaaaattttatgtgatttgctttattgcaatattgaggtggtctggggacaaactcaaaata

SEQ ID NO: 451729 - DNA, 618 bp, Homo sapiens
cactcaataatattgaaactatctaatatataattcccagtcaaattccacattcatatctctaaaaaaccaaccatactaattccatactttaaaaataatttcttaatatacttttttataaattcattttatatgcttatttattcaaatcaagatccaaacaaaatccatatgctgcaattacactgacatatttcttaaaactattttaatatactagttgtctcctttatatgtttgttctttcagttgttttattgggaaaaaaatgawttatttgccatttaaacttttccatgctataagacttgctcattgcattcctgagttgtctgctaacatctgtccccctgtatttcctatcaataacatttaaatgtttaattggattcaggtttaattgtttggcataaacatttcttaggctgtgttgtatacttcctgatttctgtttttctttttgaaatgttagcagttattgatgattgtagctttaattcattatattactggggatggcccaaatgtgatacgccaactctgttcttctattttcagatagtagctataatagttttatgaaaattaactttccttcacaaactgtttggttat

SEQ ID NO: 451730 - DNA, 519 bp, Homo sapiens
ataagaaatgtatgaattacttttcttacctcctgaggtgctccgtgatgatgacctctattgaaaaaatattaagtgctttattccttagaagagagaaagttaacaaaaaatacaatgaataaaataaaacaaayttaaccttcagaaaggattcaaatgagaagagttttagaattttttttcagttatgtaagccattaactattagtaagaaagcatgcttttaatagaaggagttgtctttgtgtgcatgtgcatatgttaattgcttacaaaaagaaaacctctaattgtatcacagctgttgacatctgacattcttatttttaacatacataaatattaaattttgctacttgagtgctacttaagaaaaaaattacttccatgaatggaatgacaattttgcaaaactttaaaaaaaagacattcataaaataccaaaaaaattaaggtagcactgaatatattcattttggtttataagtttacgctatattttccaaatcacaaaca

SEQ ID NO: 451731 - DNA, 519 bp, Homo sapiens
ataagaaatgtatgaattacttttcttacctcctgaggtgctccgtgatgatgacctctattgaaaaaatattaagtgctttattccttagaagagagaaagttaacaaaaaatacaatgaataaaataaaacaaacttaaccttcagaaaggattcaaatgagaagagttttagaattttttttcagttatgtaagccattaactattagtaagaaagcatgcttttaatagaaggagttgtctttgtgtgcatgtgcatatgttaattgcttacaaaaagaaaacctctaattgtatcacagctgttgacatctgacattctyatttttaacatacataaatattaaattttgctacttgagtgctacttaagaaaaaaattacttccatgaatggaatgacaattttgcaaaactttaaaaaaaagacattcataaaataccaaaaaaattaaggtagcactgaatatattcattttggtttataagtttacgctatattttccaaatcacaaaca

SEQ ID NO: 451732 - DNA, 655 bp, Homo sapiens
atttctttagaaaaacctggcaatataaattagtgcatatctaataatagagtaggaaaatatacaaagtgacaaaaataaaaacagagaaggtcacaaacatakttagaggtttttatcactgcttcctcactaattaataagtacacaaaaaaatcaggtttggggccgggcatggtgggtcacgcctgtaatcccagcactttggaaggccaaggcgggcatatcacttgaggtcaggatttcaagaccagcctggccaacatggtgaaacctcgcctctactaaaaatacaaaaattagctgggtgtggtggtgcatgcctgtaataccagctactcgggaggctgaggcacaagaatcacttgaactcaggaggaagaggttgcagtgagctaagatcatgccattgcactccagcctgggcaacaaagcaagactctgtatcaaaaataatcataataataagaagaagatttatgtctttggaacaagattgtcagcatgaactaatttacattaataagatactgttcccaccaactgcagaatatacatttttttctaatgcacatagaacattcagtaagctctactatatttgggccataaaaccagactcaaatttcagaataataaaatcttatacaatatt

SEQ ID NO: 451733 - DNA, 591 bp, Homo sapiens
ctaaatatctaatgtatgacatttattttatacttttatcccttaaaattagggactctcataacagatttaattaatatcaaaacaataaagtaatcatatacatatttaagtaatagattgacaaattattgacaaaatgattgctaactgtttaaatatcagagtcaatttttcaaattacatattgaayaacaggtaggttttaataacaaaagcagtcaggagtcaaatgaaatagaactgtggaactggtaattgcaattttacctaaaataaataaagttaatgttacataaagaaggaactgttttttaaactgctatgaagagattccatcccctacttttttctaatgacttgttgaatatattctcattaatgctatctgtagcctagatgttgtaaatatttaggctttagccagaagtattccattcagtaggcctccaaaattcagcaagaatatgatattgataaatttaaaatgtagtagttttcttatatgtaaaaacttgacatatattttaatttcactattcaaaagtatttataattgtaattatcatatattgatccatgactagaatg

SEQ ID NO: 451734 - DNA, 501 bp, Homo sapiens
aagacaaatcgagtccataatattaaaaaatgataagttccatgaagaaaataaagcaggcaatagtagagagagtgacaaatggtgatgacatcagggaacataatttggatattgtagtgaagaaggaatctttgaagaggtgacattttagcagagactttaatgatgagagacatttgagctgagaactgaatattgggaaggaataagtcacctaaaaatttcrttcaataaagttgtaagtagaggtcaaggtcaagggcaagatcaaatatgctgaaactaagaaaaggttagtgtactttaagaacaagcagatgcccagtacacacaaaagacaatgaaagagaggaaatataatatgatgtgatgtctgagaggaaggagaaggtaggtcatgtatatgttcttgtagacaccctagcagcatggagtttggagtgaaaaacactggcgatgatggtttctcaatggctccactttcctcagccactaggt

SEQ ID NO: 451735 - DNA, 621 bp, Homo sapiens
tttgcttgcttactttaatccagtggctttccattttaactgaattaaaattctgtcggctatcctgatatactaattactacatgaattaacttttatctatctgactaaactcctctacagctactctcgcattwgtctggtaattccaaggaacagatctgctttctgtttcttgaatctacgaagcttgttttagcttcagggcctttgctctagctggcccctctgcctggaaggtgctcccagcccactgagctccttgtctggtaattccaaggaacagatctgctttctgtttcttgaatctaccaagcttgttttagtttcagggcctttgctctagctggcccctctgcctggaaggtgctcccagcccactgagcccctgaactttcatctcctctgctggggaggtctccctgaaacccaaactaaagtaagtaaccggtcacttctctctgttattagtttttaattttctgtttagcatgtattcatggctaattatctggtatatttactgagttttcctctttctaccaaaatgtaaacttgttaagtacagacactttgcctgtcctgttcactgttaactattcagtgtctgaaaaagtgcct

SEQ ID NO: 451736 - DNA, 621 bp, Homo sapiens
tttgcttgcttactttaatccagtggctttccattttaactgaattaaaattctgtcggctatcctgatatactaattactacatgaattaacttttatctatctgactaaactcctctacagctactctcgcattagtctggtaattccaaggaacagatctgctttctgtttcttgaatctacgaagcttgttttagcttcagggcctttgctctagctggcccctctgcctggaaggtgctcccagcccactgagctccttgtctggtaattccaaggaacagatctgctttctgtttcttgaatctaccaagcttgttttagtttcagggcctttgctctagctggcccctctgcctggaaggtgctcccagcccactgagcccctgaactttcatctcctctgctggggaggtctccctgaaacccaaactaaagtaastaaccggtcacttctctctgttattagtttttaattttctgtttagcatgtattcatggctaattatctggtatatttactgagttttcctctttctaccaaaatgtaaacttgttaagtacagacactttgcctgtcctgttcactgttaactattcagtgtctgaaaaagtgcct

SEQ ID NO: 451737 - DNA, 578 bp, Homo sapiens
tttatgtgaagaattaattacgtatctaaaatattctataaatttattattctcactgttttaatttagacagtttatcagaaaacgttttgtctctatttccagatagtaaatattttaggctctgtggcccatataatttttgttgtaattgttcagtttcagcattgtattgcaaaagttgccatggacaatatgtgaatgaatagacatggatgtgttccagtaaaaccttatttacaaatgttgctgacaggccagatttagcccatgagctctagtttgctgataactgatctggatttgtaaatcatatgtaaaattatgtcaggtgggccgatgatttaagtgagtctgagaaaattctactttttaatgttttcccaataatgtttattttcatttttaaaattttatctmtcctttagagctactgctccagttttagatattcacttcaatgtttctgtgcatttgatttttaaagttgggaaagattacaccttcttctctgagcatttgggtgtatagtagtgaatggtgattaatatttatcgggctttcattatttgcaatca

SEQ ID NO: 451738 - DNA, 612 bp, Homo sapiens
ttgcagctgtgggtataaattttcttaagtatttgcatgctgagcttgggaatggtgttaaaacatatacttggagacatccaaaatttaatgtttargttgaggaaggtgagtaaataagaaaatgggttagagaaataatgagaacccagggtggatatctccaaattggaagagatcagacacggaacattgctgagaggtcttataagagaaggcctatttttttttttaactgacaggtgtaataattattttagcaatgttgtttttatagctagatgggaactggatattcaatgagcagatggctaagtgggattcagcaaacgcaggcagctccctacaggtatgtggctgtgaaagaaaagaacagtgctggacaagtgtaaggaatctggggtttagatttagttgagcttggtttggttttactgagggccaactgaaaagatttaaaagttaataggaaagagttagtaaaggaaaagagattatttttaaaagaaaaattgtgtagttcccaaggatttggaagaaaaagaagcaaagcgcagatggaagaaaagctttacataagaggggaatggagtaggataggcaaagatagaa

SEQ ID NO: 451739 - DNA, 589 bp, Homo sapiens
gaagaaaagctttacataagaggggaatggagtaggataggcaaagatagaatcactacatgccaaggcttcatctgagcattggcacagagcaataaacaaatcagaataactataccttaatggagcctatggtctagtgaggcaactaacattagttaaattcacacataattaccaatgagaacagtgttattgaggagayaacggtatctggatttagaaaaccaacaaataaactaaatcaataaatgattcaccttacatagaatattttgagaaatgctgaaaattgatatttagatcaaaagttggaaatgctgttaccatacctaatgggttcactcacccagcacagtaaagccaggcactgactggaagatttgcagtgagaacaaaggtcacttattccagtgtactgagcaagaagaatggacagctaaggcttaagacccaaactccccagtgtttacaagcaagagattttaaaggcagggatacatctcaggaaagccaaagttgtaggcaaagtattaaaccaatacacaggatacataggttgaacattggtttggtctatgggtgtgac

SEQ ID NO: 451740 - DNA, 204 bp, Homo sapiens
atattcttaatattacatttttattttcaattataaaattgaatctcaattagtatcctattaaattacttttatatgattattacytacatggtattgaagacatttttaggatctatttaatcatgtattttaaaattttcttttacagaacaacggtttttcttttcttccaattaaactctagtactcaaagtatcattt

SEQ ID NO: 451741 - DNA, 596 bp, Homo sapiens
tgataatgaaaaaagtgttaactatattcttaatattacatttttattttcaattataaaattgaatctcaattagtatcctattaaattacttttatatgattattacctacatggtattgaagacatttttaggatctatttaatcatgtattttaaaattttcttttacagaacaackgtttttcttttcttccaattaaactctagtactcaaagtatcatttaaatgtatctttgtacattaccattcctgaattcaattttaacccttcagtatttgtcataatgatccaactgatgtagatttatgcctgatatccatgacttctctaacatcagtttacaagaaaagccatccatttgtcctatgcctatttaacataaaagatccctgcatagttaaattatgaaaatggaaagggaaaaaagaaaacaataacattgatgatgtgttaagccatctggttgcgttcttaattcatttatttcttaattaaagaaattgtttgggctccctacaatggggtcaatattcttaagaggaaaggggacatccctggcagtaatagtcttcccatctgtatgttccttca

SEQ ID NO: 451742 - DNA, 694 bp, Homo sapiens
gggcttgcttcccagccccagaagtcttagaataagtcagtgtttgggagccaatctgtgatttcctttgaacttatacacagagagtaaacatttggcagtattagttgtcaaaactgtttgagtctaatttgcagaacaaattcaagaaggcatattaagttcagtaacactgttgctttatctatgataataatcaagccaaatctaataagaccagctttttatgtgatcaagaataatctttggagattgtgaccataagagagaaaactgtcaaaacaaaaatgttcacagcttggatacaggtaaacgagtttactgtgtatttttcagtgcagtactggccttattttctgagtgattttcaaccttccacaggtagtgcttaacctgtagaattctgtctggttgagatgtaatatctgtctgtccagtaaaagagataaccaaagtattatttttttwaaaaaatttttatttattttttaactctttatttccataggttttaggggaacaggtggtatctgtttacatgaataagttctttagtggtgatttgtgagattttggtgcacccatctcctgagcagtatattatggtttatagcctcattgacattagccagtttcacatttaattcagcaacctatcaaatgctgtgtttacctctagctttatttttatata

SEQ ID NO: 451743 - DNA, 608 bp, Homo sapiens
acatacattgttttaaaaattaactagagaaagtaaaaaaattagcaaattgatttaccacttaaatttccatcataaagttaaaatacaagttagtatttgacatagtttggctgtgtccccacccaaatctcatactgaattttagtcaccataatccccacacatcagcggagggacccggtggagataattgaatcatgggggcgatttcccccatcctgttctcatgatagtgagttagttctcactagatctgataattctataaagggcagttcctctgcacacactctcttgcttgccgccatataagctgtgcctttgcttctcctttaccttctgccatgattgtgaggcctccctggccatgtggaactgtgagtccattaaacttcttttactttataaattacctagtatcaggcatgtctttattagcagcatgagaatgaactaatacartattttataaagtttgctttatattccatggatatatgagaaagtaaggaaaaactttaactctatattggcaaatgttttgatgtaaattttttatttcttaagatattttggaatatttaaaatttagaagttgtgtcaca

SEQ ID NO: 451744 - DNA, 608 bp, Homo sapiens
acatacattgttttaaaaattaactagagaaagtaaaaaaattagcaaattgatttaccacttaaatttccatcataaagttaaaatacaagttagtatttgacatagtttggctgtgtccccacccaaatctcatactgaattttagtcaccataatccccacacatcagcggagggacccggtggagataattgaatcatgggggcgatttcccccatcctgttctcatgatagtgagttagttctcactagatctgataattctataaagggcagttcctctgcacacactctcttgcttgccgccatataagctgtgcctttgcttctcctttaccttctgccatgattgtgaggcctccctggccatgtggaactgtgagtccattaaacttcttttactttataaattacctagtatcaggcatgtctttattagcagcatgagaatgaactaatacaatattttataaagtttgctttatattccatggatatatgagaaagtaaggaaaaamtttaactctatattggcaaatgttttgatgtaaattttttatttcttaagatattttggaatatttaaaatttagaagttgtgtcaca

SEQ ID NO: 451745 - DNA, 537 bp, Homo sapiens
accctcacattgtttagcatttactgtttttttttctacatttggtttcccacataattaaccaaaatacctttgttattatattttttgctggtattttatcatggcattatttttgtaacacatagtataacctagttgatgtagtcttaacaaaagttttaaacagtttatatacatacarttgctaacactttactttcacacatacacacacagtactattctgaggctgtatgtgtttgcattcatacaaggctgtgtttatgtgtcccatggaaagcaaatagtctctccattgcctaattttctaaaattccttgttgagagtgatgtcacatctgtatgtaagtgtatgtatacacatatgtgtttggttttgtacatacatatagatactcacataggtgcataagatatatgatggtgctaattagaatcacctaaagagattttaacttataatactaaaacaataagaattgtaaagaactgcttactttttagcttagtccgtgtcatttaacaagtctttca

SEQ ID NO: 451746 - DNA, 499 bp, Homo sapiens
taacttagtttttattttacaagctcacaactctaaggaacttactttgagtctgagatgagactgttgactttaggcttttgagttgatggtggaataagttaacaattttgagaactattgggatggaatgattgtattttgcactatgagaatgctatagtttggcggaatgctgtagtttggatgtttgtcccctctaaatctcatgttgaagtttgaccccaatgttgaaggtggggcctaatgggaggtgtttgagtcatgaggcagtttcctagtgaatagattaatgacctcataagggtgagtgtgagtgagttcttgctctaatagttaytacttcctgccagagctggttgtttaagagtctagcaccttccttgtctctgtctcttgcttccttactcaccatgtgatctctgcacataacagctctcctttgctttccaccatgagtgaaagcagcctgagactctcactagaaaccaatgagagt

SEQ ID NO: 451747 - DNA, 589 bp, Homo sapiens
ttcaatatcatcagccaattaggcattcacaagacttttgctacatatgacaagtttagaaatattccttttttttttaagtttctagagatgtagagaactttctgactttctaattgcatgaccatagattatgactctttccataatatgaaatgcatcctgcagtgcttgttctaaactatacctcaatagttattagtgatgataaccagaaagattgacagttatttattgtttcttaccattatactccccacggaaggagagagatttcatacatactatttagacattatttaataagagacttataagtcaaagaaatttaattgcacattgtcactgtcagtcttcctacaaataaaatactgtattgagttcactaatatacaaatggtggtggtggtggtggtggtggtggtaggataatctcaagcagcctgatttctcatttgcatttctacataagtaaaaaaattcagttaatttaaaaaattaaaatgtagcatgtgatatttattaccacttttttgcattcataatctatgtaaacatgtgaatgaaaawacctatgtgtaatgggaaa

SEQ ID NO: 451748 - DNA, 581 bp, Homo sapiens
  misc_feature (1)...(581): n = A,T,C or G
catgcaataaaatattacttgacaataaaaataatgaaatattaatacatactacgatagagatgaaccttgaaaatgtcgtgttaagtgaaagaaggctgtcacaaagaccacatcaagaacaattttatttacgtgaaataccagtctaagtaaatccagagacagaaaatagattagtggttctctggagctgaggctggaagtgggktcttgaatgagagagtgcaggatgtgaagccaggatggaatatggctgctaatgtgtttggggctttttgggcagcaggtaagtattccaaatgtagattttgatgatggttgcacactctttgaaaatgctaaaaatcattcaactgtgtgttttaaagaggtgaattttatgatatgtgtaatatctcaataaagctataaaataaaaatatgcattaagcaactaattgagtatgctatttcattcatttagcaaatagaaaattacaatgcaaagaatctcccagngagaaggcacgtaataatttgaataaaagacaactggaaaactgccacaaattcaagagactacatacaatttcttcaaa

SEQ ID NO: 451749 - DNA, 581 bp, Homo sapiens
  misc_feature (1)...(581): n = A,T,C or G
catgcaataaaatattacttgacaataaaaataatgaaatattaatacatactacgatagagatgaaccttgaaaatgtcgtgttaagtgaaagaaggctgtcacaaagaccacatcaagaacaattttatttacgtgaaataccagtctaagtaaatccagagacagaaaatagattagtggttctctggagctgaggctggaagtgggttcttgaatgagagagtgcaggatgtgaagccaggatggaatatggctgctaatgtgtttggggctttttgggcakcaggtaagtattccaaatgtagattttgatgatggttgcacactctttgaaaatgctaaaaatcattcaactgtgtgttttaaagaggtgaattttatgatatgtgtaatatctcaataaagctataaaataaaaatatgcattaagcaactaattgagtatgctatttcattcatttagcaaatagaaaattacaatgcaaagaatctcccagngagaaggcacgtaataatttgaataaaagacaactggaaaactgccacaaattcaagagactacatacaatttcttcaaa

SEQ ID NO: 451750 - DNA, 581 bp, Homo sapiens
  misc_feature (1)...(581): n = A,T,C or G
catgcaataaaatattacttgacaataaaaataatgaaatattaatacatactacgatagagatgaaccttgaaaatgtcgtgttaagtgaaagaaggctgtcacaaagaccacatcaagaacaattttatttacgtgaaataccagtctaagtaaatccagagacagaaaatagattagtggttctctggagctgaggctggaagtgggttcttgaatgagagagtgcaggatgtgaagccaggatggaatatggctgctaatgtgtttggggctttttgggcagcaggtaagtattccaaatgtagattttgatgatggttgcacactctttgaaaatgctaaaaatcattcaactgtgtgttttaaagaggtgaattttatgatatgtgtaatatctcaataaagctataaaataaaaatatgyattaagcaactaattgagtatgctatttcattcatttagcaaatagaaaattacaatgcaaagaatctcccagngagaaggcacgtaataatttgaataaaagacaactggaaaactgccacaaattcaagagactacatacaatttcttcaaa

SEQ ID NO: 451751 - DNA, 576 bp, Homo sapiens
agtggtacgatcttggctcactgcaacctccacctcccaggttcaagcgattctcctgcctcagcctcccaagtagctgggattacaggcatgcaccaccacgcccagctaattttgtatttttagtagagatggtgtttctccatcttggcctggctgttctcaaactcctgacctcaggtgatctgtccacctcggcctcccaaagtgctggaattacaggcrtgagccaccacacctgggctggtgttaccatcttgttataatctggcagaggtgataatttgaaggaaatttgtgtactgtttttcaggttatgaagcacttcatctagcttacctcatctgattcgcatatttattgtatgagataggtattactatgtttctcattttaaaaatgaggaaggtgaggcagattcaatccattacaaggtttgtgaattacagtgagtacttctaacatcagtactacacagctgtcttccctacatacaggggactgtttgcatttcagcattatcaaaaagaagaagaaatctattagagaaagaacagccaccgaaataagttggta

SEQ ID NO: 451752 - DNA, 577 bp, Homo sapiens
tgtttccaactgccagggcagttgtyggactctgaatctgtgggtcaattccatctttttaagtacaccatttcattcatagacttttagaactggaagagagcttaacatgtgatcaaactcattcatctgcttccaggcaggagagcaataaaaatgtctcaggaagggaatggtttccctcatttgtcaaatttcccaagtatagcaatctatgatctttcttgttcaatattcagtatctaaatataattctctcattagtcagttcttcttaatatctaactgaggttttcacagcatatcaaatgctgttttatgttatctatgatgaatagttaaaaaataaaactgagtctacctttcagccaactcctttttttcttcaatgcttcatgatatgttgttatcttcaagttttctatacttttcttaatttactgtacactggtgcattaagaaaacacgccaaacaagaattactgaaaaaaattgacaagaggttcatatttgtctgtgtacattccagttttagaattaccaaaagaaaaacaaaaatcatcatagtgcatggctg

SEQ ID NO: 451753 - DNA, 585 bp, Homo sapiens
ggatttcgcctctgatttattcagcaaagtgaaatgcactaaattgactttgacattcagggaaaatggctgaaaaacaaagagcagaggaaagagatataaattgtgtggcagctggagacatcaggcatccgagaaacagttttctatagaatacagtcatttaaaagcactttttaaacaggcagagaagtgatttcttaaaattgttttaactattcaggtttttttttttttttaaagagggcacctgtattactcagctgaacttaraatttctgatatgataacacacactatattttgtgcatataatagctgggtaatccagctttgtacctatcaaaattagttcgtgaaaactggaaaataacctaattattttggaaaagaaatattcaagtcattttaaacacaaaatagaattgttaccttgaaagtgctagtgatttatagtaaagtgtgtatgtgttttaaaggatagggctttttccactagaaggagaatttgaaataattttggatcacaaacctcagtagagaaaagccatgtacctttgctcatctgtatgctttttttccccc

SEQ ID NO: 451754 - DNA, 509 bp, Homo sapiens
atattcaactctatttcctcctcataaaagttatcatccacaaccagacctgctgtttggcagctcagatttgaaaatagcccttttgacagcaaggtcaagggaatttctcttgtgaaagagagtactgcctaatgcaaacaataggtagagagttatttacaaaatatattttgtatattttttgtatatataaaaatacagagkgtattctctaacaccctctggtaaaattaattctccatagacaaatgcaaaacaaaatagaaatacagacgagtaaaagttattggtaagtcagaatgaagatgtagtacttacacctacttccctttctagctaagaactatttgctgagttgctgatactcagttcagtgagggagggtctactctgcaaggaggtgcttccaaaatactcataaaaatagccttcttagggcaccccaaagtggctgaaatatgccataggagagggtgtggagttgcctgccacgtggctgctagctt

SEQ ID NO: 451755 - DNA, 509 bp, Homo sapiens
atattcaactctatttcctcctcataaaagttatcatccacaaccagacctgctgtttggcagctcagatttgaaaatagcccttttgacagcaaggtcaagggaatttctcttgtgaaagagagtactgcctaatgcaaacaataggtagagagttatttacaaaatatattttgtatattttttgtatatataaaaatacagagggtattctctaacaccctctggtaaaattaattctccatagacaaatgcaaaacaaaatagaaatacagacgagtaaaagttattggtaagtcagaatgaagatgtagtacttacacctacttccctttctagctaagaactatttgctgagttgctgatactcagttcagtgagggagggtctactctgcaaggaggtgcttccaaaatactcataaaaatagccttcttagggcaccccaaagtggctgaaatatgccataggagasggtgtggagttgcctgccacgtggctgctagctt

SEQ ID NO: 451756 - DNA, 562 bp, Homo sapiens
aacgagtacaatgatgagccaagaaatgcaatagaaagctttgagggcaggcttaatcaagctaaagaatcaatgagctcaaaggcagactatttgagattattaagttagagaaacagaaagaaaaaaaatgacaaagaatgaagaaagcctacaggaattatgggacactatcaagagayctaactttcacataatatgtatttcaggaaaaaaaaagaaagagaaaacaacagaaagcatattttaacatataatagctggaaacttgtaatctgggcaaaaatgccaacatctaggtactggaagtacagaaatctcaataaaatttaacaccaagaggagttcagaaagacatctaataattaaactattaaaaatcaaagacaaagaaaaaattctcagagcagtaaatgataagaaacatagcatttataaaggtgtctcaatgtgactattggcagatgtctcagcagaagccctgcaagccaaaagagaatagaatgatataatcaaagtgctgaaggaaaaaaaaaaactgccaacaaccacaaaaagatgc

SEQ ID NO: 451757 - DNA, 562 bp, Homo sapiens
aacgagtacaatgatgagccaagaaatgcaatagaaagctttgagggcaggcttaatcaagctaaagaatcaatgagctcaaaggcagactatttgagattattaagttagagaaacagaaagaaaaaaaatgacaaagaatgaagaaagcctacaggaattatgggacactatcaagagatctaactttcacataatatgtatttcaggaaaaaaaaagaaagagaaaacaacagaaagcatattttaacatataatagctggaaacttgtaatctgggcaaaaatgccaacatctaggtactggaagtacagaaatctcaataaaatttaacaccaagaggagttcagaaagacatctaataattaaactattaaaaatcaaagacaaagaaaaaattctcagagcagtaaatgataagraacatagcatttataaaggtgtctcaatgtgactattggcagatgtctcagcagaagccctgcaagccaaaagagaatagaatgatataatcaaagtgctgaaggaaaaaaaaaaactgccaacaaccacaaaaagatgc

SEQ ID NO: 451758 - DNA, 557 bp, Homo sapiens
gaacttacaatttttatgcacagcaacatattaaaccccatcttagagtatctgacatcttgacctgaaaaagtcttgagggttcagacgaaatggcatgcaacattaaatcaatgcagcaaaacagtctgaaaaacatgtctctatacctatcctcctctatcctcctatctatccccctctatctaccaatcaacacaaactaaagggtcaatgtacatagcataagaacaatttgtataactacatagttcaatacaaaagaacagcaattttgaaaaatatttatatcactcttggatatgtttattttcagattatgtttatatttttccagagttactaatcaatccaaatagtcaaacattataggaagaaagtattgttgtggaagccaaaaatgtaaaataaagaaaattgtccaaaccttcaaattttccaaaattcttatagcatagtagagactaaataccatgatggtcaaaatcatggaaattaaaaaaaagartcatgccaaataatttaaaaaaacagatgcttaaaataccaacagaaga

SEQ ID NO: 451759 - DNA, 591 bp, Homo sapiens
tttgttttctttgtgactccaagccttatttcgaacataatccttcagagttgcccattaaatgagttcagcttgcccataagcatgccctctaggaacatttgaaaactgctacatgagaaaccttcagccctggcaccaayctaagtcacctctcttgctccactacaacgcccttacccctggccctggcggctcacccacacttgccaccgtatttctactgaattcacatgatttattttcctgctacaacaacagctcagtttagactcaatttcttgtgtaaccacaaaacttcccttagcaagagacatgctctctcttcaatcttgaggaaataatttgctacatccatttttttctctggttcccctacttcaaagcagtgagttaaacaagaataaataaaatgtggccctgagatcgtgtctattgtgactagcagaagatctataattttaataaaactggatgcatttgaacaatctatgaatttttaccatttctctgagtctggaatctaatctgtcagtttcctgtagttactcagattctgtcaatacccaaagaagaactttgactgaatat

SEQ ID NO: 451760 - DNA, 628 bp, Homo sapiens
catagcactcttgacttcaattaccwtataattttaatggaaagggaataaacaaaccccaaaactccatcaatagaaaagtttaaatatgtgtaggttttcatggttttacctaacacagcctagagaactgagaaaaggactttctattgaggatatacatgtatagtgtcttaccaaataacaaatagaaaaaatatttaaaatacataaaaaacataaaatattcaatttcaagatatataaaataacaaatttggtaattattaccatatataagtatttaatagtcaaagcaatgagtggttgtttggacgtgcccatatgaattaattttggctgccttattttgtaaatgtcacaagtatataaatatacacaaatatacaaagtttaactctgacaatgcataccaatctgaaatgaaaataaggaaggatatttcctgatttgtttgcaattttttacaaagaaactagagtgagtcatcaattacattaccagatgtggattctgagacaaaaactcacataattttctacaaatggcaataatttggttcaaaaaattaaggatatttaaaattttgcatctgatttgcatctctgaaatcattatgactattgca

SEQ ID NO: 451761 - DNA, 628 bp, Homo sapiens
catagcactcttgacttcaattaccttataattttaatggaaagggaataaacaaaccccaaaactccatcaatagaaaagtttaaatatgtgtaggttttcatggttttacctaacacagcctagagaactgagaaaaggactttctattgaggatatacatgtatagtgtcttaccaaataacaaatagaaaaaatatttaaartacataaaaaacataaaatattcaatttcaagatatataaaataacaaatttggtaattattaccatatataagtatttaatagtcaaagcaatgagtggttgtttggacgtgcccatatgaattaattttggctgccttattttgtaaatgtcacaagtatataaatatacacaaatatacaaagtttaactctgacaatgcataccaatctgaaatgaaaataaggaaggatatttcctgatttgtttgcaattttttacaaagaaactagagtgagtcatcaattacattaccagatgtggattctgagacaaaaactcacataattttctacaaatggcaataatttggttcaaaaaattaaggatatttaaaattttgcatctgatttgcatctctgaaatcattatgactattgca

SEQ ID NO: 451762 - DNA, 628 bp, Homo sapiens
catagcactcttgacttcaattaccttataattttaatggaaagggaataaacaaaccccaaaactccatcaatagaaaagtttaaatatgtgtaggttttcatggttttacctaacacagcctagagaactgagaaaaggactttctattgaggatatacatgtatagtgtcttaccaaataacaaatagaaaaaatatttaaaatacataaaaaacataaaatattcaatttcaagatatataaaataacaaatttggtaattattaccatatataagtatttaatagtcaaagcaatgagtggttgtttggacrtgcccatatgaattaattttggctgccttattttgtaaatgtcacaagtatataaatatacacaaatatacaaagtttaactctgacaatgcataccaatctgaaatgaaaataaggaaggatatttcctgatttgtttgcaattttttacaaagaaactagagtgagtcatcaattacattaccagatgtggattctgagacaaaaactcacataattttctacaaatggcaataatttggttcaaaaaattaaggatatttaaaattttgcatctgatttgcatctctgaaatcattatgactattgca

SEQ ID NO: 451763 - DNA, 545 bp, Homo sapiens
cttttgacttattccacaagtccaattaatggagagaaatgagtcatatgatcacagtggaaattttaattttcaataccgactgaagaaaataacataaaatgtataatatatctctataatgagggtattaatgataaacttgaaatgtagataattcaaagactatttgagagtgttctctgtacaaaaacttgaaatgccttgaaacctcttactcttcatatataaaagaaacttgatacatgttttcccaaatttgacagcaatcccaaaaattaacttgacaccactaatactgagttgttagggtgaaaattttctcaattatcactagtgaaaaaataattgataaaccatgttaaagactgattttattctctcyactttatttttgtttttgtttttttgagatggagtcttgctctgtcacccaggctggagtgaagtggcacgatctcggctcactgcaacctcctcctcctgggttcaagtgattctcctgcctcagcctcccaagttactgggattacaggcacttgcct

SEQ ID NO: 451764 - DNA, 621 bp, Homo sapiens
acgtacttgtgggtatgggtatatgaatgtgagaaaaagaaagaaagaaccagaaaaaaaaaactgaaaaaaagtctttggtccagggaataaggtctagaatgtctgcaattctgggaracatatttgttttctccagcagattatccaaaggaaacaagaaagaaagtgaaaagatgaccaagaacaaagagaataaaaaagggccagtgagggaaagaaaaggaggagaacgtgggagtagggaagaaagagggagatattgacagtccatgagatttcttctggctaaacacaaaagcctgtacacggttcagcgagaatgatctgtctaggagaagatacaaacttatagtgttggaaaagactgaagtaaatgcattcagtggaaatctggaaaaatttgtgagatataagatgtaaattaaggaagtatgttccagttttcctaagctgcatgagaaaagaatttgccatgagaatctatgggtgaaatgagtagattttgatggctaatgttgctcagggaatcccaggctaatattcaaatacattattcatgtattattttgtgtaatataatgcatttgtacaacttttaagaattatggatctgtattt

SEQ ID NO: 451765 - DNA, 555 bp, Homo sapiens
tactactgtatcttatttttaagaattaaaggagatttaaaagaaaatacaagtcaaattaccaattttattatcagttcggctataaatttaattaaaagtgctacccattgtgttgtggagttctgcattttttcaagtaatccctggctgcatttttgaattactatcttgccctctctgcatctctctctccccacactcttttggtgtagcgtaaacacaagttacaacacacgtggaaaaatctgtatttgaataaatgaatatgctatcatgaaaatatagctttaaaatattggaaaagggggtgtgaaaaacaaccaagaataattcagaagatattatggcagataagtgatttttctgttcaatgttttctagcccatatttttctttaaattttagtgccaatgaaccagaactgaaagtgaactgaaatgatttaaaataataaacatttacaacttgtttatctctatttttgtttctatgattttaatcayttattaaattaaattacttatttgatttcataatactttgggaaaatgt

SEQ ID NO: 451766 - DNA, 553 bp, Homo sapiens
tctgacttttagcaatttagtcagaaataagagaatcaaaggcacactcctcaaagttcaagtgtgtctgaccacatcccacagtgatgggagaaattgctcacttaaataactctccaggaagaaaatcatgctcatataattaatgagagttactctgcagagaatggatgaatttgctttaatcttgacagccatggtttattatagaagaatccctagttactctgggatctcttttcagctattttcatatcgagaatggctatcagaaactaagatatataatcatatccttgtattgcttgtttttaataaacccattgcactggggataaagtcttgtcaatagttataatagtttgttacctacctaaacttccccagttagaagttttatagcttccactgcaatgggaccaaaatactgaacaactgccaaaatatggaatagctgcccatatatggctgaccgcccaaatgtatcagtagtagaagcatttkctttctttttttttttaagatgaagtcttgctcttgtaccccaggctgg

SEQ ID NO: 451767 - DNA, 553 bp, Homo sapiens
tctgacttttagcaatttagtcagaaataagagaatcaaaggcacactcctcaaagttcaagtgtgtctgaccacatcccacagtgatgggagaaattgctcacttaaataactctccaggaagaaaatcatgctcatataattaatgagagttactctgcagagaatggatgaatttgctttaatcttgacagccatggtttattatagaagaatccctagttactctgggatctcttttcagctattttcatatcgagaatggctatcagaaactaagatatataatcatatccttgtattgcttgtttttaataaacccattgcactggggataaagtcttgtcaatagttataatagtttgttacctacctaaacttccccagttagaagttttatagcttccactgcaatgggaccaaaatactgaacaactgccaaaatatggaatagctgcccatatatggctgaccgcccaaatgtatcagtagtagaagcattttctttytttttttttttaagatgaagtcttgctcttgtaccccaggctgg

SEQ ID NO: 451768 - DNA, 379 bp, Homo sapiens
acaattgtaactgccttttgggagagagcactcatctcgagtcagggaggagggacagcacaagcaaggcagttttttttttgtttgtttgtttgtttttttttttagtagagacagggtttcaccatgttagccaggatggtctcaatctcctgacctcgtcacacccccaccttggcctcccaaagtgctgrgattacaggcataagccaccacacccaaccggcaggaggcagttctaagagacaaaggtcctggtgacattcccctagtcttggagaataaccttcacattccctgcagctatcgtcctcagcagaaaggtaccacttcaaaagtattccgtcaactctaggggccatttttaccacttttatct

SEQ ID NO: 451769 - DNA, 418 bp, Homo sapiens
aatcaaaaccagtgataaaataataaaaatgagtaacatgaattaagcactcactattcatctgcactctactaatcacttcatctcctagaatctcatttacttcttaaaacaacccctgttgcgtgtactagatgttagctacagtttaaaatagaagaaacagagttagaaagacgaatgatgagttcatctcacaattttatctgtagttagtgacccaaaataggtcttccttyaattaaaaaaaaaattgtctgttttttattgagaccgagtcttcttctgtcaggcaggctagtgtgcaatggcagctcacggctgactgcagctttgacatcctggcttaagcaatcctcccacctcagcctcccaagtagctgggactacagatgtgtaccatcacacttggctaatt

SEQ ID NO: 451770 - DNA, 601 bp, Homo sapiens
atggaagtggaaccaggagaggcaggcatacttggtgtaacttttatttaaaaaaatccacatatagttggacccatgcaattcaaagccatgttgttcmaggctcaactgtagttacttaaaaaaactaactggaacaagacaacgatgcccactctcacttctattcaacatagtactgaaagtcctagtgtgtccggaattggttccttccggtgggttcttggtctcgctgacttcaagaatgaagccgtggatcctcgcggtgagtgttaacagttcttaaagatggtgtgtccggagtctgttccttcagatgtgcctggagtttcttccttcaggtgggttcgtgattttgctgccttcaggagtgaagtggcagacctttgcagtaactgttacagctcttaaaggtggcacgtccagagttgtttgttcctcccggtgggtttgtggtgttgctgacttcaggtgtgaagctgcagaccttcacagggagtgttatcgctcttcaaagtggcatgtccagagttgtttgttcctcctggtgagttcgtggtgttgctgacttcaggaatgaagcctcagaccctcgcggtga

SEQ ID NO: 451771 - DNA, 583 bp, Homo sapiens
agggagtgtaaattagttcagccattgtggaaagcagcttggggatttctcaaagaacttaacacagaactaccatttgatccagcaatcccattactgggctgcaaagaaatatacgttgttctaccraaaatatacacacactcatatgttcatcacagcactagtcacaagagccaagacatgaaatcaaactagatgcccatcactggtggaccggattaaaaaatgtggtgcatatagtcataaaaaagaatgaaatcacggtttttgcagcaacgtgtatgcaactgaaggccattatcctaagcaaatttatgccaaacagaaaacaaatattgtatgttctcacttagaagtggtaattaaacattgagtacacatatacacaaacgggaacaacagacactatgggctacttgggcatggaggctgggaggagtgtgagagtcaaaaaactacctgtaagtactatgcttacttacctgcgtgacaaaatcatttgtacaccaaaccccagctacctgcagtttacccacttaacaaaccttcacatgtacaccctgaacctaaaataaaattt

SEQ ID NO: 451772 - DNA, 467 bp, Homo sapiens
gaggagcattacacagacagaaaacaatatgtacaaaggctcagagtcatgacatagcataatgtgatttgatctggaaacagataatattccgtataattaagctaacagtatagctagggaagaaacaagacataaatctgaaaggttaagtagggcttagagttcataggttartaacttttaggctaaaagtagtaaggggctttgaagaattgaggcagagcaacatggtcaatttggtaatacacattgattacaaaataatatgcaggtaaatgtgttggacatagatctcaccagagacagttctagattggagacttatatttggcagtcacctaagtgtatatgattattggaaacatagacttgcagagaaaatagacagataaatagatatatagacaaagcaagaaaatgaaatccaagggggtacacatctctaggaagacaagggaaattgg

SEQ ID NO: 451773 - DNA, 467 bp, Homo sapiens
gaggagcattacacagacagaaaacaatatgtacaaaggctcagagtcatgacatagcataatgtgatttgatctggaaacagataatattccgtataattaagctaacagtatagctagggaagaaacaagacataaatctgaaaggttaagtagggcttagagttcataggttaataacttttaggctaaaagtagtaaggggctttgaagaattgaggcagagcaacatggtcaatttggtaatacacattgatkacaaaataatatgcaggtaaatgtgttggacatagatctcaccagagacagttctagattggagacttatatttggcagtcacctaagtgtatatgattattggaaacatagacttgcagagaaaatagacagataaatagatatatagacaaagcaagaaaatgaaatccaagggggtacacatctctaggaagacaagggaaattgg

SEQ ID NO: 451774 - DNA, 621 bp, Homo sapiens
atgatactctttaaaaaaggaagaattatcccaaggcaatcagtggttgctggggttgggggatggaagcaagaggtaatctataaaagaatagcaatcagtggttgctggggttggggtgatagaattgctttgtttgagccgggcatgatggcacacacctgtagtctgcagctactcaggaggctgagacaggaggattgcttgaaccccggagtctgaggctacagtaaactatgattgcacgactgtactccagcctgagcaacaaagtgaaacttcatctttatataaaaaacaaagagatttttaaaaaattgtttgaagtgttgcagtggatatacaactctatgcatttgtctaaaccaacagacctgaacaccacaaaaagtgaattttattacacattaatttttaaaatttaccrgaatgtgaagaaattgtattacaaatgaaccacatgatcatacttaaggcggctgcaggagaaagaaactgatgtaattaactctggaaaaatgctgttttgactggatactgtaaggctaaggggaaaaaggaacagtacacaaacactgtatcctagttgataaatttgtttctcacaggagttttggttaa

SEQ ID NO: 451775 - DNA, 613 bp, Homo sapiens
tacccgcctcggccacccaaagtgctgggattacaggtgtgagccaccgcaccaggccattgtacctcttaaaaagaaaatatttatagaagaaccaaatgaactaattaacattctccaggttattgtgacttaggaattaaagayaaaatattcagtactctgagaaaaaaaaaaaaaacttactagagttcaattgctttctcctcaataaatgtgcaaatacaaatgtgttgttgttttttctcattaggtaaaacatttgcctagaataccttaaaagttgcattaattgctttggactctcaacaatccaaaaggaagcaaacaatgggtttactaaagtcctcacatttaatatagtgcttgggggaaaataatcggtgccattttaaacacagaagcacacttctctgttgcactagtttgtatttctctggggtaggatctgcaactaattcttctccctctcccccggccggtagcttgcactgtgctttccttaagaaagttattaaatcaacatctctcaacagattgtttggcatgactgcaggaaggtctcattcatcactgtggtctgtattacataagacatctggagttgatgata

SEQ ID NO: 451776 - DNA, 591 bp, Homo sapiens
cactctgttgcccaggctggagtgcagtggtgcaatcttggctcactgcaatatctgcctcccgggttcaagcaattgttctgcctcagcctcccaagtagctgggactacaggcacctgccaccacacctggctaattttcgtagttttagtagagatggggtttcactatgttggccgggctcrtctcgaactcctgacctcacgtgatccacccacctcagcctccctaagtgctgggattacaggcgtgagccaccacacccggcctaaacaagtgttaattttggttgcatcacaataaatagaacctgagaaagtatgtgatagccacatgataaaaaggtttatttatataataatcatttagatcttaaaaggaccaagccaattctgtatccacttgcacagaggtatctcagtgacgtgaccttcctaaaattttcatccagttgcttccctgccctgcttaaaagatctccgacagctccccatggcttctgggaatcagtcactttcagagtgtagagtagcttcacatcccagttttccccagacagtctcagttcacactgactatcttgtcaaaat

SEQ ID NO: 451777 - DNA, 591 bp, Homo sapiens
cactctgttgcccaggctggagtgcagtggtgcaatcttggctcactgcaatatctgcctcccgggttcaagcaattgttctgcctcagcctcccaagtagctgggactacaggcacctgccaccacacctggctaattttcgtagttttagtagagatggggtttcactatgttggccgggctcatctcgaactcctgacctcacgtgatccacccacctcagcctccctaagtgctgggattacaggcgtgagccaccacacccggcctaaacaagtgttaattttggttgcatcacaataaatagaacctgagaaagtatgtgatagccacatgataaaaaggtttatttatataataatcatttagatcttaaaaggaccaagccaattctgtatccacttgcacagaggtatctcagtgacrtgaccttcctaaaattttcatccagttgcttccctgccctgcttaaaagatctccgacagctccccatggcttctgggaatcagtcactttcagagtgtagagtagcttcacatcccagttttccccagacagtctcagttcacactgactatcttgtcaaaat

SEQ ID NO: 451778 - DNA, 613 bp, Homo sapiens
tacccgcctcggccacccaaagtgctgggattacaggtgtgagccaccgcaccaggccattgtacctcttaaaaagaaaatatttatagaagaaccaaatgaactaattaacattctccaggttattgtgacttaggaattaaagataaaatattcagtactctgagaaaaaaaaaaaaaacttactagagttcaattgctttctcctcaataaatgtgcaaatacaaatgtgttgttgttttttctcattaggtaaaacatttgcctagaataccttaaaagttgcattaattgctttggactctcaacaatccaaaaggaagcaaacaatgggtttactaaagtcctcacatttaayatagtgcttgggggaaaataatcggtgccattttaaacacagaagcacacttctctgttgcactagtttgtatttctctggggtaggatctgcaactaattcttctccctctcccccggccggtagcttgcactgtgctttccttaagaaagttattaaatcaacatctctcaacagattgtttggcatgactgcaggaaggtctcattcatcactgtggtctgtattacataagacatctggagttgatgata

SEQ ID NO: 451779 - DNA, 364 bp, Homo sapiens
catgcagctggaggttacaagattctgaccttccctaaactgctcctaagatcagtgcttgagatattttgcagaccctgcacttgatggatcaggtggtaccatccagatcaataaactggcttatctgatcttgtggcaccgacccaggaactgactcagcacaasaatacagctcgacttcctatgatttcatctttgaccccctatgatttcatctttgacctgaccaatcagcactcctggctcattggcttcccccatccaccaagttgtctgggagactgatttgagtaataacaaaactccagtctctgcacagccagccctgcgtgaattactctttctctattgcaattcccct

SEQ ID NO: 451780 - DNA, 501 bp, Homo sapiens
gttgagatgaataaattcatgtactgtataaaagaagttgcagagtatattctagttattttgctgaaattctgtaaaatgggtgtgaaccacttttttcttcctgtctttgagatccagtggaccttctctgtgatcttatgctatgatttccatctcttcaccagctgctacggaaattattttctgaaacaggggtcaaccaactacagcccrtgggctacatcaagcccaccacatgtttttgtcaataaagtttgatttgaaatagagtcacacccattagtttacttattgtttctgacttctgttgttccacaagggcagaggtgagtagatgtaacagagactattggcccacatggtgtaaagcattgactggccctttgtagaaaagtttgcctgctctgaaagactcattaaataattataaatattgcctttctttattttcttttcatgtgatttattcctctccagtaaaattgtgtgcctctttga

SEQ ID NO: 451781 - DNA, 612 bp, Homo sapiens
tatgaactctgtattttattctttcaaaggcccttgccactatttaaataaacttttggcgctttctgagaacatacttgaagactaagcacgcaaaaastgtttacaaaattacttgctctaaactagattcaattaaaaaatattcacaatcaagacataacatttatttttacttcactcaggtgaacacataaagcattcatatgcccactatttgaatctataatacccaaaaatggctatattaaaaattgataaatattttattatatgctgaccaactgcacgatattgtcacattcttacttatccatgtaaatttctatttatttaaaaactttaaaaattcctaaattcctttagaagttaggcattaaagtctttgtttttttcgtgtcacagcaccaaacatattagggacgcttctctgtaataatgtttgtattagtcagagttctccaaagggacaaacccaataggatagatagaaaaatgagaagagattcattaagggatttggctcatttgacaatggaggctgagaagtcccaggagaggtcatctgcaagctggagagcctgagatgtcagtggcgtggctcagtctaac

SEQ ID NO: 451782 - DNA, 612 bp, Homo sapiens
tatgaactctgtattttattctttcaaaggcccttgccactatttaaataaacttttggcgctttctgagaacatacttgaagactaagcacgcaaaaagtgtttacaaaattacttgctctaaactagattcaattaaaaaatattcacaatcaagacataacatttatttttacttcactcaggtgaacacataaagcattcatatgcccactatttgaatctataatacccaaaaatggctatattaaaaattgataaatattttattatatgctgaccaactgcacgatattgtcacaktcttacttatccatgtaaatttctatttatttaaaaactttaaaaattcctaaattcctttagaagttaggcattaaagtctttgtttttttcgtgtcacagcaccaaacatattagggacgcttctctgtaataatgtttgtattagtcagagttctccaaagggacaaacccaataggatagatagaaaaatgagaagagattcattaagggatttggctcatttgacaatggaggctgagaagtcccaggagaggtcatctgcaagctggagagcctgagatgtcagtggcgtggctcagtctaac

SEQ ID NO: 451783 - DNA, 596 bp, Homo sapiens
  misc_feature (1)...(596): n = A,T,C or G
nnnnnnnnnnnnnnnnnnnnnnnnnnnnnnnnnnnnnaagatgaatagatatgcacaatcctatagaactataaaaaacaaaaatatacacaaaagttatgtttaaaatggtacattaaagatttttttctactttttagcatctctgtgatatttaaataatgttaaaaatagctaaaattatagccatttttatagttattgattattctttattgggcattttaaaaaattgatattagaattaaggtatggtgaataaaatggtctccataggcaagtctccaaaatattattgaatgagtaatgaaatragacacactaatttttccatcaggatttttttttaaatatggtaagagtgttaacatttgaaaattattttttgttgttgttgaaaataaagtatatcttgaggttgatatgaagtgttttcataatataaaatcactagaccatttatatttgtgattatcagcactggccaatgagagacacatgaaaggaaatggctgaagcatgagtgagatttcaaaagaaagagatgttaattaaagaccaagggaacaacattttatcttaaatggggttttgga

SEQ ID NO: 451784 - DNA, 549 bp, Homo sapiens
tactgtgagtattgaaatcctttrtctctgacccaggagacttcttgtcttttgccagcatccatgaaactgcagcaggctaactagttagattgcaagaattgtaaattcccagacccttcacatttcttgacattgatatgtatagtctcataaactcttgcaaagatttatttgcccccatcattcaaatccccaaaactgtactgtctaactccatcttcagctcaaataaacaccaggctaaatcctgacgtttgctggataatttaattagctctttcccagtaactctgcatcatagaccttccaactgtcctgctctgtaaacatgtgccacagttttagctaggaacagcttaagacctttagaaaacttgagtagtgaaaagattatcgtgccctccacatgtgtaattcaaaacaaaaatagtaataaacagcaaaggaagtttaaggaagtccagcgaattctgattatctgcatgatgaccattcagccactgttgttcttatagcagcaaatattaaaatttttgtttctcagtc

SEQ ID NO: 451785 - DNA, 608 bp, Homo sapiens
atttcctcccactgcccatcttgattcatactgtcccactgcctcagtgattctgaactcactgtctgacacaacccacatttctttgagattctgcatgattcaaagttcatctaggagagaggttcatrtcataaaccccattttcagcagcatctcaggtcatgctcacttctaattatactgttaaatgagtgtcctttggtatttaattttgtattatcagaggtttattgaaaaatagaaggcatttatgcaaaaacatttcaggagtttttagtattttttcatcagtcagaagacaatcctataattatcgtcatcatgatatttattttaaaaagggtaagcaaattcccttaaactccaatgcctttgtgggtggaagatagatatgtaatttcttaatacaacagcatgtgagatgggaaagaaggatgaaggatatctctcatttgtaaatgtctaacaagcattggaaagttgtgagaaaaagacagattcaaattacatgaaatagtgaagttaactgattcatacatatttttaggtgaatgagaatttgttgaaagaatgaattaacacttcacatatattatggcacacat

SEQ ID NO: 451786 - DNA, 536 bp, Homo sapiens
tgttaaattattttcattgtaggaaagataaatctttcaattaatatagtattgttcatgctaaaaaatgtcttatccattaaaaagatactcagttgtaatagagtagttcaatcaatactggtaaattgcacattttgaggggataattggtaaatgcaaactcaactagaaaagaagagaaagcagtgtgtctttgttccttctgtggtaaaggaattcagaccaccaccagtcaacataccttgaattatgaaaacagcacctactatttcatcattcagagagatcactcacaaacctctttttcaattgtatctaatttttttgtgctggcattaggcaatggaccacctttgtatttaaagtcttttctttaaaaagattttaaatttcagaaaaagcctttgcacttaaacagtgcttccttwtctgtcactttcatgcttaaatggtcgtccaatttgacattaactttatcgagaataataagtctcaatagagcttctattatccagtgttctgtgagtaggtag

SEQ ID NO: 451787 - DNA, 512 bp, Homo sapiens
atctcatagttaatgacaatgaaaaagatgaggaagatgggggataaggaggaggaggtagaggagacaatgatgacaacaaaaaagataaaagaaatggtacagaagaaaaggaggaagaaagacaaggaaaaggaaagaggaaactaactgaaagaagagaaagtctattactaaagaaaactactcagaaaaataggtttcttcttctcttttatttacttactgccctgtcttagtcacatatctactatacactattctttgttgggcaatgagaataatattgctaatcagctcatagaaatgtttctgttctrtctctcatatctacataggttctttgctagcattatatttcttagagaagcaatgatctaaaatcaatgtctgtgttattcttgaataaaatctaacaataaattcaattcacaacattgttagtatagccttgactagtgagagtgttactataaaagcaggaagagtttctctatggaactgtagctccc

SEQ ID NO: 451788 - DNA, 512 bp, Homo sapiens
atctcatagttaatgacaatgaaaaagatgaggaagatgggggataaggaggaggaggtagaggagacaatgatgacaacaaaaaagataaaagaaatggtacagaagaaaaggaggaagaaagacaaggaaaaggaaagaggaaactaactgaaagaagagaaagtctattactaaagaaaactactcagaaaaataggtttcttcttctcttttatttacttactgccctgtcttagtcacatatctactatacactattctttgttgggcaatgagaataatattgctaatcagctcatagaaatgtttctgttctgtctctcwtatctacataggttctttgctagcattatatttcttagagaagcaatgatctaaaatcaatgtctgtgttattcttgaataaaatctaacaataaattcaattcacaacattgttagtatagccttgactagtgagagtgttactataaaagcaggaagagtttctctatggaactgtagctccc

SEQ ID NO: 451789 - DNA, 569 bp, Homo sapiens
tagtgaacattaatgcatgggtcttgtatgaatatatcttttcattcatttggggttaataactaagatttggattgttggatcatatggtaagtgtatgtttaactcttgaagaaactgctaatgtttatttcaaagtagtcataatattttacatatctaccaacaaagaataagagttctagttttttcacatttcacatttcatgccaacacttgttatgwttagtctttttaattttagcaattcaaataggtgtgtcatagtatctcattgtagttctaactttttattgtcctaatgactaatgatgctgaatatcttttcatgtgcttgctatctatgtatatggtgaagcatctgtttaaaacatttgcccattttgtaatttattatttgttttctccttgaattttgagagtattttacattctagttataaatcctttgtcaaatttatgatttgcaaatgtttttacccaatctgtggcttgtattttcattctcttaatagtgtcttatgaaaagcacaagtttataattttggttatactaacagtgttagtac

SEQ ID NO: 451790 - DNA, 569 bp, Homo sapiens
tagtgaacattaatgcatgggtcttgtatgaatatatcttttcattcatttggggttaataactaagatttggattgttggatcatatggtaagtgtatgtttaactcttgaagaaactgctaatgtttatttcaaagtagtcataatattttacatatctaccaacaaagaataagagttctagttttttcacatttcacatttcatgccaacacttgttatgattagtctttttaattttagcaattcaaataggtgtgtcatagtatctcattgtagttctaactttttattgtcctaatgactaatgatgctgaatatcttttcatgtgcttgctatctatgtatatggtgaagcatctgtttaaaacatttgcccattttrtaatttattatttgttttctccttgaattttgagagtattttacattctagttataaatcctttgtcaaatttatgatttgcaaatgtttttacccaatctgtggcttgtattttcattctcttaatagtgtcttatgaaaagcacaagtttataattttggttatactaacagtgttagtac

SEQ ID NO: 451791 - DNA, 520 bp, Homo sapiens
tattttcagcaattctggcttaagctaaattgccagcaggctatattattgtaattctctctttgcaagtctcacagatgcaaagttcttgtcatgacaagtttcatgaacatattttccttgttggaacttctagaccagctggctacctgtggcatattttataaattctaaacgaaatcatttacaggctttcatactttgagatttttccactctgatgacgtgtgtatatcaagccttctgtcctttacttargttcagctatttgagtcctagagagcttatcaatagcagtatttttgttttagtatttacttctattggacagaaaaactaattttaatatggccaaagcatgatattaattcaaattaattattttgatcctttgcatttttatctgtagcatttgggaagattttattgttattctttcaagttgcagtaagccacattttattaattagttagtagtagcagtagtaatttggaatatttacttcacatcctatatatc

SEQ ID NO: 451792 - DNA, 535 bp, Homo sapiens
tcttggcaacagtgagtttgtmctaattgatcaagagctgcagccccactttttgggctaagaaatcgtttaacatctttcctgctgaggcagtcagtagtagtcatagaggaagcctggcatttaaggcaagctggaaatccagaaaattctctcctctttggaaaaagcattcacagagtagcaggacttatttgttatgaataaaaatttatttcattggtggcttgaggaactttgaggatttttttgagaaatcgggttacctctgttctttactgattttgccttctaatgtcttcagtgcttatataatgcacagcttccctaaagatcagaataatgaggttataaggatatacaaagctttgatgaaaataacaattcacataaaacatttttacggctaaagaaataacagagtttgcaaaagagaaggtaaaaactttcttatatcttggcatatttcaggtcacttcctcctctgataatgtttcataatgtaaatcatatgtgcatttaaagtattattaat

SEQ ID NO: 451793 - DNA, 542 bp, Homo sapiens
gtccaggccttttcctttacccattttatcagcaagtgcattttttcaagagacaaactctgaaggccatacaagacatcatagaacttatagctgacaggaaccttggttttgtccagaaaaaaaaaaaatctttttagtgacaagaaaattgtctctggtatttttcaaagccatgcatgtagtgtttcagtctgagtctagttaaaagacagaaatcacatttttctaaccaagtctatgtatatgaacattgttgaataggtactgaagagtaaaaaaagagagctagctatcacagaggtggcaactacagggtgtagcttttaccccagggcagagaagaggtcaacatgattgaarcatagaagctttaaaaaaaggattctgccttagggaggtaagaggaaaacaaatgttattggcagttccagccccatcatcacatactgctgaagagtggaatagaagctgagatactttattaactggctaaaatagttaatcgaagggtcaaatataccatcagaccaaatagaata

SEQ ID NO: 451794 - DNA, 568 bp, Homo sapiens
tctctcatcttatgattattttaaaaatcaagaggcaaattcctggaggcaggaactgcaatttttagcagattttaccctggttgggagagattaaacttgaatgcagaccaacactcaggggtccgtccatactctcaacacaatctttagttcctaaaaattcttcatttgagattctttcttcaaggccaggcatggtggcactcacctataatcccagcattttgggagactgaggtgggaggaccacttcaggataggagttcaagacaagcctgggcaacatagcaagtttccatctctgcagaaaattagccagatgtagttgtgtgtgcttgtattcttagctactcagggggctgaggtgggaggatcccttgaacctaggtgtttgaggttacagtgagctatgattgtaccactgtactccagcctrtgaaacagagtgagaccctatctgaataaaaatacacacaaaaaaagaaaaaaaatttaaaaagagatcctttcttcagctttgccaattcacatccttccttgcaattctctcagctgatgtccctcc

SEQ ID NO: 451795 - DNA, 443 bp, Homo sapiens
tttagaatatctccactcaacatctcacagatatttattataagascaattttctggtcaagagaaggcccactctttgagacccatttcagttccactcaaagtttcatccgtataccagcaacatcatcagcattagtttggagcatattagaaatacagattctgggctccacctcaaatctactgaaatagaatctgcattttaccttgatctccaagcgattaccctcattactcttttagcaacccaagtgcctctcccataggtgcagttgttatacagcctggtaaatcgagagttacttgagaagaggctttatgtctttgaaaaactccactgctcaatgccttattatagaagatatttaataacgcttgttggatttaggacatctgtgtcacctatgtgaaaaactaatcatctgtatcatctttataaa

SEQ ID NO: 451796 - DNA, 628 bp, Homo sapiens
ttaagcagaatcacagactacagtaacatcctttctcagaaaattcttgggcttgtcagttagtgactgaactttaatattacttgacaaagttcattttattccatcatattaaccttcttcctccaatcaaaattattgaggcaggtggtaagattgctggccatgggaagctatcagcacagcgctggagtgttagtgaccaaagaaatctgaggagaatatacaagtkgtgatttttccccctggtgaatttaacagcatgaaatcccagatagtctttcctgccgtatccaacttcttttaaaaataaaataatacaaaattgtaggctgcctttttttaatgagagtgcagaatgctgtccacatcatagagtgatccttttcaggcagaaatactgggtataattttctacataaatggaaaaaagtaatcttatctccagtatattcctcttctgtgcactgcaggtttagccaggctgaagccgttgagagaaaattcttcactcgcatgagaagcaaagatgagaagaggtattgcaacggtgatggaaaagctttatataatgagataaatcccagcacctctgggaactcattcgatatggaaaccatttcatgtt

SEQ ID NO: 451797 - DNA, 585 bp, Homo sapiens
tgacaagaaatgttgaaaattgattgaaaaaatgacatttacatgttttcttaattgtttattttttcataaatttcgttttttgtgagtagatatacatctgttcctgattttttttaaacaatgaaacaaatgatttttttaacgtgttggagaaaatctcttactaatatcccaataccatgtttcatgatgaaatgaaatgttcaattaaagttaaaaataagataaaattcctattgctgctaaagtaagtattgttgtaaaatgtataaccaatgtaataaaaaagaaaacctgttattataaatattagaagaaatgatacaacacgattattacttacagattattagattttgacttttaaagcttaaaagaatcaaataaaagaaaatttaatatcagtatgatgttcagcaatgtggctaacacaaatttggcaaaggaaaacaaaaacatttctatatatcccagtagtgaaaagagcacaaaaataataaaataactgataaataaacactargaaatatgtggcctcatatgatggaaacaatgaactttaatgactaaagaaatgttgac

SEQ ID NO: 451798 - DNA, 615 bp, Homo sapiens
atagttaccttgcaaaacacttctgattctccccaagactcacccccaccacyctcttttgcttgtagacctataattagacacaagtcccaccagccccctaaagatgaagtacaaagtatggctcatgagaaggtgcactgcattccaaaaaaactacataatttttctaatttatttagacagaaatcaggggaatatgtttgggaatcaatattgcatgtataggatgaagatgaaaagaacaaagttagatcacaccaaatttattgatatggtataatttatttatcactaagcagagattatggtttaatgttgcagcatggaggttagaaaggactgtaacggtcagtttggttggctgaaaatggaccaaaagatggcctatactaagtgaagttgaaatgcagaattgccgtggtttactgaaaaggaagggattcgaaggcctaggaaaattggagtgttaatgtggatttatcatttaagatctgctcacccatcttaggagggtccagaggacacacctttcaccacaactgtgagaaatgtgaagacagccccagcattctcaaacagccctgtggttgctcttctctacagctcagaaat

SEQ ID NO: 451799 - DNA, 570 bp, Homo sapiens
gaaattctgtgagtggtgttagccctgcttgcaggagggggtgacacccttaaaagtgattattcctctttaccagcatcagattttcttgattctgtgtgtccaggaagtttctccactactcccttgagttttggtgaattcaggatggtattcttgtctttgaataatttctagttgtattttttttctaggggaagtgatgctgggagatcttctagtctgccatcttgcttacaycactctgtgattttcctggttatttatcttttaggtttatttgtgattgttgcagtttctgtgctggcttctcatgctggttggattattattaatttttgaatgggaacttctaaataataaagtggttagtggaatgtatatgtgtggtagattgatggaggatgagattttgtgggaaatggatagattctgtccaggtttggtatcatattattaaatcttttgttgttgttgttaaagaagctattgcaactcacatatgtgtcttttgtctgttgcagttttgcgctatcttcctccctctgtttttagccatttttactgtca

SEQ ID NO: 451800 - DNA, 648 bp, Homo sapiens
tcagtgatgacactttggaggaaaacctgtgtactgttataggttcaagacagcatgactattatctcttagtattctccaaagccttgtgccagatttcatgacagtacttttagtatcagagggctatggaaattttcttactttttttcttttgtttctgggagttttataggaaaagtgagggcaaaggggagctttattctgccatcttcttaaggatataaaaatagaaaataaccagagactttgcaagattactgtatgactttctgacgttgagtactttgaagattactaagagcacargtttaaatacctatagtaactatctgtttttagaaaaaaaccgtaatgctctagatctccaaagtgatttggtgaggaataaacctatatactatataatccaaaattgcttttccatggtcctagatcatagagagatacattggtgggtaaattatcatattttcgaaggaaatataccagtgattggcccttaaattgcacccatatattagaattaatccctttctaaagacagataatttttttgtagtactagctgaagatttgtccttcacacatgaatatatgtcttaaactatctgcaaatattttgaaattttgaaaattatcatgctg

SEQ ID NO: 451801 - DNA, 514 bp, Homo sapiens
ctggccaacatggcgaaacttcatctctactaaaaatacaaaaattagccgggcatggtaatgcacacctgtaatcccagctattagggaggctgaagcaggagaattgtttcaacccagggggcagagattacagtgagccaagatcatgctactgcattccagcctgggcaacagagtgagactccatcaaaacaaacaaacaaaaaaagaaaccaccyactatattaaatatcctcaaagagctaaaggaaaacatggacaaagaacaaaaggaaatcagaaaaactttgtaaaaaaagtgaaataaagatgataaaaaataaacaatatccttagttgaaaagtataatagttgaaataaataatttatagagagattcaacagcagatctgagcagacgaaagaagaatcagtgaatctgaacataggacaattgtgattattaagtctgagaagcaggaataaaaacgaaggaaagggaagggacctgtgggacaccatcgagtggat

SEQ ID NO: 451802 - DNA, 570 bp, Homo sapiens
aaaaacgaaggaaagggaagggacctgtgggacaccatcgagtggatcagcaacacattatgtgggtatcagaaggagaaaagagaaaagagcagaaggaatttgtgaagaaatgatgggtaaaaaatatcccaaatttgatgaaagacatgcatctacacatttaaaactaaccaaactccaagtagrataaactcagagatccacaccgagacacattgtaattctgtcaaaaaattctgtcaaaatgcaaagacagccctatggaatgacatcagcaagatggcagaataagatttcctagtgcttttgcccttatagaaacatcagtttgaacagctatctacacatgaaaataccttcacaacagctaaagaaaccagatgagagattacagcacttgaatgtaacgcagatgtaagaaagatgcattgaataggggaggaaggacagttttacataatctgcatcactccctccttaacttcgggcagcacagtgtggagagagatatccttaatgtgaggaaagaaagggtaaatgagcactggacttccttggaccccaaca

SEQ ID NO: 451803 - DNA, 570 bp, Homo sapiens
aaaaacgaaggaaagggaagggacctgtgggacaccatcgagtggatcagcaacacattatgtgggtatcagaaggagaaaagagaaaagagcagaaggaatttgtgaagaaatgatgggtaaaaaatatcccaaatttgatgaaagacatgcatctacacatttaaaactaaccaaactccaagtagaataaactcagagatccacaccgagacacattgtaattctgtcaaaaaattctgtcaaaatgcaaagacagccctatggaatgacatcagcaagatggcagaataagatttcctagtgcttttgcccttatagaaacatcagtttgaacagctatctacacatgaaaataccttyacaacagctaaagaaaccagatgagagattacagcacttgaatgtaacgcagatgtaagaaagatgcattgaataggggaggaaggacagttttacataatctgcatcactccctccttaacttcgggcagcacagtgtggagagagatatccttaatgtgaggaaagaaagggtaaatgagcactggacttccttggaccccaaca

SEQ ID NO: 451804 - DNA, 616 bp, Homo sapiens
atgctacttgggagcctgtgggttgtttcaccactgtgacttttattgcccacatcatgtacactgtctggaggctcaaggacccacctacctgctggcaccatggccagcactcaagcaagccacctagaggcccaaggattagcctgcctggactcactaatcctgatgctcacatatatcacctaggggcccaaggataggcatgctcagccattgctatcactaatgaggccaaggactgattcacctggggtccctgtccccagcaaagcctcacggcagcatccactagcaactacagcctaagtcattgaagaaatgayggacatcactgacactgttatagctgaaaaaaaaaattatacagaggccgtataccactgcatacacccagaatcaaagctaaaatgcccaacccagggtaggcatggtgactcatgcctataccccagcactttgggaggtgaaggtggcaggatcacttgagatcagacatttgaggccagccttggttcaagaccagtgagacactgtctctaccaaaaaactttttttaatttgaaaagtgccctatccaaccaacatcatagatagcatcttcaggaaaaagttt

SEQ ID NO: 451805 - DNA, 569 bp, Homo sapiens
aaatcaaaaaaaaggatatatcacttgaacatctgttgcctgaggagaaagttttattatcaagaagcgaatctcaaacgaagaaacttcaagctaaagtaacttcaagaaaaagtaagtaattatttataaatcttataaattgtttttattaaattcaggagaaatttgtttttggtttataaatatgccttcaaccatatgcttcttctrctaattatttccatcacactaccagatctttattgataacttgtttcttttataattactcagttgcatgtgtcaaatctgccactttgtggatttctctatttcttcttgtattagtgtcaggttttgctttatatcttataatgctctatttttgtgtgtgtgtgcaagtaaactttaaatttatattcttcaaaactttatattcttcaaaaaacagttttttccttataaaaggattcacttcatcattttcataatttttgttgttttccttaataactactttatctgttattatggctccacaaactttcttccagttggtatttgcttgatacgtttttttcatcata

SEQ ID NO: 451806 - DNA, 511 bp, Homo sapiens
ctctcttttggatttataatttaacccaccaagcaagctcagctagggaattggaagctaaaaggaaggattattagttctccctgagacctgaaaagcktatatatacaatcactagcattccccaaaagcactcccagggcccacaaaatatttcctgagacacattgtcatggctggtgaagtgctctatgggactcccagactcttgcaaaggattcattggcatcatccgtgagtgtcccatgcatttctctaacatctcccaaaaaatttccatgggatcctcggggttcttttcttttctagaaaggcagtgtatttactggtcaactctgctcactgcaccactttgtcagagagagagctgccagttgttgagttggtcaattaatataacaagtcaaactgaaaggaataattaagccttttttcagatactgtgataacataagcaagagtctacacaggaaagggcccagcttcaccagaattccacttttccccatta

SEQ ID NO: 451807 - DNA, 520 bp, Homo sapiens
tgcttagcatatactactacaaaaacaaacctactaaaagaatttcatgatttctttgcagtctgcccccaacactcttgcccaagactgagggtatgtttcaaatactgtatttattagttacatggattagtacttgtttttttgttccatatattaggttagtttcctttcagttttagttcccacttcttatccttattgaattaattttatttttagaatattgtgttcatgcattttgtattgctgtgaaggaatacctgaggctgggtaatttatgaagaaaagaggcttatttggctcatggttatgcaggctgtacagatatggtaccaacatctgttcagcttctgatgaggcctcagggagtttttagctatggtggaagggaaggggaaccagcatgtcacatggcaagagaagcaagagagagatgggggacatcmcaatgtctttgtcaacaaccagattttatgtgaactcattaccatagagagggcaccaagccattcatgaa

SEQ ID NO: 451808 - DNA, 498 bp, Homo sapiens
gcacaatccagatcttaactgaaaaatttccatgccagacaaaagaacctactgccaagacaccagtatttcattagcagtcagagtgatgtaaaaatgtaactgggcactcactcctggaccatttgtttaagtcccttctcaaagacatctatggctctagttgctcaacaataaggtctcaaggaagagattgaggggctctccattagatgcttatcatcatttmatagtcatgggggcacaacacagagccccactacagtccaaatagtgaggtctcctgtagctaataaaagcgctatcctggatacccaaagtggtggagcaagatggtcaaatagaaggttacaccaattatccctcttgcaggaacaacaaatttaaaactatctatacaggaaaaagcaccttagtaggaaccaaaaatctgctgaacactcacagtatctggttttaacttcatattgttgaaagaggcactgaagagggtagaaa

SEQ ID NO: 451809 - DNA, 498 bp, Homo sapiens
gcacaatccagatcttaactgaaaaatttccatgccagacaaaagaacctactgccaagacaccagtatttcattagcagtcagagtgatgtaaaaatgtaactgggcactcactcctggaccatttgtttaagtcccttctcaaagacatctatggctctagttgctcaacaataaggtctcaaggaagagattgaggggctctccattagatgcttatcatcatttaatagtcatgggggcacaacacagagccccactacagtccaaatagtgaggwctcctgtagctaataaaagcgctatcctggatacccaaagtggtggagcaagatggtcaaatagaaggttacaccaattatccctcttgcaggaacaacaaatttaaaactatctatacaggaaaaagcaccttagtaggaaccaaaaatctgctgaacactcacagtatctggttttaacttcatattgttgaaagaggcactgaagagggtagaaa

SEQ ID NO: 451810 - DNA, 534 bp, Homo sapiens
aatgttaatcaccaagacaatggggaaaatgtctccaagtcatgtcagagaccttcacagcagcccctcccatcacaggcccagaggcctaggaggaaaaaatggtttcctggatcaggcccaggttcccctgctctgtgcagcctcaggacayggtgccctacatcccagctgcttcacctccagccattcctgaaatagaccaatgtacagctcagaccattgcttcagagggtgcaagccccaagccttggcagcttccacatggttttgagcctgcaggtataaagaagtcaagaattgagatttgggaacttctgcctagatttcagaggatgtacggaaatgtctggatgtccaggcagaagtttgctgcaggtggggagcattcacggagaacctctgctagggcagtgtagaagggaaatgtggagttggagcccccacacagagtccccactggggcactgcctagtagagctgtgagaagagggccactgtcctccagaccccagaatggaagatccactgaca

SEQ ID NO: 451811 - DNA, 534 bp, Homo sapiens
aatgttaatcaccaagacaatggggaaaatgtctccaagtcatgtcagagaccttcacagcagcccctcccatcacaggcccagaggcctaggaggaaaaaatggtttcctggatcaggcccaggttcccctgctctgtgcagcctcaggacatggtgccctacatcccagctgcttcacctccagccattcctgaaatagaccaatgtacagctcagaccattgcttcagagggtgcaagccccaagccttggcagcttccacatggttttgagcctgcaggtataaagaagtcaagaattgagatttgggaacttctgcctagatttcagaggatgtacggaaatgtctggatgtccaggcagaagtttgctgcaggtggggagcattcayggagaacctctgctagggcagtgtagaagggaaatgtggagttggagcccccacacagagtccccactggggcactgcctagtagagctgtgagaagagggccactgtcctccagaccccagaatggaagatccactgaca

SEQ ID NO: 451812 - DNA, 240 bp, Homo sapiens
tccacacatacatgtatcatagtcaaattgtsatatgaaattgttttctagaaattgcaacatttgtaatttgagatgggcttttgagtttaaaatttatattcaggtgtaagatttttcctttggctgaaaaaacctcacccattttctcagctataagaagaaaggctttgagatagaatcaccagagcaagatggaggaagaaccctatccatccacaggaacatcaaattgaatga

SEQ ID NO: 451813 - DNA, 590 bp, Homo sapiens
aataaaggattaaaactttatctttgtgttttctattttttcctatcttacttatttttacttctctcacatttattgtttcttttaaagtaacctttttatcatttctttttctttcttaattataatgcttatgagttttaaatttttttgaatgatggctttccatacaaaactgaagataatattaaatgttttaaatgtttgtgtatgtctagaagtaataagaatgtgtctacctgcattaatgaaaaatattctcctaattattattttatactatataatcttactttaatagttcatagcacataaatgtgattatttgctaataagttgtaaaaatgagagagatactgcttaatattgacatttattttgaaattctgagatttctcaataaattattttttcctaggtagtrgattaaaaacatctcttcttgcaacttacagaatggctttacttactgaaactcttttgttcaaagataaagttttaatcctttattaaaactcaatctcaaactaagaacttggagccaccaaaacagatagtcttttcagtacatattaaaattatgcacattg

SEQ ID NO: 451814 - DNA, 630 bp, Homo sapiens
tcattatgacacatcagttgcataaaacatgcccctggttagagatgatgtataggatactatggcagtcgaaaagatattcttcaagtttatgaaccacaatattggtagaagttctatmggcagagaacgtgattcagtgcctataataaatgcctaactcactgaaggcagttcgcttgcctctgtatgatagaaaatttacagtagtccatctgcaaccagatgttttgctaattcttctggaaaatgatgctatacttggaggctcaactttggcctacgcttttgacaatttcagcactcagcagaggcaatatccatattatttttgataggaaaaaccctataccattaagtttattcaaaagccagtgtcaccgtggcctcttggtacttaagtccatggaataagcactaatgtagctgaggcatgaggttgactagtatttatagccctctaattgagagctaacactatggtaaatgccttcctatgcacatttacatgggggatggataactttatacactatcatcctattctggaaaatcatagacaaaactccccaagacatgcctgtcaccattttttcaactttttcccccaagtcttcaactgattacctg

SEQ ID NO: 451815 - DNA, 609 bp, Homo sapiens
taaggagtatgttgtggtgcttccagaagaaaataaaagacaaactcattagttacaggtacaacaaataaaattcgcaaaacgttttatcatatacctaaagaatggttatcttacttcaaattgtatcaataggaaggaagatattacctattacacaatagcagttagtcttcagatgtgtttcaaacttaactgggggtattcccttgcaggtctgggctgaaatccaagctattaggagcacttgggtttttgcagccctagcatgcctttccccacctccaaaactacattcgatcaaayaagattagggtaaaccagtctcctacaaaaggcaagaatactcaacattctaattaccggccttgaaaatgtattcctttttgcacacagacaaatcctttttattacatgaaaacaaatatgccctgaaatttggaatactcagataattttaaaaattgaaaagaagttttacaaacaagtgctagaaaaaaaccacaaaactcaatcatcagaataaacactgccaaacaaataagaaactagattcctctaagattctttcaagtaaaagacattgtaaatattgagtactaagaaaat

SEQ ID NO: 451816 - DNA, 463 bp, Homo sapiens
gagaaatagaagcataattcacataaggctttaaaataattttcagactggactacaaaacttgccaccaagcaggtgtgagagatgtagatgctgaatgtccagaggatgcactcttttctaggaaactatgatagcaaatactatgagcatattagagttccccgggaaccacatagatgatggcaaccatccatcaacctttatccaatccactctgacctgtgactaycctcactcagaagacattgccagttgttttgaagtgtgctatgaccaagcaccaagaagtttctagtctatcaatgttaacagagtacagtgagaagagtatacaatttcactacttatgggggcagataaaaaacttggctctactctcaatagttgtgggatgttagatctggcatctgccaaaagggaataaacctgtcaatatactgtgttgttttaagaatctgta

SEQ ID NO: 451817 - DNA, 330 bp, Homo sapiens
ataataatgattgttgttgatacaccacagaggcaagatgggcccctcacctaaaatttgagatgtcaagrttgatgatgccacccatacaacaagaggtgatgaaactcttatgactcatattgtgagctatctgggaaaggaggtccgcctccaaagcggatctgaaaatgtcttgacagagagcaaagagggtccacagccataggttttaatagtggttagtgggtggaactaagatgaggggcttgtgtgctcacagagtagggcttttatgtagtttaaacttcaagttggcaccaaaaaagggagctcatagactttcttatc

SEQ ID NO: 451818 - DNA, 610 bp, Homo sapiens
catgcaaaatattttaacaaacattttccaccccagtgggttgatttttctgttttgttttattttggtttcttttttttgctatatccaagggaagctttccattgaaagtgactaattatttatctaatcgggacagaaactacatgtccgctcaggctttgatcccctttttagtgagtgttttatgattggcacatagctctagtgagttttacctgaatgacaattatcaaccatcagtggaccatatgcagtggtgggtagaattgcygtcagctgccgatgggccatctggagtaatgcttactaagtagtttaaagatggctcagaagtacaactgagagccagcagctattgaagtaggtcttgatctctccataccaaaacctgagtgtggccttagcaattaagtttctaaaaggaattataaaaggttatttttcttgacaatgtttgttataatcatatttagtgaggcataggtttcatagtggtgtgcttacactgtatttgtttggaagatatctagacatcttttatcaggaagttattcatagaaaaaatgatagtataaatcctggccaaaagcatggccacctgttttta

SEQ ID NO: 451819 - DNA, 610 bp, Homo sapiens
catgcaaaatattttaacaaacattttccaccccagtgggttgatttttctgttttgttttattttggtttcttttttttgctatatccaagggaagctttccattgaaagtgactaattatttatctaatcgggacagaaactacatgtccgctcaggctttgatcccctttttagtgagtgttttatgattggcacatagctctagtgagttttacctgaatgacaattatcaaccatcagtggaccatatgcagtggtgggtagaattgctgtcagctgccgatgggccatctggagtaatgyttactaagtagtttaaagatggctcagaagtacaactgagagccagcagctattgaagtaggtcttgatctctccataccaaaacctgagtgtggccttagcaattaagtttctaaaaggaattataaaaggttatttttcttgacaatgtttgttataatcatatttagtgaggcataggtttcatagtggtgtgcttacactgtatttgtttggaagatatctagacatcttttatcaggaagttattcatagaaaaaatgatagtataaatcctggccaaaagcatggccacctgttttta

SEQ ID NO: 451820 - DNA, 610 bp, Homo sapiens
catgcaaaatattttaacaaacattttccaccccagtgggttgatttttctgttttgttttattttggtttcttttttttgctatatccaagggaagctttccattgaaagtgactaattatttatctaatcgggacagaaactacatgtccgctcaggctttgatcccctttttagtgagtgttttatgattggcacatagctctagtgagttttacctgaatgacaattatcaaccatcagtggaccatatgcagtggtgggtagaattgctgtcagctgccgatgggccatctggagtaatgcttactaagtagtttaaagatggctcagaagtacaactgagagccagcagctattgaagtaggtcttgatctctccataccaaaacctgagtgtggccttagcaattaagtttctraaaggaattataaaaggttatttttcttgacaatgtttgttataatcatatttagtgaggcataggtttcatagtggtgtgcttacactgtatttgtttggaagatatctagacatcttttatcaggaagttattcatagaaaaaatgatagtataaatcctggccaaaagcatggccacctgttttta

SEQ ID NO: 451821 - DNA, 605 bp, Homo sapiens
gaactgaattagaaattctgaggatgacacctcgcaatctgtgttttaccaagccttccacctaaaatttggaacctctggtgtagaatataaaacccagctccttgatgtcagacagacctgaatctgagtttaggcttktcaacttgcatagtcttaatcaaattgcttaactctgattggcccagcttgaatcacagtgcctatccctatccaatcactgtgttcaaataaatgggaggatttgtttggcttatccatccttggccatgagacgacactgtggatagagaggtgagaaagcctcatcataaaataaataaataaataaataaataaataaataaataaataaataaataaataaaaagggagaggagtggttctgtaaagaaagagatgatggagaaaaacattttctgttctcaatgactttgttcatatttccccctctctattcttcatctaaggatctgtaaccatttactttcttccaggcttgaataaaaatcaattattttcaggagctttcttcggttaatccctctctctatatatacacaattttaccacacttgaaaatacaatctttatacaatttcttt

SEQ ID NO: 451822 - DNA, 605 bp, Homo sapiens
gaactgaattagaaattctgaggatgacacctcgcaatctgtgttttaccaagccttccacctaaaatttggaacctctggtgtagaatataaaacccagctccttgatgtcagacagacctgaatctgagtttaggcttttcaacttgcatagtcttaatcaaattgcttaactctgattggcccagcttgaatcacagtgcctatccctatccaatcactgtgttcaaataaatgggaggatttgtttggcttatccatccttggccatgagacgacactgtggatagagaggtgagaaagcctcatcataaaataaataaataaataaataaataaataaataaataaataaataaataaataaaaagggagaggagtggttctgtaaagaaagagatgatgragaaaaacattttctgttctcaatgactttgttcatatttccccctctctattcttcatctaaggatctgtaaccatttactttcttccaggcttgaataaaaatcaattattttcaggagctttcttcggttaatccctctctctatatatacacaattttaccacacttgaaaatacaatctttatacaatttcttt

SEQ ID NO: 451823 - DNA, 582 bp, Homo sapiens
ggcttgttattgcagggatgttaaagaaaatccggggtcttaaaatttttcgtttttaagaatcaaattttctacccctaataaaaagggagaagtctggaggcaagctttatcaggaagatatgaatgaytgttctcattctggtgaaagtatactccaataaataggtctcataagctaatggttttatgacctattttgctgggcagggagaaaacaaaaaacaaacaaacaaaaaattaaacagaagataaattcaaccccatggcaaatgtgccacactcagatgatgacctattctcggcccaacttggtttgtccccaatacagaattttcaacagagaagcacatatctaattttctcaaacatgactttgagggtcacaagttctatccattctctaccaggcagctgagaaaatgagcagagaataaagaccatcatattcccaccctccagctaggattataaggggaatgaagcaagctagtattacaaggggaagaaagtaagtattataaggtagtattacctgagaaggtgagtcaatgcaatgttacaaacgctattttggtggca

SEQ ID NO: 451824 - DNA, 582 bp, Homo sapiens
ggcttgttattgcagggatgttaaagaaaatccggggtcttaaaatttttcgtttttaagaatcaaattttctacccctaataaaaagggagaagtctggaggcaagctttatcaggaagatatgaatgactgttctcatyctggtgaaagtatactccaataaataggtctcataagctaatggttttatgacctattttgctgggcagggagaaaacaaaaaacaaacaaacaaaaaattaaacagaagataaattcaaccccatggcaaatgtgccacactcagatgatgacctattctcggcccaacttggtttgtccccaatacagaattttcaacagagaagcacatatctaattttctcaaacatgactttgagggtcacaagttctatccattctctaccaggcagctgagaaaatgagcagagaataaagaccatcatattcccaccctccagctaggattataaggggaatgaagcaagctagtattacaaggggaagaaagtaagtattataaggtagtattacctgagaaggtgagtcaatgcaatgttacaaacgctattttggtggca

SEQ ID NO: 451825 - DNA, 517 bp, Homo sapiens
ttaaaatttttcgtttttaagaatcaaattttctacccctaataaaaagggagaagtctggaggcaagctttatcaggaagatatgaatgactgttctcattctggtgaaagtatactccaataaataggtctcataagctaatggttttatgacctattttgctgggcagggagaaaacaaaaaacaaacaaacaaaaaattaaacagaagataaattcaaccccatggcaartgtgccacactcagatgatgacctattctcggcccaacttggtttgtccccaatacagaattttcaacagagaagcacatatctaattttctcaaacatgactttgagggtcacaagttctatccattctctaccaggcagctgagaaaatgagcagagaataaagaccatcatattcccaccctccagctaggattataaggggaatgaagcaagctagtattacaaggggaagaaagtaagtattataaggtagtattacctgagaaggtgagtcaatgca

SEQ ID NO: 451826 - DNA, 517 bp, Homo sapiens
ttaaaatttttcgtttttaagaatcaaattttctacccctaataaaaagggagaagtctggaggcaagctttatcaggaagatatgaatgactgttctcattctggtgaaagtatactccaataaataggtctcataagctaatggttttatgacctattttgctgggcagggagaaaacaaaaaacaaacaaacaaaaaattaaacagaagataaattcaaccccatggcaaatgtgccacactcagatgatgwcctattctcggcccaacttggtttgtccccaatacagaattttcaacagagaagcacatatctaattttctcaaacatgactttgagggtcacaagttctatccattctctaccaggcagctgagaaaatgagcagagaataaagaccatcatattcccaccctccagctaggattataaggggaatgaagcaagctagtattacaaggggaagaaagtaagtattataaggtagtattacctgagaaggtgagtcaatgca

SEQ ID NO: 451827 - DNA, 574 bp, Homo sapiens
ttctacatttagcagtggtagtctgctgtaaggatgaactttcactattctcctgtttatttatttatttatttgatatctgttttaacatgtgaatttttcttctagttcaatacattatagttcactgtcatcattatttattttgattgtcagatttcctaaattaagcctgtgagagttcttttaatctggctcttattatcattatgattaattattattttgccatagtcccatcatttcctgagctctatgctatgttcacacacagctyactattgcaggctcattgtatgctttccctgaatcagcactgggatcagttactaccttttattgacttctttttctgacaataatacttagcattcaaaacgtggtaagtgtgctaattgctattagggaacacttgttctgaaaaaaatgtactttttgcaagacaaaagtgagtttgtaaaaaagatgtactccatttgcatggggtttaaactttttgcatttcttactttttcgtaaattataatcattttagatttttttcctctaaaaagtctaatttggtacactccta

SEQ ID NO: 451828 - DNA, 603 bp, Homo sapiens
ggaattagcttacgcttttattcttagttcctctttatcattgartacataatctgtattcagtagttcatgtgttttgaaacagacctcccaggtgtgtcactaattattgttacctagtctcttatctcatttgtttgagacgggctgtttgaggctgttctttactgcatcggtggtaaactgagtcatgaatgcccctgcctctgtagtgggaggcatgagcagacttgcgagcatatttatctgttttaaagaaatgaagagaaatggcaaagcctgaaatcaatttaattgtttattcttagtttctatctattcacaccatagcctggtgataaataactctttccaattgtatttgtcttttgtctaatttattactctgaagttggtgagagctatcttaagtaaatagggttgcttttcaattgtacatttatattaaataagactccttggagcaggctaagaggaataagaatagtagttagaaaggagaaactggatttctggacccatgttcctcaatttgttgccatctgcagatgaggatgaacacatagataatgaagcttttcctcacagacacatattatgctt

SEQ ID NO: 451829 - DNA, 638 bp, Homo sapiens
ctgttctttactgcatcggtggtaaactgagtcatgaatgcccctgcctctgtagtgggaggcatgagcagacttgcgagcatatttatctgttttaaagaaatgaagagaaatggcaaagcctgaaatcaatttaattgtttattcttagtttctatctattcacaccatagcctggtgataaataactctttccaattgtatttgtcttttgtctaatttattactctgaagttggtgagagctatcttaagtaaatagrgttgcttttcaattgtacatttatattaaataagactccttggagcaggctaagaggaataagaatagtagttagaaaggagaaactggatttctggacccatgttcctcaatttgttgccatctgcagatgaggatgaacacatagataatgaagcttttcctcacagacacatattatgcttgccttagccattcccctctttctgaggtttgcttggcaattctctcattgagaatcgacaagttaataaaatttccttcttctctactgcactactgtaactttaaggaacctcaatactgtatctattgccagtaggggtgggtggaagaaattgttttaaaatttgggtaactcttttatgtaaaaggta

SEQ ID NO: 451830 - DNA, 546 bp, Homo sapiens
atacacacattattcatattcttttctttttaaacataattttatattctcaacaataaatttgctkaaaatttcaaaataatttagcatatccgccattgcatttattataaaaataagattaatccttgcaccataaaacattaaagaatattctaaaaactaacttcaattatagacttttaaatgcgcaaataaaatacatgtttgaactacatttatatatgtctgaaaaccagatgactaacctcctgcaatcattcattaaattagatttcttgagcatgaactgtgtaccaaacaatgtattaaaggctgagagtacatggttagaagagacaggcatgcccttgatttatggagcttacaatctagtatacatgtatatgtcacgtgataaaagatacagaaataatgcaagttttttaaaattcaactttaattttagatacagggatacaggtacaggtttaccgcatgagtatgttgcatgatgctgaagttaggggtatggatctcatcactcaggtggtgagcatagtacta

SEQ ID NO: 451831 - DNA, 546 bp, Homo sapiens
atacacacattattcatattcttttctttttaaacataattttatattctcaacaataaatttgctgaaaatttcaaaataatttagcatatccgccattgcatttattataaaaataagattaatccttgcaccataaaacattaaagaatattctaaaaactaacttcaattatagacttttaaatgcgcaaataaaatacatrtttgaactacatttatatatgtctgaaaaccagatgactaacctcctgcaatcattcattaaattagatttcttgagcatgaactgtgtaccaaacaatgtattaaaggctgagagtacatggttagaagagacaggcatgcccttgatttatggagcttacaatctagtatacatgtatatgtcacgtgataaaagatacagaaataatgcaagttttttaaaattcaactttaattttagatacagggatacaggtacaggtttaccgcatgagtatgttgcatgatgctgaagttaggggtatggatctcatcactcaggtggtgagcatagtacta

SEQ ID NO: 451832 - DNA, 546 bp, Homo sapiens
atacacacattattcatattcttttctttttaaacataattttatattctcaacaataaatttgctgaaaatttcaaaataatttagcatatccgccattgcatttattataaaaataagattaatccttgcaccataaaacattaaagaatattctaaaaactaacttcaattatagacttttaaatgcgcaaataaaatacatgtttgaactacatttatatatgtctgaaaaccagatgactaacctcctgcaatcattcattaaattagatttcttgagcatgaactgtgtaccaaacaatgtattaaaggctgagagtacatggttagaagagacaggcatgcccttgatttatggagcttacaatctagtatacatgtatatgtcaygtgataaaagatacagaaataatgcaagttttttaaaattcaactttaattttagatacagggatacaggtacaggtttaccgcatgagtatgttgcatgatgctgaagttaggggtatggatctcatcactcaggtggtgagcatagtacta

SEQ ID NO: 451833 - DNA, 547 bp, Homo sapiens
tgcaaactatgcatctgacaaaggtctaatatccagaatctatagggaacttaagcagttcaacaagcaaaaatcacataaccccgttaaagtgtgggcaaagtacctgaacacacacctctcaaaagaagatatacaagcagccaataagcatatgmaaaaatgctcaacatcactaattatcagagaaatgcaaattaaaaccacaatgagttactatcttacaccagtcagaatggctattattcaaaagtcaaaaaagaacagatgttggtgaggctgcagagaaaagggaaggctaatacactgttggtgggaatgtaaattatttcagctattgtagaaaccagtttggagatttctcacagaacttaaagcaggtttttaaaatattaatgttgcaaatgtcaaatattcttagtgcaaaaacaaatagatttaataaattagctgctaaatagtttaataaataaatgatttaataaatttaatacatttgttcctgttttattatataaagtagggcttatatatctttgcctgatgt

SEQ ID NO: 451834 - DNA, 547 bp, Homo sapiens
tgcaaactatgcatctgacaaaggtctaatatccagaatctatagggaacttaagcagttcaacaagcaaaaatcacataaccccgttaaagtgtgggcaaagtacctgaacacacacctctcaaaagaagatatacaagcagccaataagcatatgcaaaaatgctcaacatcactaattatcagagaaatgcaaattaaaaccacaatgagttactatcttacaccagtcagaatggctattattcaaaagtcaaaaaagaacagatgttggtgaggctgcagagaaaagsgaaggctaatacactgttggtgggaatgtaaattatttcagctattgtagaaaccagtttggagatttctcacagaacttaaagcaggtttttaaaatattaatgttgcaaatgtcaaatattcttagtgcaaaaacaaatagatttaataaattagctgctaaatagtttaataaataaatgatttaataaatttaatacatttgttcctgttttattatataaagtagggcttatatatctttgcctgatgt

SEQ ID NO: 451835 - DNA, 567 bp, Homo sapiens
ttacctgtgtttaaaaacaatttgttagagtgaaaaaaaaaaagccccagactgagagaaaagacctaaaatcttcccttacatacagcaggtaaacaaaacaaaaaaattataatgctggaatttaaaccatcttaatcaagtcatctgacctcttgaaactcaatttccttagtagttaaatgagactaatagcatctaggcataattccaaagaacaatatgaggscaatactgttaaaatgcttataaagctatgtacatataatgatgtggatatgattgtgttgacagaaattagagtaaatgatcttatatatatttatcagaagaaaatcacctattttttcttttaaaatagaaatgcatgtaatcagagaatttgattatatgttcatgataagtgttttgattagaaaagaagaaagaattaaattttaccttgatttacttttaaactatctttagaggatattgcttataaaaatgtaagaagaatgtataatctgggcttaaattgaactgattatgtaaatatattgaaaaggagttggaggtataaatcac

SEQ ID NO: 451836 - DNA, 584 bp, Homo sapiens
ttctcatttacaatttcacaaattgttctcattttacaattttacaaattattctaaggttttattgatttatagaatgtagtttgattaatggttcttaccaagggttttttttttcttttaagtcactgccagatttggtgctaagtctgtttccagaactgcaaaactttagcaccaaaacttgacctccagtagayacacaaagatgttaccatgctctagagtctgtgaaaaacattagtcttttgataccttctcagatgtgaaagcattgcctaataaacatgtgtttagagcaactttgacctgtgagattaaaaaaatctcattcccctcttccctgacacctaccttacacataagaaacacatatatgaataatatatttatagtatatgcttcattctagtgtctttttctatataagtagtattgtgtaccatcaagacattcatcacataactgtagacataacaaacatatacatatatgttatatatatatatataagtgtacatatagcaacacttggtgaatttaaaaatatagaagaggtggaagatgctaagcaatggaggaag

SEQ ID NO: 451837 - DNA, 633 bp, Homo sapiens
tcattcccctcttccctgacacctaccttacacataagaaacacatatatgaataatatatttatagtatatgcttcattctagtgtctttttctatataagtagtattgtgtaccatcaagacattcatcacataactgtagacataacaaacatatacatatatgttatatatatatatataagtgtacatatagcaacacttggtgaatttaaaaatatagaagaggtggaagatgctaagcaatggaggaagtaacaatgacagattgctgtatttttaaagatgaatactgttattttatcttccatctcttggtgctatatgaggaataacatgatatttggttgggawcgtgttttaatagagatgtagttgcatggtaatttcagtaatggatttctctaagttggtaatcaatcatgagctaaagacatgtttacaaacatgataattcagattaatctgatgggctattgagagagagaaaagacagagctctagcagttgctgtgggtggaaaacattttatgagcctctcacagctctgagacagtgaacctccgctttttaaaaagcttaaaaaaagaggtaaacaaaatttaaattagaatacttaaccatatttaaag

SEQ ID NO: 451838 - DNA, 633 bp, Homo sapiens
tcattcccctcttccctgacacctaccttacacataagaaacacatatatgaataatatatttatagtatatgcttcattctagtgtctttttctatataagtagtattgtgtaccatcaagacattcatcacataactgtagacataacaaacatatacatatatgttatatatatatatataagtgtacatatagcaacacttggtgaatttaaaaatatagaagaggtggaagatgctaagcaatggaggaagtaacaatgacagattgctgtatttttaaagatgaatactgttattttatcttccatctcttggtgctatatgaggaataacatgatatttggttgggaacgtgttttaatagagatgtagttgcatggtaatttcagtaatggatttctctaagttkgtaatcaatcatgagctaaagacatgtttacaaacatgataattcagattaatctgatgggctattgagagagagaaaagacagagctctagcagttgctgtgggtggaaaacattttatgagcctctcacagctctgagacagtgaacctccgctttttaaaaagcttaaaaaaagaggtaaacaaaatttaaattagaatacttaaccatatttaaag

SEQ ID NO: 451839 - DNA, 488 bp, Homo sapiens
aggagcccaggcctttgggatatgcccaggggactaccaagaccaccacaagtgggctccatctcagacracactgtggcatccatctaagtcccctcttggttttgttcgttcgtttgtttgtgagacagagtctcgctctgtctcccaggctcgagtacaatggctcagtctcggctcactgcaacctctgcctcctgggttcacgtgattctcttgtcttagtctcccggcagctgggattacaggcgtgcacctcggcgcccagctaatttttgtatttttagtagagatggggttttcgccatgttggccaggctggtctcgaactcctgaccttaggtgatccacctgcctcggcctcccaaagtgctgggattacaggcatgagccacagcgcctggcccaagtcccctctagttaagtggcaagcatttggatgatgacttatgtgtccggcaaaaccaaaacaggaaaagcaaacctat

SEQ ID NO: 451840 - DNA, 488 bp, Homo sapiens
aggagcccaggcctttgggatatgcccaggggactaccaagaccaccacaagtgggctccatctcagacaacactgtggcatccatctaagtcccctcttggttttgttcgttcgtttgtttgtgagacagagtctcgctctgtctcccaggctcgagtacaatggctcagtctcggctcactgcaacctctgcctccygggttcacgtgattctcttgtcttagtctcccggcagctgggattacaggcgtgcacctcggcgcccagctaatttttgtatttttagtagagatggggttttcgccatgttggccaggctggtctcgaactcctgaccttaggtgatccacctgcctcggcctcccaaagtgctgggattacaggcatgagccacagcgcctggcccaagtcccctctagttaagtggcaagcatttggatgatgacttatgtgtccggcaaaaccaaaacaggaaaagcaaacctat

SEQ ID NO: 451841 - DNA, 488 bp, Homo sapiens
aggagcccaggcctttgggatatgcccaggggactaccaagaccaccacaagtgggctccatctcagacaacactgtggcatccatctaagtcccctcttggttttgttcgttcgtttgtttgtgagacagagtctcgctctgtctcccaggctcgagtacaatggctcagtctcggctcactgcaacctctgcctcctgggttcacgtgattctcttgtcttagtctcccggcagctgggattacaggcgtgcacctcggcgcccagctaatttttgtatttttagtagagatggggttttcgccatgttggccaggctggtctcgaactcctgaccttaggtgatccacctgcctcggcctcccaaagtgctgggattacaggcatgagccacagcgcctggcccaagtcccctctagttaagtggcaagcatttggatgatgacttatgtgtycggcaaaaccaaaacaggaaaagcaaacctat

SEQ ID NO: 451842 - DNA, 563 bp, Homo sapiens
ggagtggcagtttgtttggccgagctatggccacatgccctctgcccttggatcgacatacctggaggaatacctggcccaatgcctctctaggatcacccactgccccaccgagactgctcacaagacagttttccccagcagggaggttgaagcctgagtgaccagaaacaagtatccactrcacattgtaacgaactgagcacatttgactgctagggagaagtacccattgagaaggagtggacaggagatacaggagccagaattgctactggcaataaggtcctcaatgggctgagattcaggagttcaataggaggaaagaggtgacttctttatgtaatagcagagcaagaagaaatgatgggggtagtactgaggtaccgtagtctctctcctcttgggaaagaaagttgctggcaaccttaaatctacatcctcacatctctggatctaaacaacccacaaatcaagtcttactgcccctacttgacaatcctggaccagagagagagctcttcaattgaccagcctgtgtcactgctcttcccaaaatggtg

SEQ ID NO: 451843 - DNA, 563 bp, Homo sapiens
ggagtggcagtttgtttggccgagctatggccacatgccctctgcccttggatcgacatacctggaggaatacctggcccaatgcctctctaggatcacccactgccccaccgagactgctcacaagacagttttccccagcagggaggttgaagcctgagtgaccagaaacaagtatccactgcacattgtaacgaactgagcacatttgactgctagggagaagtacccattgagaaggagtggacaggagatacaggagccagaattgctactggcaataaggtcctcaatgggctgagattcaggagttcaataggaggaaagaggtgacttctttatgtaatagcagagcaagaagaaatgatgggggtagtacygaggtaccgtagtctctctcctcttgggaaagaaagttgctggcaaccttaaatctacatcctcacatctctggatctaaacaacccacaaatcaagtcttactgcccctacttgacaatcctggaccagagagagagctcttcaattgaccagcctgtgtcactgctcttcccaaaatggtg

SEQ ID NO: 451844 - DNA, 563 bp, Homo sapiens
ggagtggcagtttgtttggccgagctatggccacatgccctctgcccttggatcgacatacctggaggaatacctggcccaatgcctctctaggatcacccactgccccaccgagactgctcacaagacagttttccccagcagggaggttgaagcctgagtgaccagaaacaagtatccactgcacattgtaacgaactgagcacatttgactgctagggagaagtacccattgagaaggagtggacaggagatacaggagccagaattgctactggcaataaggtcctcaatgggctgagattcaggagttcaataggaggaaagaggtgacttctttatgtaatagcagagcaagaagaaatgatgggggtagtactgaggtaccgtagtctctctcctcttgggaaagaaagttgctggcaaccttaaatctacaycctcacatctctggatctaaacaacccacaaatcaagtcttactgcccctacttgacaatcctggaccagagagagagctcttcaattgaccagcctgtgtcactgctcttcccaaaatggtg

SEQ ID NO: 451845 - DNA, 570 bp, Homo sapiens
tcttacttatttctgttctccttctacagtcctttctattatgtttaatcatcaaaacgttgttcttgttttctattgcaatctaatttttagtgttatgctgtttccagatgccatttgggtcattttcaaaaaaagatgagtaataattagcaagtaatgaatattgttctttttaccattcattaagaacaattgttaattgtcttattctattgtgaagaatatctgtaattcctgcttagaacctgggttgatagcaggatatcaggaagcactaagtgtacacagaaygatatagctggaaaaagtatatatgttaaagaataatatgttgtctaaggacagaatggaactgatcacacaggttcttttttggtaagcttcaaaacttcttatctcccatgaaagtactttttcttttataatatgcaacaataactttctgtttagttaattagttttaaaacaagcttaaacttataatttataaagaatcatatttgctccctatcattgttttatagctggggctatactgacaaataagaaaaataaaattcctgccct

SEQ ID NO: 451846 - DNA, 627 bp, Homo sapiens
acttctctgggcttcgtttttcatgaacaagatagagcttttggggaacaaaaacatctctgacatcaaattatatatttgtccctgattcataaaaatttacrtggaaacacatggttatttagattccaaaaaaagtctacctcatggaaacactgtgttgatctttgacttatatatttaataatattcaagataaatttatattcctgtcacattatcagaactaggtttgtaaaacatgtaacacctcactataaagatgaaagtacagaagtcttttcttttcaacttttactttagattcgggtgtacatgtgcaggtctgttacctgggaatactgcgtgatactgaactttggggtacaagtgatcctgtcacccaggtactgagcacagtacccaacaggtagtttttcaaccctctccctctagtagtccccagtgtgtattgttgccacctctatgtccatgagtagccagtgtttagctcccacttataagtgagaatacacgttatttggtttcctgttcctccctcaattcacttaggataattgcttccaactgcatctgtgttgctgcaatttatttatttatttatttatttttttgagacaaggtgtc

SEQ ID NO: 451847 - DNA, 497 bp, Homo sapiens
tcaaattatatatttgtccctgattcataaaaatttacgtggaaacacatggttatttagattccaaaaaaagtctacctcatggaaacactgtgttgatctttgacttatatatttaataatattcaagataaatttatattcctgtcacattatcagaactaggtttgtaaaacatgtaacacctcactataaagatgaaagwacagaagtcttttcttttcaacttttactttagattcgggtgtacatgtgcaggtctgttacctgggaatactgcgtgatactgaactttggggtacaagtgatcctgtcacccaggtactgagcacagtacccaacaggtagtttttcaaccctctccctctagtagtccccagtgtgtattgttgccacctctatgtccatgagtagccagtgtttagctcccacttataagtgagaatacacgttatttggtttcctgttcctccctcaattcacttaggataattgct

SEQ ID NO: 451848 - DNA, 497 bp, Homo sapiens
tcaaattatatatttgtccctgattcataaaaatttacgtggaaacacatggttatttagattccaaaaaaagtctacctcatggaaacactgtgttgatctttgacttatatatttaataatattcaagataaatttatattcctgtcacattatcagaactaggtttgtaaaacatgtaacacctcactataaagatgaaagtacagaagtcttttcttttcaacttttactttagattcgggtgtacatgtgcaggtctgttacctgggaatactgcrtgatactgaactttggggtacaagtgatcctgtcacccaggtactgagcacagtacccaacaggtagtttttcaaccctctccctctagtagtccccagtgtgtattgttgccacctctatgtccatgagtagccagtgtttagctcccacttataagtgagaatacacgttatttggtttcctgttcctccctcaattcacttaggataattgct

SEQ ID NO: 451849 - DNA, 627 bp, Homo sapiens
acttctctgggcttcgtttttcatgaacaagatagagcttttggggaacaaaaacatctctgacatcaaattatatatttgtccctgattcataaaaatttacgtggaaacacatggttatttagattccaaaaaaagtctacctcatggaaacactgtgttgatctttgacttatatatttaataatattcaagataaatttatattcctgtcacattatcagaactaggtttgtaaaacatgtaacacctcactataaagatgaaagtacagaagtcttttcttttcaacttttactttagattcgggtgtacatgtgcaggtctgttacctgggaatactgcgtgatactgaactttggggtacaagtgatcctgtcacccaggtactgagcacagtacccaacaggtagtttttcaaccctctccctctagtagtccccagtgtgtattgttgycacctctatgtccatgagtagccagtgtttagctcccacttataagtgagaatacacgttatttggtttcctgttcctccctcaattcacttaggataattgcttccaactgcatctgtgttgctgcaatttatttatttatttatttatttttttgagacaaggtgtc

SEQ ID NO: 451850 - DNA, 519 bp, Homo sapiens
ccctcttcgcgccgtggcccgccgcctccgccccccgaaatacgcggggggtgcgtcggggcgacgttttactttaaaggcaaaaaaaggggacgccgcgatgcccccagaaaagtcacgactgaaactcgctgcgtcatgacccggtttactctttcagaagraaaacaactgcaatattctcaaaatgtccactggtagccatttccctacatcaataaaaaaactttagaatatactttatttagctactaacctgtaaaaaataaagcaccataaattcctgtgtatgtgtaaaaacaaagattgtgaagtaacttctaaagattatctaattagttcaagatttttcacatcattctacaaaaacctgaaactctctaggggattcatagaatattctccatccagaattttgtcataagagttttatgaaattactgaactattacttgaatctagatcatccttaaaaccagagatatctacatttcccaaatctcttgcaaagcatttgca

SEQ ID NO: 451851 - DNA, 519 bp, Homo sapiens
ccctcttcgcgccgtggcccgccgcctccgccccccgaaatacgcggggggtgcgtcggggcgacgttttactttaaaggcaaaaaaaggggacgccgcgatgcccccagaaaagtcacgactgaaactcgctgcgtcatgacccggtttactctttcagaagaaaaacaactgcaatattctcaaaatgtccactggtagccatttccctacatcaataaaaaaactttagaatatactttatttagctactaacytgtaaaaaataaagcaccataaattcctgtgtatgtgtaaaaacaaagattgtgaagtaacttctaaagattatctaattagttcaagatttttcacatcattctacaaaaacctgaaactctctaggggattcatagaatattctccatccagaattttgtcataagagttttatgaaattactgaactattacttgaatctagatcatccttaaaaccagagatatctacatttcccaaatctcttgcaaagcatttgca

SEQ ID NO: 451852 - DNA, 332 bp, Homo sapiens
acggtttctaaaaacccatcgaagagctgaggatacaagggagcctaaatgaaccaactccagaaagtaatcaaactttcatagtggagaagaaacccatggttgctctaggatggaacaacsaaaggaataggaatccaccatagatgaggggaaaggagaaaccagccacatttttttaaaatcagatttttaatggccacgtatgggctggtttgacaggttaggatcctaagaagccctagcaactctggcaccaaagagcaagtatgcacccacactccagctcctacccacagatgttcactgaatgttcaggagtagtaagccaa

SEQ ID NO: 451853 - DNA, 635 bp, Homo sapiens
acaaaattacaagatattgccattcttgtaactgaaaacctataaaagcaggataagaagtacggtttctaaaaacccatcgaagagctgaggatacaagggagcctaaatgaaccaactccagaaagtaatcaaactttcatagtggagaagaaacccatggttgctctaggatggaacaaccaaaggaataggaatccaccatagatgaggggaaaggagaaaccagccacatttttttaaaatcagatttttaatggccacgtatgggctggtttgacaggttaggatcctaagaagccctagcaactctggcaccaaagagcaagtatgcacccacactccagctcctacccacagatgttcactgaatgttcaggagtagtaagccaaaagcctgggccagtgaygaactggcatagataatacctgaggcatttggaacctctcccaagtatagggcaaccacccttagaaggcaggattgctgagaaaaatccagcagaggctctccaggctttcagttctggaatgctgcaggcaggggaagagctagagataactctcaccccacactctggcagtccatgttttcagccaccaaggactggggacagggcagaagaggtgagtga

SEQ ID NO: 451854 - DNA, 552 bp, Homo sapiens
tatgcacccacactccagctcctacccacagatgttcactgaatgttcaggagtagtaagccaaaagcctgggccagtgatgaactggcatagataatacctgaggcatttggaacctctcccaagtatagggcaaccacccttagaaggcaggattgctgagaaaaatccagcagaggctctccaggctttcagttctggaatgctgcaggcaggggaagagctagarataactctcaccccacactctggcagtccatgttttcagccaccaaggactggggacagggcagaagaggtgagtgaaactgctctaattcatttcaggccttcacagaatgtaaggaagctgccctccagaaggctggctggggaggaggagcagggctgcacgagggcacctgagcttcaaaaagcaaggtgtgcgactggagagcaaggagaatctagcaaaccaaactctgaccgtcgcgcttaatgcagagatagagttcctacagttttttttttctttcttttttaaaatataaacttgaatttttgaaacagttt

SEQ ID NO: 451855 - DNA, 556 bp, Homo sapiens
tgtagttttaattcgaatttctctaataagttatatttgatagccatttttatatctttttttgaaaattgactgttcatctctttttcacattttcccttttgccaggctagagtgcagtggcatgaatacagctcactgcagcctcgacctcctgggctcaaacaatcctcctgcctcagcctcctacgtagctgggaccataggcatgcaccaccacacctggctaattttttgactttttgtagagacagggtctcactatgttgcccaggctggactcaaactcctgagytcaagtgattctcccacctcagctttccaaaatgctatgattaccagtgtgaacaaccacacccagactttgtcactcaaggtttaaaagttctttatatattagggatattagccttttgttgtatgttacaaatattttctccaagtttgtcagttgtcttttgactttgtttatagtgttttggttatgcaaaatttatttttctgtagtaaaatgtatcagtttatcttctactgcccctggattctgagtaatatt

SEQ ID NO: 451856 - DNA, 556 bp, Homo sapiens
tgtagttttaattcgaatttctctaataagttatatttgatagccatttttatatctttttttgaaaattgactgttcatctctttttcacattttcccttttgccaggctagagtgcagtggcatgaatacagctcactgcagcctcgacctcctgggctcaaacaatcctcctgcctcagcctcctacgtagctgggaccataggcatgcaccaccacacctggctaattttttgactttttgtagagacagggtctcactatgttgcccaggctggactcaaactcctgagctcaagtgattctcccacctcagctttccaaaatgctatgattaccagtgtgaacaaccacacccagactttgtcaytcaaggtttaaaagttctttatatattagggatattagccttttgttgtatgttacaaatattttctccaagtttgtcagttgtcttttgactttgtttatagtgttttggttatgcaaaatttatttttctgtagtaaaatgtatcagtttatcttctactgcccctggattctgagtaatatt

SEQ ID NO: 451857 - DNA, 599 bp, Homo sapiens
aatcttcttactctgttccactggtctacttgtctattcatgcatcagtacttmactgttttaattacagaggctttatagtatgttttaacatctggtaaagctagttcccctcctctgtagttttcctttgtcagtcttttcctagctattcttgcatgtctgttttcccatatgagctttagtatcaacttttatatgccacaacatatatattttcattggaactacattgaatttacatattaacttaggaagaactgacatcattataatgttgagtcatcctatccaagaacagggaatgtctttccatttattcatgtcttcatttctttctggagtgtttaaattttttcctcatataggctttgcatatttcttgttaactgtattttgaactatcttctttattactatagtaaatgagtttttcactatcattatgccctctgtttattatttgtgtatattgtctaattactattattattattttttttttgagacagggccttgctctgttgcccaggctggagtacagtggtgcaatcacagctcactgcaacctcatcccccagcctgggctcaagcaatcc

SEQ ID NO: 451858 - DNA, 571 bp, Homo sapiens
tgtctcagcaccatttattaagaagttagcttttatctcactgattccagatactatctttgtcatatattaaattgctatatgtaggtgggtctaattctaatcttcttactctgttccactggtctacttgtctattcatgcatcagtacttcactgttttaattacagaggctttatagtatgttttaacatctggtaaagctagttcccctcctctgtagttttcctttgtcagwcttttcctagctattcttgcatgtctgttttcccatatgagctttagtatcaacttttatatgccacaacatatatattttcattggaactacattgaatttacatattaacttaggaagaactgacatcattataatgttgagtcatcctatccaagaacagggaatgtctttccatttattcatgtcttcatttctttctggagtgtttaaattttttcctcatataggctttgcatatttcttgttaactgtattttgaactatcttctttattactatagtaaatgagtttttcactatcattatgccctctgtttattatttgtgta

SEQ ID NO: 451859 - DNA, 599 bp, Homo sapiens
aatcttcttactctgttccactggtctacttgtctattcatgcatcagtacttcactgttttaattacagaggctttatagtatgttttaacatctggtaaagctagttcccctcctctgtagttttcctttgtcagtcttttcctagctattcttgcatgtctgttttcccmtatgagctttagtatcaacttttatatgccacaacatatatattttcattggaactacattgaatttacatattaacttaggaagaactgacatcattataatgttgagtcatcctatccaagaacagggaatgtctttccatttattcatgtcttcatttctttctggagtgtttaaattttttcctcatataggctttgcatatttcttgttaactgtattttgaactatcttctttattactatagtaaatgagtttttcactatcattatgccctctgtttattatttgtgtatattgtctaattactattattattattttttttttgagacagggccttgctctgttgcccaggctggagtacagtggtgcaatcacagctcactgcaacctcatcccccagcctgggctcaagcaatcc

SEQ ID NO: 451860 - DNA, 599 bp, Homo sapiens
aatcttcttactctgttccactggtctacttgtctattcatgcatcagtacttcactgttttaattacagaggctttatagtatgttttaacatctggtaaagctagttcccctcctctgtagttttcctttgtcagtcttttcctagctattcttgcatgtctgttttcccatatgagctttagtatcaacttttatatgccayaacatatatattttcattggaactacattgaatttacatattaacttaggaagaactgacatcattataatgttgagtcatcctatccaagaacagggaatgtctttccatttattcatgtcttcatttctttctggagtgtttaaattttttcctcatataggctttgcatatttcttgttaactgtattttgaactatcttctttattactatagtaaatgagtttttcactatcattatgccctctgtttattatttgtgtatattgtctaattactattattattattttttttttgagacagggccttgctctgttgcccaggctggagtacagtggtgcaatcacagctcactgcaacctcatcccccagcctgggctcaagcaatcc

SEQ ID NO: 451861 - DNA, 599 bp, Homo sapiens
aatcttcttactctgttccactggtctacttgtctattcatgcatcagtacttcactgttttaattacagaggctttatagtatgttttaacatctggtaaagctagttcccctcctctgtagttttcctttgtcagtcttttcctagctattcttgcatgtctgttttcccatatgagctttagtatcaacttttatatgccacaacatatatattttcattggaactacattgaatttacatattaacttaggaagaactgacatcattataatgttgagtcatcctatccaagaacagggaatgtctttccatttmttcatgtcttcatttctttctggagtgtttaaattttttcctcatataggctttgcatatttcttgttaactgtattttgaactatcttctttattactatagtaaatgagtttttcactatcattatgccctctgtttattatttgtgtatattgtctaattactattattattattttttttttgagacagggccttgctctgttgcccaggctggagtacagtggtgcaatcacagctcactgcaacctcatcccccagcctgggctcaagcaatcc

SEQ ID NO: 451862 - DNA, 582 bp, Homo sapiens
atgatattttttaacattaattttgcatcctgttatatcattgaattatcttattrtttaaatttgttttaactttgattccctggagttttcaggtatgttatcagagcatttgtaaatagagataattttcattcttctttatccattcaaatgttcaaatgcctcttctttcttttttttttttttttttttttttttggagagacagaatctcgctctgtccctcaggctgcagtgcagtgtacaggtgctcactgcaacctccacctcctaggttcaggcaattctcatgcctcagcctcctgagtagctgggaccacaggcatgcaccaccacacctggctaatttttcatctttttagtacagacagggttttgctatgttggccaggctggtcccaaactcctggcctcaagtgatccgcccactttggcctctcaaagtgctgggattacaggcgtgagccaccgcaccagaccagatgcctcttcttgtctaagtgcattagctgataattctagtataagatgaatagttgcagagatagtggacatccttatctttttcctggttttaat

SEQ ID NO: 451863 - DNA, 582 bp, Homo sapiens
atgatattttttaacattaattttgcatcctgttatatcattgaattatcttattgtttaaatttgttttaactttgattccctggagttttcaggtatgttatcagagcatttgtaaatagagataattttcattcttctttatccattcaaatgttcaaatgcctcttctttcttttttttttttttttttttttttttggagagacagaatctcgctctgtccctcaggctgcagtgcagtgtacaggtgctcactgcaacctccacctcctaggttcaggcaattctcatgcctcagcctcctgagtagctgggaccacaggcatgcaccaccacacctggctaatttttcatctttttagtacagacagggttttgctatgttggccaggctggtcccaaactcctggcctcaagwgatccgcccactttggcctctcaaagtgctgggattacaggcgtgagccaccgcaccagaccagatgcctcttcttgtctaagtgcattagctgataattctagtataagatgaatagttgcagagatagtggacatccttatctttttcctggttttaat

SEQ ID NO: 451864 - DNA, 582 bp, Homo sapiens
atgatattttttaacattaattttgcatcctgttatatcattgaattatcttattgtttaaatttgttttaactttgattccctggagttttcaggtatgttatcagagcatttgtaaatagagataattttcattcttctttatccattcaaatgttcaaatgcctcttctttcttttttttttttttttttttttttttggagagacagaatctcgctctgtccctcaggctgcagtgcagtgtacaggtgctcactgcaacctccacctcctaggttcaggcaattctcatgcctcagcctcctgagtagctgggaccacaggcatgcaccaccacacctggctaatttttcatctttttagtacagacagggttttgctatgttggccaggctggtcccaaactcctggcctcaagtgatccgcccacyttggcctctcaaagtgctgggattacaggcgtgagccaccgcaccagaccagatgcctcttcttgtctaagtgcattagctgataattctagtataagatgaatagttgcagagatagtggacatccttatctttttcctggttttaat

SEQ ID NO: 451865 - DNA, 582 bp, Homo sapiens
atgatattttttaacattaattttgcatcctgttatatcattgaattatcttattgtttaaatttgttttaactttgattccctggagttttcaggtatgttatcagagcatttgtaaatagagataattttcattcttctttatccattcaaatgttcaaatgcctcttctttcttttttttttttttttttttttttttggagagacagaatctcgctctgtccctcaggctgcagtgcagtgtacaggtgctcactgcaacctccacctcctaggttcaggcaattctcatgcctcagcctcctgagtagctgggaccacaggcatgcaccaccacacctggctaatttttcatctttttagtacagacagggttttgctatgttggccaggctggtcccaaactcctggcctcaagtgatccgcccactttggcctctcaaagtgctgggattacaggcgtgagccaccgcaccagaccagatgcctcttcttgtctaagtgcrttagctgataattctagtataagatgaatagttgcagagatagtggacatccttatctttttcctggttttaat

SEQ ID NO: 451866 - DNA, 552 bp, Homo sapiens
tatgcacccacactccagctcctacccacagatgttcactgaatgttcaggagtagtaagccaaaagcctgggccagtgatgaactggcatagataatacctgaggcatttggaacctctcccaagtatagggcaaccacccttagaaggcaggattgctgagaaaaatccagcagaggctctccaggctttcagttctggaatgctgcaggcaggggaagagctagagataactctcaccccacactctggcagtccatgttttcagccaccaaggactggggacagggcagaagaggtgagtgaaactgctctaattcatttcaggccttcacagaatgtaaggaagctgccctccagaaggctggctggggaggaggagcagggctgcacgagggcacctgagcttcaaaaagcaaggtgtgcgactggagagcaaggagaatctagcaaaccaaactctgaccgtsgcgcttaatgcagagatagagttcctacagttttttttttctttcttttttaaaatataaacttgaatttttgaaacagttt

SEQ ID NO: 451867 - DNA, 604 bp, Homo sapiens
tctattttattgatatagtattaatcatattataatgctgtattgatgctatatttatttatttaagaaaaaaattttttttgagacaaggtctgactctggtcacccaggcagaagtgctgtggtactatcatggctcactgcagcctcaactttctttcccacttaagcctccccagtagctgtaactacaggtgtgcaccactacacctggctaatttttccatatttktagtagagatgaggtttcaccatatcatccaggctggtgtcgagctcctgggcccaagtaatcctcctgcctcagccacccagagtgctgggattacaggcataagccactgtgccaggctgatactatatttattgatactgaaagggaaagtatcctagtatattactagttaacagtattatacaaatgttgatttcctgttgttgatattgtactaaagttatataagatatcaccattgggagaagctagaagaagagttcatgggactttatgtattatttttgcaatcccctgtgattctataattatacagataatatttattttaaaaacttttaaatttgaaatattatctgtatgctaata

SEQ ID NO: 451868 - DNA, 570 bp, Homo sapiens
cttgttattctaattgttgctcttcccttctacttgctctgcctttctttaagaattcaaagattggaattccatgctctatcttccatatacatcctataactttcctattattccagttatcttcttgtataatcagtatatttctctagctattttcttgtatgatayttcagcattttatcaaatatattttgctagcttattatttctccctctaatattactatgttactactacattatgtgcaggttcaacatcttatattcattttctcacttaatcttcataacaaccctataaggtatatatgtatttttatctccatttcaaagaaaaggagataaaggtatagtgaagtgaaataacttgcctaaagacaaagactggaagtaagagggccaggattcaaatcctggtctatctgagtccagtgaccaaaaccacaagtttatactgtttcccttactttgttttctttctttttttttatgttattttatttcctagaggaggagatagctgctagtttcctcattaaacagcttcttttaaagaagagaaaactg

SEQ ID NO: 451869 - DNA, 570 bp, Homo sapiens
cttgttattctaattgttgctcttcccttctacttgctctgcctttctttaagaattcaaagattggaattccatgctctatcttccatatacatcctataactttcctattattccagttatcttcttgtataatcagtatatttctctagctattttcttgtatgatatttcagcattttatcaaatatattttgctagcttattatttctccctctaatattactatgttactactacattatgtgcaggttcaacatcttatattcattttctcacttaatcttcataacaaccctataaggtatatatgtatttttatctccatttcamagaaaaggagataaaggtatagtgaagtgaaataacttgcctaaagacaaagactggaagtaagagggccaggattcaaatcctggtctatctgagtccagtgaccaaaaccacaagtttatactgtttcccttactttgttttctttctttttttttatgttattttatttcctagaggaggagatagctgctagtttcctcattaaacagcttcttttaaagaagagaaaactg

SEQ ID NO: 451870 - DNA, 547 bp, Homo sapiens
ctggaggtaattatactgagaaattctttatcagttgatattttaaggtctgagaccttcttaactgctgcttcagaccttgacttatctactgagttcgaggaaaataatcccaaacrctggttttgtatttcatgatattctgttggcacacactctctttgtaccacttcaggccctatattaattttttcagtactacaaaccaaatccaacacagctgcacatttatggcccaactgaaacaaatttgtgttaaagttctgaccacatatatctggctgatgtttaggctgttcatctctaattttattttcactgagaagctttgatacttttcttcttcggttaaatgcggaactgtgcttttaaatccacatatttgcatattagagctagttatgtcactcagtctagaggagtgaatcttctgggattctatattctgtgtttcagaaacagaatgtacaaagtcatctttcacatgaacatgtctattcatacagtttgctaagaaatgaccacaaagatctggagaaccaataga

SEQ ID NO: 451871 - DNA, 547 bp, Homo sapiens
ctggaggtaattatactgagaaattctttatcagttgatattttaaggtctgagaccttcttaactgctgcttcagaccttgacttatctactgagttcgaggaaaataatcccaaacactggttttgtatttcatgatattctgttggcacacactctctttgtaccacttcaggccctatattaattttttcagtactacaaaccaaatccaacacagctgcacatttatggcccaactgaaacaaatttgtgttaaagttctgaccacatatatctggctgatgtttaggctgttcatctctaattttattttcactgagaagctttgatacttttcttcttcggttaaatgcggaactgtgcttttaaatccacatatttgcatattagagctagttatgtcactcagtctagaggagtgaatcttctgggattctatattctgtgtttcagaaacagaaygtacaaagtcatctttcacatgaacatgtctattcatacagtttgctaagaaatgaccacaaagatctggagaaccaataga

SEQ ID NO: 451872 - DNA, 581 bp, Homo sapiens
atattggattgactcagactcccttctagtgtcctaacagaaaaattgtcatgtctttttctggaagtaaaatattacttaatttaataagtaatctatttttatataaaatgtctggtgtgtaatgaaaagttacaaggcacaagaaaagcaaraaaatgtgaccaaaggtcaagagaagaaatagtcagagatgatccagatttatcagaattatcagacagggatttaaagataattatgaaaaaaatgctagatgattgaatgataaaggttaacgatatgcttgaaaagatggggatttctgtagagtcatggaaattatgccaaagaaccaagttgaaattctattaaatagaggtgaaaaatatactagcagagaccagggaaaacaaaaaaaggaaagaaaagaaaaggaaagggaagggaggggagggaagggagaaagaaaaatacactagcagaaatgaattcattacatgggcttaacagtttatggacatagcagaagaaagaatcagtgaatatgaagacagattggaaagagaaaagacagaaaaagtcagggaggggtagaaaag

SEQ ID NO: 451873 - DNA, 610 bp, Homo sapiens
tacatgtaaggtactcccacagttttaaaaactggtggcttggctatgaaacacaagcaggtctctgtaattttacctaggctcagatcccagacctgctcaagtgaaaggcttgatctcagtccttaaatatttgaagccagtgattaactgttaaattaaagctgcatcatagcccacacccagctcagttacatattggattgactcagactcccttctagtgtcctaacagaaaaattgtcatgtctttttctggaagtaaaatattacttaatttaataagtaatctatttttatataaaatgtctggtgtgtaatgaaaagttacaaggcacaagaaaagcaagaaaatgtgaccaaaggtcaagagaagaaatagtcagagatgatccagatttatcagaattatcagacagggatttaaagataattatgaaaaaaatgctagatgattgaatgataaaggttaacgatatgcttgaaaagatggggatttctgtagagtyatggaaattatgccaaagaaccaagttgaaattctattaaatagaggtgaaaaatatactagcagagaccagggaaaacaaaaaaaggaaagaaaagaaaa

SEQ ID NO: 451874 - DNA, 266 bp, Homo sapiens
acttgagcccaggagtttgagtccagcctgggcaacattgaaagactatatattttaaagtagacacatgtacaaaatcatacatgcataaaacaaccraaggaatatctattaaaatgttggcagcaattagctttggttggtagaataacagaagggttacttttctcactttcattcatccatattttccaaagttttaaaaaaaaagaaacggcctggtgcagtggctcacgcctatagtcctagcactttgggaggccaag

SEQ ID NO: 451875 - DNA, 266 bp, Homo sapiens
acttgagcccaggagtttgagtccagcctgggcaacattgaaagactatatattttaaagtagacacatgtacaaaatcatacatgcataaaacaaccgaaggaatatctattaaaatgttggcagcaattagctttggttggtagaataacagaagggttacttttctcactttcattcatccatattttccaaagtttwaaaaaaaaagaaacggcctggtgcagtggctcacgcctatagtcctagcactttgggaggccaag

SEQ ID NO: 451876 - DNA, 565 bp, Homo sapiens
agcagctgcatcctcagtctaagattgcagccaatgatgatgttttcatgaatccaccgttcacgtggcagcctcctggagctcagactgatgcctgctcctccagccttccaatacctttgcaaacacctgaattccacattaatctctctctgtttagaatacccagagtggcttgtgtttcctgggctgaaccctgcctggtaagtccattttaacaggcttctagatctttcctcaaaaactgtaaagctgatgatkgttttgaaaaaaatcacgatttcttaacaacgtggaagcagagaggtcacctttagcaaatgtatgccttaagtgggtagaattcacttcttaataacaaatcaggttcaagacctccaaagacataatgacaattaattggcaaacctcatcccctctcacacatttctcccctgttgacattaaatcaagggccagaattaagctactgataaagacgaacactttattctaattgttctatgattcatgacctgtgttccaacacctagaaacccatcaggatacaaatatatcacttaaa

SEQ ID NO: 451877 - DNA, 563 bp, Homo sapiens
tcaaggaaatgatttcacattgacggttttttaggtagggataagcgaaagcactgcagcagtttctgaaggagtgtcttctctgtggttccccatacttagtacgatgcctggaatgtagcagggactaaatacagtgaacaaatgggcaaacctttaattcccagggatctgctacatattgccttgactggtagatcatttctccagaagaaaggaagaaaccaaaagacaaaaacaatctttttaaacctcacaggattttyttagaaaaaagttttaatttatctagtgcaattctctttgtaaaatatatttcataaaaaatccaaagcaaaagccctgtcattcatttatttcaaaagacaaatcatttcagtacttcttccttgaaatgcctgcaatttcttcctctggcctcagagacgggcattggctccatgctttaccatgtcaggataaaaatccaggagggagaaatcttgttgtaatggatagctgttttcatctaacacaaaaaggctctgaatcttcaatacacaaggttctgcgctgactgccaa

SEQ ID NO: 451878 - DNA, 579 bp, Homo sapiens
aatagtctgcatggtctgatgaccactttatgaccaatgacattttgacttatgatcacaatctaattaatgccaagaagtacaactttaattgtctcaagaatggacaaaacactgaagtatatgtgatatgagaattatgcttctctaagagataaagactaatttacattatgcaaaaaagaagagataggccggacacggcagctcacgcctgtaatcccagcactttgggagaccgaggcaggcagatcacctgaggttgggagttcaagaccagcctgactaacatagagaaaccccatatctactaaaaatacaaaattagccgggcatggtggcacawgcctgtaatcccagctacttgggaaactgaggcaggagacttgcttgaatccaggaggcagaggttatggtgaactgagatcgcgccacagcactccagtctaggcaacaagagcaaaactccatctcaaaaaaaaaaagaagagataacactgaaaatatataagtaacattaagaaaaggaatgaaaatagccaaaagaataaaaatgaaataaagaaaatgggggaaaaa

SEQ ID NO: 451879 - DNA, 579 bp, Homo sapiens
aatagtctgcatggtctgatgaccactttatgaccaatgacattttgacttatgatcacaatctaattaatgccaagaagtacaactttaattgtctcaagaatggacaaaacactgaagtatatgtgatatgagaattatgcttctctaagagataaagactaatttacattatgcaaaaaagaagagataggccggacacggcagctcacgcctgtaatcccagcactttgggagaccgaggcaggcagatcacctgaggttgggagttcaagaccagcctgactaacatagagaaaccccatatctactaaaaatacaaaattagccgggcatggtggcacaagcctgtaatcccagctacttgggaaactgaggcaggagacttgcttgaatccaggaggcagaggttatggtgaactgagatygcgccacagcactccagtctaggcaacaagagcaaaactccatctcaaaaaaaaaaagaagagataacactgaaaatatataagtaacattaagaaaaggaatgaaaatagccaaaagaataaaaatgaaataaagaaaatgggggaaaaa

SEQ ID NO: 451880 - DNA, 579 bp, Homo sapiens
aatagtctgcatggtctgatgaccactttatgaccaatgacattttgacttatgatcacaatctaattaatgccaagaagtacaactttaattgtctcaagaatggacaaaacactgaagtatatgtgatatgagaattatgcttctctaagagataaagactaatttacattatgcaaaaaagaagagataggccggacacggcagctcacgcctgtaatcccagcactttgggagaccgaggcaggcagatcacctgaggttgggagttcaagaccagcctgactaacatagagaaaccccatatctactaaaaatacaaaattagccgggcatggtggcacaagcctgtaatcccagctacttgggaaactgaggcaggagacttgcttgaatccaggaggcagaggttatggtgaactgagatcgcrccacagcactccagtctaggcaacaagagcaaaactccatctcaaaaaaaaaaagaagagataacactgaaaatatataagtaacattaagaaaaggaatgaaaatagccaaaagaataaaaatgaaataaagaaaatgggggaaaaa

SEQ ID NO: 451881 - DNA, 545 bp, Homo sapiens
gaggagggacaccaaatcctgttgccccagggtacaggtgaggaaccagtacagatgggggaaagaaaaaagaaaaaaaaaaacctccatcctgggggaggactgaaaaaccaccctgggtcaagaccattagtggtcccctactgctggggcagggccaggaccacacaagacccactaaaggcacaagacagagctcagctgccatgccacataagggacagggctaccaagaaagcgccatrtgcaacatccgtataagactggggctggaccagaatcaaagaggaacaaccctgctcccacccaccaggttaggatgcaccaaataacaaccaacaaaagcttgtgcaacttggggaggtgcaagaatatggaaagaaactttctctgaggcccaggtgcagagtggagggctatgctgatggtggagcaggaatactggggaaccacttcccaccataagcacaagataatttgaaaccagtggtgacctgaaggtaaccagagaaacaacaaaacctgaatccaactcaacttatgac

SEQ ID NO: 451882 - DNA, 545 bp, Homo sapiens
gaggagggacaccaaatcctgttgccccagggtacaggtgaggaaccagtacagatgggggaaagaaaaaagaaaaaaaaaaacctccatcctgggggaggactgaaaaaccaccctgggtcaagaccattagtggtcccctactgctggggcagggccaggaccacacaagacccactaaaggcacaagacagagctcagctgccatgccacataagggacagggctaccaagaaagcgccatgtgcaacatccgtataagactggggctggaccagaatcaaagaggaacaaccctgctcccacccaccaggttaggatgcaccaaataacaaccaacaaaagcttgtgcaacttggggaggtgcaagaatatggaaagaaactttctctgaggcccaggtgcagagtggagggctatgctgayggtggagcaggaatactggggaaccacttcccaccataagcacaagataatttgaaaccagtggtgacctgaaggtaaccagagaaacaacaaaacctgaatccaactcaacttatgac

SEQ ID NO: 451883 - DNA, 495 bp, Homo sapiens
tgggatgacatccataaagagctgaaagaaaaaaaaaaaacaacctgttaacctagatttctatggccagcagaaatagccttcaaaaataatggcaaaataaagactttttggacatatcaaaaagggaaagaatttgtttccagcagacctggactcaaaaaacattaaaacatacacattaacaagatgtgggttttacagcatatatgtgattatacaaccatgaaagaacaaaaaggaggagatggaattatactgtcayacatttcttactctgtgaaaggagactgtagtaacttctggatgcatatgtaatctctagaacaagcactaaaaacacaaacagggataccataaagtcagtacatctgcccaagagggattaactgctacgagaatcattctcctactgtaaacagctagaaaacaggacaaaaatacatgaaacaactgttttcagacattggacaacaggcagcacaggatagtgat

SEQ ID NO: 451884 - DNA, 495 bp, Homo sapiens
tgggatgacatccataaagagctgaaagaaaaaaaaaaaacaacctgttaacctagatttctatggccagcagaaatagccttcaaaaataatggcaaaataaagactttttggacatatcaaaaagggaaagaatttgtttccagcagacctggactcaaaaaacattaaaacatacacattaacaagatgtgggttttacagcatatatgtgattatacaaccatgaaagaacaaaaaggaggagatggaattatactgtcacacatttcttactctgtgaaaggagactgtagtaacttctggatgcatatgtaatctctagaacaagcactaaaaacacaaacagggataccataaagtcagtacatctgcccaagagggattaacygctacgagaatcattctcctactgtaaacagctagaaaacaggacaaaaatacatgaaacaactgttttcagacattggacaacaggcagcacaggatagtgat

SEQ ID NO: 451885 - DNA, 582 bp, Homo sapiens
tcttattcagtttgctgattgatttatgtagatgattttggagtcacatacttgataacttgaagggagtttgttaatttcaatattttctttccaaggaaaccacataatctggactctaataatttaaaggcttttaggctgsgcttggtggctcacacctgtaattccagcactttgggaggctgagacgggtggatcacctgaggtcaggagttcgagaccagcctgaccaacatggagaaaccctgtctctataaaaatacaaaattagccaggcgtggtggcacatgcctgtaatcccagctacttgggaggctgagacagaagaatcacttgaacctgggaggcagaggttgcgatgagctgagatcgcaccagtgcactccagcctgggcaacaagagcgaaactctgtctcaaaaaaataaaaaaaaaggcttttaaataaataaaaaataataattcttgccttaacatgaccattcaacattctagtaagacaacaaactagcactacatctttaatgtggtatagtttaggaagagatcttaaataccccatactagttatgccataatc

SEQ ID NO: 451886 - DNA, 582 bp, Homo sapiens
tcttattcagtttgctgattgatttatgtagatgattttggagtcacatacttgataacttgaagggagtttgttaatttcaatattttctttccaaggaaaccacataatctggactctaataatttaaaggcttttaggctggrcttggtggctcacacctgtaattccagcactttgggaggctgagacgggtggatcacctgaggtcaggagttcgagaccagcctgaccaacatggagaaaccctgtctctataaaaatacaaaattagccaggcgtggtggcacatgcctgtaatcccagctacttgggaggctgagacagaagaatcacttgaacctgggaggcagaggttgcgatgagctgagatcgcaccagtgcactccagcctgggcaacaagagcgaaactctgtctcaaaaaaataaaaaaaaaggcttttaaataaataaaaaataataattcttgccttaacatgaccattcaacattctagtaagacaacaaactagcactacatctttaatgtggtatagtttaggaagagatcttaaataccccatactagttatgccataatc

SEQ ID NO: 451887 - DNA, 582 bp, Homo sapiens
tcttattcagtttgctgattgatttatgtagatgattttggagtcacatacttgataacttgaagggagtttgttaatttcaatattttctttccaaggaaaccacataatctggactctaataatttaaaggcttttaggctgggcttggtggctcacacctgtaattccagcactttgggaggctgagacgggtggatcacctgaggtcaggagttcgagaccagcctgaccaacatggagaaaccctgtctctataaaaatacaaaattagccaggcgtggtggcacatgcctgtaatcccagctacttgggaggctgagacagaagaatcacttgaacctgggaggcagaggttgcgatgagctgagatcgcaccagtgcactccagcctgggcaacaagagcgaaactctgtctcaaaaaaataaaaaaaaaggcttttaaataaataaaaaataataattcttgccttaacatgaccattcaacattctagtaagacaacaaactagcactacatctttaatgtggtatagtttaggaagagatcttaaataccycatactagttatgccataatc

SEQ ID NO: 451888 - DNA, 606 bp, Homo sapiens
acccttctaggaaatgctcccatgctgatctctctttctccttttatttaactataaaataggttagggaaaagttgcttgtgttttcatattctctctccatttttgtcttaaaaacacatacactatgacagaaactatgaattcagccctcatagctgaacataaagagaatgaaaaaggctaaacaggcctctgtgaacaaagcctctgaaggactgattttaatggcacagttttggcatggcttgctaatgaggagcacacctccaggacttccaagaacatgcacaattcctggctgcgtcctcaaacaagtggggctatagcctgagaatctttcatcatcagcgtggtggcctcctattttgttgttgtccatgatgttatttatttttatttttaaacctaattctagacttcaatcccagcagataactgttttgtgtaagcagtaaataacagagttgacttctccayggcaccaaactaaacgtctctgcaaagtaaggtagcccctcaactgtgtctggcattccttcctgtggtgaccacctctatatgtctgtgaagttggagaagcagagcacgggaggggcacataaa

SEQ ID NO: 451889 - DNA, 606 bp, Homo sapiens
acccttctaggaaatgctcccatgctgatctctctttctccttttatttaactataaaataggttagggaaaagttgcttgtgttttcatattctctctccatttttgtcttaaaaacacatacactatgacagaaactatgaattcagccctcatagctgaacataaagagaatgaaaaaggctaaacaggcctctgtgaacaaagcctctgaaggactgattttaatggcacagttttggcatggcttgctaatgaggagcacacctccaggacttccaagaacatgcacaattcctggctgcgtcctcaaacaagtggggctatagcctgagaatctttcatcatcagcgtggtggcctcctattttgttgttgtccatgatgttatttatttttatttttaaacctaattctagacttcaatcccagcagataactgttttgtgtaagcagtaaataacagagttgacttctccatggcaccaaactaaacgtctctgmaaagtaaggtagcccctcaactgtgtctggcattccttcctgtggtgaccacctctatatgtctgtgaagttggagaagcagagcacgggaggggcacataaa

SEQ ID NO: 451890 - DNA, 489 bp, Homo sapiens
ccaagtaaataaacatatagcagccataatctcaacaccctaaataagcagttaacattttagcggacaaccagttgtttgggattttatttattgggattcccttaataagtcaaatatagttttatatgtatgtattattctacattgcttttaaatattacataatatgccattgtccagatacaccaaaatcttaaaaattattacagcaaacctctattttgagggactctggttgttttttatttttcacaattatacatgataccatgataaacccattttcagctacatctttatacatagytatgataagttcctagagctaaaattattgggctaaaagtacccccaatttgttcatattaattgtcagttatcctcaagaaaggttctgccagtttgcatttccaatagctgatgacagtagctgttttcccatatcttctcaatcaatttcttaaaagaaaaataatctatcatcat

SEQ ID NO: 451891 - DNA, 643 bp, Homo sapiens
caatggaactgtgttctaataaatactcttcaacaatgtgcagttatttctccacaactatcaattccccttaaagcagaattttactaaaaatggctttatccttctggggataatcagtaaaatggcaattggtgggtgaattaaaaatataytaaaagcagatggcagaacatgagtgcagatttttactacaaagcttaggaaaagcaaaaggaacttgaatagagaaaatgcagaaaagccctcctttggctattaggacggagagagcagaagtatgtttagagcttcaaagagtctgactctttgcaactgttatcttaggactttaaggaagtaaaagtgcaagtgaaacactctggattataaaatagaatctgacacagagggattcaacccagttaatatgcatgttgcttacatggaaatgctgagaaatttttagcaaatagatagaaaatgacagatggtaggtatatagaaaataattgtaggaaaaaatgtaaaatgaagatttatggtattccttttatattttattttgttaatatgttgcccataatgctttatttcaaagaatgcaaaaccaaaaaagtagttccttcctaacttcccctgcagccttgtcttgtggagcttg

SEQ ID NO: 451892 - DNA, 643 bp, Homo sapiens
caatggaactgtgttctaataaatactcttcaacaatgtgcagttatttctccacaactatcaattccccttaaagcagaattttactaaaaatggctttatccttctggggataatcagtaaaatggcaattggtgggtgaattaaaaatatactaaaagcagatggcagaacatgagtgcagatttttactacaaagcttaggaaaagcaaaaggaacttgaatagagaaaatgcagaaaagccctcctttggctattaggacggagagagcagaagtatgtttagagcttcaaagagtctgactctttgcaactgttatcttaggactttaaggaagtaaaagtgcaagtgaaacactctggattataaaatagaatctgacacagagggattcaacccagttaatatgcatgttgctyacatggaaatgctgagaaatttttagcaaatagatagaaaatgacagatggtaggtatatagaaaataattgtaggaaaaaatgtaaaatgaagatttatggtattccttttatattttattttgttaatatgttgcccataatgctttatttcaaagaatgcaaaaccaaaaaagtagttccttcctaacttcccctgcagccttgtcttgtggagcttg

SEQ ID NO: 451893 - DNA, 643 bp, Homo sapiens
caatggaactgtgttctaataaatactcttcaacaatgtgcagttatttctccacaactatcaattccccttaaagcagaattttactaaaaatggctttatccttctggggataatcagtaaaatggcaattggtgggtgaattaaaaatatactaaaagcagatggcagaacatgagtgcagatttttactacaaagcttaggaaaagcaaaaggaacttgaatagagaaaatgcagaaaagccctcctttggctattaggacggagagagcagaagtatgtttagagcttcaaagagtctgactctttgcaactgttatcttaggactttaaggaagtaaaagtgcaagtgaaacactctggattataaaatagaatctgacacagagggattcaacccagttaatatgcatgttgcttacatggaaatgctgagaaatttttagcaaatagatagaaaatgacagatggtaggtatatagaaaataattgtaggaaaaaatgtaaaatgaagatttatggtattccttttatattttattttgttaatatgttgcccatawtgctttatttcaaagaatgcaaaaccaaaaaagtagttccttcctaacttcccctgcagccttgtcttgtggagcttg

SEQ ID NO: 451894 - DNA, 537 bp, Homo sapiens
accactaatggggcacgagtagacttcagggaacatgccagtacagaaccatataaatgtgatcattggtagagataggaattaataggcatttgaatgtctccctcaacctggaataccacaaataaagctctttgcttttcatgttgcattgttatcataccctatagttttctgccattttcagttacttaatattatgttttgcctcaatagattatagtgctttctcttgttgtgttatatttgcagcaattattagtgaagttttaaacttcaatatcacatctaaaacagagcaaaattgttgcatactattttccattaaaacatgagaccactatgacaaaaaaagctaaacrtgtcatgaaatgacttacattggatgaaagtatatgcaatatattaagaaataatctctgactttatagttttttatttgtagtttttactagaacgtgaaatcaatatgtgaaccctggctggagtttgcatctaaatgtaataaaataaaagaaagtttaatattatcattga

SEQ ID NO: 451895 - DNA, 550 bp, Homo sapiens
tcaactttacattcacttttcctgttttagggctattattttatcttcaattaycaaaatctatctacatttagatactttaacttgcaaatacatagtaaacaattacagattatttaaaatagcagttttcccatgagtataaaaaaaaagaacaataaaagcaatatttgttgagtattttaaagtgccaggcactgagcagtgtgctttgcttaagtaaatgtttgacaaaataaaaggtcctttaaaagttccatgctttaacattaataaccatataaagataaggttagacttcctatcaaattagcagttttgtgaagataggccttttctgctatatagaatctcctcaaacctgagtgttcgtattatggattatctagtatactccatagctatcaagtttgtgtatgtttctttctcaagcaagttatcttatttctccttatttcttcagacttatcctttcttttcttttcttttcttttttctttttttttgagacagagttgcactcttgttgcctaggctggagtgcaatggc

SEQ ID NO: 451896 - DNA, 550 bp, Homo sapiens
tcaactttacattcacttttcctgttttagggctattattttatcttcaattaccaaaatctatctacatttagatactttaacttgcaaatacatagtaaacaattacagattatttaaaatagcagttttcccatgagtataaaaaaaaagaacaataaaagcaatatttgttgagtattttaaagtgccaggcactgmgcagtgtgctttgcttaagtaaatgtttgacaaaataaaaggtcctttaaaagttccatgctttaacattaataaccatataaagataaggttagacttcctatcaaattagcagttttgtgaagataggccttttctgctatatagaatctcctcaaacctgagtgttcgtattatggattatctagtatactccatagctatcaagtttgtgtatgtttctttctcaagcaagttatcttatttctccttatttcttcagacttatcctttcttttcttttcttttcttttttctttttttttgagacagagttgcactcttgttgcctaggctggagtgcaatggc

SEQ ID NO: 451897 - DNA, 550 bp, Homo sapiens
tcaactttacattcacttttcctgttttagggctattattttatcttcaattaccaaaatctatctacatttagatactttaacttgcaaatacatagtaaacaattacagattatttaaaatagcagttttcccatgagtataaaaaaaaagaacaataaaagcaatatttgttgagtattttaaagtgccaggcactgagcagtgtgctttgcttaagtaaatgtttgacaaaataaaaggtcytttaaaagttccatgctttaacattaataaccatataaagataaggttagacttcctatcaaattagcagttttgtgaagataggccttttctgctatatagaatctcctcaaacctgagtgttcgtattatggattatctagtatactccatagctatcaagtttgtgtatgtttctttctcaagcaagttatcttatttctccttatttcttcagacttatcctttcttttcttttcttttcttttttctttttttttgagacagagttgcactcttgttgcctaggctggagtgcaatggc

SEQ ID NO: 451898 - DNA, 550 bp, Homo sapiens
tcaactttacattcacttttcctgttttagggctattattttatcttcaattaccaaaatctatctacatttagatactttaacttgcaaatacatagtaaacaattacagattatttaaaatagcagttttcccatgagtataaaaaaaaagaacaataaaagcaatatttgttgagtattttaaagtgccaggcactgagcagtgtgctttgcttaagtaaatgtttgacaaaataaaaggtcctttaaaagttccatgctttaacattaataaccatataaagataaggttagacttyctatcaaattagcagttttgtgaagataggccttttctgctatatagaatctcctcaaacctgagtgttcgtattatggattatctagtatactccatagctatcaagtttgtgtatgtttctttctcaagcaagttatcttatttctccttatttcttcagacttatcctttcttttcttttcttttcttttttctttttttttgagacagagttgcactcttgttgcctaggctggagtgcaatggc

SEQ ID NO: 451899 - DNA, 585 bp, Homo sapiens
tgtgctacctatttgttaacctgtgtaatttgttctcctgctgacttcttgcaaacacttgccagtgggtatctgaagcctcttacatcttctgtggcacggacttggcctatatttagcatattcactcatctaaagtgggaagaagaatctggcatcttttctctttctccatcttgccatcaaaagctgcctcaatgagcatgtagccttcagaattttgaaagcaagaagcaggcaacaactggccatgtttagcttcatcttgaaactcttgaggacacctatcaaactttcccaaaactgtctcatcatgtatggttccattgcaggatgggtgcaatgctgagtrccagaaggagagggatatcccattctttccttcttaaaaattgctcccagtctttttgagctctcttcctgtttggaaggagaactaaagcaagtttagttctccttacaaaagagaaaataattaaaagcactctcacttaggtaactaattcactttctatatgataattcttagaatgtctagtcctctctttacataagagtacaggtaattgaggtcagtgaaggttt

SEQ ID NO: 451900 - DNA, 565 bp, Homo sapiens
tggttcaggagtgtggctgggatcctctaaaactgcaagcagttataactgagagttcttgcttaaagtgtggtttatgttcamccatctggttataactgagagttcttgcttaaagtgtggtttatgttcacccatctggttataactgagagttcttgcttaaagtgtggtttatgttcacccatgtggttataactgagagttcttgcttaaagtgtggtttatgttcacccatctggttataactgagagttcttgcttaaagtgtggtttatgttcacccatctggttataactgagagttcttgcttaaagtgtggtttatgttcacccatctggttataactgagagttcttgcttaaagtgtggtttatgttcacccttctgggactatacttttgcagtctatacttttggaaggatagatgtttgatgttttttttttcttttaaaactagtaagtcatttttgttcagttttttaagtgtctattttatatattcaaaagtaagttgataatgctttcttgtgctcattatggcttaaatttctactatgttt

SEQ ID NO: 451901 - DNA, 565 bp, Homo sapiens
tggttcaggagtgtggctgggatcctctaaaactgcaagcagttataactgagagttcttgcttaaagtgtggtttatgttcacccatctggttataactgagagttcttgcttaaagtgtggtttatgttcacccatctggttataactgagagttcttgcttaaagtgtggtttatgttcacccatgtggttataactgagagttcttgcttaaagtgtggtttatgttcacccatctgrttataactgagagttcttgcttaaagtgtggtttatgttcacccatctggttataactgagagttcttgcttaaagtgtggtttatgttcacccatctggttataactgagagttcttgcttaaagtgtggtttatgttcacccttctgggactatacttttgcagtctatacttttggaaggatagatgtttgatgttttttttttcttttaaaactagtaagtcatttttgttcagttttttaagtgtctattttatatattcaaaagtaagttgataatgctttcttgtgctcattatggcttaaatttctactatgttt

SEQ ID NO: 451902 - DNA, 603 bp, Homo sapiens
gtggtttatgttcacccatctggttataactgagagttcttgcttaaagtgtggtttatgttcacccatctggttataactgagagttcttgcttaaagtgtggtttatgttcacccatstggttataactgagagttcttgcttaaagtgtggtttatgttcacccttctgggactatacttttgcagtctatacttttggaaggatagatgtttgatgttttttttttcttttaaaactagtaagtcatttttgttcagttttttaagtgtctattttatatattcaaaagtaagttgataatgctttcttgtgctcattatggcttaaatttctactatgtttataagtgctgaccctcttttcatcatcatcttgtgtcttttgatctatctccttctttttctctttacttggtaaacaatctggctggaaatttgtctatttaactatggtttttaaagaatcaactttattttttattgtactgcttccttctttctctttgatatatttttacttcattataatttacacttattttgtgtgtttatgtttatatttcttatataattccagcttttgctgtattcaacagtctt

SEQ ID NO: 451903 - DNA, 603 bp, Homo sapiens
gtggtttatgttcacccatctggttataactgagagttcttgcttaaagtgtggtttatgttcacccatctggttataactgagagttcttgcttaaagtgtggtttatgttcacccatctggttataactgagagttcttgcttaaagtgtggtttatgttcacccwtctgggactatacttttgcagtctatacttttggaaggatagatgtttgatgttttttttttcttttaaaactagtaagtcatttttgttcagttttttaagtgtctattttatatattcaaaagtaagttgataatgctttcttgtgctcattatggcttaaatttctactatgtttataagtgctgaccctcttttcatcatcatcttgtgtcttttgatctatctccttctttttctctttacttggtaaacaatctggctggaaatttgtctatttaactatggtttttaaagaatcaactttattttttattgtactgcttccttctttctctttgatatatttttacttcattataatttacacttattttgtgtgtttatgtttatatttcttatataattccagcttttgctgtattcaacagtctt

SEQ ID NO: 451904 - DNA, 603 bp, Homo sapiens
gtggtttatgttcacccatctggttataactgagagttcttgcttaaagtgtggtttatgttcacccatctggttataactgagagttcttgcttaaagtgtggtttatgttcacccatctggttataactgagagttcttgcttaaagtgtggtttatgttcacccttctgggactatacttttgcagtctatacttttggaaggatagatgtttgatgttttttttttcttttaaaactagtaagtcatttttgttcagttttttaagtgtctattttatatattcaaaagtaagttgataatgctttcttgtgctcattatggcttaaatttctactatgtttataagtgctgaccctcttttcatcatcatcttgtgtcttttgatctatctccttctttttctctttacttggtaaacaatctggctggaaatttgtctatttaastatggtttttaaagaatcaactttattttttattgtactgcttccttctttctctttgatatatttttacttcattataatttacacttattttgtgtgtttatgtttatatttcttatataattccagcttttgctgtattcaacagtctt

SEQ ID NO: 451905 - DNA, 473 bp, Homo sapiens
tgtttacttaacatctttggaataatcattaagtaaacaaaaactgtcccctcttcctcaaaactttcttttattcccatgcttatccactgtcatcaaaktaccacatctgacagaaataattttaatttcaccatcaattgctaggatattaatttagactacaaatagctgcatataaacataaatgaaaaaatatttttccactctcgttgttgaaacagtgggagtcctgaatgatttgatagctgtacaattaatcaaataatagactactggattaaatctcagtgaactaaaaatatctgtgcatagctgtaaacaaaattaaattaatatcctcagtacctcttatgcctttaatgctatcaggatcagtagatgtgattttaaatgacgattcatataaataggaatatacgtaaaatttaaaaatactaagtgaatttatacctaattgtactacattatta

SEQ ID NO: 451906 - DNA, 616 bp, Homo sapiens
caggcacatgtcagtgacaattccccatcacactctgagccacactcrcactaccagtggcgtgtcatgtgcccaagatccacaaacctttggctggcatctgagggagcctggctgcttcccaacacagcagctgcctactgtcttcatcagaaccaagaagccacaattgcctgtgcacctccaccagcagtccgtctgcctcccaaactccaggggacagaaagcaagctctcagagcagagttgaatccccaactctctgggctggaggggaggctgtcctctgctccacctgccccctctctacctgagcacagccccctccccgagcacacccccctccccagccctggccagccgtaggaggtgggagtccacatcacagccccagccctcaagaaaggaatctggcaaatcccctccctccctcactctctcagcccttcctctcactgggggacagttgtccagcaggttctcagccacctttggaaatctgcgtcttagtctgtcaccactctttggagtttgatagctaatttcttcatgtcttaaccgacacatcaatttagcatattaatacatcaaaaaacaaagtctttccgccctcttat

SEQ ID NO: 451907 - DNA, 616 bp, Homo sapiens
caggcacatgtcagtgacaattccccatcacactctgagccacactcgcactaccagtggcgtgtcatgtgcccaagatccacaaacctttggctggcatctgagggagcctggctgcttcccaacacagcagctgcctactgtcttcatcagaaccaagaagccacaattgcctgtgcacctccaccagcagtccgtctgcctcccaaactccaggggacagaaagcaagctctcagagcagagttgaatccccmactctctgggctggaggggaggctgtcctctgctccacctgccccctctctacctgagcacagccccctccccgagcacacccccctccccagccctggccagccgtaggaggtgggagtccacatcacagccccagccctcaagaaaggaatctggcaaatcccctccctccctcactctctcagcccttcctctcactgggggacagttgtccagcaggttctcagccacctttggaaatctgcgtcttagtctgtcaccactctttggagtttgatagctaatttcttcatgtcttaaccgacacatcaatttagcatattaatacatcaaaaaacaaagtctttccgccctcttat

SEQ ID NO: 451908 - DNA, 567 bp, Homo sapiens
atttttaaagggataccaaaataatcaacatttattttagaaggtgactttcttcaatgagatgtcaatgtctactttctgttatatagtgctatkgtttcttttttcttttttttctaagtgagggtctcactctatcacccaggctggagtacagtggcatgatctcgggtcactgcaaccttcacctcccaggttcaagcaattctttcacctcagcctccagggtagctggaactacaggtgtgcatgcctcgctaagttttgcatttttagcagttgttggccaggctggtgtactgtttcttttattgactgagatctatatttacacagcatgaaagtctcagttgcattaagtacattcgcattgttatgcaaccatcaccattatctagttccagaattttgccgtcaccctaatagagcttgtatatatgtccccaccaaatcttatgttgaattgtaattcccagtgtttgaggtggggtctggtgagaggtgtttgcgtcatggggcagatccctcatggcatagtgttgtcctcgcagtagtgagttagttctc

SEQ ID NO: 451909 - DNA, 561 bp, Homo sapiens
gaggttccactttacagcctctagaatggctacagtgaaaatgactgacatctcaaatgttgacaaggatgtacaacaactggaagcctccattttggctgyggagagtgtaaaattgcacaactttggagcactgtttggcagattcttctcaagttaaatatatacctatccaataaactgacaatctcagtcctagctatttaaatccctgccccaacaaaaacttatgtccacaacaagacttgttttaaaaatgtttttagcagctttattcataatagttcgaaactggaaagaactcaaatgaccttcaacaggcgaatggataatatattcacacattgatatattactgaacaataaaaaagaataaactgctgattcacataaaaatatggataagcctgaaaaacattcttaggttaaaaaaagccagttacaaaggaatatatactgtatgatttcatttacatgaagtccaaacaaagatcaaactagtgtatagtgatagaaatcagaatagtggttggccatcatggatggaggagactgactgga

SEQ ID NO: 451910 - DNA, 561 bp, Homo sapiens
ggccttttctgctatatagaatctcctcaaacctgagtgttcgtattatggattatctagtatactccatagctatcaagtttgtgtgtgtatgtttctttctcaagcaagttatcttatttctccttatttcttcagacttatcctttcttttcttttcttttcttttttcttttttttttgagacrgagttgcactcttgttgcctaggctggagtgcaatggcatgatctcggctcatcacaacctctgcctcccgggttcaagtgattctcctgcctcagcctcccgagtagctgggattacgggtatgtgccaccacgtccagctaattttgtatttttagtagagacggggtttctccatgttggtcaggctagtctcgaactccacccgcctcagcctcccaaagtgctgggattacaggcatgagccaccgagcctggcccctaacctctcatttctaaggaaatgacaaattaagtcttttatgaaaatacagtgtagggtcatttaaaaatattttttgtaataggtgtctctgtacataaatctatttaa

SEQ ID NO: 451911 - DNA, 561 bp, Homo sapiens
ggccttttctgctatatagaatctcctcaaacctgagtgttcgtattatggattatctagtatactccatagctatcaagtttgtgtgtgtatgtttctttctcaagcaagttatcttatttctccttatttcttcagacttatcctttcttttcttttcttttcttttttcttttttttttgagacggagttgcactcttgttgcctaggctggagtgcaatggcatgatctcggctcatcacaacctctgcctcccgggttcaagtgattctcctgcctcagcctcccgagtagctgggattacgggtatgtgccaccacgtccagctaattttgtatttttagtagagacggggtttctccatgttggtcaggctagtctcgaactccacccgcctcagcctcccaaagtgctgggattacaggcatgagccaccgagcctggcccctaacctctcatttctaaggaaatgacaaattaagtcttttatgmaaatacagtgtagggtcatttaaaaatattttttgtaataggtgtctctgtacataaatctatttaa

SEQ ID NO: 451912 - DNA, 445 bp, Homo sapiens
aagaattttagaaataccattcttctatgaaataagtaagctcaatcaagatacatattatagtgcccatttaagaaagtctaataataatgcttgcactgcttaaagattaggttgataaattaattattgttaatcctacttgcataatcaacggacacctagcgatggagtcttaagtatagacacagaagttgaatacttttaagaacttttaaatttacatccgggttaarttttactttaaaattatgttgagtggttgtgattagtacatgtgtgattagaaccgtctttctcaggttattacatcatcatatagacacaggaaaaataatagaattaaaaataaagcaagaaaaataatgtaacactttattggcttcagataattattttgagattctaatcctaccaaaacattctgcttttcttaacttgatcc

SEQ ID NO: 451913 - DNA, 445 bp, Homo sapiens
aagaattttagaaataccattcttctatgaaataagtaagctcaatcaagatacatattatagtgcccatttaagaaagtctaataataatgcttgcactgcttaaagattaggttgataaattaattattgttaatcctacttgcataatcaacggacacctagcgatggagtcttaagtatagacacagaagttgaatacttttaagaacttttaaatttacatccgggttaagttttactttaaaattatgttgagtggttgtgattagtacatgtgtgattagaaccgtctttctcaggttattayatcatcatatagacacaggaaaaataatagaattaaaaataaagcaagaaaaataatgtaacactttattggcttcagataattattttgagattctaatcctaccaaaacattctgcttttcttaacttgatcc

SEQ ID NO: 451914 - DNA, 445 bp, Homo sapiens
aagaattttagaaataccattcttctatgaaataagtaagctcaatcaagatacatattatagtgcccatttaagaaagtctaataataatgcttgcactgcttaaagattaggttgataaattaattattgttaatcctacttgcataatcaacggacacctagcgatggagtcttaagtatagacacagaagttgaatacttttaagaacttttaaatttacatccgggttaagttttactttaaaattatgttgagtggttgtgattagtacatgtgtgattagaaccgtctttctcaggttattacatcaycatatagacacaggaaaaataatagaattaaaaataaagcaagaaaaataatgtaacactttattggcttcagataattattttgagattctaatcctaccaaaacattctgcttttcttaacttgatcc

SEQ ID NO: 451915 - DNA, 445 bp, Homo sapiens
aagaattttagaaataccattcttctatgaaataagtaagctcaatcaagatacatattatagtgcccatttaagaaagtctaataataatgcttgcactgcttaaagattaggttgataaattaattattgttaatcctacttgcataatcaacggacacctagcgatggagtcttaagtatagacacagaagttgaatacttttaagaacttttaaatttacatccgggttaagttttactttaaaattatgttgagtggttgtgattagtacatgtgtgattagaaccgtctttctcaggttattacatcatcatatagacacaggaaaaataatagaattaaaaataaagcaagaaaaataatgtracactttattggcttcagataattattttgagattctaatcctaccaaaacattctgcttttcttaacttgatcc

SEQ ID NO: 451916 - DNA, 545 bp, Homo sapiens
tttcttaacttgatcctacttttgtttgtttgttttaataaaggatgaaccaatatcctgagaaattttcaaatagggctggttataacactaagaacctagatctcactatgttttagaaaaattgtaaagtatttcaaataatcagtaaagtttcagctctgcaccattgtgtctttgcaatatggggaaagtcacttcacttctctccctctctcgtttttggcacatgtaaggcagagaaaataatatctactccagctatcccacatgttattataaaatataataagagatagaaaatcactttataatgttcaaagtattataaaagtaagccatgattatatgtgggattaacagcagtttgttatttaccatttaatgtattyctaatgtacatttttgccatatttaaaaatgtttacatttcgatttttaagtgaaagagtaacggtatgacattatgccatgttatatctgatgccattatgtcaaacaaacaaacaaaagcattttaaactatttggaatcttaccaaaata

SEQ ID NO: 451917 - DNA, 521 bp, Homo sapiens
ggtattttctctcactttgcgtcattaccaaagtggctatcaagattccctcccctaccttctttttcttttttcaatgtttaagagctggagttaatttcttgactcctttggtaacacatgccgatatataccactcaaggcctgttggattaaactgttaaatttgtcatctagctaatgttttctcagaaccagacaaattaaacagagtcaattgttgaaattatttcaaaagataaacaatcatagaatggaaataaactacagaaagtagggaacaggagtaactaagtctcctagaaaacatttgcagcagatgttaagtatccagtctcgttgttataaatgaatttcaaagaatctcatgaggagcagctttacaaaattttactgcactaacaaatggcagccaacctctgtagtaaacacaaaatactgtamcatcctttgtatctccttaaattaagccaatttctgcttacacagaaaatctgtctgtggaaaacactgcttagaat

SEQ ID NO: 451918 - DNA, 643 bp, Homo sapiens
gcacccagctgagaaggctttttattataggttgttcttattgttttatttatttggtttacttgttggttttcaaggtaagtttgacatataaggtggtataatgtttaaaggtcaagttatagagatagctagattgaagttcaaatccagagccaagttacttagactctctaaggacttgttttttcccttataaaattaaaataaagtggatagccacttcataggtttgtaataagaattaatatgatcatgatgtcacagagttgcaaagagatactgaaacttggctctgccaaaaaatattagctattgccattatgattgttctccttaatacctaaggcatttgctgacartcaggttactcatcatgtccttccaggaaaaaaactttaagaatgttgaaaacttaggaactacttttaaaatttaattttcagacctgacataacacagctgaggaagagaggtggtagctgattggggatagatgtagagatcattaatggtataagagtgtgagaatgtgaagcaggataggatatgatattactcatacagatcacaaatacatgtcaaaattatatttatcattcatttaagtaaaattcaacattgttttcttcaaagaagaaat

SEQ ID NO: 451919 - DNA, 513 bp, Homo sapiens
ttgctttgtggagctcagtgtcatccttggagaacatgggcaataaaaagcatttcttctgcaccagtaagacaaaaacaractgactacttctcacataaaccttggagggcttccctcagtggggttagtgatcagcaaatcatgtcaaataaccccttttgttatttttgacataatagtgttcctagcagacagtactcaagaattcccagattcttagctgtaacataaatttaatatactctcttttattaaaagtcaagctgtttattcacagtagctcttaggtctacgtttcattttacacatatatgtggatgtaatagctttttccttagaacttttaaaaaatagaattcagtaaaagtcctatatttgtattttctatgtgtcaagaacagataagcatcattaatgtgaaccaaatttcaattgaggagctgaaattaggaagaattgaaaaacacctgaaataaatcttcaagtaataaaggggaaagtttactttag

SEQ ID NO: 451920 - DNA, 586 bp, Homo sapiens
aattttcaggttaaaaccattttgttagtaatatgtaagtatatcaattaaccattaaataatttaccaaattattccattacctaatccatattgctccttcttgtccacaagaatatagtaaggtacattgtcaaatacatacctctgactttagtgggcatttaatgtattattagaggatcctgatatctgtctttcttaaagaaattaaactcatccctagtgattatactttcttcatctaacactataatattaataacatttgaaaaaataatgtctaataattaacactagatttacagagtatttttagacaattttctaaaattatctgaaaaatttgaccagaatcattgtaaaattcacatctgagcttatgaaagcccactttattccactctaaaagaacaaaattttgtacttttaattttatcttttaaaatgttttaacataaaggtagtgggagacgttactaaaggaagcttagatagtaacgtatttgtygtctcagttaacacaaagaccatagatggggcagatctgcaggatgcaaaaactttcctttttctcacctcatag

SEQ ID NO: 451921 - DNA, 569 bp, Homo sapiens
gaatgcaaagttgggaggagatgagcactgtgtgctcctatgaggagttccatctggctcaaacataaacactattaacatcactttgctcwagacatgtgattctctttcataatgcttcttgcattaactgcaatataaaagttacaatccttattatttttgaaaaactcaatttgtataggactcttgataatattttaatatgtatacattttataattttattgatattttttcttcttttatacttttttttgtttatttatatagtttgttttcacattaaatgggagaaatactgacattgttcaattcacacccagggaaattctgtgtgaatgatatcatattatatttcttttaatgctctaaacaatgttgtgaggtaagtgttatctctgatttgcatatgaagaaacatattccgagattaaaaaattgcccagtttcacacaaggaataaattggagcacaggagttctatatagatagacctgtatgacttcacagagtgaaatggacagataaacaattcactttccaggagaaatcacaggacaatggat

SEQ ID NO: 451922 - DNA, 540 bp, Homo sapiens
cagcaaacaaacaggaaaaggagatctattcttccattctcttgcctatgtttctctagtacctcccaatagcagwacgtagcaggatcccacttgaaggaacttggaaaacgtagcttgctgatccccatcacggcatcatagcaaatttatttcagagaaatgtggctaaagatcaagattattagtaaatcaatttttttacctaatttttaatctgtattgatttcttataacataaatatctgtggttacagagacctcagtattttctttttcttctgtagcagcatttcaatcttttttgaagttctacctctctttcactgctagttcacaccatgtgagagcaatggacctaatcatcatgggcagtggtcataatatgtctcaacctgcccaaaataaagatgctaccccattaaccatatgttttattttgtaatacgatcatgatccaacctagtctaatgagaaacttaactagaaattttgttggaattattgaggaaaacagtgttcattttctgaaaaagtagc

SEQ ID NO: 451923 - DNA, 540 bp, Homo sapiens
cagcaaacaaacaggaaaaggagatctattcttccattctcttgcctatgtttctctagtacctcccaatagcagtacgtagcaggatcccacttgaaggaacttggaaaacgtagcttgctgatccccatcacggcatcatagcaaatttatttcagagaaatgtggctaaagatcaagattattagtaaatcaatttttttacctaatttttaatctgtattgatttcttataacataaatatctgtggttacagagacctcagtattttctttttcttctgtagcagcatttcaatcttttttgaagttctacctctctttcactkctagttcacaccatgtgagagcaatggacctaatcatcatgggcagtggtcataatatgtctcaacctgcccaaaataaagatgctaccccattaaccatatgttttattttgtaatacgatcatgatccaacctagtctaatgagaaacttaactagaaattttgttggaattattgaggaaaacagtgttcattttctgaaaaagtagc

SEQ ID NO: 451924 - DNA, 579 bp, Homo sapiens
ctcaatcatctttcctttgtttgcaatcaacattttatatgtattcacttattatgtatcactcctttgattcctcaaaatttatttagggctatataaatattttgctactactggaattagcaaaactttaaggttaaattttcaaacatgttattgccctcatcatactgtagcaagaattagtaatcaatgatacataaaccctatttatttatccraattattccatttcacatcctcacaaaggacactattctgtcaccatttaaccctgttccccaaaatctcctcataaatgcagtttcaaaaacagcaaatagataaattggactttattaaaattaaatttttttttttggtgaaatggagtcttgctctgttgcccaggctggagtcagtggtgccatcttggttcactgcaacctctgcctcctgggttcaagcaattctcctgtctcagtctcccaagtagctgggactacaggcacgcaccaccacgcccggctaatttttgtattattagaagagatggggtttcaccatattggccaggctggtctcgaactcctgaccttg

SEQ ID NO: 451925 - DNA, 579 bp, Homo sapiens
ctcaatcatctttcctttgtttgcaatcaacattttatatgtattcacttattatgtatcactcctttgattcctcaaaatttatttagggctatataaatattttgctactactggaattagcaaaactttaaggttaaattttcaaacatgttattgccctcatcatactgtagcaagaattagtaatcaatgatacataaaccctatttatttatccaaattattccatttcacatcctcacaaaggacactattctgtcaccatttaaccctkttccccaaaatctcctcataaatgcagtttcaaaaacagcaaatagataaattggactttattaaaattaaatttttttttttggtgaaatggagtcttgctctgttgcccaggctggagtcagtggtgccatcttggttcactgcaacctctgcctcctgggttcaagcaattctcctgtctcagtctcccaagtagctgggactacaggcacgcaccaccacgcccggctaatttttgtattattagaagagatggggtttcaccatattggccaggctggtctcgaactcctgaccttg

SEQ ID NO: 451926 - DNA, 579 bp, Homo sapiens
ctcaatcatctttcctttgtttgcaatcaacattttatatgtattcacttattatgtatcactcctttgattcctcaaaatttatttagggctatataaatattttgctactactggaattagcaaaactttaaggttaaattttcaaacatgttattgccctcatcatactgtagcaagaattagtaatcaatgatacataaaccctatttatttatccaaattattccatttcacatcctcacaaaggacactattctgtcaccatttaaccctgktccccaaaatctcctcataaatgcagtttcaaaaacagcaaatagataaattggactttattaaaattaaatttttttttttggtgaaatggagtcttgctctgttgcccaggctggagtcagtggtgccatcttggttcactgcaacctctgcctcctgggttcaagcaattctcctgtctcagtctcccaagtagctgggactacaggcacgcaccaccacgcccggctaatttttgtattattagaagagatggggtttcaccatattggccaggctggtctcgaactcctgaccttg

SEQ ID NO: 451927 - DNA, 579 bp, Homo sapiens
ctcaatcatctttcctttgtttgcaatcaacattttatatgtattcacttattatgtatcactcctttgattcctcaaaatttatttagggctatataaatattttgctactactggaattagcaaaactttaaggttaaattttcaaacatgttattgccctcatcatactgtagcaagaattagtaatcaatgatacataaaccctatttatttatccaaattattccatttcacatcctcacaaaggacactattctgtcaccatttaaccctgttccccaaaatctcctcataaatgcagtttcaaaaacagcaaatagataaattggactttattaaaattaaatttttttttttggtgaaatggagtcttgctctgttgcccaggctggagtcagtggtgccatcttggttcactgcaacctctgcctcctgggttcaagcrattctcctgtctcagtctcccaagtagctgggactacaggcacgcaccaccacgcccggctaatttttgtattattagaagagatggggtttcaccatattggccaggctggtctcgaactcctgaccttg

SEQ ID NO: 451928 - DNA, 565 bp, Homo sapiens
ctacaagctccatgcaagtctgaaactcagcagggcagtcataagatcttaaagctccaaaattgtttcctttgactccatgtcttatatccaggccacactgatgcagtgggtgggctcccaagaccttggacagctcagcccatgtggctttgcaaggctcagctcccatggctgttctcaagggctggcgttgagtgcctatggcattyccagacacatgatgcaagttgtcagtgtatctaccattctggggtctggagggcagtggctttcttctcatggctctactaggcagtgccccattggggactccatgtgggggctccaaccccacatttcccctccacacatccctagtagaggttctcgatgagggcttcacccctgcagcaaacttctgcctggacttccaggcattttcatacatcctctaaaatgtaggtgaaggctcccaagcatcaattcttgccctctgtgcacctgcaggcttaacaccacatggaagccaccaagacttacagcttgtgccctctggagcagcaacctgggacatatctggggc

SEQ ID NO: 451929 - DNA, 645 bp, Homo sapiens
tggggattctgggagatacaattcaagttgagatttgcctggggacacagccataccatatcacccctcaccaataggggttgtcagacatcctatacaggagcgttcctattggcatcaggttggtgcccctaaaggtcagagatcccagaggaaggagcaggcacccatctttactgttctccagcctccttgagtgacatctccaggtgcaagagcgaaccacatgaatagggcctgaagtgaacccccagtaaaccacagcagccttacagaagagggacctgactattgaaagaaaaacaaacaaaaagaaagcaacaacaacagcatcaacaacagcaaaaaaagtttccacaaaaacctcrtccaagagtcagcaacctcaaagatcaaaaatagacaaactcatgaagatgagaaagaatcaacaaaaaaacacagaaaacccaaaaggccagagtgcctcttctccaaatgattgcaacacctctccagcaacggcgcagaactggatggaggatgagatagacgaattgacagaagtaggcttcagaaagtgggtaataacaaactttgttgaggtaagagaatgttctaacccaatgcaaagaagctaagaacgttgataaaaggttagaggag

SEQ ID NO: 451930 - DNA, 645 bp, Homo sapiens
tggggattctgggagatacaattcaagttgagatttgcctggggacacagccataccatatcacccctcaccaataggggttgtcagacatcctatacaggagcgttcctattggcatcaggttggtgcccctaaaggtcagagatcccagaggaaggagcaggcacccatctttactgttctccagcctccttgagtgacatctccaggtgcaagagcgaaccacatgaatagggcctgaagtgaacccccagtaaaccacagcagccttacagaagagggacctgactattgaaagaaaaacaaacaaaaagaaagcaacaacaacagcatcaacaacagcaaaaaaagtttccacaaaaacctcgtccaagagtcagcaacctcaaagatcaaaaatagacaaactcatgaagatgagaaagaatcaacaaaaaaacacagaaaacccaaaaggccagagtgcctcttctccaaatgattgcaacacctctccagcaacrgcgcagaactggatggaggatgagatagacgaattgacagaagtaggcttcagaaagtgggtaataacaaactttgttgaggtaagagaatgttctaacccaatgcaaagaagctaagaacgttgataaaaggttagaggag

SEQ ID NO: 451931 - DNA, 645 bp, Homo sapiens
tggggattctgggagatacaattcaagttgagatttgcctggggacacagccataccatatcacccctcaccaataggggttgtcagacatcctatacaggagcgttcctattggcatcaggttggtgcccctaaaggtcagagatcccagaggaaggagcaggcacccatctttactgttctccagcctccttgagtgacatctccaggtgcaagagcgaaccacatgaatagggcctgaagtgaacccccagtaaaccacagcagccttacagaagagggacctgactattgaaagaaaaacaaacaaaaagaaagcaacaacaacagcatcaacaacagcaaaaaaagtttccacaaaaacctcgtccaagagtcagcaacctcaaagatcaaaaatagacaaactcatgaagatgagaaagaatcaacaaaaaaacacagaaaacccaaaaggccagagtgcctcttctccaaatgattgcaacacctctccagcaacggcgcagaactggatggaggatgagatagacgaaytgacagaagtaggcttcagaaagtgggtaataacaaactttgttgaggtaagagaatgttctaacccaatgcaaagaagctaagaacgttgataaaaggttagaggag

SEQ ID NO: 451932 - DNA, 551 bp, Homo sapiens
gaaagtgggtaactggggtttataatttaaaaatattaaatcttttgaggtaacaatttttttgtatataatgtaaaagaagaaaatattttaagcaacacttgccttttttccttttgaggtttcagaatcctcatcttcatccacactgagcagatttgtcccactacacagaaaataaggggaaaaaaacataagtagcaatcacaatccttatattaaattctgaggttttatcctctatgttcacctaattcagggaatcagcaaactttttctgtaaagggccaaaccayagtctttgcaggccatatggtctctgtagcagctactcatatgttgtatgaaaacagccataaacaatacatgtggctatgttccaataaaaattattaactgaattaggtggcacgcaagattagcccatggatcatagtttgttgaaccctacaataaatgaacacataattctgtttatttagttatggattttatatattctcattcatttttcctttttgtcttagattgaaaattaagggtagaaagat

SEQ ID NO: 451933 - DNA, 621 bp, Homo sapiens
tataataaagtgttgaatatctcacataatttatggaacacagcacacagtagagtacaatatcagttgttaacggtggtggtgaagtggctgactgaaagcagcagcttactgcctcctccaacatcatgatagagtgagtatattgctagcttaggaaaatatcaaaatttaacagtcaaagtatgatttctactcaatgtgtattgcttttgcgccatcatgaagtcaaraaaatcttaagttaagccattgtaagtcaggcaccatctgtatttattttcctaaattctacccttccaagacatcccaggaagagctgcccttgtccaccatggatcacagctcctgtcaacaagccctccccacacagcctgctgtgtgtccacattccagtaccagcttcttcatgcccctctccccacccccaccatatcattcagttgtagagatggtagcagtcccattattatgagaaccagattattgctgtattgcttgtaggttccttgtaccccagccacacctttgtaaatatagtcagccctccatatccaggtattctacatccacaattcaaccaaacatggatcaaaaatattccaaaaagtggacagttgc

SEQ ID NO: 451934 - DNA, 462 bp, Homo sapiens
aaggagaaaaagtactgtaatttttttttcacccacccagaaaaagagtatttgtgttctcttctttggagacaaagagtttgactggttggcctctagaagtatttttttcctcattcaattattctaaatttcttttggtacacaacagcgataatttccacattagtctttagctaatttttaagatattaacagcttatcatattcattcaagaattatctaagacttctgtaagatttcctagttctctttgcacatctgcccctagtctgattgtgagcaggcacagggccttgagtaccacaatgtcaatgattacatggctttggtcctggggacagctataccttacaggaaaccaaaaggagtggaaacctctagactctgacctcacttgaaaccatcwgattatctagtactgtggctctcaacactctctgtgcatcaaagtcacctgg

SEQ ID NO: 451935 - DNA, 545 bp, Homo sapiens
acttttgggcacatgtactttaccccagacattatgaacacaaattctactgtcctgtttggatccttgacctttcccctagtcttgtgagtttggctgggttccccattttcgctgggattcctctgtctggacttttatacctccccctatcttctctcacaataccagcaacaacaggaaaggattaatcactttgctttcctatacagcaggtgcaytggaaacaagctgatctgtcctgtgaaactgacaggtcagtgtgttaatgtactccgaagaacttttaaaatctacatttttaggtagcatgtacggaattaattttctgattgattctgtaagtttgaaattctatggaacaggcttcttcacacctagagaaaaatgtatgtgtgttgtccagtaaaatgaatcttactaagatgaaaatcaccaatagcaaatactgtagcacagattttttttttttgcaatagaaagcaaacaaaaagtgaaagattcttataattattctgtgacacatatttacatgtaaattcaaa

SEQ ID NO: 451936 - DNA, 545 bp, Homo sapiens
acttttgggcacatgtactttaccccagacattatgaacacaaattctactgtcctgtttggatccttgacctttcccctagtcttgtgagtttggctgggttccccattttcgctgggattcctctgtctggacttttatacctccccctatcttctctcacaataccagcaacaacaggaaaggattaatcactttgctttcctatacagcaggtgcattggaaacaagctgatctgtcctgtgaaactgacaggtcagtgtgttaatgtactccgaagaacttttaaaatctacatttttaggtagcatgtayggaattaattttctgattgattctgtaagtttgaaattctatggaacaggcttcttcacacctagagaaaaatgtatgtgtgttgtccagtaaaatgaatcttactaagatgaaaatcaccaatagcaaatactgtagcacagattttttttttttgcaatagaaagcaaacaaaaagtgaaagattcttataattattctgtgacacatatttacatgtaaattcaaa

SEQ ID NO: 451937 - DNA, 653 bp, Homo sapiens
attataggtggtatttctacattctaaaaagctgagaacaaataaggtagcattttaataggaaaaaagattttaacagtaaacctacacaatgactttaagtggaaggtcattgaaaaccttccacttaatcctcatgcattttgtctatcactaactgtgtgattgggtaataatttagctgctctgagccacagttactcaggctataaaaaagtaaagtttgaactaattaatcttccaagcctttttaaacattgcaacatcatgatttttcaatccttcttgaactatttctacaccaatgtgtaataaggagttagctcaacaggctttggctgctcaaactgcacaatccaaaaaaaggaatggctcttgacctggtcctgggagagaacttctgagtccttgcaatatcctgcctgataagaatgcgtttgcgtgcctcataccttgagccattctgtattggagccattgcatgcctccagcctttagggggctggagattgagtagctaaggtcaatcacatgggcactacatatctatgtgactgacccccccaaaaaagtcctggatactaagccttaagggaacttctctggttcacaatactcyacacatattgtcacaggtcattactgagcgaatt

SEQ ID NO: 451938 - DNA, 534 bp, Homo sapiens
caagtgatcattattcattaccgaaaaataagatctctgacccccattccctgggagaatggatgatttctcctagctcaaggaaaattacttgaagagtctggtatcaggtcctgccagacgacactacagtaaagtttacctgtgactagttctgcatacacatccagagtttcaratcaacctcacattgccttaccatccaatagaagctgatagccaaggactgcctgatacttgagaagtctctaatgtgaatcagcaatgaaaaaagaaatagaaagaatttgagataaaaaatatgcagaaggggccagtgcagtggttcacagctgtaatcccagcacttatggaggctgaggtgggcggatcacctgaggtcagaagttcaagaccagtctggccaacatggtgaaaccctgtttctactaaaagtacaacaattagctgagtgtggtagcgtgtgcctgtaacccctgctacttgggaggctaaggcagagaatcactttaacaaaggaggaggaggttgcag

SEQ ID NO: 451939 - DNA, 386 bp, Homo sapiens
catggtgaaaccctgtttctactaaaagtacaacaattagctgagtgtggtagcgtgtgcctgtaacccctgctacttgggaggctaaggcagagaatcactttaacaaaggaggaggaggttgcagtgagtccagattgcaccactgcactccatcctgggtgacaaagcgagactccatcttggaaaaaaaaatgcagaaggaataaaacattcaagaattttttaaattcttagaaaaaaggccagacatggtggctcatgcctgtaatcctagcactttgggacaaggtgggtggatcacttgagcccagraatttgagaccagccttggcaacatggtgaaaccatgtctctacaaaaaaatacaaaaattagttggtgtg

SEQ ID NO: 451940 - DNA, 459 bp, Homo sapiens
atcgttgacttctcgtagaacattgaaatctgcatacacctttcttttttttttttttttagatgaagttttgctcttattacccaggctggagtacaatgccgtgatctcagctcactgcaacctctgcctcccgggctcaagcgattctcctacttcagcctcccaagttgttgctgggattgaaagtgcccatcaccaagcccagctaatttgttgtatttttagtagagatggggtttcgccatgttggccaggctggtcttgaactcctgacctgaggtgatcyacccacttccacctcccaaagtgctgggattacaggcatgagccaccacgcccagcctatatacaccttttaatagcagaggtctaatctttggtgtgctcccagaaggtggacatttccaaatttgagcaatgtttatagaatagatgaattagatagctgtaacatct

SEQ ID NO: 451941 - DNA, 618 bp, Homo sapiens
ttaaaaaaggacaaagaagggcattacataatgataaaggattcaattcaaaagaagacttaactatcctaagcatacatgcacccagcattggagcacccagattcataaagcaagtacttctagaaatgtgaaaagatttagacagccacacaataataatgcgggacttcaacaccccactgacagccttagacaggtcattgaggcagaaaactaataaggaagttctggacttaaatttgacacttgaccaattggacctaatagacatataattaaaagccraaactataccagtcatactcttggaccacagtagaataaaaatagaaatcactaccaagaagatctctcaaaaccacactacctggaaattaaagaactggcttctgaatgactttggataaacaacaaaactaaggcagaaatccaaaaattacttgaaataaatgaaaacagagcacaacatatcataatatctagaatacaacaaaagcacagttaaagaaaatttatagtcctaacacttagaaagatcttaaatcaatgacctaacaacacacctagaaaaactagaaaaacaagaacaaaccccaaagctagaagaagaaagga

SEQ ID NO: 451942 - DNA, 540 bp, Homo sapiens
gttatgacacattttggatggtaatctgcattactcaaagtctactaatttaaatgtgaatctcatctaaaaaaacagcttcacaataacatccagacatgtttgattgaatatttgtatatactatgacctagccaagttgacacataaacttaaccaatcgtgttagccattaaggaaatgcaaattagactcaaaatgagatatcactacacatcttttacaaggctaaatttttttaaaaaattatatattacactaaatgctggcaaaaatgkacagaatctggagaatttctacattgctggtgtgaatgaaaattgacaaactcactcttgcaaagagtataacggttattacaaaatcacacatgcacagtttatataatccagtgattgcacagttgtgcatttatgccagatgaataaaagcttatgcttacacagtaacttgtgcatgagtattcatagcagctttgttcataatagccagtgactaaaaacaaccagatgttcttcagtgagttcctttttaaactgt

SEQ ID NO: 451943 - DNA, 590 bp, Homo sapiens
tctatttattaattattctttattgccaaattagtattgacacagagataaaaattagtttaatcacagagactatactcttttctgtcaaaccaccttatataaacctaaagaatatttgcagagaaaacagatcatctaaaaataatcaaaagctccatgggatgttattactcaacactttttgatccaagaatyaaagagatgcttctgaaaactttcttttttttaaaaaaaaaaggaccatacttaaattccaagtagatagaaatttttcaatccacaagctcaggatgcaatagcatcacaaagataaaatattaaaacataaatttccataagccagctcccacctgcagaattttaagaatcccttccccacccataactctcattttgacaaccttaataaggtgccaaggaaggtcaattccagtaccaagttaatttggtttaatgttatatttgtaccatgtaagttcattggttaatagaaatgaaactacatccagagtggcaagacccatgatttcaaatgcagtagctgattaaagatctttatcctaccctatttctttctaactatattc

SEQ ID NO: 451944 - DNA, 578 bp, Homo sapiens
ttattttaatttttttgaatgttttaatatctgttttgtgacttaacatatggtctatccttcaaaatgatctatgtactgaggaaaagaatgtgtattctgcagctcttgaatgaaatattctgtacatatctactagatccatttgttccatagtgcagattaaatctaatgtttgttgattttctgtctggaagttctgtccaatgctgaaaatgggatgttgaagtctccagctattattgtattagcacctatctctctttagctctaataatatttttttatatatctgggtgctccagttttgggtgcatatacatagttattgttatatcttcttgctgaattgacctgcttatcataatatagtgatgttctttgtctttttttatagtttttgtcccgtaatctattttttctaagtatagaaactcctgcttttttgtggtttccattggcatggaatatctttttccatccctttatttttagtctgtgtgtgtctttataggtgaagtgagtttcttgtatgcaacagatcaattaatyttgtttttccattcatccagccagtc

SEQ ID NO: 451945 - DNA, 583 bp, Homo sapiens
cttcaggaaaatatcttagcataattaaaattatataactttgcaagcactgaataatgtatgccagtgactagaccatttgtataacttgatatagactaygaatttctgtaagaagttatgaaacaagtttgtaaatatccatatatagcaagtacaagtggtcagattaaaatttttgatgtaaagctacatgaggctaatggtccccaacaacatacattaaatagtaaaatgccaccacagactgctacaagcctgatggcagaaatggtttttccatttcatttcctgatctaacaatcctgagttatataacatgtttaaaatgaatgaatttgtctgcttgatgaatttcccagtcttcagttttaaagaggaaatggaaaagactgtggttgctgcattaaaaaaaagtttgtatgtgtagcttttcacatgcctcatctttattcaatccaaaataaactttgaccctctgatactgtaagtggctccttggggaaggacttctgcaccaaaccagaacataattgcaacatgtaaatgaatgctcttaggccctttcaaaaccatagtatcg

SEQ ID NO: 451946 - DNA, 583 bp, Homo sapiens
cttcaggaaaatatcttagcataattaaaattatataactttgcaagcactgaataatgtatgccagtgactagaccatttgtataacttgatatagactacgaatttctgtaagaagttatgaaacaagtttgtaaatatccatatatagcaagtacaagtggtcagattaaaatttttgatgtaaagctacakgaggctaatggtccccaacaacatacattaaatagtaaaatgccaccacagactgctacaagcctgatggcagaaatggtttttccatttcatttcctgatctaacaatcctgagttatataacatgtttaaaatgaatgaatttgtctgcttgatgaatttcccagtcttcagttttaaagaggaaatggaaaagactgtggttgctgcattaaaaaaaagtttgtatgtgtagcttttcacatgcctcatctttattcaatccaaaataaactttgaccctctgatactgtaagtggctccttggggaaggacttctgcaccaaaccagaacataattgcaacatgtaaatgaatgctcttaggccctttcaaaaccatagtatcg

SEQ ID NO: 451947 - DNA, 635 bp, Homo sapiens
ggtatgccctgcaagtaacgaaaaaagtcatcattcttggaacatactggaatggaacaaagtacaattgcttactttcctctcaacatgtgtgatccctttaagcacttgagtttttgcttatgttattatgtatgccttaaagacctacttacttcagcttatgccctatacctacccaaatttttcttcagatctcaactcatttttaaatcctagccacaagaacatgaagcaatatctctctcctactaatttccgtagaaatttcttcatgtaaaattcatttaccaattaattgtatattgcctcaggacatttcttatactgktctaatctgttacttaaatactttattgctgttctaactgccttatgacatgttctatttagccccaggattataaattctttgaaaagagactcttaaaaatattactagtgtagcacttaacacattgaatggttacactcgattaatatttagcaatttgattttgcatcactgataaattatataatctgaattcaaaaattgattctattttctgagtacctactatgtgctaggaactgtgttgatgttttgtgtttctcattactaatccttataacaatcctgcaaggttattatt

SEQ ID NO: 451948 - DNA, 599 bp, Homo sapiens
ctcccaaagtgctgggattacaggcgtgagccactgtgcctggcctaattaacttttttaaggtatgcataaggcacagcaatcactgagtaaatgttagatattattattactaggataatatatacattaaggtaaatctattcaatagtccaatacttctaaaagataataatccctggtcagttaatgttggaaatcctgcatcttacattccttttttaatttattcattcactcactcaataaatattataaagcatcaagccctcctggagtttgcagtctagataaaaagacatacattaacagataaatacataattacaaattttacttagtgacatggaggaaaagaaaaggcaaccaagaaagaggttaatatggtggacctaatttatattgtgatgtcagagaaggcttttctgaagaagtatttagttagacctaaaagattaatgggagctagaaaaaagaagaaaataaaatttcagaagataggaataaatgaatgaggccatgagtamaacaaaacaaaactaataaaagacacagtcattttgaggaattaaaagaaaaactaatagagcaaggggaaa

SEQ ID NO: 451949 - DNA, 589 bp, Homo sapiens
acaaaaacaaagagaagctatgagaacaaggagggagaagtatctgcttactggtacatttcatttaatttctggtgttgagaactagtagaaaaaaaaagtcttgtcaagttagcatttgtagcagttaggagagcccagttatactgagtatctagtaatttgaaggaggttaaacactcttgaattaaatttaccttgagaaatgatcattatcagtatttctgcaatccaaagaagttttcctcaactaccatgctgagatgttacatcatatttatattaagggagcatccccaagcatgggctccttactcgggaacgattcagcagaaccagggacccccagaaatgatgctgtgactcatgctaaccccacagttcctgcatagaactaaraggattcattcctttgttcattagtcagacaaatatttttgagacttggtttttttccctcccaacttcagggaagagatgaagaaaaaaagcaccagcatacttttaaaggatttttttttagcagaaacgagtcaattttgaattaaactggactgaaaaactttgagttaagaatctaatatcatat

SEQ ID NO: 451950 - DNA, 592 bp, Homo sapiens
ggagtgaaaacaccaaacaattcatttaaactctcaatttgagatttcttctctgtaaactcgtattaataataatgagctttaggaccaaattctctatggattataaaggtattagtagtcagtactaaaattaacaggactaaaaacaattattattaaaatcacttttacaattgttgccatcttggaaagcagataacacaacttttgagtgaattattaatgaagcagcaaaactttaatagagaataatttggaatctaaaaattcagagtaggaatgaactaaattgtgagaatatcacaaaggaaacactaaatgacatgaccttgaggtagcrtcatttggatattcttgactttgacattactaataaccacataagcttcataatctcaattacactctccaaccaacacttcctatctttagcccactcttcataggcctccacaactttaacatttatttgattcactttaacatttatttatttgaagctgctaatatgtggatcctaccacattttcattggttcatcccccttatggcctcgctttcctcctcagcctaaatacaagggtctaac

SEQ ID NO: 451951 - DNA, 294 bp, Homo sapiens
atatgaactttcataaacatcttttagtacatygcagagctctgacgttgatcctttccaaattgaaattttcaagtttttagataaggacacttgagaatgctgatcaaatttggaaatgatataatgttgggatttgagtggagtgaccaacttttcccaatttgcctgaaactttcccagtttggacactgaaaatcctgaatcctgggaaaccgctcagttccaggcaaactggatggttgggcaccgtagatttgagcagcaactagaaggaggagtaaaacattgcca

SEQ ID NO: 451952 - DNA, 461 bp, Homo sapiens
tgggatttgagtggagtgaccaacttttcccaatttgcctgaaactttcccagtttggacactgaaaatcctgaatcctgggaaaccgctcagttccaggcaaactggatggttgggcaccgtagatttgagcagcaactagaaggaggagtaaaacattgccaggcagcacaaagcactgactcatgagagcctagtgtgtttgagaaattacaagtggttcggggttgccagaccacgtattggtagacaagagcagttagccaagaatcaggttccataggatctttgtttttttaattgtgataaaatatatataacctaaattggacattttaacaacttttaagtgtrtagttcagctttaagtacattcacatcgttgtgcaaccatcaccaccatccaatcctgaccttttttcatctttccaaactaaaattctgtacccattaaacattaa

SEQ ID NO: 451953 - DNA, 585 bp, Homo sapiens
ttgttatttgagaataatttttggcaatttttctaaacatgagaggtatcacattttaccaaaaatactaacttattaactattttattcacaccactagcatatttttttgtcagtcactaagctaaatgattcagaggcaactttatttttatttattttttatttatttattcttcttgagacggagtctcgcactgttgcccaggctggagtgcagtggccacatcttggcttactgcaacctctgtctcccgggttaaaatgattttcctgcctcaacctcctgagtagctgggactacaggcatgcgccaccatgcctggctaatttatatatatacacacacatatatatatacacaaacacacacacacacacacacacayatatatatatatgtatatttagtaaagacgggatttcaccatgttggtcgggctggccttggtctccagacctcaagtgatccacccaccttggcctcccaaaattctgagattataggaatgagccaccacaccttgccttttttcttcttttttttttaagacaaggtctcactctgttgcccaggcttgagtg

SEQ ID NO: 451954 - DNA, 484 bp, Homo sapiens
cagtttgcttttattttaaatcacccaagagttggaggttactctgacagtaagctagcaggatgaaagaggaaagattaatgagtctttctctaaaaaccaacaaatcaggttctcatcagaaacacaatagtcttggttattgttaggtaagggagaatatttaacatgaaaaaaaataaaataaaggaaatcatgcagaagaaaacaaaaggtcaaagaactgtcttatcctttttaatgcttggggcctctgttgagcagggaaaaattgagagagacattattgtcrtctcttgcctctgcttgtcccattttggttgctttatctccacctataacttagaaagagcaattataaacaaatggggaccagcatgagcacctctctggcagcctctcagggtcaattgtctcctcccagcccctgcaccagcagagtgatgcatagcccttggatgtcggctggaggaaatgctaagga

SEQ ID NO: 451955 - DNA, 603 bp, Homo sapiens
actcacaattgtacaggtacaactatatgaggcaaacaaattcgtgaacaattgctttgctccaaatactttctgtcctccccattttgtttttcagttgctaatgactatcgttacttagtacatgatatgagttctaatgttactatggaagaggaaagtcacttccaagtgatgcttgcagaaccctgacacttccgtgtccccatgagcaatgctgcctatgaagacagtggaccaggtgagtctgccggaattctagggaaccccaaacaaaactgatgatccaatacattgttcaaagtacaagttaaaaaarttaaaatgtgtcttgaaaaaatctcctcatgtgttccatttttatcctaacataaaatcaaaagcatttaatggagagtaatgaaaagtaaagtataagttttatacttagcaaaagtgagaatagaaaaggaagaaaaattctcatcacctagcaaagcaccatgccatcgtaggcactcagtaaatatttattgaataaatgaatggggtttatatttacttctgtaaaatagaacacattccactaaagggtaactcttttgtgaaatatcttaccacagt

SEQ ID NO: 451956 - DNA, 549 bp, Homo sapiens
tgctatctcagaaattaaattctcttgggtgggatccaaaaggatttgctttaattatgaaagtattttcagaggcaaatagtcttaaagtgaagtttcaatggactgcaaacagattatctttagcatgaaacatcttaagaagatgaagtcatgagaagtacctgttcagcaaaaagtaaaaggagtccaaagaaaatatatacacatgagactgggcatggtggctcttgcctgtaatcccagcacttttggaggctgaggcaggtagatcgcttgaggtcaggagttcsagaccagcctggccaaaatggtgaaacctgcctctactaaaaatacaaaaattagctggtctttgtggcacgtacctgtaatcccaactacgggagaggctgaggcaggagaattgcttggaccctggaggtggaggttgttgcagtgagccgagagttcgccactgccctccaacctgagtgacagagtgagtgggacgccatctcaaaaaaagaaaaaaagaaaacatatgcacatgaaaaaatcatttaaaaa

SEQ ID NO: 451957 - DNA, 484 bp, Homo sapiens
gatgttattaactaaacgtaaaatcttagctgtctgaggagagaagtgaaaacatgatatgtgcaaaggacaatgaaaacaggagaatccatgaacatagtttccagcaggacttaaatatcattgaaatcaaggtgaaaaacaaaaataagaggtgctggtcattgtataggatgcatacaactgtggtaatggagaragttctggtaatgagaaggtttaaggtgtgaccctgggagtgagtgagtggcggcagtccaataggaaacattatcactggtggcagaggtcaaggaactgagaggctgtcatataggaaggatcacctatgagaatactaaaatcaccaagagttataacagtattaggttgagatgcaatgagcccttcaagtaaggaagaggagtgacccagagattagtaggtgattacaacaaggaggatggtggtaaaaggtagatgactggagattcaaagctaagac

SEQ ID NO: 451958 - DNA, 484 bp, Homo sapiens
gatgttattaactaaacgtaaaatcttagctgtctgaggagagaagtgaaaacatgatatgtgcaaaggacaatgaaaacaggagaatccatgaacatagtttccagcaggacttaaatatcattgaaatcaaggtgaaaaacaaaaataagaggtgctggtcattgtataggatgcatacaactgtggtaatggagaaagttctggtaatgagarggtttaaggtgtgaccctgggagtgagtgagtggcggcagtccaataggaaacattatcactggtggcagaggtcaaggaactgagaggctgtcatataggaaggatcacctatgagaatactaaaatcaccaagagttataacagtattaggttgagatgcaatgagcccttcaagtaaggaagaggagtgacccagagattagtaggtgattacaacaaggaggatggtggtaaaaggtagatgactggagattcaaagctaagac

SEQ ID NO: 451959 - DNA, 593 bp, Homo sapiens
gttaagttttttaacatttcactttgcaatctcagaagtcttcatttaaacacatccagaaacttggaagaagagtaacacaaaatttatttgcaatttgaataactatcagtatctcagaattatatttgatgaacagttttctcaataaatctaaatctttattaatatatataaatatatatgcctatatataagatatgcatatcttgaaatatttaatatcattaagatatcttattatctcaatacycatctctgttatatatatatattttttttttcactcagagtttcataagaatcatatttattttatttcgcatattgaatccaaagtttgttttggtttttttgctaaaactttatgtgcagctgtaaatgagattaacatggcaggctaacacattgtcatattgagtcccttcaggttattaaaaatgtcagcaagagatgaaagcaagtacaaccatgttttaagagaggttttgttaatggtggtactaccaggaggaaacaagaaaagatttcttcgtctttaatcttatcttcattttcagccttcatcttcaaatcttattgcatttgaaaga

SEQ ID NO: 451960 - DNA, 491 bp, Homo sapiens
aacacaaaatttatttgcaatttgaataactatcagtatctcagaattatatttgatgaacagttttctcaataaatctaaatctttattaatatatataaatatatatgcctatatataagatatgcatatcttgaaatatttaatatcattaagatatcttattatctcaatactcatctctgttatatatatatatwttttttttcactcagagtttcataagaatcatatttattttatttcgcatattgaatccaaagtttgttttggtttttttgctaaaactttatgtgcagctgtaaatgagattaacatggcaggctaacacattgtcatattgagtcccttcaggttattaaaaatgtcagcaagagatgaaagcaagtacaaccatgttttaagagaggttttgttaatggtggtactaccaggaggaaacaagaaaagatttcttcgtctttaatcttatcttcattttcagccttcat

SEQ ID NO: 451961 - DNA, 545 bp, Homo sapiens
ctgcatatgaacatatgtgcacacacatgcacaactttgcactctgctttcttttcccttatgcagctttctttatcatagattccttccttctttcttctttaatccgggaacagctttctaaatgacctcctcacagtatagcactgccaaggttagccaattgattcaaatactccccrttagctccacatagccagcagtcagagacaccatgagtcactttttccttctcaaacatcttttacacaatcacacaatcattgtaagcattttccataatgcttcctgttaggtagaaattgacctcttgaaactgatcagcagaagtagtcaatcttcagagctgcagttaattaactatgcctcacctttagttcaaatcatattttattatcaaaatatgataatattttaaaactaggggtagattttttctgacccccttatttcacagatgcagaaactatggctcattatggcccaaaaagataaaattagggatgatcaaaatggcacagtgaagaaggtgggacagaatccag

SEQ ID NO: 451962 - DNA, 618 bp, Homo sapiens
aattatggcctgttctactctagcctctacttgaatgaaattatggggtagtaagtcctatctttgcctaaacaaacaaaattctgactcttctattgctctatattatgactgtatctctttctagaattccaaacaagttccctctgctttagatattgtactcagccttgctaacatttccatcttcttgctattttcccatccctcttcctataaagtactgtgtccttgaggaatctaggtttgttctaaatccagtcccattcctgcttgcttgaaggttcaaggttctcgctcaaggttcacactctcagccytaagagctctccatttgcataggtagtggaaacttcttttatatcatagcttgacttccatcaaccaaaagcttaaaatgaaattctgtgctctgactgctccagtctgactcatttctctctagggttcctattgatctgggctttcacttcacaattcttctgtactgaattttcctgcctttgaattctgatgacttccctttttaaattttagtctatcactatgtatatataccacattttatttatccatgcatctgttgatggacatgtaagttgattccacaccatggct

SEQ ID NO: 451963 - DNA, 576 bp, Homo sapiens
ggctgggcatggtggcttacgcctgtaatcccagtactttcggaggttgaggtgggtggatcacctgaggtccggagttcgagactagcctggccaatatggtgaaaccccgtctctactaaaaatacaaaaattagccgggcatggtggcctatgcctgtaatcccagctactcaagaggttgaggcaggagaattgcttgaacccgggaggcggaggttgtagtgagctgagattgtgccattgtactccagtctgaatgacaagagmgaaactccatctcaaaaaaaaaaatatgtttattgtataaagcaaaatatacccacatagaatggcatagtgacatttacaggctttctggcatgtatttaaatgtatgtctatgcagagaaaaggaacccttatacactgttgttgaaaatgtaaattagtacagccactatggaaatctgtacagaggttcctcaaaaaactacaaatagaattaccatatgatccagtaaactcacttctggatatttacccaaaagatttaaaatcagtatattgaagagatatctgtactcccatgttcat

SEQ ID NO: 451964 - DNA, 576 bp, Homo sapiens
ggctgggcatggtggcttacgcctgtaatcccagtactttcggaggttgaggtgggtggatcacctgaggtccggagttcgagactagcctggccaatatggtgaaaccccgtctctactaaaaatacaaaaattagccgggcatggtggcctatgcctgtaatcccagctactcaagaggttgaggcaggagaattgcttgaacccgggaggcggaggttgtagtgagctgagattgtgccattgtactccagtctgaatgacaagagcgaaactccatctcaaaaaaaaaaatatgtktattgtataaagcaaaatatacccacatagaatggcatagtgacatttacaggctttctggcatgtatttaaatgtatgtctatgcagagaaaaggaacccttatacactgttgttgaaaatgtaaattagtacagccactatggaaatctgtacagaggttcctcaaaaaactacaaatagaattaccatatgatccagtaaactcacttctggatatttacccaaaagatttaaaatcagtatattgaagagatatctgtactcccatgttcat

SEQ ID NO: 451965 - DNA, 563 bp, Homo sapiens
tttccgctgcagtccacatttagaataaacatacatgcatctacaccgtagggtttcttcccaagctggaaaggccatagtagtaagttggcaattcagacttttttttttcccttttattgactagattccaaattgggggtagaggggagagataaaactcaaataccccaaatttgaaccagatgacaaaatgtcacccaaaccttttgcaaggcaaggctgaagggtgcaggtgtgtgtatcgggtgtcggttcttccctccttgggtattgacacagtttgcctcttccccgagattcagtgagtagctactgctgcacataggtacccagtccctaatgaaactcagctgcacgagtttcatggggctttaggatttgtaagcccatgattggrgttgaagccttccaggaaccgctgccctaatagaacagggaaggaaaactgatctatctctgcaggcctacttttcattttaatgagtggctctgaaggacgagcaggctgctaaacaatttatttttcagataatacgaagaacggactggaaatacattca

SEQ ID NO: 451966 - DNA, 660 bp, Homo sapiens
catctctgcatccccatgactgacagttcatactcactgtggcaaactgctggaggagacgcagggaatccgtcccttttccagctgaggattcagatctgacaggtccagtgaaccaggatcaccctttcctcctccctgatcaagtttttcagagaaactatgagagaacaaaaataaatctgtagaataatttttcagactccttctcaaaattgtaactaaactaaaacaaaagccaatcataaaaaagctaaacgtttgtttcattttggttgaattagaaggatttgtgttatgacctggataagaggctcttctatattttttcttttgacttaagacactattaaaatgagacttttaatattctatcctaagaarccttggacacatctataatttatattatgatttttgagaggtttcacctgaagggagtgtggagaccatcagcggtctgttgagctctccttgaaaatgctttccattactaatagatagaacctctttttcttattatttatacaagaccttctttgatttcctgcttgtgacactttggagtgaaaaactggtgactgcattaattaaaaacgaagatgagatggcttattttttttctatccagaaaatcctagccagagtccctgcaagtag

SEQ ID NO: 451967 - DNA, 660 bp, Homo sapiens
catctctgcatccccatgactgacagttcatactcactgtggcaaactgctggaggagacgcagggaatccgtcccttttccagctgaggattcagatctgacaggtccagtgaaccaggatcaccctttcctcctccctgatcaagtttttcagagaaactatgagagaacaaaaataaatctgtagaataatttttcagactccttctcaaaattgtaactaaactaaaacaaaagccaatcataaaaaagctaaacgtttgtttcattttggttgaattagaaggatttgtgttatgacctggataagaggctcttctatattttttcttttgacttaagacactattaaaatgagacttttaatattctatcctaagaaaccttggacacatctataatttatattatgatttttgagaggtttcacctgaagggagtgtggagaccatcagcgstctgttgagctctccttgaaaatgctttccattactaatagatagaacctctttttcttattatttatacaagaccttctttgatttcctgcttgtgacactttggagtgaaaaactggtgactgcattaattaaaaacgaagatgagatggcttattttttttctatccagaaaatcctagccagagtccctgcaagtag

SEQ ID NO: 451968 - DNA, 603 bp, Homo sapiens
acttcttccttcgctgaacttctgttgcccttcctgaatggtttagcacctggtcccacagcgtgtgccttcctagaagtgaaagaagagaatgtgcttaggtagatgcattgtctgtgttgtaaagggattaaaaacgtttcggactggtgtgttttgagctgagaatatgttttgcatgattgaaaatgaccactatcagattcccttcaataaaatgcaacagagagaatgtctaggtgactccagtgtgtattaaaactgtattgattttggtcattgttgtttagagaatggcagttttgggtttaaaagccactacggaaattawaatgtaggcattggaggtcccaatccggccttcactaagctgactacaatattctgtgtaatccatgtgtggtaacccaacgctgctccaggaaccctgaacctgacacctctcttccctgcctaattgctatgatgaattttcacacttgtaacgtaatacttggctcggtgccataacagagacccaaaggtctcaaagcggctcaattcctgaataactaaagaaattcatgagtgacccgaaggtgctgaacggcccttatggccagc

SEQ ID NO: 451969 - DNA, 543 bp, Homo sapiens
ggcagttatcaggggtgcagtcaatgtatgggtgatagacttactggtaaaacagaacaaatttaacatcaataataagaaaacattaaaacagtaaataccagaagaatacttcaccctctgcagagaactttgaaggggaatatggagacctggtggggcagagactgctaactgtctctcagtattcattctacccttcttcctttcagtgacagaaacttttatctgggtacatggcctcccagctgaagactgcatttcacaggcttgctgggacttgggtgtggccatatgactgagtgcagtctagtggaatgggagagaaatgatgtgtgcaacttcaagtcattctcttcaagatgaagctgctcaggtgggtgctccrtttgttccctcagattggaatgtgggtgaggtgttggatgtcagcctaggcagttaggagattagtacccaaggagatggtggggctgaacactaaagggccatgggtccctgggtcactctgtgctgccgagtttcctagcaagtcttgattgc

SEQ ID NO: 451970 - DNA, 534 bp, Homo sapiens
aaataaagtaagtaggcctttagaaaattgtagatttgagaagaaagaatagatgtattkctttaaattcctgcttcacatggtgtcttcaccgtaagtgaataactgtgtaactgtacttcattaaggatgagttgatggttatactattttaacaaagagttatacttttgtagagaaagcttaatcaagggtgtctttaatctgtcactcatttcagttatctgaacctgatgtagtacctgtatctccacttgcctgcattacaccaaaactggccttcatcaaacaggatgtgctccatttccaaagctccaaaagcacaaaacacaaaactcagacatatctgagaaaaatccagcaaaatcctagccaatataaagatttggaagactgcacactacaagaaaaaacaaaaaatgaatatccttcaaaccacaggtcaatagcttcatctacatgcatctgcaaaacagcagctcattttccccctgaacagcatttagtggccttatttcatgctctactctttcc

SEQ ID NO: 451971 - DNA, 534 bp, Homo sapiens
aaataaagtaagtaggcctttagaaaattgtagatttgagaagaaagaatagatgtattgctttaaattcctgcttcacatggtgtcttcaccgtaagtgaataactgtgtaactgtacttcattaaggatgagttgatggttatactattttaacaaagagttatacttttgtagagaaagcttaatcaagggtgtctttaatctgtcactcatttcagttatctgaacctgatgtagtacctgtatctccacttgcctgcattacaccaaaactggccttcatcaaacaggatgtgctccatttccaaagctccaraagcacaaaacacaaaactcagacatatctgagaaaaatccagcaaaatcctagccaatataaagatttggaagactgcacactacaagaaaaaacaaaaaatgaatatccttcaaaccacaggtcaatagcttcatctacatgcatctgcaaaacagcagctcattttccccctgaacagcatttagtggccttatttcatgctctactctttcc

SEQ ID NO: 451972 - DNA, 240 bp, Homo sapiens
gcagagaggcccagccttgggtgtgggttccaagcccagatgrcaataaaggagcaccctgtcttcctacgggctggagttccttttgagagtgcttcctgggaaatgttgtcataacattgacagggcagaatttcagcatttctcacccttggccctaatatccatctcccaaatcacccccagtgccaggaatcattaagaaagcagtggtagtgttgagacaaccaaaaggctgtt

SEQ ID NO: 451973 - DNA, 607 bp, Homo sapiens
ttttaatatgtagacttggacagaagagataaagtattaatcttcttgtgtggaacctcatatcctcttattgttcttcagtttaatttctgatctttccataaagtttgaacagtcttttcatgaaggtcttgcacacttttttggtctttgcaccatagttctttgcacactgaagtttaaagtgaggactgttggctgggcatggtagctcatgcctgtaatcccagcaccttgggaggccgaggygagtggttcgtctgaggtcaggagttcaagaccagcctggccaacatggtgaaaccccatctctactaaaaatacaaaaattagctgggcatagtggcaggtgcctgtaatcccagctactcaggaggctgaggcaggaggttgcagtgagccaagatcgtgccactgcactccagcctgggcgacagtcagactctgtctcagaaaaaaaaaaaaaaaaaaaaggaagactgttaatgtgtttctgaatgtgctgttatgtgtctttgaacatgtaatgttgcagagaagcagcagggtgtagattccacaagcattcctggattgagggactccctgcctttaattagggagcagg

SEQ ID NO: 451974 - DNA, 545 bp, Homo sapiens
tgttaatacaaaaaagaaatagccctccatctacttgttaaaaaaaatcattaaatagctaacattgactgcacacccaccaggggctcagcaatgttctgagtgcctcatgggtatcatcttagtttgttctcagtggccctatcaacaggcacagccgtctgtttctataatcacctctgtttcacagaagaggtaagtgaccgtccagccatgaagcaggtgcccacactcatggatgctgtgccaggaagtccggccygcacagtccactcctcacctctgcactgcaccaggccacctttcctccacctgcgtcagcacaaaaagctgttttcctcattctaatgtaccttctggtatagttattcaccacaggattgatgaaacttatcaaaatttcctgggtgaaagagagtagaatttttttcagtcacccctttttactgtaataattcccagtcgtgatgccatacacctccaggagcacctggtcttctatacaaatagcatcctctggattgggccaagattacaacccaagc

SEQ ID NO: 451975 - DNA, 545 bp, Homo sapiens
tgttaatacaaaaaagaaatagccctccatctacttgttaaaaaaaatcattaaatagctaacattgactgcacacccaccaggggctcagcaatgttctgagtgcctcatgggtatcatcttagtttgttctcagtggccctatcaacaggcacagccgtctgtttctataatcacctctgtttcacagaagaggtaagtgaccgtccagccatgaagcaggtgcccacactcatggatgctgtgccaggaagtccggcctgcacagwccactcctcacctctgcactgcaccaggccacctttcctccacctgcgtcagcacaaaaagctgttttcctcattctaatgtaccttctggtatagttattcaccacaggattgatgaaacttatcaaaatttcctgggtgaaagagagtagaatttttttcagtcacccctttttactgtaataattcccagtcgtgatgccatacacctccaggagcacctggtcttctatacaaatagcatcctctggattgggccaagattacaacccaagc

SEQ ID NO: 451976 - DNA, 565 bp, Homo sapiens
tttcctaagggacaaacacaatctaactgataaagtgggtcagaataaaagcttcatgaaatttcttccaggtcaaatgttccatggttccagaattcaatgcaaattcatgtcatcaatggtgtttaatcaaagaaaacttatgtcagattatcttacttctaaaactataatgtccatttcttcacyatggggtaacatctagaggctgtttccctaagtacagctcatgaatacctccactttatatagaataatcaatgcaacagaaatataaagaacatttattccattcaaagctttattctgtgcattgtagaataataaaggaagtaaaacatagagcccttacacttaagaaactcacgatctagtcgaaaagataagaaataaggatttaaaaaactgtaatgaaaaagatcaggataagaatacaaaagatatcatcaaacataacacagattgactttttaaaaaactatacagacagtaagaatttgaaagaaatttaaatcaagaagtgtcccttcagctgaatgttgaaagaaataataggcattagaag

SEQ ID NO: 451977 - DNA, 565 bp, Homo sapiens
tttcctaagggacaaacacaatctaactgataaagtgggtcagaataaaagcttcatgaaatttcttccaggtcaaatgttccatggttccagaattcaatgcaaattcatgtcatcaatggtgtttaatcaaagaaaacttatgtcagattatcttacttctaaaactataatgtccatttcttcaccatggggtaacatctagaggctgtttccctaagtacagctcatgaatacctccactttatatagaataatcaatgcaacagaaatataaagaacatttattccattcaaagctttattctgtgcattgtagaataataaaggaagtaaaacatagagcccttacacttaagaaactcacgatctagtcgaaaagataagaaataaggatttaaaaaactgtaatgaaaaagatcaggataagaatacaaaagatatcatcaaacataacacagattgactttttaaaaaactatacagacagtaagaatttgaaagaratttaaatcaagaagtgtcccttcagctgaatgttgaaagaaataataggcattagaag

SEQ ID NO: 451978 - DNA, 620 bp, Homo sapiens
cccttcagctgaatgttgaaagaaataataggcattagaagttattttttaaatctactggacatggtagtgtggtgaattcatactttgaagtacyctctctctttcaaacacatggcaatgataaataaaatataggccaggtgcagtggctcacgcctataatcctagcactttgggaggccaaggcaggaggattgcttgagcccaggagtttaagaccagtctgggcaacatagtgagacccacctctacaaaaaaattaagaaagacccaaatagccaggtatggtgacatgcacctgtagtcccagctacttgggaagttgaggagggaggattgcttaaacctaggagttggagactgcagtgagctatgattgtaccactgtattctggcctgtgtgacagagctagaccctttctcaaaaagtaaataaataaaataaaatatagaaattaaaacaaaaaaaaatagtttcaaaaacaaaagacagatacccacagaagaaggaaatgaaacagcaagttgagggaaaacacaagcctgctggaggtggtagccagagtttggttcctgtgagtcagaagaagccagacattctctaagtcacatggcca

SEQ ID NO: 451979 - DNA, 557 bp, Homo sapiens
ctgtgacaataatgactcaacacataatctgaatacagaaaaaattgtttttaaaaagaaccaaatgaaaattctgaaattaaaagtacaataactggtatgaaatattaattaggagaatatttggcagacaaaatgcagaaaaaaraatcagcaaatgtaaatatagatcaataaaagttatccaatctgatgaacagagaaaaaacattgaaaaaaaaaaagctatcaaagcattagagacctgtggaacaacatcaagggtaccaatacacttgtaatggtattcccagaagaaaaggaaaaagaagcagaaaatagttgaagaaataatggcctaaaattttctaaacttgataaaaagagaagataacctacagatccaagaagctcaagaaaccccagcagactaagcacaaagaaatcacatcacagtcaaacttttgacagttcttcccaaattgatctatagagtaaatgtaatttctattaaaaatctaatcatcttgtctttagaaaatcaacaagttaatcctaaaatgtggatgaggatgcaa

SEQ ID NO: 451980 - DNA, 561 bp, Homo sapiens
caacattaaacattagggaaatgcaccttaaaaccacaatgagaatatcactatacatctactagaatgacaatattcaaaaagacagacaatgccaagtgttggtaagaatatggagaaattgaaaccctcattcattgctgatgagaatgtaaaatagcatagacattttggaaaactgctgggcagtttcttaaaaagtgaaatagaaaattaccatacaactcagcaattctactcttagaaacatacccaaaagaaatggaaatatattatcacacaaagacttgtataatgttcatagcagcrttagtcataatagctaaagactggaaacaacggtgaatagatatacaaaatattgtatatctatacaacagaatattagtcagcagtaaaaaagaacaagataccaatacatggtataatatggatgaacctcaaaaacattttgcaaaatgaaacatgcgagacccccaaaattacatattgtattattccatttatagccaatgtccagaaaaggcaaatttattaaacacggaaggtagatcagtggtt

SEQ ID NO: 451981 - DNA, 569 bp, Homo sapiens
gtagcccttggaaagtagtagattgaagaggagacaaacatttcatgtgaacagttaaggtgtgccacgtgtgtatgctcagggtgaaacttcatatttcattctaggtaatgtgcccacaaagtctcatattattctaattggagaatagccaaagaagaaatataatcccaaatattttkatttgactttactaccctgcttttccttacacagaggacacacatgtgtgtcctcatactgcatgaatacagagctgttttaacatttcttgatgctagctatagctttcttactcgtagacaggaccttcaccatagtggaagtatgctaatataaacatggtcagtgactgtagtcattacaaataagttcttttcaactaattgactaaaataatcatattaataaatacatgatactcgtacgcacaagtcaccttttctcccacactgatggctttgattactttgacagactaagatgcactaatgatacaaattagaagcaaaaagaattaaaaaggtgtttaactctgatgccaggctgtcaatttcctatagtgctac

SEQ ID NO: 451982 - DNA, 589 bp, Homo sapiens
tcttttaattttgaaaaatgagccacctacattaatatagaatataactagcatatttgttcattctcacactgcaataaacaaatacctgaaactgggtaatttacaaagaaaagaggtttaattggtccatggttccacaggctttacaggaagcatagctgtggaagcctcaggaaattttcagtcatggcagaaggtgaaagggaagcaggcatgccttacatggctggaggaagaggaagaggaatagaagcaaagggagaggtgcaacacacttttaaacaaccagatctygtgagaactcactcactatcatgagaacagcaaggggagtatctgcccccatcatccaatcacctcccaccaagcccctcctctgatatgggggttgcaattcatcatgagatttgggaagagacacaaatccaagccacatcaactagtacacctgaattattttttatagctaaaatgaagagtcttatttttgtgtgtgtgtaatattaagatacacttcaccaaatatctatgattttaaaaagatcagtcttgttttactttgttttgtttgctttgtttcatactt

SEQ ID NO: 451983 - DNA, 623 bp, Homo sapiens
ttattgaactctttggatactagagatagtacacgcctcaggtagcattctacttggaaaatggtactaactagtccacagataagcatccatcgagtggggcccagacaaaaaggatacgtttaaaattgcccagtgagctttgcatgtcttctacacaactgatctctttgaactataattctctgtggctaatgattttgatgattggagtgtttggaaaagtgaagcacccctataaccacaggagtccctggggttttggagtcattggcttggtggcacaggtkccaagtacactccttttgaaaaacagcacttagcttggcatgagacactagtcaaaactaaatacctgatccatgaaggaagggttcgacaagcctcatttgtcagatgaaagtaatacattcaagaatgctattggtttggacccagtggcatctttgcctttcattttcaaaagaggttactatctctttgaggaagtctttatccttcactctgccaactgaagcaaagtgctgtcataatggggtccttgcttcacagagtttgccctaaatgcctgggcctgattcactgaaggctcatctcagcaggaacctgatggtgtccactgg

SEQ ID NO: 451984 - DNA, 570 bp, Homo sapiens
gctgttttcattactgtagctctgtagtacaatttgaagtcaggtaatgtgattcttccagttatgatttttttttttttttttgcacaggatagctttcattattctgggtctttgggggtttcatataaaatttaggattgtttttctatttctgtgaataatgtcattgatattttgatagggattgccttgaatatgtactttgctttaggtggtatgaaatttataacaatattgcttcttccaattcatgaacctggaatatctttccattttggaggtcctcttcaattcattttatcagtgttttatagttttcattgtagaaatctttcactttggtcaagttaattatgaggtatttaattttatttgtggctcttgtaaatgggcttacttccttatttctttttcagacaattcactctyggcatatagaaatgctactggattttgtatgttgattttgatcctacaaccttactgaatttgtttatcagtttgaatagttttttgctgcagtctttaggtttttccaaatataagattatatcacctgcaaacaag

SEQ ID NO: 451985 - DNA, 536 bp, Homo sapiens
ctctgttctcttaacttactttctcccaaacaaagtctgtgtgtgtgtgtgtgtggtgagccacctgaaactgggttgtggtgatgcaagcacctctgtgttcaccaccgctgagactagactgggtcagacccaaagccaacacagcactcaatctcactgaaggcccattgtaaactctacctgactaccacctatgttcagtcaggaatctagggctctacaattggcaagtggtgaagccagcctcatttctgtccttcctttctgggcagtgagtttccccakgtcccaggtgggtccagagattctgtctgggagccagggtttgaagtcaaaaatcttagaaatttacctaatgttctattctactgcagctaagctgacactcaaaccacaacacaaagtctgtcctgctcttccctcccctttccataggcagaggagcctttctctgtggccactgccaacactggcccataggcgattctgccaggtcactgccgatgctcacttaaagtcctaagggctcttca

SEQ ID NO: 451986 - DNA, 583 bp, Homo sapiens
tggcccataggcgattctgccaggtcactgccgatgctcacttaaagtcctaagggctcttcagtcagcttgtggtgaatgctaccaggcctgggacttagccttctggcccagggaaggttcacaaacctgactgagagtctaaacctggacttagggaccccaagagcctgcttgttgctctatcccactgtggctaaggtgcaagacaagacyccttgacttttccctctgcttttatcaaacagaaggagtctttcactgtagccacaacagctaggaatgtggtgtgtcccacctgaagccaacatgtctcacagcccaaggcccattgtgtactacctgggtatccctgctggttgttcaggacctactgattaaaggggtctttaatcagtaggtgatgaatcctgacaggactgggtcctactcttcaaggcagcagattcccttttggtttggggtgtgtctagaaatgttgtctgggatctagagtctggaatggggacctcacaactctgcccagtgccctattctattgtggctgagctggtatgcaagatgcaaggcaaagtcctctcta

SEQ ID NO: 451987 - DNA, 591 bp, Homo sapiens
ttcagtgtaaagtcccccaatcactgccctctttctcactaaaggagacagactctttttgccccacaggaccatgcaaggagatggggaaggcatgatgttggcaatttaagactgtctctcctaccctcttcaatgcctctctttcagcaatgtcaagttaaaacaaagtactgtgatggcctacctgatttttagttcttgtgactttactgtttagatagttgttagaattttgtgttcctacagggagataaaggttgtaagcttctgttccaccatcttgctccactgccaatggctattactgaaaagtcaaaagataagtacagtgagaatgtggagaaaaggaaactcatatattattgagaggaatatacactagtaaaaacattatgcaaaacagtatggaggtttttcaaaaaaataaaggtagaaataccacatgacccagcaattctgtgcatatactcagaggaaataaaatcactatctgaaagagatctctgcwtgctcatgtttcttgcagcattgtttacaatagccaagatatgataatgacctaagtgtccgtcaattaatgaatgaaga

SEQ ID NO: 451988 - DNA, 571 bp, Homo sapiens
ttccaccatcttgctccactgccaatggctattactgaaaagtcaaaagataagtacagtgagaatgtggagaaaaggaaactcatatattattgagaggaatatacactagtaaaaacattatgcaaaacagtatggaggtttttcaaaaaaataaaggtagaaataccacatgacccagcaattctgtgcatatactcagaggaaataaaatcactatctgaaagagatctctgcttgctcatgtttcttgcagcattgtttacaatagccaagatatgataatgacytaagtgtccgtcaattaatgaatgaagacattttagtgtgtgtgtgtatatgtacaaaatatatacatacaatgaaatattactcagcattgaaagagaaagaaattctgtcatttgcaacaacatggatgaacctggaagacattatgctaagtgaaatacgttagacacagaaaaacaaatactgcatgatttcacttatatgtggaatctaaaaaagttgaacttataaaaacagagtagaaggttgggtaccagggattcaggtgggggaaatggga

SEQ ID NO: 451989 - DNA, 548 bp, Homo sapiens
aattattaaaaatgttttgacaaagtcggtaaggacaattgacaatttgcagtttggcagcattgcattttattgagcacaggactagagtcacctttaggagattcacaggactcagcacaggactttttttgggtttaggagaatgacctagaacaggtggaaaccagagtaaagtttggtcaaatctgttagcacagtgttcaaaaaagtccctgatgccatgtgggagttcaggtttacattgataattgactgacagcagaatttttatcaacaataaataccttaaaattaaggagtaatatcatccacaatgtccaatagatatttttttaaaccgagctagacatgcaaaagaaaatttaatgactaggaacagacctaaaaagtactcagatgtttcattaatataatctgatgaaggaattatttggaaactatattaaagcacctatatattatacctgaaagcatattaaaaataagatagaagaatgaatttgaaaaagcatcagrttaaaacaaagataagaaaaattagaatt

SEQ ID NO: 451990 - DNA, 620 bp, Homo sapiens
attatttacagtttctagataatctattagaaataataagagatatattcagtttgaagaatctaagaaaaatttctgaaatcaatagcacactttaccacaataaaaccattaggaaattgaagtaataaaaataccattctcgatacaatcccaagtcataagatttatggaaattaacccaagattacatgtacccagagtayatgttctttatgaaaaaaagtataaaacttgattaatggacataaaagaaggcaaataaatggacatattataacttattgataaattagaaaatttgaaatcataaagattgcattctccccaagcaaaataagaaattaaatacaatttcaatcaaaatctcatcaggatattttatgaacttgaaaaactatgctaaaatgtgtatgtaaatactaagggccaagaacacccagccaaatttggatattttcccaacaaaatatcaaaatttactacaaaactagaccacttttaagaatcctatagaaaggaggcaatgtaataaatctaagaacaattacggagtcatgtgttacttaatgacaggatatattctgagaagtgtatcattaggcaatattgtcattgtg

SEQ ID NO: 451991 - DNA, 552 bp, Homo sapiens
ttccaagaaaactctgagattcctcacgattggaatgtttacaacatatgtctgcctctatgctgctcatgagtatagaatatactgattaacttaagtcaaatattgcctatcttaggaaatgggggtatgggcagctatatacaaggcttggctgtgtgctaaaacttagataccttaaataaactgaaatttttattattaaatgggaaaggggtgcaaaagtgatcmacctgctcaccacaaccaatcttcttttgaaacataatcttttgtccagtgtcttttctttatgataaaaagcagctttattccacattgcgcaaagaacaagagctgctatgtcagtgtggataatgttttgctttacaaatcttacaagtacatatttaattaatatcatgatccttcacattcaacttaaactcttgggctaattatctcaagagtgatccattagatgattggggacaacatttaaggtatcaagatctatttattatttgtccaaacatcacagtggtggtgtttttaatttcaattagaatgtgg

SEQ ID NO: 451992 - DNA, 350 bp, Homo sapiens
gagagccattgtgaccatagaggcagagattggagggatacaaccagtagaatccccgcaaatgcaagaagttgattctcctttagagtctcaggagggatcacagtcctgccaacaccttgattttggtccaacgatactgattttgggtttctggccttcacaactgtaaragaataaatttcctttgttttaagccaccacatttgtgataacttgttacagcagccactggaaactagaacaatacctagtgaattgatattttcctcattctaactgttactcacagattaatcctatctggatgtctcaacaaccaaaaatacgttaatctgttttcctttcct

SEQ ID NO: 451993 - DNA, 502 bp, Homo sapiens
ctccttgtggaagtttttcaaaataactctcaagattttcttgttaaggcgacatgtattcagttttgcatggttgccggtccttcagggtaattccacggtaccatcctgcctcacatcctttcagaaaggaagtatgaattacagaaaataccatggatattttcatcaagataagtaggtttaacactggcttcagcaattgtagttgtttcattttctacatattgacttatttgatttatacatatacacacattaattacacactcatataggaaatctggaatacagtagatactaaaatactgttaggtacctatctcaattaatcattatcttactcttcaagtacatgtygaggtacttcttttgtcaatggtcaacatctctcttaaaatattacactcaaatcagtgtacaatagctaggcataataaactatatgtggaataatcagcaaacaattcagtggagttcatactttcctttgtctgaaata

SEQ ID NO: 451994 - DNA, 543 bp, Homo sapiens
gtaaaattaacaattagaagttaacatgtgaggtactaaaagttactgaaaatagatttgtgttgtgtggattatttgactcctaaaatattaatgtcatgattaccataaaagttctagacaaactgcacgtaaaatttataaatcaccaactaattaatttttgctataattatacatattcttatatagattcccacttatctaccacaaacagatttctgtttttataatccagagagaaaactttgctaaaattctcatatgagataggcataaagtaaagcaaatgtgggaaagctttggttcttccttctttttgctttggctgacatgaaaaacttaatgctgagagagttstactcttctgaaaacagtaaaaagcaaaaaatttctggttattttccaatgactcctgctgctaagttggtatcactagaaacagacctattttgatgctcatgcctgtagtgattcttgcatatttagttcttaattatttggattaactgtaagaggtcaaatgcatttgagctatagttt

SEQ ID NO: 451995 - DNA, 588 bp, Homo sapiens
gtctaatattttaaaggataatatcagtatagtgttaaacaaacctagtactcatttatcctagttgtgagcctttgtgctagttttgtcatagccccaattattagatttatcaacttttaaatgaattttttttaatttttcaaggtattaattgcttccaagaaacaaacaaacaacatgcaaagaaaaaaaaaaaagaaactatggtgatgatggaatattaacatttttattattaaatatttgttcttaaaatatttaatgtattaaaatatatgtcataataaccaaagatgaatcaagcaataggtctcagggtatcctgaaacaaagacttagaaagacatcaatcaaaaatgaaccaaggatattctctgtgatacctagggatacatggtctcacatcttcacttctcttttaaattgtctttttatttgttctctctgcagattgtttttctgtgctcacttgcatgaggcagatttttatcaaacaaattctgatattagtarcatagtacatttaataatctgctaaataatcttacacttacttattaggttactgttcatatttatgttgat

SEQ ID NO: 451996 - DNA, 650 bp, Homo sapiens
aaatttactaacaacttgtaataactaatttaatttggatactttcatatgaactcataatatttataaaatatgtcaaagagtaactacactcccatgttaattatgaaattgtttaccaacagccaagatatggaattaacattagtgtccatcagtcaatgaatgtaaaaagaaagtatggtatacatttctatatgtatacacatgaacacaaaaatggcacactatttagccttaaaaaagaaaatcctgcaatttgcaacagcatggataaacatgaggaacattatgctaagtgaaataagctaggatagtaatgtatggcttcacttatatatggaatctaaaaactttgaactcatagaagagagagtgtcatggtggttaccagggattgggagaaggtggaagattgggatgaaagatattggtcaaaggatacaagattttagttaracaggagaatcaatatcattcaaaaggctgtattgcccaaaggaatttatagattcagtgttatttctattacgctaccactgacattcttcacagaactagaaaaactattttaaaattcatatgggacaaaaaaagatcctgaagaaccaaagcaatcctatgtaaaaggaataatgctggaggcatca

SEQ ID NO: 451997 - DNA, 511 bp, Homo sapiens
atttctcaaagaacataaaagagaaatatcattctacccagcaattccattactggttatatatacaaaagaaaataaattmttatcaaaaggacacatgtacttgtgtgtttatctcagcactgttcaccatggtgaagacatggaatcaaccaaggtgattatcaaaagggaagaggaatggattaaaaaatatatggtagatatagaccatggaatcctatgctgccgtaaaagagaacaaaatcatgtcctttgaggcaacagcatggatgcagctggaagccgttatcctaagtgaattaacagaggaacagtaaaccaaacaccacacggtcttacttaaaagtgggagctaaacattgggtactcatggacataaagatgcctcaatagattacgaggacaaacaggattaaaaaacatgcgtactatcctcaccatgtgggacacaggatcatttttaccccaaacctcaacatcatgcaatatacccatgtaacaagcctgt

SEQ ID NO: 451998 - DNA, 494 bp, Homo sapiens
gatgatttctcaaagaattgagagttgaattaccatttgatccagcaatcttgttaccaggtgcatacccaaaggcaagtaaataattctaccaaaaggacacatgcacccatatgtttgtcactatttacaatagaaaaggcatggaatcaacccaggtgtccaccaatggcagactggaatatttttaaaaatgtgatacatatacactatggaatactatgcagccattaaaaatgatgaaatcatgttctttgcagcaacatggatgcagctggaaaccattatcctaagtgaacaaacacagaaacagaaaagcaaataccacatgttctcacttataaatggtcataagaatggtaacaatagacactgargaatacaagggttaggaggggattaagggtggaaataaactaacttttgggtactatgctcactacctgggtgacgaaatcatttgtactccaaacctcagcatcacacaatacatg

SEQ ID NO: 451999 - DNA, 494 bp, Homo sapiens
gatgatttctcaaagaattgagagttgaattaccatttgatccagcaatcttgttaccaggtgcatacccaaaggcaagtaaataattctaccaaaaggacacatgcacccatatgtttgtcactatttacaatagaaaaggcatggaatcaacccaggtgtccaccaatggcagactggaatatttttaaaaatgtgatacatatacactatggaatactatgcagccattaaaaatgatgaaatcatgttctttgcagcaacatggatgcagctggaaaccattatcctaagtgaacaaacacagaaacagaaaagcaaataccacatgttctcacttataaatggtcataagaatggtaacaatagacactgaggaatacaarggttaggaggggattaagggtggaaataaactaacttttgggtactatgctcactacctgggtgacgaaatcatttgtactccaaacctcagcatcacacaatacatg

SEQ ID NO: 452000 - DNA, 577 bp, Homo sapiens
taaaaatatacaaacattttggaaagcagttttgcactttcttataaagctaaacatatacttaccatgagaccctgccactccaatttagacattttaaaaaataaaaacatttgtccatacaaacatttgaacatgaatgttcrcagcagctttacttgaaagaactccaaactggaaacaacatatatataactgttgaatggataaacaaattaacagtatgatcataagtgaaatagtgctcagaaataaaaagaaatgaactattgatgacatgcaataacatggatgcacctcaacaacattatcttgagtgaaggactccatacacaagagagttcaaaatgtatgaatccatttatttgaaaatctattaaagatgaatagcatcattatgataaatgaagtttagcattatgatgagtgtaggtggaatggattgggcaggtattaaggaaacactttggagatgggatgatggtaatcttctatatgatgattgtagtaatggttatccaaaaggttatccaaatgtataaacatatcaaactcatgagcacattgtattgcagtt

SEQ ID NO: 452001 - DNA, 561 bp, Homo sapiens
taaacatatacttaccatgagaccctgccactccaatttagacattttaaaaaataaaaacatttgtccatacaaacatttgaacatgaatgttcacagcagctttacttgaaagaactccaaactggaaacaacatatatataactgttgaatggataaacaaattaacagtatgatcataagtgaaatagtgctcagaaataaaaagaaatgaactattgatgacatgcaataacatggatgcacctcaacaacattatcttgagtgaaggactccatacacaagagagttcaaaatgtatgaatccatttatttgaaaatctattaaagatgaatagcatcattatgataaatgaagtttagcattatgatgagtgtaggtggaatggattgggcaggtattaaggaaacactttggagatgggatgatggtaatcttctwtatgatgattgtagtaatggttatccaaaaggttatccaaatgtataaacatatcaaactcatgagcacattgtattgcagtttggacatatttataggattcctaaaataagctga

SEQ ID NO: 452002 - DNA, 544 bp, Homo sapiens
gtttgtgatgctataaaagtatgtattttgtactttctatttttcaacatcacattttaatgaatatatattactaaatttatataataatttagtatccttgttctataattcgaaatgytatctttaaaaacacttatttcactcttcattccatgtattcatgctgtatctgttagcactattcttgacattgggaatatggtagtaaataacataaagatctctacatttattgattagcactgcatgaaatctttgtatatgtcaggaattatgacttttacatctgttttcctgtgttgtaattttacttaataactgtttttattggacaagatacttcacatagctaaatcttagttttctcatatataaagttgaaataataacaaacaattcatatggttgctgtgaagatttcagggactaatgaccatagaacacttagtatggagtaattactaaaaaacagagtgaaaagacttgctgggtgcaaaggagctttcagcattggccacaattgtacttataccaccccaca

SEQ ID NO: 452003 - DNA, 544 bp, Homo sapiens
gtttgtgatgctataaaagtatgtattttgtactttctatttttcaacatcacattttaatgaatatatattactaaatttatataataatttagtatccttgttctataattcgaaatgttatctttaaaaacacttatttcactcttcattccatgtattcatgctgtatctgttagcactattcttgacattgggaatatggtagtaaataacataaagatctctacattyattgattagcactgcatgaaatctttgtatatgtcaggaattatgacttttacatctgttttcctgtgttgtaattttacttaataactgtttttattggacaagatacttcacatagctaaatcttagttttctcatatataaagttgaaataataacaaacaattcatatggttgctgtgaagatttcagggactaatgaccatagaacacttagtatggagtaattactaaaaaacagagtgaaaagacttgctgggtgcaaaggagctttcagcattggccacaattgtacttataccaccccaca

SEQ ID NO: 452004 - DNA, 562 bp, Homo sapiens
tgttgcggacaaggagcctggcagagagaacgtttccatggtcttacaagkgtattacccacctaccctactagcattttttttcactgtgtagtcaagaaaggaaaaatactcacaaccaggttgctaaactaagagctttttttaatgagactccagaaagggccctggcaggataaaaatttgattgcactgtgttctctgacctcaactgcaggttctctgacttctcttttgtgtttgtttgtacaccttcagtgtaaagatataagggctctctgagatggcaagctgttttgcaaagaagcctcttcacacatttggaatataacctcttaaacctaacccaggtttatgttaacaccatggctcataaaccatgcttaggctgcatggaaccataaacatgttgaatgtaggaaacacggttagtttataaattgggcctgctattaagttctgaggtcattagtttttttttttttttttttggtcctttctttttatttttccaaactatacgtgctttggaaatctaaggggtgggtaagaaaacagttta

SEQ ID NO: 452005 - DNA, 563 bp, Homo sapiens
tttaaactgtataaatttacttacttaatgatttggatattggaagtcctaaaaccaagatgttggcagggctgtgtaccttctgtacagtttttggaaatatctgctttattgtttttcttccatttccaaaaggagttcgcattcctgaactgacagacctagacctcagcttttgtcactaattccttcaactctaaatatcttgcctctcttctccttagaaggatgtttgtgattacattaggctcacctggatgattcagcatactctccctcatacagtttaaatgtttgtcctcttcaaatctcatgttgacatatgatctccactgttggaggtgaggcctagtggaaagtgtttgggtatggggtcaggtccctcatgaatggcttcctaccatcctcgcagtaacaaatgagcctcactccatgggttcacatgagatctgcttgtttacaagcgyctagaacttcctcacctctttctctcctgcttcctgtcttactgtgtctgaaattagtgggttctttgtctcactgacttcaagaatgaagccgca

SEQ ID NO: 452006 - DNA, 527 bp, Homo sapiens
ttggttgcagttgacagcaaggcgtttcttgccaaaatggaattcaatatttcatgggaagttagcaaaaatataaagtaataagctccagaatagagatgtatgcaagtaactgttggatcacagaaaatggcatatctaattctgcctaagaataaaatgcacaaagggaacagatgttacccagagtagaatgttcaagaaatagtaataatttggcatggcaagagccatttatacatagctgtaaattttttatgcataggtgtgagctttcttgaaagagagccctcagttagatctcacatggaattttcaccaccctatgtattaggttttttttccaaaattccttagttawatataggtaaaaggtaacaaagtattttagctctttgtccaaaattaaatacaatttattttcattgtccattttatgtgcaattaggtcattatatagattttctctatctttttaatgaacagcatgcatgggcgataatgtaaacctttttagcattccagtc

SEQ ID NO: 452007 - DNA, 607 bp, Homo sapiens
tgtattgtggttttaatttttattccatgaatgactaatgataatgtgcatcttctcatgtgcttgctggcctttggcatattttctttggagaaatattggaataaaattatttgtycatttttaaaatcagcctgtgtttttatcattgagtcattagtttcctttatatagtctagatctaagccccttataagacatatgacttgaaaatatcccaaatattggtggtcattttacttttttgatattacttacagcacaaaaattttaattttgatgtaatctaatttatctattttttaattttactcttatcattttgatatgacgtagtagcactgggacttctaaaagtatccacattcaaatcaagtgatagaatcaccaaggtagacacagggcccagcatcaatggtaattgtgtcttcatcagactcgttccttggtaaaatgactgtaattctgtcaaatcacatctgagggatttttttttttaacaagttgactggtatttttgttaactcaacaataatatatgaagttattttctgctgaatttcggaggctatttctgctgcatatattattatgtaaactgcctgct

SEQ ID NO: 452008 - DNA, 607 bp, Homo sapiens
tgtattgtggttttaatttttattccatgaatgactaatgataatgtgcatcttctcatgtgcttgctggcctttggcatattttctttggagaaatattggaataaaattatttgtccatttttaaaatcagcctgtgtttttatcattgagtcattagtttcctttatatagtctagatctaagccccttataagacatatgacttgaaaatatcccaaatattggtggtcattttacttttttgatattacttacagcacaaaaattttaattttgatgtaatctaatttatctattttttaattttactcttatcattttgatatgacgtagtagcactgggacttctaaaagtatccacattcaaatcaagtgatagaatcaccaaggtagacacagggcccagcatcaatggtaattgtgtcttcatcagactcgttccttggtaaaatgactgtaattctgtcaaatcacatctgagggatttttttttttaacaagttgactggtatttttgttaactcaacaataatatatgaagttattttctgctgaatttcggaggctatttctgctrcatatattattatgtaaactgcctgct

SEQ ID NO: 452009 - DNA, 460 bp, Homo sapiens
cacatgtgctcactggcatgtgtgtgctagtaaaaaactcagggaagagagaattccctcagaacttcagaccagggttcctcaagcaaactttccactaacaccagagttttgtgagccatactgctaaggtgtccagggctaaaataaaattcttaagcttttatggtgcctgttcctccaaacactaattgctgacaaagcaaatgaaccagtgcaagcaaatgttatgggaaaacttggaatcaatcaatcacacctagattgacagctatccccctactgccgtggagagctatatttatgcttgtgttatagtatgcgtgtctattacagactagttctttctgtcggtaaaatgaatgaatgaawgagtaaataaagaattttgtatttgcttattgagatagggtcttgctctgttgcccaggctggagtgtaattgcacaaacacagctca

SEQ ID NO: 452010 - DNA, 540 bp, Homo sapiens
ggctgtgcaccatgcacaggctccaagacctggaccattggacaagaccaaggcctccagaagaccatcagrctgggatgggcacagccctgccccaatccttccaaaaaggggacctgttgattgtaacaacatggagatgggctaggagtgatccatggctccccccacagcagcctgagccaagataggtttggggaaggaggtgtctggggtgccaggtctgcagggctctgactcctgggctcagcattcatcaagtagtattttgacccaggaaggggcatttctgtggagaggtggggagggtggacatcaggcactaggtacaaggacaagtattttctagtgtgagactcccctgaaggccacagcactgtcacccctggggcagggaagccttcagggagctaagagaggagccctcttgagggctgcagagagcaaaacaggaccagggtgggcccagcaatgctggggagcccagagcagcacatggaggatagggtcctcccctttcctgaggcacagcaggcaggg

SEQ ID NO: 452011 - DNA, 647 bp, Homo sapiens
aaccccgctggacttggaggaaagagatttaggttttagtgctagttgtggtactaactagtatataactaggtcatttacattatagtccttatatttctaactttaaaataaagttatttttcagcataagcaatattttwtttgggttttacacccattcatagaaactccttcttggaaattgatatctaaacaaacatcttcaaattggtttgaagctttggccagaactcatgatgtttacatttgtcaagtggaattaccccttgaccattaaaaaagaaatcctgtttggatgtacttttgagctgattaggaaaaattatttgttttgaaaagatgaatgcattttaatactggttgatgaggcttgattggactatgcaatacaggtgaggcagtttttatcctgattttgattccaactattttgtctgtgttcccaaccatccacttctatgagaagaggaaacaataggaactgtagcccaagcacgggtgagtcattactcataagaatgacggaaaagaagtttccaatgctacaagtgacattaatgctgtataatcatggctcaggatattttggctgccctcatttttgtcagcagcagcagctacagcaaagtgccgttgttgggtat

SEQ ID NO: 452012 - DNA, 580 bp, Homo sapiens
tattatcttctcaaatctccctgaatataatagtgatagttattataagtgatctgtttcccgaattttctgggatatttattctactgtgcttttttttagtgctgcattcttcctcaaatgtctgaagattctgattgcccatttatatttaagaatgagaaaacagactgcctgagaggcatgtctgtacgtgtggactacattcattcattattttttggtttggtgagagcaggtcttgagttccctgtcaggctccggaccccttctaaatgccaaatgaggcaggctttactcttgtctgtcaaaacccatgttggctgtcctaattctttccaggtggtagttctkctctcttagagaaaaattttccatgtttttgctcaagtataaaggtcatttgtgtgctgttgtgcaagaatgcaagaaagaaatatgttaggagaccaacagacctcccggaaacacacttttcagtctgacttcccagtcctgcctgaacactgttcctggggatcggccaggccggtcagccccttcctctgctgttgttggtcagtgtattacatatgttggg

SEQ ID NO: 452013 - DNA, 549 bp, Homo sapiens
taaagcctgtagttagtgactttaaataagggagactatcctagataatccgggtgtgcctcactcagctgcaagaccacagggcagagccaagacacccttgagaaagaagacatctacctggggactgcaactgcagcccatgccagaaagttccagccggcccttctgacagcctggcctatggatttcatatttgtctagccagccccacggtcaagtaagccaattccttaaaatacatttcttaatacatatctcctacaatttctctggtaggaccctcattgatacatctagaaatttattgaactctctcatccactgagagactcttctccctatgtagtgttctttactgcttatggatttatactattaaattttaayaagttattacaaaggaagaagttatgaatatatattcttagtttaacatttggattcagaaggcctgattctttaaccccttatttttggatatttttccccaaattttcattactgctgttaatatggttaatgttgggttgaacatcatgaacctta

SEQ ID NO: 452014 - DNA, 532 bp, Homo sapiens
ttcattactgctgttaatatggttaatgttgggttgaacatcatgaaccttatacttctcaacatttttatactaaatttttrtaagagaaattgctatatcaaagggtacatactggctgggtatggtggctcacacctataatcctagcactttgggaggctgaggtgggaggatcacttgaggccaggagttcaagaccagcctggggatcatagtgagactccatctgtaaaagaaaaaaaaaaaaaaaacagctgagggtggtggtatgtgcctgtagtctcagctactcaggagcctgaggtgggaggattgcttgatcccaggaattcgagctgcagtgaactatggtcatgattatgccactgcactccagtctgggagaaacagcgagacaaaaacaataaaaagggtaagtactttctaaaatctttcgttatatattgccaaacttctccaggaattgtatgcctatttctcatggccacctgtaagatgtgagaatggctatcagacattcagaagggca

SEQ ID NO: 452015 - DNA, 473 bp, Homo sapiens
agttagctacaaatggccctttgaagcraaatttacaatatgagcttggcaaaatatagactgtacaatgtccctcaaatagtacattagaaaaagcaccaatctgacaacaacatattttctcctacatagtaagttttgatagtagcaattggatttgaataattctgaatgcaagacataaataaatcacaaaagaatagattgaaattaataagtggatgcaaaaatatacatttttgtttacaaatttgaacaataaaagctattccagaaaaaagaaatgaaaaatgaacatccgctatccccttaaacattattaatattcacataaaaatagatgctgctgaattgttcagtatggaatcttagtgtagtttaattattttcatcttcaggctttgcacaagccccctgaatgcaatctgtgattaaagttcctaacagatttgggaacataatagtggcaagtg

SEQ ID NO: 452016 - DNA, 473 bp, Homo sapiens
agttagctacaaatggccctttgaagcgaaatttacaatatgagcttggyaaaatatagactgtacaatgtccctcaaatagtacattagaaaaagcaccaatctgacaacaacatattttctcctacatagtaagttttgatagtagcaattggatttgaataattctgaatgcaagacataaataaatcacaaaagaatagattgaaattaataagtggatgcaaaaatatacatttttgtttacaaatttgaacaataaaagctattccagaaaaaagaaatgaaaaatgaacatccgctatccccttaaacattattaatattcacataaaaatagatgctgctgaattgttcagtatggaatcttagtgtagtttaattattttcatcttcaggctttgcacaagccccctgaatgcaatctgtgattaaagttcctaacagatttgggaacataatagtggcaagtg

SEQ ID NO: 452017 - DNA, 473 bp, Homo sapiens
agttagctacaaatggccctttgaagcgaaatttacaatatgagcttggcaaaatatagactgtacaatgtccctcaaatagtacattagaaaaagcaccaatctgacaacaacatattttctcctacatagtaagttttgatagtagcaattggatttgaataattctgaatgcaagacataaataaatcacaaaagaatagattgaaattaataagtggatgcaaaaatatacatttttgtttacaaatttgaacaataaaagctattccagaaaaaagaaatgaaaaatgaacatcygctatccccttaaacattattaatattcacataaaaatagatgctgctgaattgttcagtatggaatcttagtgtagtttaattattttcatcttcaggctttgcacaagccccctgaatgcaatctgtgattaaagttcctaacagatttgggaacataatagtggcaagtg

SEQ ID NO: 452018 - DNA, 549 bp, Homo sapiens
tttataagatatcccattatctggtttcaaataccaaatcagaagagagtcatgcaatagtgtctagaaaagcttttgttatgaaaactcaaaataccaatctatcaaggatgacttgattacattttgaatagtaagtcacacacagtctattatgtctgcatataaattataacctgagtaatcaaaccaaatgttctagtatttttgtacttttgcccaaggttcagagtccatcaattctctgtccagtatattttaaatgataatattttcctttamgtttctatttcatttcattcaaagattcatccatgctattaaacctaatgttgtaggaatgggatggtataaaacccccttgtaaggacgtaaggaatgagtccaacatctcaaacctatgacttagcaatgtccagtccttaagaagggatttctgttccagcatctatcagagctttttcttccctgcaatttaaaacacgagcatttaaaggacacgtagtgccttcttcaaaacaggccaatttttcctacttgttctacccc

SEQ ID NO: 452019 - DNA, 589 bp, Homo sapiens
tcagaagagagtcatgcaatagtgtctagaaaagcttttgttatgaaaactcaaaataccaatctatcaaggatgacttgattacattttgaatagtaagtcacacacagtctattatgtctgcatataaattataacctgagtaatcaaaccaaatgttctagtatttttgtacttttgcccaaggttcagagtccatcaattctctgtccagtatattttaaatgataatattttcctttaagtttctatttcatttcattcaaagattcatccatgctattaaacctaatgttgtaggaatgggatggtataaaacccccttgtaaggacgtaaggaatgagtccaacatctcaaacctatgacttagcaatgtccagtccttaagaagggatttctgttccagcatctatcagagctttttcttccctgcaatttaaaacacgagcatttaaaggacacgtagtgccttcttcaaaacaggccaatttttcctacttgttytacccccttctgctgtgaatcttcagtctatcatatagctaagttatcaatgttaatgcaaaatcaaaactggatactgcatag

SEQ ID NO: 452020 - DNA, 589 bp, Homo sapiens
tcagaagagagtcatgcaatagtgtctagaaaagcttttgttatgaaaactcaaaataccaatctatcaaggatgacttgattacattttgaatagtaagtcacacacagtctattatgtctgcatataaattataacctgagtaatcaaaccaaatgttctagtatttttgtacttttgcccaaggttcagagtccatcaattctctgtccagtatattttaaatgataatattttcctttaagtttctatttcatttcattcaaagattcatccatgctattaaacctaatgttgtaggaatgggatggtataaaacccccttgtaaggacgtaaggaatgagtccaacatctcaaacctatgacttagcaatgtccagtccttaagaagggatttctgttccagcatctatcagagctttttcttccctgcaatttaaaacacgagcatttaaaggacacgtagtgccttcttcaaaacaggccaatttttcctacttgttctwcccccttctgctgtgaatcttcagtctatcatatagctaagttatcaatgttaatgcaaaatcaaaactggatactgcatag

SEQ ID NO: 452021 - DNA, 635 bp, Homo sapiens
caccatgtgttatagcacgaaaactcatcccaaacccagaagtttccaccacaaaaaacttttaatagcctgccttgaaagcacacaaagattctattatgaataaaacaatttattcactggggctagaatgtgtaaattkgtctcaccgtacagattattttttaacagaattattttgtatatttgttataataaaaatattcacaaaatgaacattttgccaccatatttgtaaaaaaaaaaaaaaagcacttcttgctttttcagtatatatttggtatttgctcagtgtttctttaacaaaaaggagaaaagaggccctgaggaaaaagagtagcatgcatgcataaattaaattgtgcttttatctccactaagtattaaataccaaaacccacattttaatatacctgattatcacatgttttggagtacacaatgaggaatagcatgaaaagtaactgtagataacagatgtgtaataaagtgtatctgttacctatggctatgaatcccatccctcacaccaatgttatgtactgttatcttctaagtctctttccacaatagggaaatgaagccccacagcgagaatgttacaaacttgattaggggcctgatacaaatatatg

SEQ ID NO: 452022 - DNA, 635 bp, Homo sapiens
caccatgtgttatagcacgaaaactcatcccaaacccagaagtttccaccacaaaaaacttttaatagcctgccttgaaagcacacaaagattctattatgaataaaacaatttattcactggggctagaatgtgtaaattggtctcaccgtacagattattttttaacagaattattttgtatatttgttataataaaaatattcacaaaatgaacattttgccaccatatttgtaaaaaaaaaaaaaaagcacttcttgctttttcagtatatatttggtatttgctcagtgtttctttaacaaaaaggagaaaagaggccctgaggaaaaagagtagcatrcatgcataaattaaattgtgcttttatctccactaagtattaaataccaaaacccacattttaatatacctgattatcacatgttttggagtacacaatgaggaatagcatgaaaagtaactgtagataacagatgtgtaataaagtgtatctgttacctatggctatgaatcccatccctcacaccaatgttatgtactgttatcttctaagtctctttccacaatagggaaatgaagccccacagcgagaatgttacaaacttgattaggggcctgatacaaatatatg

SEQ ID NO: 452023 - DNA, 635 bp, Homo sapiens
caccatgtgttatagcacgaaaactcatcccaaacccagaagtttccaccacaaaaaacttttaatagcctgccttgaaagcacacaaagattctattatgaataaaacaatttattcactggggctagaatgtgtaaattggtctcaccgtacagattattttttaacagaattattttgtatatttgttataataaaaatattcacaaaatgaacattttgccaccatatttgtaaaaaaaaaaaaaaagcacttcttgctttttcagtatatatttggtatttgctcagtgtttctttaacaaaaaggagaaaagaggccctgaggaaaaagagtagcatgcatgcataaattaaattgtgcttttatctccactaagtattaaataccaaaacccacattttaatatayctgattatcacatgttttggagtacacaatgaggaatagcatgaaaagtaactgtagataacagatgtgtaataaagtgtatctgttacctatggctatgaatcccatccctcacaccaatgttatgtactgttatcttctaagtctctttccacaatagggaaatgaagccccacagcgagaatgttacaaacttgattaggggcctgatacaaatatatg

SEQ ID NO: 452024 - DNA, 598 bp, Homo sapiens
tatcacatgttttggagtacacaatgaggaatagcatgaaaagtaactgtagataacagatgtgtaataaagtgtatctgttacctatggctatgaatcccatccctcacaccaatgttatgtactgttatcttctaagtctctttccacaatagggaaatgaagccccacagcgagaatgttacaaacttgattaggggcctgatacaaatatatgacattgtaacttttattgaccttaagagtactgctttgtcagtaaamctttctgttttaatatttagttgcaggacacataggcccgctgtcatacacttcttgacagatgagctatcttgtgccttcagtgtctcagtaatagaaatagtagatgtactaaaatcaaacaacaacaaaaacaacaataaaaaacgatgatcaaagcttctcagatgtgcttagtcagcacaagccatggaatagtttcagttaccttgcattcaatgaaaataataattcaaggcacttttttagatggctttgacctctgagttgtacttaaataccatttcagcactgtttacacaggcaataaactataattattgagtggggggga

SEQ ID NO: 452025 - DNA, 598 bp, Homo sapiens
tatcacatgttttggagtacacaatgaggaatagcatgaaaagtaactgtagataacagatgtgtaataaagtgtatctgttacctatggctatgaatcccatccctcacaccaatgttatgtactgttatcttctaagtctctttccacaatagggaaatgaagccccacagcgagaatgttacaaacttgattaggggcctgatacaaatatatgacattgtaacttttattgaccttaagagtactgctttgtcagtaaaactttctgttttaatatttagttgcaggacacataggcccrctgtcatacacttcttgacagatgagctatcttgtgccttcagtgtctcagtaatagaaatagtagatgtactaaaatcaaacaacaacaaaaacaacaataaaaaacgatgatcaaagcttctcagatgtgcttagtcagcacaagccatggaatagtttcagttaccttgcattcaatgaaaataataattcaaggcacttttttagatggctttgacctctgagttgtacttaaataccatttcagcactgtttacacaggcaataaactataattattgagtggggggga

SEQ ID NO: 452026 - DNA, 478 bp, Homo sapiens
agctatcttgtgccttcagtgtctcagtaatagaaatagtagatgtactaaaatcaaacaacaacaaaaacaacaataaaaaacgatgatcaaagcttctcagatgtgcttagtcagcacaagccatggaatagtttcagttaccttgcattcaatgaaaataataattcaagrcacttttttagatggctttgacctctgagttgtacttaaataccatttcagcactgtttacacaggcaataaactataattattgagtgggggggatgaatacattgctgtggaataacctacaatctggtctccacatcaataaaaatatcttttcacttgtgatagttattttcttggcttgaaaggtcatcatttgcttgaacaaataggtgaagaggaaggttttcaagctgtgtttctaaggaaaatgagaccctgaattggaggagacgtgtatggtaatgagaaagtgtgatgatga

SEQ ID NO: 452027 - DNA, 478 bp, Homo sapiens
agctatcttgtgccttcagtgtctcagtaatagaaatagtagatgtactaaaatcaaacaacaacaaaaacaacaataaaaaacgatgatcaaagcttctcagatgtgcttagtcagcacaagccatggaatagtttcagttaccttgcattcaatgaaaataataattcaaggcacttttttagatggctttgacctctgagttgtacttaaataccatttcagcactgtttacacaggcaataaactataattattgagtgggggggatgaatacattgctgtggaataacctacaatctggtctccacatcaataaaaatatcttttcacttgtgatagttattttcttggcttgaaaggtcatcatttgcttgarcaaataggtgaagaggaaggttttcaagctgtgtttctaaggaaaatgagaccctgaattggaggagacgtgtatggtaatgagaaagtgtgatgatga

SEQ ID NO: 452028 - DNA, 478 bp, Homo sapiens
agctatcttgtgccttcagtgtctcagtaatagaaatagtagatgtactaaaatcaaacaacaacaaaaacaacaataaaaaacgatgatcaaagcttctcagatgtgcttagtcagcacaagccatggaatagtttcagttaccttgcattcaatgaaaataataattcaaggcacttttttagatggctttgacctctgagttgtacttaaataccatttcagcactgtttacacaggcaataaactataattattgagtgggggggatgaatacattgctgtggaataacctacaatctggtctccacatcaataaaaatatcttttcacttgtgatagttattttcttggcttgaaaggtcatcatttgcttgaayaaataggtgaagaggaaggttttcaagctgtgtttctaaggaaaatgagaccctgaattggaggagacgtgtatggtaatgagaaagtgtgatgatga

SEQ ID NO: 452029 - DNA, 478 bp, Homo sapiens
agctatcttgtgccttcagtgtctcagtaatagaaatagtagatgtactaaaatcaaacaacaacaaaaacaacaataaaaaacgatgatcaaagcttctcagatgtgcttagtcagcacaagccatggaatagtttcagttaccttgcattcaatgaaaataataattcaaggcacttttttagatggctttgacctctgagttgtacttaaataccatttcagcactgtttacacaggcaataaactataattattgagtgggggggatgaatacattgctgtggaataacctacaatctggtctccacatcaataaaaatatcttttcacttgtgatagttattttcttggcttgaaaggtcatcatttgcttgaacaaataggtgaagaggaaggttttcaagctgtgtttctaaggaaaatgagaccctgaattggaggagaygtgtatggtaatgagaaagtgtgatgatga

SEQ ID NO: 452030 - DNA, 633 bp, Homo sapiens
acttttcactggtttgttttgaaatcatggcagagagaataatagctaaatgatacttatcagttaaaaatagaagactgtcagattaagagaaccaggccctgccaaacaggtcacttctgtttgctgtgttctgaatactcaatttatgtattgatctttttttactttatatctttgctgcaagctaaagaacaaaattaacaatgtgtacaaatatgtttgtgttgtgtgtgtatacacatatacacatatatgcaatctatgcattatatatgtattatatacacataaacacagagcatttctctactgtcactgtcctgggaagcagctcttaaatgcatctagtggcttcttgcttgggcgggtcttcttctagcacccttgctgtcatatgccactgtgaagtgcattgtaattagctgtatattttatgtcatggagctgcactacstagtgataacaggttagggctgtcagttcaagtagcaagagtgtgaaaggatattaagtgaaaggatgacaacacaatgggaatacttcagatcccagtcattcaaagtttggccctctgtcaagcaacaagctccctttgccatggaatctatttctaggattagctggcctgct

SEQ ID NO: 452031 - DNA, 591 bp, Homo sapiens
caagaactgtgatctaacctcttaggagtatgatggtttcraaacttccctcaggtgtgctagtacactgtttacacctctgttgaaatctagtttaccatacttgtgtgatgaaagtgtcctcttccctctaacccccgattggagtgcactaaagggtcctccagggtacaggtacatgagtgcctaaccacccagcctcaaatgacacttagtttaaattcatcctctttactctccctcagagcagtctggggatctcacagggcttacatatatgcagggagattgtcaggttccacatatccaattgcaggactgggctgcactacaacatctttttgggttgagtggagggattgctgaccaggtggtgatggcatggtggtgtgacaaggctaggatcctagatgccatcaggaagtgcagaaaatgattgagaggccaaggactgtgtggcagcctgtttgtgtcagttgtcccccagagagagatgctgggatgggcttaaggtctttcatagcagccggctctcatccacagacactggcatcatgcaggcaccaaacctgtcttggatggatgggatgg

SEQ ID NO: 452032 - DNA, 593 bp, Homo sapiens
ataggaattattacaaaggtgaagactggtggcagtgctgataataagaaggtattaagcatttttccaaataggaacacagatttccagaaaaggaaatttctaaaaaactggtgataaaatgtaatctttaatccaagagaatgtaaaagaaagttttgcatttccctagaaaatgtaccatttgtgacaataaatcttagcattgatttctagtcaattgtctagtttatggattagcraataagaaaataatgaattccagaccattaccatgggatacaggtgcctttgtatataagagatgacatgagaaaataaatatatgatctggaatattaacatatgataccattcttgctttctaaaaatggcttctataagtttttcactccacatttcacaggcagatggttgagaaaatactatctaaccagaaatagaaaaacacttttcctggccagtgtcaactgtgtttccattaatctgcaatatctgaaagtaattattttgatcctttctctaaattgttagtaggaaagtttcatttactataattaagaaaaataaaaaattcctcctagaagtggatc

SEQ ID NO: 452033 - DNA, 491 bp, Homo sapiens
tgttatgacagccctagcaaactaacagggaccctgttccaagaagcagttctgggctgcctgtgcacgggtggatcttactggaccaaggatgatcaagtgacctgaggggaactcatctctaggctgactgaccctatagggtggccaggagcacagatcactgcccaatcagacaatgatccagagctaccyaaacagactggctcactccaggaatcctactggtggatacagtaggttgacagttaatcaaaagggggatgcaggcatacagaaataagtgacatcacagggagagaccatgtgaaaactagagaggtcagtacttcaagctgcctcaggctgatttccaaatccaactccaatcctcattttttgccttacaataatctttcctgcctcacactttttcttaaaacattgtcatgtaactcaatatgcagagggtcttacattgttttgaaactggaaaaacagttattccaaat

SEQ ID NO: 452034 - DNA, 541 bp, Homo sapiens
ggccagtgagaacctcctctcactcaacctcaacctctaagcagcattaaacacagctagccactcccatcttctgaaaacattttctttatttggtttccaggatgccacatgcttctaatttttcttttttatctctgaccttgctcctycttagtcttctttactgagttgtccctcttttcagacttctaaatgtcaaagtgccctgaggcactttttatattaacttcacttttttacatttactccttaggtcatctcatccaatttcatggctttaaaaataatctaaaaactggtggtcctcaaatttaaatttctagcccctatttgtctcctgaactccacaccagtgtattttaggctacttaagccttaatttcctcttcttcctcaaaacccactcatgttctcctctgtcttaagaaacagctgcacaactaagtcaatatagcaactataatgacaatttcctaccactttagccttagaacagagggtctttattacgtagttcttttactagagaatttttact

SEQ ID NO: 452035 - DNA, 541 bp, Homo sapiens
ggccagtgagaacctcctctcactcaacctcaacctctaagcagcattaaacacagctagccactcccatcttctgaaaacattttctttatttggtttccaggatgccacatgcttctaatttttcttttttatctctgaccttgctccttcttagtcttctttactgagttgtccctcttttcagacttctaaatgtcaaagtgccctgaggcactttttatattaacttcacttttttacatttactccttaggtcatctcatccaatttcatggctttaaaaataatctaaaaactggtggtcctcaaatttaaatttctagyccctatttgtctcctgaactccacaccagtgtattttaggctacttaagccttaatttcctcttcttcctcaaaacccactcatgttctcctctgtcttaagaaacagctgcacaactaagtcaatatagcaactataatgacaatttcctaccactttagccttagaacagagggtctttattacgtagttcttttactagagaatttttact

SEQ ID NO: 452036 - DNA, 578 bp, Homo sapiens
tagggtggaggtacaggtggaaggcaggaatcccaggagtattaccagccaagaatcagggtaaagattcagaccatgagtctatgtgacagcatatctgtaagtatatattctcgaggaaacgttgatttacccagactctagtatatctccctgtgctggggggcactgggcagggacagatcctcatttttattcattatttttcagaggattaggctttaaactttgcttacgaacccagttatagctttctaactttctgcaggcagcattggcctatcttggacttcaattgaaagctgtctctctcggtgtcacagaggtagctcccgcagcttctaggggcagggatatgtagccagtcttgttcacgttcaaccaacaagataagtgtctgagtagttctttcagaaaacctaggaggtattcagccccctmctgccccactttcttatatctcattgggtcacgtttcattaactgttttgaactaaacattgggaaactaaatgattgggaaaagctgattgttaaaccagtcggagcccacctcacttgttgagagtggtgttacc

SEQ ID NO: 452037 - DNA, 603 bp, Homo sapiens
gaggctatattctaaaatcatttcatccatttaaatcaaattgatgctgtccaaatctttacttactggctttctgtttgctcagtctatcaatttttgagagattgcattaaaagttcccaatatgttggtaaatttgtcaacttctccccgtgtacctataatttttcaaagcatataattcaaagccacattgttacattttatataattctaaaatcactatgtctaactggttaaactktttaatcactttttttcctccttagagtctactctttttgtgatattttggttagcatttgtttggtgtgactctttttatccttttacatccttatatgttcagaatgtgtgtgtgcatgtgtgtgtgtgtgtgttgtttaagatatatgtgtatatttgcatatgtacgtacacatgaacgaaatgtgaatccgtatatgtgtgtgtatgtgtctactctatctctttaaattactgcataggttatttcattggaattttattttaccttcaactcttattcattttctgtcatgtcttgtttttaaattttgtctcatttttggcctcctttggaatttcatctgtgtacttgtt

SEQ ID NO: 452038 - DNA, 587 bp, Homo sapiens
ctgactcttcactgagtttcagactcacatatcccaaggcccagtgagtacttcaagccactcacttcccatgtctaaccaaggacaatgtcattcccattctgcgtgttcttgatgtggcatttcttgcatcaccttactctcagtcctaattaacactgccctaatagaagctcccgtggtctttcatcaagattattaaaattgcttctcagttgggttccctattttcagtcttgcacaaataaatgttactcccttttatatgttcccagtttaaactattaaaaacacagatatgagtctgtttcccttaggatttcaatgcccatctttttcataagatgtaagttttttttttcccttaagtgcttatttgcctggacactgcctacctctcaagtcccaatgtcctgctggtcccagcctagcccttgaaatttgcagggtaaactgcttgtaagttcctgctcatttctgctattccatgcccttctgccttagcttatgctgctcctcctgcctggaacccaccccsctcttcactaactcttgacttgataccgatttctttttcagcactaatt

SEQ ID NO: 452039 - DNA, 549 bp, Homo sapiens
gctcacatttgtacagaaattggtagaaaggcagttactaaatagtaagtatgtggctgataagagaactaaatagtgctattgccaaacatcatttttatatctgcacttcatwcctactgactttggatgaagttgcccacacagggctgagaggagaatttggctccaagtgtgcagtttggccatggctgtagctctgactatagagaaaagagcagcatgccattggaggtagggtctgggcaaatcaactgatttctcatcctatctcacaggctcccttgggtccagagcacaatatgagtcattttatttactcttggtactttgtggtgccagaattaacagcagcccagctctgaaaggaagcttgacatatttttccaggagtccctattgctagaaactcagaatatggaattgacataaatctaatgaagtaaaagctctctcttcccctccctagaatcacagaaagcagtggcatttggaaaattgtgttttaaacgagttgacgagggcaggagttcagtagaagccagttat

SEQ ID NO: 452040 - DNA, 568 bp, Homo sapiens
ataaaatgtccttacttgtttctagtaatgagttttcttttatagtccattttgtctgctgttagtataaccactcaggttctatttttgttactgtttgcatgatacatctcattgtgtcttttacttccaacctatttgtgtctttgaaagtgtgtctcttttaaaagcatgtaatgggattatatttttaaatccattctgctaatatctgcctcttaataatacatctattaaacttttaaatctaaactcaaaagagatttaaaaaaaawttttcaacttttattttagattcaagggatacgtgtgcaggtttgttatttggatatattgtgtggtgctgaggtttggggtatgattgatcctgtcacccagatactgaatatagtgcccaatagttactttatcaacccttcctccccttctaccctcccccaaaaatagtcctcagtttctattgtagccatctttatgtcctcaaatacccattgtttcactctctattataaatgagaacatgtggtatttggtatttggtttcctgttcctgtgtgaatttgcatag

SEQ ID NO: 452041 - DNA, 625 bp, Homo sapiens
tcctgttcctgtgtgaatttgcataggataacggtcaccagctacattcatgttgctgcaaaggacatgatttcatttgtttcttatggctgtgtagttttagtattccatgacgtaaatgtaccacattggctttatccagcccactgttgattgcatctaggttgattccatgtctttgctattttgaatagtgctgcagtgagcatatacatgcatgtgtccttttggtagaatgatttattttggtgggtgggggggtatatactcagtaatgggattgctgggtccaatggtagttgtgttttaagttctttgagaaatgtccaaactgctttccacaktggctgaactaatttacattcccatcaacagcatattagtgttcccttttctctgtagcctcaccagcatgttattttttgattttttaatgatagccattctgattggtgtgagatagtatcttcttgtggttttggtttgcatttctctgatgattagtgatgatgagcattttttcctgtttgttggctgcttatatgtcttcttttgagaagtgtttgctcatgtcttttgtccatttttaatagaattatttggtttttgcttgttcaattattta

SEQ ID NO: 452042 - DNA, 627 bp, Homo sapiens
ctgtacactgctttgggcagtatgacaaatggatttccttttgtttgtaccatttatgattttatttcatcagcrttttaaatttcttcttgcagatatctttcacctctttggttagatgtattcctaggtactttttgttgttgttgcttttgtaattgggattgtgttcttggtttggctctcagtttgaactgtattgctgtatagaaatgctactgatctttggacattgattttttaaatactgattttttatactggagttatttatcagagccaggagccttctggctttcagggttttatagatatagaatcatatcatccatgaagaaatctctgcctcttaattgaaacattcactccatttatatttaaggcaattactgataaggtgggatttacatctgccattttgctatttttttctatatgtcttatgtcactaatgccatgtccattacagccttctctagtgataaatagatattttctggtgtaccattttagttcccttgacatttttaaattatattttttgagttactttcttagtggttgccctgaggattataattaacatctgaatttataacaaggtagtttggatttatatcaacatag

SEQ ID NO: 452043 - DNA, 627 bp, Homo sapiens
ctgtacactgctttgggcagtatgacaaatggatttccttttgtttgtaccatttatgattttatttcatcagcattttaaatttcttcttgcagatatctttcacctctttggttagatgtattcctaggtactttttgttgttgttgcttttgtaattgggattgtgttcttggttyggctctcagtttgaactgtattgctgtatagaaatgctactgatctttggacattgattttttaaatactgattttttatactggagttatttatcagagccaggagccttctggctttcagggttttatagatatagaatcatatcatccatgaagaaatctctgcctcttaattgaaacattcactccatttatatttaaggcaattactgataaggtgggatttacatctgccattttgctatttttttctatatgtcttatgtcactaatgccatgtccattacagccttctctagtgataaatagatattttctggtgtaccattttagttcccttgacatttttaaattatattttttgagttactttcttagtggttgccctgaggattataattaacatctgaatttataacaaggtagtttggatttatatcaacatag

SEQ ID NO: 452044 - DNA, 537 bp, Homo sapiens
ttttgtaaagttgactgggtgagcttcatgtcacttcaagtaccaacagccctgtgagtggagtcttccagggaaacattagacagaccaaataatgaataattatatggaaatagagctttgaaggggttcttaccctattttaccccctccaaatggcttcccaggctgctggtgttaattatgattgtggcctgttggtttttaaggttacctcaaaaatgagggaggaggtggatgggcatagggcaagttaaaataacatacaatgtgcttttcttaataaaatttagcttctttttaggaaaaatgaatgttctttgaattgctgcaagcctttgggttaatggctagagttataaaaaagttgattctgacattttttgccattattttcattgcttttatgaaagataatctttttggatgtccttaccagcattttccactgatgcyacttctcactattaaaagactcaataaatgatgtttgtttttgttatcaattagctaaccaacttcatgagattatcatta

SEQ ID NO: 452045 - DNA, 634 bp, Homo sapiens
tacttctcactattaaaagactcaataaatgatgtttgtttttgttatcaattagctaaccaacttcatgagattatcattattatcatcatattgcatatgataatgaagcacaaaagaagaaaaatactttttattttccacctccttttactgcacttttcccatttcaagtgccagtgaagcttcttattaatatccagtctcaagaaaaggtttgacattcatcaattatgtcatatagattcggggtcatatgttacttctcccaggaaaatgtgtactgaatcaaaacatattcctattctcttaaaggtatatgaagccccagtgagaaaactgaaattatgatttaaggaaaagaagcccttgaaatatckgaaatagcattatacaggcaataaaccttagtcttgttagtgggtttagtttggagtccaccattgcccatgggcatggagatctgccagggctcatgtgagatgattagggcactgcctcaggggtgcagaatgcagagagtagaagcagcctaggagactgattaacattcttggcagaatgtggtgaggactggcttcataacatgcagtccgtgactcaagataggatatgaaaattaatagcagaaacc

SEQ ID NO: 452046 - DNA, 525 bp, Homo sapiens
gatgctcaccaaataataacgatgattctacctgaataggatgctcactttccttgtcttttttaattgtttacatttttaagatgcgcgtagcctttttagagagataataatgttattattattaataaaataaagtagaatagcaaggacatggtagcagtgactggagccgttcttatgagctgttaggctataaaagtaagtagagatatagagaaaaagcaacaagctrtctatgcccgttaattttccagggccttatattaattgcagaaaactgaaagcaaaactattattctgagtgagatcctagttgcaaaaccctacctcctcttccagagatcagagctctcttcttaggatctcagaaagagatcccaatcagggtctggccttactccattgttcattactgaaaaggcaaaaccacaaaggatagtgaaaagaaacaatgtctgatttgtccttgacagccaaacactctgttttctgctcaggacatacatcattccatttcacatt

SEQ ID NO: 452047 - DNA, 637 bp, Homo sapiens
agtctaaatttcaaacatgtaggtataacaagcattgtaatttcaactcttaaagttcttcgtcactcttatttttaaccttagacactttcaggttccaatatttttggtaaagtacccacctgaatttcagttgtgttaggttctgtcagcttcttttgttaacttcaagtaaaattcaactgaatagttaatcttaaaatgatgtgtatggtataatacattctaaagttattttgattttatttttctggaatgatgctcaccaaataataacgatgattctacctgaataggatgctcactttccttgtcttttttaattgtttacatttttaagatgcgcgtagcctttttagagagataataatgttattattattaataaaataaagtagaatagcaaggacatggtagcagtgactggagccgttcttatgagctgttaggctataaaagtaagtagagatatagagaaaaagcaacaagctgtctatgcccrttaattttccagggccttatattaattgcagaaaactgaaagcaaaactattattctgagtgagatcctagttgcaaaaccctacctcctcttccagagatcagagctctcttcttaggatctcagaaagagatc

SEQ ID NO: 452048 - DNA, 506 bp, Homo sapiens
tagcaagtgttcagtaaatggtagctctttaaaaatcatacactatgcctcacaataagaggagccatgtatgacaaacccacacccaacattatactgaacagggaaaaactggaagcattccccttgagaactggaacattacaaggatgcccactctcaccattcctattcaacgcagtactggaagttcttgccagagsaatcaggcaagagaaagaagtaaaaattcatccaaataggaaaagaagaagtcaaactatctctcttcactgatgatatgattctatacatagaaaatcctgaagaatctgccaaaaggctcctggaactgataaacaatttcagtaaagtttcaggatacaaaatcaatgtacaaaataatcagtagcatttctatacaccaataatgaaccaagctaagagccaaatcaagaacgtaatgccatttacaatagctgcaaaatatagaatacctagaaatacatctaaccaaggaggtgaaa

SEQ ID NO: 452049 - DNA, 506 bp, Homo sapiens
tagcaagtgttcagtaaatggtagctctttaaaaatcatacactatgcctcacaataagaggagccatgtatgacaaacccacacccaacattatactgaacagggaaaaactggaagcattccccttgagaactggaacattacaaggatgcccactctcaccattcctattcaacgcagtactggaagttcttgccagaggaatcaggcaagagaaagaagtaaaaattcatccaaataggaaaagaagaagtcaaactatctctcttcactgatgatatgattctatacatagaaaatcctgaagaatctgccaaaaggctcctggaactgataaacaatttcagtaaagtttcaggatacaaaatcaatgtacaaaataatcagtagcatttctatacascaataatgaaccaagctaagagccaaatcaagaacgtaatgccatttacaatagctgcaaaatatagaatacctagaaatacatctaaccaaggaggtgaaa

SEQ ID NO: 452050 - DNA, 599 bp, Homo sapiens
ttggtttggagtttgtttcatccctagctgtgagtgccttttggtctagaaacttggcttgtctcataataacccagagctaggacattctctgtaattatgaattgtccttgttttacattaaaagagtatgtctttgatcgctagagtttgcacrattaaattatttccactgtgagattcttaaattttttgcttcatcatattaaaataactcatgttagaggtcctttcaacatgaaagctttgtaggtgagatagtatatatatattttactgtttataataaaaatcattaatacaaaataagtcctgggttttaattttaatattttgtacaagatctgttttccataatgtgttgacagctacaatttcactaactgttgatgttattttctatagggattctggagcctagggagctatgtggttttttcattttcacttttaataccctgaagcaagagactatatgaccttcagtgcaaagacttcagaccaattctttgtattacacttggttgcctcttagctatataactcctgagtgcaaatcaacaaactctttagtgaagtattgtagagaataaatcata

SEQ ID NO: 452051 - DNA, 621 bp, Homo sapiens
ttaatatggttcttgggtatttcaaygtctttttttttttaagatgatgtctagctctgtcgtccaggctgaagtgcagtagtgcaatctcagctcactgcaacctgcacctcccaggttcaagtgattctcctgcttcagcctcccgagtagctgggactacaggcatgcaccaccgtgcctggctaatttttgtatttttagtagagacaggttttcaccatgttggccaggctggtctcaaactcttgacctcagatgatctgcccgcctcagcctcccaaagtgctatgattacaggcattagccaccatacctggccttgaatgtcttcttttgatatatgtctatttagatcctttgcccattttttaagcagattgttttcttattattcagttgtttgggttccttatacattttggatactaatcccttgtcagatgtatggtttgcaaatactttctccccttctgtgtcctgtctcttcacttgattgttttctttgctgtgcagaagatttttagtttggtgtaatcccattgatctattcttgcttttgttgtctgtgcttttggggtcatatttaaaaagtcattgcccagaccagtgtcatagaac

SEQ ID NO: 452052 - DNA, 562 bp, Homo sapiens
tccagtttggggcctctggkgatgactttaataccgagcacttagtcatcatgtttgatggcttccgcggcctcatttatcaaggatctatagttaaatttaattttcatgtgagtggaggacagccatggcagcccagctccttgttgctgatctgcccccgttgatgtcttctgaagtggaaatgatggatgccacgtgttctggctgtgattaaatttgctttgacaaagcagcatggaaatcagattttcaatagacttctgtatttcacctagtgctgagtaaacagatgcagaacataatgcttgcatggctgtcaggccgatagctaattcattgtggccatctaatcaggctgtccattaaattattatttgtcaataacatacaggatcatttctgaaactctgaggaatgagaagcttgtttttaagtaaataaatgtggagggcttgacaacatcaggggtttttcttaggagggtccaaataactcatcagtctctgtgtctctacccccctgaagaatcaaagcaccatttaagaagtttttagtttct

SEQ ID NO: 452053 - DNA, 562 bp, Homo sapiens
tccagtttggggcctctggtgatgactttaataccgagcacttagtcatcatgtttgatggcttccgcggcctcatttatcaaggatctatagttaaatttaattttcatgtgagtggaggacagccatggcagcccagctccttgttgctgatctgcccccgttgatgtcttctgaagtggaaatgatggatgccacgtgttctggctgtgattaaatttgctttgacaaagcagcatggaaatcagattttcaatagacttctgtatttcacctagtgctgagtaaacagatgcagaacataatgcttgcatggctgtcaggcygatagctaattcattgtggccatctaatcaggctgtccattaaattattatttgtcaataacatacaggatcatttctgaaactctgaggaatgagaagcttgtttttaagtaaataaatgtggagggcttgacaacatcaggggtttttcttaggagggtccaaataactcatcagtctctgtgtctctacccccctgaagaatcaaagcaccatttaagaagtttttagtttct

SEQ ID NO: 452054 - DNA, 601 bp, Homo sapiens
gccaagagagtcaactgctactctcaggacctaagcaggracctcaccctgtgtttcctatttcagttcatggcttcagtaacatcttcctaatcactcaaactaggagacatcttccaataagtatttctcccattctttgcccaccatatctcccctagcaggtgtacatccccgagttcttcctctctcttttatccccatatgagactactctaaatcaagtccccacaatctcttaggtggacgagtcagccccctaactgtctaccagcctccacgttgttgcttctggaatccattcttgcaaatgccatgttactttcctgacacagaccagatcatttcctcctcagaaacactcgatgacccctgcttactttgtccagttccctggatgttctgttcaaggtgcttcctgttgaccccagtcttgtctccacccttctgtccatgctcactctgcctgagccaagcttgacccattgctagtccctgaatcttcataatttgatgacttttcatgacattccttttcctggaatgcattttctctcctgtatgcctgagcaaaggctattcagtccttcagtgataactc

SEQ ID NO: 452055 - DNA, 618 bp, Homo sapiens
aatttaaaaagcacaccaaatatatgctgtcttcaagggacccaattaacttgtaaaggttcatataaactcaaggtcaaaaggtgggaaaaaatattccacacaatgaaaaccaaaagggagtaggaatagctactcctatatcagataaaacagactttaaaacagcacagtaaacaaagacaaagaaggtcattatataataataaaggatcaattcaacaagaagatatagcaatcctatatatatatatrtgtgtgtgtgtgtgtgtgtgtgtgtgtgtgtacctaactccagagctcccaaattcataaaacaaataccactaaatttaagaaaagagatagcaacacaataatagtgggggagttcaacactctactgacagcattagacactctactgacagcattaaggcagacagccaacaaagaaacactggacttaaactggaatctagaacaaatggccctaacagacatttacagaaaattctacccaaaaactgcagaatacacattcttctcatcagcgcatggtgcattttccaacatagaccatatgataagccacaaaacaagtctcaataaatctttaaaaatcaaaattatatcaag

SEQ ID NO: 452056 - DNA, 555 bp, Homo sapiens
tctttctgagcattgagataggtgcaagggttggtgagctcccttgaggaggtcatagtaagaataaaaatgtatgtattcattcaacaagtttttattgagaaactgtcattggcagacgttgtattcaacactgggattatggacaagaaaggcatggatcttgtcctgtggagcttcctcttggggggtaggtggataaaaaccccaaatacacagaaaaataaacacaaagtcattaacaaataaagacactgtcatttgtaaatactcaagagagcattgtatttcacaattcacattttgacctaattttaggaagggatttagccagagccttgagttggggatttaactgtaaatgtttactcaggatgcaaagtttgcacagagcctcagaaccacagccatcctcgcctactgctcgtcacacatcgccacccsccggagcatactttctcacttgaggaaataaggctaatgtaggaagcatttagctcagctctatgccagctctgtattgaccttgtatgttcagctctgtaattttaagac

SEQ ID NO: 452057 - DNA, 510 bp, Homo sapiens
aataacacagtgttgacagcatggtatagttttttkttttgttttgttttttgttttttgttttttttttgagatggagtttcactcttgttgcccaggctggagtgcaatggcgtgatctcggctcaccacaacctctgcctcccgggttcaagtgatgctcctgcctcagcctcccgagtagctgggattacagggatgtgccaccacacccagctaattgtgaatttttagtagtgacagggtttctccatgttgctcaggctggtcttgaactcctgacctcaggtgatccacccgcctcagcctcccaaagtgctgggattataggcatgagccatcatgcccgaccttttttttttttttaactttaagttctagggtacatgtgcagaatgtgcaggtttgttacataggtatacatgtgccatggtggtttgctgcacctatcaagccgtcatctaagttttaagccctgcatgcattaggtattggtcctaatgctctccc

SEQ ID NO: 452058 - DNA, 510 bp, Homo sapiens
aataacacagtgttgacagcatggtatagtttttttttttgttttgttttttgttttttgttttttttttgagatggagtttcactcttgttgcccaggctggagtgcaatggcrtgatctcggctcaccacaacctctgcctcccgggttcaagtgatgctcctgcctcagcctcccgagtagctgggattacagggatgtgccaccacacccagctaattgtgaatttttagtagtgacagggtttctccatgttgctcaggctggtcttgaactcctgacctcaggtgatccacccgcctcagcctcccaaagtgctgggattataggcatgagccatcatgcccgaccttttttttttttttaactttaagttctagggtacatgtgcagaatgtgcaggtttgttacataggtatacatgtgccatggtggtttgctgcacctatcaagccgtcatctaagttttaagccctgcatgcattaggtattggtcctaatgctctccc

SEQ ID NO: 452059 - DNA, 627 bp, Homo sapiens
ctcaatgtttagctcccacttgtaggtgaaaacatgcagcgtttggttttcttttcccgcattaactcacttaggataatggactccaatgccatccatgttactacaaaggatatgattttgttcttttttatggctgtgtagtattctgtggtgtatatgtaccacattttatttatccagtccactattgatgggcatctaggttgactccatgtctttgctattatgagtcgtgctgcaatgaacatacgcatgcatatgtccctatggtaggatgatttacattcttttggttatatacacaatagggattgccagatcgaatggtagttctattttaagttctttgagaaatctccagactgctttccacagcagctgaactagtttacattccaaccatcaatgcataagcattccttcttctctgcaatcttgccagcatccattatatttttacttcttttttttacaattcttttttttttattattatactttaagttctggggtacaagtacagaatgtgcagttttgttacatagggatacatgtgccatggtggtttactgyacccatcaacccatcacctacattaggtatttctcctaatgctatccctcc

SEQ ID NO: 452060 - DNA, 529 bp, Homo sapiens
ggatatccctatggccaggatcctttccaggagggggattggaagatttgatgcatggatcaaattagctacacagtccacatgaaatgcaaatttgttttgctccctccatggcagctaagtatagtacaacatattaggatgtgagaaacctgagctaaacccccacattttcctgataactcactagccttatacaagtctccccatcaccaattcaagctctgcagtaagccacaccactttatcagaccctggacagcctttctaggcactgccacaggccactagaaaccrttgtttatattgaaatagcagaacttactgtgacctttaaaaataaagtactaatttatatccttatgctgtggtctgaatgtttgtgtctctgcaaaatccatgtgttgatatctagtcctcaatgagatagattaatgcgcttataaaaaaggcctaagggaggttgtttgtctcttccactgtgagaaggcaccatcattgaggaatggtcctcaccagacactgaatc

SEQ ID NO: 452061 - DNA, 568 bp, Homo sapiens
cccttatacctaactactagaaattactcttttcttacaactggcatattctttaacttatcacagtttatttatatttattgcttcacttatttatccattattagccctcaaactcctttacagagaaactacatatttttttgtatttttagtacttagctgaggtagctaaaggaatagtttttaaattgagagatgagtaatatatttctctggagaaaggaatgtacagataaaatatgctttcttatactcttaaaaaagttttaacatgcaatatagatagtttatgagtacaataaaagatttctcccttatatttacaaaaatcacatgggtttcttatttaataataacccaaattctttcttctcccaaaatgaaattttatagtaagttgttttgttarttaagattttgtgtaagaaacagaaatcgtgcatgactaacaaacagaagaaaatgtattgttagcataaggtgttgctaacaatatgaaagggaagaataaatcatcaggttttcaataagcagaaagctttcattccaacagttttcagtcatg

SEQ ID NO: 452062 - DNA, 474 bp, Homo sapiens
agttttttggcttctctgctcgaagatatgggacttggattcacaaccccaataaggaaaaaaatatctgaagaaataattctttgtttggtcaggagatatttggtgatcaaaagtcaacaaatactcgttatcatggataaccttgatagaagcatattaatatctaataagactatccttctgaaatcagcatttccttattctaggaaaataatatgactataaaataatgtaattgttattaaagaaggcttcagttattgtgattyttaaaaatatttaattaatctgctgcaaagtgaattatatgtaacattttcatcaatgccaattctaatgtagatattcttatcttgcttccaggttacaattgcttgctttctcattgtcagtaagcagtaggtattaagaacacgggttctaagtcaaactactacctcaatttgaaattcttaaattacaagtgatagg

SEQ ID NO: 452063 - DNA, 599 bp, Homo sapiens
gaattcttaaaaatatctctctaaaagaatattctaagtgcattagaaatgctccactgtagaaataaatagtaaagagaaataaagatataaagtgttcaaaatgtgactataatgaaaataagtttgtacagttttgacttctcatcaatagatgtgaaatattattttttatgttgcaaaataattcagaattataataatttattagaactttacagttacatgcaaaaatatacaaaaacaggttataaagaatatgctattattagcgtaagtaatgyagaaaaagatgtatattcatattgcttctgtatgtataaaataacttcagaaaactatacacacacaaaaaagccctgataacactgattggctatagagaggagagaataattgagtgggtgggtaatgctggtggcaatgttgaactctgaaacatatagacatatcacctattaaaaatagatatgaaaacatgtacaaggtataaaaataatgcttgatttgatagcaaactttccatgtttatttccaataaagaggagatgacttctaaaaatctcttccattaatagaataaaattttataataccaa

SEQ ID NO: 452064 - DNA, 599 bp, Homo sapiens
gaattcttaaaaatatctctctaaaagaatattctaagtgcattagaaatgctccactgtagaaataaatagtaaagagaaataaagatataaagtgttcaaaatgtgactataatgaaaataagtttgtacagttttgacttctcatcaatagatgtgaaatattattttttatgttgcaaaataattcagaattataataatttattagaactttacagttacatgcaaaaatatacaaaaacaggttataaagaatatgctattattagcgtaagtaatgtagaaaaagatgtatattcatattgcttctgtatgtataaaataacttcagaaaactatacacacamaaaaaagccctgataacactgattggctatagagaggagagaataattgagtgggtgggtaatgctggtggcaatgttgaactctgaaacatatagacatatcacctattaaaaatagatatgaaaacatgtacaaggtataaaaataatgcttgatttgatagcaaactttccatgtttatttccaataaagaggagatgacttctaaaaatctcttccattaatagaataaaattttataataccaa

SEQ ID NO: 452065 - DNA, 599 bp, Homo sapiens
gaattcttaaaaatatctctctaaaagaatattctaagtgcattagaaatgctccactgtagaaataaatagtaaagagaaataaagatataaagtgttcaaaatgtgactataatgaaaataagtttgtacagttttgacttctcatcaatagatgtgaaatattattttttatgttgcaaaataattcagaattataataatttattagaactttacagttacatgcaaaaatatacaaaaacaggttataaagaatatgctattattagcgtaagtaatgtagaaaaagatgtatattcatattgcttctgtatgtataaaataacttcagaaaactatacacacacaaaaaagccctgataacackgattggctatagagaggagagaataattgagtgggtgggtaatgctggtggcaatgttgaactctgaaacatatagacatatcacctattaaaaatagatatgaaaacatgtacaaggtataaaaataatgcttgatttgatagcaaactttccatgtttatttccaataaagaggagatgacttctaaaaatctcttccattaatagaataaaattttataataccaa

SEQ ID NO: 452066 - DNA, 590 bp, Homo sapiens
ggccctcatgattcaattatctatatcttgtccctcccatgacatgggggaattatgggaactacaattcaagatgaaatttgggtgggacacagccaaaccatttcaacaaagaagcttgtcaatttctacaaagaaatttgtaactcacccatttagagcataagattcaataatatttaaattttgcataaagctgaacaacaatcaccacagtctaattttaaaacattttcatcatcccagaaagaacccatgtacccattaacaatcattttcgatctggccccacattccatccaatacccaagcacagcacaaggcaaccgtgaatttacttactgtctctttagatttgcctaatgttggcaaggatctttctttgttataacatgcatcagtacttcattcctttgtaatgtagaataatattycatttacacatatattaccttttatttgtccattcatcagttgttaggcatttgggatatttctactttaaagctgtaatgaataatggtgctataaacattaacgtaaaagttttatatagacctacgttttcatttttcttcagtattcaccta

SEQ ID NO: 452067 - DNA, 594 bp, Homo sapiens
tgagaagtgctagtcacagtgagctagaagggggtaggaagggagcaagttgaggctcaaatgctatagatttgctgttcttactgagaattagtagattttcttaaataagtttgaggcaggaaaatagggtctgcagacagggaacttaaggccaatttgagcaaatttctaaaacagaaaacaccaaggtctgggggcagaaaatctagggccaattcatgctgacttcccaaagctggatcaaaaggaaaacrcctaggtttgggggcagggaacctgaggccaattaatacaaacttcctaaaactaaaccaaaaagaaaaaaagaaccctctccccaagctgagtaacaaaggatcaaaagctactctccctacagccctcccccttccgccacatctcagatggaaagggagagtgccttggataggccacaggccgagcagggaccatccctttatctgcatgggctgccaattcacctcagcctttagccacagacaaaaccttcttccagataaggggtagccaataagaacctcaaattgggtacttaaaacccagaaaactttgcatccaggcccttgacca

SEQ ID NO: 452068 - DNA, 541 bp, Homo sapiens
tccaataccatttttagaaactgtttgcaacaaaccaatgcttttacaaatactaacttaaaattacagtgataaagtttgctctacagcttaaaaaatactagagtgatttttgaatattagtatgtaaaaatgatttgaaattctgcattccaagagagcatggtaattaacagacaatagagatycatatatttgcttaaatctttaaacaaaagattaaataatattactgatacctctctccgtcgagaagcccaacaagtttgtttgatcttccataccacagcagccaccagcaataaggataggaaacaactggaaaataaaacacaaataatttttgctcaaaacttatttgaactatgtaatgaaaaaacagtacatgaaagactcaaatacatatatatataagtaataactttgtctaggtaaacaatcaaaaatatgataaatttccaatgcttaaaatgttctctcaaaaccaaaatgtacaggtagaaaaaatatttatatttcttgctatagattatggtcaata

SEQ ID NO: 452069 - DNA, 541 bp, Homo sapiens
tccaataccatttttagaaactgtttgcaacaaaccaatgcttttacaaatactaacttaaaattacagtgataaagtttgctctacagcttaaaaaatactagagtgatttttgaatattagtatgtaaaaatgatttgaaattctgcattccaagagagcatggtaattaacagacaatagagatccatatatttgcttaaatctttaaacaaaagattaaataatattactgatacctctctccgtcgagaagcccaacaagtttgtttgatcttccataccacagcagccaccagcaataaggataggaaacaactggaaaataaaacacaaataatttttgctcaaaacttatttgaactatgtaatgaaaaaacagtacatgaaagactcaaatacatayatatataagtaataactttgtctaggtaaacaatcaaaaatatgataaatttccaatgcttaaaatgttctctcaaaaccaaaatgtacaggtagaaaaaatatttatatttcttgctatagattatggtcaata

SEQ ID NO: 452070 - DNA, 488 bp, Homo sapiens
ggagctctggctacagagagccaagataaaccctgttgatttccttcttgtctgtcctcccagctcaaaacatggtacaataggaaaagtgtgtagtttctgaccacatgatggaaaagtagagcccacaaatccagaaaggacctaggagataatggagatagaaaagccttcccatcaaatgttatggggtggggggagggggagggctagcattaggagatatgcctaatgtaaatgatgagttaatgagtgcagcacaccaacatggcacacgtatacatatgtaacaaacctgcacattgtgcacatttaccctagaacttaaagtataataataataaataaataaataaataaatatatagtgctttataaacggtctgggatctctcctgagctgsctgtgtgctgatctgatcctaattaacattatcatacgaaagaataggagaactgagctcataaattgaactttggtccgggcc

SEQ ID NO: 452071 - DNA, 626 bp, Homo sapiens
cagaattgcttgaacccaggaggcggaggttgcagtgaactaagatcatgccattgcactccagcctgggcaacaagagcaaaactccgtctaaaaaaaaaaaaaaaaggggggagggaacagggctctaatggaagtagtcattcttaagttaattaccaagtcaaggactatctctcaatgtttagtgctttaagaaaactttcatcaggtactagatctattacctatgcrtatgggaaaggtgacatttgatccctgctttgaatataaaataaattctaggaggaaaggtaaaaacaatgaaatatctagaaggtaatgtaggaattattcttcataacattagaatatagaatggattcttaaagaggacacataaaatactataacaaaattagactacaaaaaaacctaacactttttcttatcgaaagacaccattagcattatgacgagtcaagtcacacagtagtacgaaatatttgcaaactgtataaaagccaaaggccttatattcacactatgtaactcatataaatcaattaagaatagtctgaaaactcctttctccaaaaatgacaatagactgacatacacttcacaaaagaagacatccaagtgtc

SEQ ID NO: 452072 - DNA, 626 bp, Homo sapiens
cagaattgcttgaacccaggaggcggaggttgcagtgaactaagatcatgccattgcactccagcctgggcaacaagagcaaaactccgtctaaaaaaaaaaaaaaaaggggggagggaacagggctctaatggaagtagtcattcttaagttaattaccaagtcaaggactatctctcaatgtttagtgctttaagaaaactttcatcaggtactagatctattacctatgcgtatgggaaaggtgacatttgatccctgctttgaatataaaataaattctaggaggaaaggtaaaaacaatgaaatatctagaaggtaatgtaggaattattcttcataacattagaatatagaatggattcttaaagaggacacataaaatactataacaaaattagactacaaaaaaacctaacactttttcttatcraaagacaccattagcattatgacgagtcaagtcacacagtagtacgaaatatttgcaaactgtataaaagccaaaggccttatattcacactatgtaactcatataaatcaattaagaatagtctgaaaactcctttctccaaaaatgacaatagactgacatacacttcacaaaagaagacatccaagtgtc

SEQ ID NO: 452073 - DNA, 581 bp, Homo sapiens
gagcagcctcaggaagtttacaatcatggtagaaggtgaagggggggcaggcttgtcacatggcgaaagcaggaacaagcaagagagttaaggaaggagaagtgccacacatttttaaatgaccagatcttaggagaactcactcactattgtgaagtcagcatcaagccatgaaggatcttttcccctgacccgaataccaggccccacctccaacactgggattacaattcaacctgagatttgagtygggacaaatatccaaactatatcagaagggatagcatggaatacaggacactgcttcacatggtcatttaagaaattcagatgatggaaattctgtcattcttcaggtgtccaagattgtcaataaagacggagactctctagtagtcaccaaaggaagaatataactttttaactatgctgaataaatatgacaaatatttattgtttgcctgtttgttttgctttttagcaaagcaagtgttcttaaactgttttttgtttgtatgtatattttttaagagaactgtcacttttgtttgcaatgtaatttattagaaatcaagaacatt

SEQ ID NO: 452074 - DNA, 610 bp, Homo sapiens
tgatattttcaggtaatattgatcataaagcatatatattcatgtctacatgaactggatattatcttaaatatctttgccagaatttagattctaaatataaagctctcagcaagttcttaatgcttggaaaaaattcagcttttgtcttagcaagaatgtgaggtagtgcataaaaaacaaatgtakgttcttctatactagatttttaaaaacgaaatttgattttggagtgttaggttttatttcaatttaatttaatttttaaaataagtaatatattaacataattcaaatttaggaaaaaataaaaagttataaattaaaaagtttcacatttatctataacctagtccacactttccctccctgccttcatagataaacacttgtttattatctatccttccaggtttcctttatcaggatgttgcatattccaatatcaacatacgcaaatgtgtaaacatgtatccctcctttattatacaaaaataatatatttctgtatttcgttaaacctgagttcagacaatttgcacaacatttttgtgtaccaccaagaaagaaaaaatcttggcaattaaagggtgacagcattgattataaa

SEQ ID NO: 452075 - DNA, 610 bp, Homo sapiens
tgatattttcaggtaatattgatcataaagcatatatattcatgtctacatgaactggatattatcttaaatatctttgccagaatttagattctaaatataaagctctcagcaagttcttaatgcttggaaaaaattcagcttttgtcttagcaagaatgtgaggtagtgcataaaaaacaaatgtatgttcttctatactagatttttaaaaacgaaatttgattttggagtgttaggttttatttcaatttaatttaatttttaaaataagtaatatattaacataattcaaatttaggaaaaaataaaaagttataaattaaaaagtttcacatttatctataacctagtccacactttccctccctgccttcatagataaacacttgtttattatctatccttccaggtttcctttatcaggatgttgcatattccaatatcaacataygcaaatgtgtaaacatgtatccctcctttattatacaaaaataatatatttctgtatttcgttaaacctgagttcagacaatttgcacaacatttttgtgtaccaccaagaaagaaaaaatcttggcaattaaagggtgacagcattgattataaa

SEQ ID NO: 452076 - DNA, 610 bp, Homo sapiens
tgatattttcaggtaatattgatcataaagcatatatattcatgtctacatgaactggatattatcttaaatatctttgccagaatttagattctaaatataaagctctcagcaagttcttaatgcttggaaaaaattcagcttttgtcttagcaagaatgtgaggtagtgcataaaaaacaaatgtatgttcttctatactagatttttaaaaacgaaatttgattttggagtgttaggttttatttcaatttaatttaatttttaaaataagtaatatattaacataattcaaatttaggaaaaaataaaaagttataaattaaaaagtttcacatttatctataacctagtccacactttccctccctgccttcatagataaacacttgtttattatctatccttccaggtttcctttatcaggatgttgcatattccaatatcaacatacgcaaatgtgtaamcatgtatccctcctttattatacaaaaataatatatttctgtatttcgttaaacctgagttcagacaatttgcacaacatttttgtgtaccaccaagaaagaaaaaatcttggcaattaaagggtgacagcattgattataaa

SEQ ID NO: 452077 - DNA, 556 bp, Homo sapiens
tcatagctctggctacagtatggagaatggattataggggaacaagggaagaggtagggagaacaatttggagcccagggtataagagaaaatagttgtttggactacataggtggtaatagaggtggagagacagaggaaaatttaggatttgtttttgaggtcaaatatattgtcactgctgatagattggatgcaacgggtggggaaaaaaaaagactaattctcactctacaatctagggttttaccttcaaaaactrggtacatggtggtaccttaacctaaaccataagaactgggagagacaaaaatgtgagggaagttagacagctgtcaagagcattacttgaggtaaagtttgcaatgcctaaaagagattcaagaggggaaggttcacatagcagttggacataaagacatttggatatacaagtctgagattccagagagaggtctgggattccagagagagttctgggctgaatctataagtttcctaattaataccataaaatttatattcaagatccaagtcttgattaatgttaaatact

SEQ ID NO: 452078 - DNA, 578 bp, Homo sapiens
tttcagagcagaagtctcagtgtccttgggaatgttacaactcagtgagcaagataaataggtaacacaaagtgttaaattccaataccaggtgaaggcagatggttagaatagccttcaccaaataggtgccatttgagctatcaagaatatgtagccctttgcttgatagataaattggttaggatgttattaaaagtcagtatgggcacagagaaggtccttggaaaatactagcagttatgacagtaccattgctttcaaaatactgaataatcaaatgccaggtatgtaattaagaaaagagttgaaagacaaagctgaaaagatacttctgtgtccgattgtaggagaacctgtgacagacaggaaagaaatgggtaatctaaacttctgtaaaccacttaaagcagaaaattctttgggaagtagttatctcaattatttcttgcaaaatcatgattctgtttgtcttacttacgataaaaagcaaactagcaaactacagctgcagttttatatgtataastacagccattatatataattgtatatataatacatatatatgtgtatct

SEQ ID NO: 452079 - DNA, 522 bp, Homo sapiens
tcaatggcactgctcatgtaaatttcaacttatttgggaagaagaattcttagatataaattttgaattgtttctgaaattttatatgtgaattttttgagaaacaaactgcagcttaataatttgcttttccactgagttaatgattcagttaatattgcgtttcagttttaatttagcatcatctataccatttaaggagatcttggttgtaatctcccatataacaactaggttattttatacaagttaaytaagcttaatgagacccaatggtacaacagggataaaaccgcctatgtcataggactgctctgtgaattaaatgtaattgtgtgagtatgtatttgccttagagaagactgtctgataaaataaaggcattcgataaagttatttcactgccttattcactgtagttatttctgaatgaattctgaaggatttcaaaagtcagattcccatatgtatgtttatttatattcatatgtttgttaataaacatatgtttatgatcttata

SEQ ID NO: 452080 - DNA, 548 bp, Homo sapiens
tgttttgttgctgtatttgcaactgcagataagactaatggtttctttgtgataatgagttaagcagccttgatgtctaatatataagatacttgaggaactcttatgcttgctttattctgtaaacatttattcactgagaggctatgagacagtaccaaaagcatacatctgaaaatatcagttcagaacgcatgttactcatgttaaggttggccagtatgaaaccatatatggttttgtccgatttctacccttgaggaatatgttytggtaacaagtctaacttgagcatataacttcctatgtcaggtaaatgtttgagttcttttggagtatgacttaatgaatttaaagctcttggattttaggaatgtactttcaaagttaaatgttagttctcccatcagtctttctataccaacaccttgtccctcaaaactatactagattgaatgtcatttaatcgccaattttgaaaacattctgaacacaactcagctgtatttcgcagcctccattgcagttaggttggaagtcatgttatt

SEQ ID NO: 452081 - DNA, 548 bp, Homo sapiens
gggggcacataacaaattctgactaaattcttgctcacagtgtgcccactatgtcaatggatccacccattggtcatttccccactctttaagtgtataaatagaactgatgtacaaggtagctggaataacctctacactgtgtccctggcttataggataagatcagtcatagtggaaaagaccaactggtaatctctgaaactactcccaactggacaagttaataaatacaaaatataatgtcatccaatgatatagaaaattaatgccaccactaaaagtctaacacagggatagtagtctctaccaaatttccatttaatttagttctttamaataaataattcagacttttctgactcagatacatctacttttccattttacacacaagaagagtttatttaaaaaattattcttttcaatttttgaattatttactatattatttcacagcaacaacaagaaaaaaaaacctttagttcaatatatgaaaggactgagatttagagaagctaggtgactgctatagtttggatatttga

SEQ ID NO: 452082 - DNA, 613 bp, Homo sapiens
catgcaacaattcttttcatttgaacactgggaagcaattgtagcattattaaacagcttgatttcaatattgctgtgtctcaatgaaaaggaggcctaaggagatggagacagaacttccagtcaatggagcactcagaacaaacaccacattaattaagctgacttgttttatataggtacagtttttggcaccccaaaacaattacaaaagtaacatcgargagcactgatcacaaattgccataatctatatagtaataattttaaaaataaaaatattttaaaaataaccaaaatgtggtgcagagacacaaagtgagtacatgatattggaaaaattgcacgaacagacttgcttaacctatggttaccacaaaacttcaattagtaaaaaaactacaacatctctgaagtgcaataatgcgaagtaaaatacaacaaggtatgcctataccagcagtttcaaaaacttgacatacattagcaaacctctgtaaccctgtttggcacaaacttttccctcatcccttataccttccacccatgggtaactcttattctagaatcattgcctaccagttctggattttgtgtgaatggcaatcctcat

SEQ ID NO: 452083 - DNA, 613 bp, Homo sapiens
catgcaacaattcttttcatttgaacactgggaagcaattgtagcattattaaacagcttgatttcaatattgctgtgtctcaatgaaaaggaggcctaaggagatggagacagaacttccagtcaatggagcactcagaacaaacaccacattaattaagctgacttgttttatataggtacagtttttggcaccccaaaacaattacaaaagtaacatcgaggagcactgatcacaaattgccataatctatatagtaataattttaaaaataaaaatattttaaaaataaccaaaatgtggygcagagacacaaagtgagtacatgatattggaaaaattgcacgaacagacttgcttaacctatggttaccacaaaacttcaattagtaaaaaaactacaacatctctgaagtgcaataatgcgaagtaaaatacaacaaggtatgcctataccagcagtttcaaaaacttgacatacattagcaaacctctgtaaccctgtttggcacaaacttttccctcatcccttataccttccacccatgggtaactcttattctagaatcattgcctaccagttctggattttgtgtgaatggcaatcctcat

SEQ ID NO: 452084 - DNA, 514 bp, Homo sapiens
gccactgtgcctggactgcagtcatgttttataatagctgcaggtactcacctgtagagttgttgtgaaggttaarttagttaatgtatggaaagcactgagagcagcgcttggcatctaacaattgctcagtaaaagccagtcattattactatttcatcgctgttgttattgtcagctaatcttattctacatggaggatatcagtttgaggtcaagtggcagcctgggaatctgagcgtgtgattctctgctgtcctgcttcccttagcctaaagttctcagtgcccagtgattccttttcagctctctcccccatttgtagcaaacctccacccttggtgtcttttctccctccctcgttttgcctcctctccccagccctgaggcaaagatgctcaggataccatctctggctaatgcactcagttccaggagaacccttgatctgtaacattgtcactgctaattcattgaaactcagccattattagcaactcctcaagcaggtggg

SEQ ID NO: 452085 - DNA, 514 bp, Homo sapiens
gccactgtgcctggactgcagtcatgttttataatagctgcaggtactcacctgtagagttgttgtgaaggttaagttagttaatgtatggaaagcactgagagcagcgcttggcatctaacaattgctcagtaaaagccagtcattatyactatttcatcgctgttgttattgtcagctaatcttattctacatggaggatatcagtttgaggtcaagtggcagcctgggaatctgagcgtgtgattctctgctgtcctgcttcccttagcctaaagttctcagtgcccagtgattccttttcagctctctcccccatttgtagcaaacctccacccttggtgtcttttctccctccctcgttttgcctcctctccccagccctgaggcaaagatgctcaggataccatctctggctaatgcactcagttccaggagaacccttgatctgtaacattgtcactgctaattcattgaaactcagccattattagcaactcctcaagcaggtggg

SEQ ID NO: 452086 - DNA, 605 bp, Homo sapiens
ttgggagggagaggcatctgttctgaaaggcaggctggggagaagagaaagcactaatcacggcttgaatgctaaactctgggctggtgttcaccagggggcagggagggaaaggaagttctcagagcagatgaaaatccttgtcatcactgttgagaaactactggtggcccaatgactcaggtgtacagagacttattgctacttcagttgttcattgattttcttacccataagtgtctatttattcgtgacagtgtggcaggcaatgtgttaggcacctagaacataagggtaaaccagacagacactgtcatctctgctgccagggatgagtaaatgattactttggtgtgacaagtgatagcctcttgtcctacacaggatgtgtatgagcasagagcagggcaaataactttgacttgggagaggtattcagagagggcttcctggaggaagtgatgtgtaaactcagacctaaaggatgagaagataataatcatcataatagcaaacttttcataaacacttaattacatgccaaacagggttctaagcatgttacgtgcattttctcatttattttccacaaaaattctattatt

SEQ ID NO: 452087 - DNA, 554 bp, Homo sapiens
aaggatttgcgtgactagtcctgagtatagtgactctggtgtactttttggtatgaacattcatattgtttgagacatttcctcccagaaatagtgtttttctctgtctttgtctttctgtgttgttctgttataaagagggtaccatagggtagaacacaggcctaaaacccctatacgcctgttgttcaagctggcccagtcaggggcgtttgaacaagagtgactccatcttgaatacagggtggttaaaaataagtctgagacctactgggctgcattcccagaagcttagacattcttagacacaggatgagatagaaggtcggcacaagatacaggtcacaaagactttgctgataaaacaggatgcggtaaagaagccggctaaaaccaagatgactatgaaagtgacctctgattgtcctcaccgctcacgatatgccaattataatacattaatatgtattgtcatggcgctggggggtgatatgttaattataatrtattaatatgtactgtcacggcactgacactcccactagcgccatgac

SEQ ID NO: 452088 - DNA, 554 bp, Homo sapiens
tgcactcaccgccaacctgagccctgcccctaacccacagtaccagccttcctcaaatcagcatctgccttgacaagatgcttttgaaacaaggaggtactgcaggccgcgggagtatgggaagcaccgcacagctgggtcttttctggaagctgcatcaggtctctgagaaaccgtgtagtaaagaaaccagcttagctctgctgagcccagcctttcccagacccctctgacctcagaaacctactctgcccgcagaaacccccggggcccgcattccagggacaaacccttcaggaagtgtgtatgtgagacctaaagcaatggcggtgactggggagggcccacggctccttcctgcatcttcagkcactgagactccacccagaggatggcaagaacaagcccaacaacagctgacatgtactgagtccttaccacgagccaggccctgtgctaagtcctctatatgtcactgactctcatctcactgactgctcatgctgttaaaatatccattttacagatcaggaaaccgcggcacggggcaacag

SEQ ID NO: 452089 - DNA, 611 bp, Homo sapiens
tgtaaaatctcctggttttcaataatttgtcattgatttaattaaaaacatagttttaattaaaaacgttcagtgttagtcaaatagagcgtgttgacaggctgattctgggctgtgagtccctggtttgtaagcaaggtctggtgaggaaagggccccaaaggagagagtgtgcaagtcagtgagtgagctggggccgtcaggtgctcagggatgatcctgccatggaagaagtggggtggcatccacctgaatgggtgagtgcccagtgggttcaaattcctggagtgagccccttggattctcaccaaggtctaagcagaaacagtcccattttgccaaacgcacgcacacacacacacacacacacacacgcacrcacgcacacgtgcatgcaccctatcagtggagacaaggcctgcagaagtgatctgtggctcagcaagctggtacattttaatggatgcatcacaatcaaccaaagccctcagtatctgtcccttctgccaattgccaacaatgtaaggagacgtgttttttgatggtagtgagggcaaggtgagaataaggaaggaaataactgtctacccacctgcaaatttgggacgggg

SEQ ID NO: 452090 - DNA, 594 bp, Homo sapiens
agccatacaaccattccatggttcaatttcagyatggtatttaatatattccatgagatactcagctctttattacaaaatgggctttgtgttggattattttgcccgagtgtaggctaatgaaagtgttttccgcacatttaagctaggttaggcgctaagccatgatgttctgtagatcagatgttttaagtgcattttcgacctaagatattttgaacttacgatggacttattgggacgtaatcccatcataagtccgggaacatctatacttttaaatgaccacactataaagacaccttttctctggaatctgcctcctgtctacatccgtctacttcttagagggaggaggctggacgttaattaacctgtcccaggatcaaggtcattaaaacaaacatcaatctcatcctgtcgagtcttaggggttttgcaatgtgttaggtgagtttatcctgatgctaaatgtctcctgggatccttgcctttgtttgtttcaattttattaattgctttattggggtataattgacaaacaataaattgtacctactcagcatttccacatttgataagtttcaatgtatt

SEQ ID NO: 452091 - DNA, 594 bp, Homo sapiens
agccatacaaccattccatggttcaatttcagcatggtatttaatayattccatgagatactcagctctttattacaaaatgggctttgtgttggattattttgcccgagtgtaggctaatgaaagtgttttccgcacatttaagctaggttaggcgctaagccatgatgttctgtagatcagatgttttaagtgcattttcgacctaagatattttgaacttacgatggacttattgggacgtaatcccatcataagtccgggaacatctatacttttaaatgaccacactataaagacaccttttctctggaatctgcctcctgtctacatccgtctacttcttagagggaggaggctggacgttaattaacctgtcccaggatcaaggtcattaaaacaaacatcaatctcatcctgtcgagtcttaggggttttgcaatgtgttaggtgagtttatcctgatgctaaatgtctcctgggatccttgcctttgtttgtttcaattttattaattgctttattggggtataattgacaaacaataaattgtacctactcagcatttccacatttgataagtttcaatgtatt

SEQ ID NO: 452092 - DNA, 616 bp, Homo sapiens
  misc_feature (1)...(616): n = A,T,C or G
cgctaagccatgatgttctgtagatcagatgttttaagtgcattttcgacctaagatattttgaacttacgatggacttattgggacgtaatcccatcataagtccgggaacatctatacttttaaatgaccacactataaagacaccttttctctggaatctgcctcctgtctacatccgtctacttcttagagggaggaggctggacgttaattaacctgtcccaggatcaaggtcattaaaacaaacatcaatctcatcctgtcgagtcttaggggttttgcaatgtgttaggtgartttatcctgatgctaaatgtctcctgggatccttgcctttgtttgtttcaattttattaattgctttattggggtataattgacaaacaataaattgtacctactcagcatttccacatttgataagtttcaatgtattgaaaccattgccacaatcaagataatgaacatactcatctctcccaaaaagctccttgtgcccttttataatctatgcccctcatcctcaggcagccattgatcctctttctgtcactataaatcatgattcctaggattttatataaatggaatcacaaagtgtgtnnnnnnnnnn

SEQ ID NO: 452093 - DNA, 592 bp, Homo sapiens
tggggtaaggggagcaatcagccttgcagagaaaactggkgaaacagaggcaccaagaggccctgagtctggtgtttccgatccattgcagctttgctgacagtgagaccctggctgccaatttatggttcctgaacctcagattcagtacagcctagagggcacaattctggagtctggagttagataacctgggtttgatttttatgtctgcctcttattagtttgatatccttgagcaagttaaacctctccgtgtgtcagtttcctcatctataaaatggggatgatagtatggatctcataggtagttgtagtaatcacctaagttaattcatctaaggcactttatgtgtatgtaggatataaagcccatcatagacacaggcatgctgatggttttcattattagccgtgccaatgacagtcaactgaatagatatccacagctgtaccacccgacaagggttgtggtgagcattaggtttggtaatgcatgctgcagagcctgcagccaggtacagaataggcatgcgatgcctgttagagtgcctgtcatgcttacactctacagttattgctgctgttgcca

SEQ ID NO: 452094 - DNA, 593 bp, Homo sapiens
gactccatagcctcccttttggttttatctttcctcttaggatratgtatttgctaatatgtaacataacttagttgttttgtttattgcctacccctgttactagagtgtcagtttcagaggggtggggacttctgtctgttttgctcctggccgcatctcgagtccagagcagtgcctggcacttagcaggtgctcacggaatgttcactgaattaatcaattaatcaatgtgcccctgaaaaaaaagtgtgggtgctggtgcccgccagcctaagacacgcagagccaatgacatgggctcccgaagccggataactggaaggaagttgagtgtgtgtgtgaggtcaaactgctctccagtgtggatacaaagctggcagtgatacagctgtcatttctatcagctgccatcagcacctcgagagtaatgtccacttcgctgaggacaacctttattcttaaagcccatatgaaatctcaccttgtccccacctccagcctgtgctctgtgcgggggtctcctcctgcctgctgcattgagaggcttggagaggaagagccagctcagaccctgatttccttctcatcag

SEQ ID NO: 452095 - DNA, 433 bp, Homo sapiens
aacacacctgtgcacgcacactcacacgcacacacacacacttttacacaaattgcatcaaattaaactctgcttgaccgtttgcttcttttattcattgacggtagcggagaaacttgggtatcaatgaatgtagacatgtgtcactttttgaccactgtacaggactttttggctgtaccctcatgtagttcatccagcatgggtgggtggacaggaggccattcccattttttttgctactataaatcatgctcattaagtatttcacacctaccgctttgcctactggtttgggattgatccttaggagcagaagtcttaagtcaatttggcacattcattcattcattcattcattcaacaagaygtattgagaattgtttacatgccaagcatgatcctaggcacaggggtcacagccatgaggaaa

SEQ ID NO: 452096 - DNA, 658 bp, Homo sapiens
ggtactgattcattcattcatcattcattcactcactcaataatttgttattgagccatgtgccaggctctggtctaagtgtgaggatacagcagtgcacaatacagacctggtccctgtgctcatggggctgacgttctggctcarggtagggaaagactgccaataaataaacaagtaagtagaaaaagcatagggtaataatgcatgccttgcagagaattaaatcgagggtggcacgatggagaggggtgtggtggtcaggtaggtctctctgagtgggagttaagctgccatccaattgcatggaggagccagccctgcaaaggagaagagaattccaggtggaaggaacaagtagaacaaaggtcctcaagcaggagcggacttgaagaattcagtgaatggaaagatgagtgtgaatgaagcaacaggagagagggagtggggatgagacacgttagagggtcaggcagagcagaccacatccagtcgacctgtaaagggctcagatttgttttctgtgtgatgggaagccagggttctgagaaggaggtcgctgtggcatgacagatttaaaaggattccactggctgctatgtgggagactggactggagattggggaggaaatctgaagaccagattggaggctgagg

SEQ ID NO: 452097 - DNA, 658 bp, Homo sapiens
ggtactgattcattcattcatcattcattcactcactcaataatttgttattgagccatgtgccaggctctggtctaagtgtgaggatacagcagtgcacaatacagacctggtccctgtgctcatggggctgacgttctggctcagggtagggaaagactgccaataaataaacaagtaagtagaaaaagcatagggtaataatgcatgccttgcagagaattaaatcgagggtggcacgatggagasgggtgtggtggtcaggtaggtctctctgagtgggagttaagctgccatccaattgcatggaggagccagccctgcaaaggagaagagaattccaggtggaaggaacaagtagaacaaaggtcctcaagcaggagcggacttgaagaattcagtgaatggaaagatgagtgtgaatgaagcaacaggagagagggagtggggatgagacacgttagagggtcaggcagagcagaccacatccagtcgacctgtaaagggctcagatttgttttctgtgtgatgggaagccagggttctgagaaggaggtcgctgtggcatgacagatttaaaaggattccactggctgctatgtgggagactggactggagattggggaggaaatctgaagaccagattggaggctgagg

SEQ ID NO: 452098 - DNA, 483 bp, Homo sapiens
catgatttgcccaaggtcacaggtttcatgtatcatggatggcagagcagagatttcctrcctggtggggttcctcatctctggccagctttcccttgagggcagagtctgggcctggctcagctcagtgtcccaacactcccactccggtgaataagctatgctgagggaagtctgggctctgatgcagagagacctagaagaaagcactaatggggtaatttggggtccagagcaccagttctcatgaatctgaggaattcttcctcctagctacttccttccttttccctcattacatccctgccaaggacaaattctgccatttgcatggcaggactcctccaaaaaggggcttcctccctttccgttagtaaaggaagaggttacctgagacttgacttaacctccttgggagggaacatgctttcactgttgcgaattgttaagtcaggtccagagtgatccagtcacttatcatga

SEQ ID NO: 452099 - DNA, 640 bp, Homo sapiens
ttcccttgagggcagagtctgggcctggctcagctcagtgtcccaacactcccactccggtgaataagctatgctgagggaagtctgggctctgatgcagagagacctagaagaaagcactaatggggtaatttggggtccagagcaccagttctcatgaatctgaggaattcttcctcctagctacttccytccttttccctcattacatccctgccaaggacaaattctgccatttgcatggcaggactcctccaaaaaggggcttcctccctttccgttagtaaaggaagaggttacctgagacttgacttaacctccttgggagggaacatgctttcactgttgcgaattgttaagtcaggtccagagtgatccagtcacttatcatgagtcatacagtaaccagaggttgagttgactgagccagcttcatccaccggaccagtgagtaagtctcaaaccataaagtatgtaagaattgccttgaaaagaagcaggtggtgcagaggagagtgagcagagctggcctgagactgctgtccttcaaagacctgcttgcaaagtgggcccatgtctggcatctgggaactcgggtttcaggagggctctcaccaccctgataagagtggctcacaat

SEQ ID NO: 452100 - DNA, 483 bp, Homo sapiens
catgatttgcccaaggtcacaggtttcatgtatcatggatggcagagcagagatttcctgcctggtggggttcctcatctctggccagctttcccttgagggcagagtctgggcctggctcagctcagtgtcccaacactcccactccggtgaataagctatgctgagggaagtctgggctctgatgcagagagacctagaagaaagcactaatggggtaatttggggtccagagcaccagttctcatgaatctgaggaattcttcctcctagctacttccttccttttccctcattacatccctkccaaggacaaattctgccatttgcatggcaggactcctccaaaaaggggcttcctccctttccgttagtaaaggaagaggttacctgagacttgacttaacctccttgggagggaacatgctttcactgttgcgaattgttaagtcaggtccagagtgatccagtcacttatcatga

SEQ ID NO: 452101 - DNA, 640 bp, Homo sapiens
ttcccttgagggcagagtctgggcctggctcagctcagtgtcccaacactcccactccggtgaataagctatgctgagggaagtctgggctctgatgcagagagacctagaagaaagcactaatggggtaatttggggtccagagcaccagttctcatgaatctgaggaattcttcctcctagctacttccttccttttccctcattacatccctgccaaggacaaattctgccatttgcatggcaggactcctccaaaaaggggcttcctccctttccrttagtaaaggaagaggttacctgagacttgacttaacctccttgggagggaacatgctttcactgttgcgaattgttaagtcaggtccagagtgatccagtcacttatcatgagtcatacagtaaccagaggttgagttgactgagccagcttcatccaccggaccagtgagtaagtctcaaaccataaagtatgtaagaattgccttgaaaagaagcaggtggtgcagaggagagtgagcagagctggcctgagactgctgtccttcaaagacctgcttgcaaagtgggcccatgtctggcatctgggaactcgggtttcaggagggctctcaccaccctgataagagtggctcacaat

SEQ ID NO: 452102 - DNA, 511 bp, Homo sapiens
ttctgggaataaggagaataaaattctaacaaatggcagaaatattaaaaaaaaatcaacatagtaaatgacattaagaaaaagacttatttcatcaattaaaacccttgagggcatatcagaaataatagaaatacaggcatttgtaagtaaagaacaatgttgccctggaaatctatgcaaattagaactttttggaggaaacaagaaagaaacacttcatctaacagcaacaaatagaatacaagataaatttcagttgatattaagattaattaaagcagtgtatatatatrtatactactgttatatatatacactactttaattaaatatatattatatatatattatatatatatataaaatatatataacatataggaataggcgtaggctagaaatgtgaaaatgaatggtcacttatagaattcatccataatccacaaataccaacgttctgacggcctatatgccacaaaatataacaaatatggcaaaactgacactt

SEQ ID NO: 452103 - DNA, 636 bp, Homo sapiens
atttgatagcatgtaattgcatatttagaataagataaaaatttatgccaagtatagaaactcacaaaaataaagggattaaaaacttttgtggtttctgagaattaaaatcaaggatgtttaaagatttcatatttgaatttcagaggtagatctaggcrtattatcaaaaggagattagataaaaatgacacttctctgcatagtagcctaaaatagtattcatttttttcagactatattaaagaaccatgaggctaaaatagaaagaaaatatgtaatagaacaattgtttctacaaatgtttttactataatagaatacaaatgtggtctgtgagaaaaggggagagaaggggagaaaaatcagaacacatagctttattaagctgtgtatatcttttatacatattgtatgatttgcttcagaaattattgtgaatcttagcaagaaaatgaaaagtcctttggaatactttagtgaaggttaaaccaaagtcatgaatgagaaaaagttgatgggatgtgataacatgataaaaatctttgcaaagtttcagtactacactcttcaatacagtaaaacagagaggtatatgagaagttactgggtaatcaatactatgattgggaactg

SEQ ID NO: 452104 - DNA, 453 bp, Homo sapiens
aaaaaatttacaaagcataattagtgtgactcacagttggttttcccttcttttttttttgccattatttgaaatatagggtgggattctaagaatctaagtagataatcttcttaatttcagttaatagttgtttttaatagaagattaaatgaaatagaagtgttgactaattgattaataaactggaagacaagaaagtcaaaaaaatccagaatccttgtagagaaaaattccatagattgtttagaacagagtgtaagagcttatataagatacaatgagaaaatttaatatatgttaattaagttctaaaatgasaaaagaggaaaataatatgacagaagaaatacggaaagtcaccaaatattctccaaagctgaagaaagttattaaagtacagatttgagaacttcaataaaccttagttggaatatgcacaaagtaaaccac

SEQ ID NO: 452105 - DNA, 589 bp, Homo sapiens
tcaccttctgaaagagaattaaaaatagctgtattgaggaaactcaaagaaattcaatataacaaaaagaaggaattcagaattctatcagataaatttaatataagaatcaaaataattaaaaagaatcaatcagaaattctggagctgaaaaatgtaattggtatactgaagaatgctccacagtcttttaatagtagaattgattgagcagaagaaaggattagtgaacttcaagaaagattatttgaatatgaacagtaataggagacaaaagaaaaaaaataaaaaacaatgaagcacacctaatggatctagaaaatagcctcaaaagggcaaatctaagagttatcggcatcagagaggaggtggagaaagagagatggatggaaagtttattcaaagggataataacaaaggatgcgccaaacctaaagaaagatgccaatatgcaagtacaagaaggttatagaacaccagaatatttaacycaatgaagaccacctcaaggcatttaataataaaacacccaaagtcaaagataaagaatgggttctaaaagcagcaggaggaaagtaacaaatatcat

SEQ ID NO: 452106 - DNA, 403 bp, Homo sapiens
aggaaatttacataattctgtgatgcaacataagcacaaaaaacagtccatggaaaattctaacttacaatactgtctcccatcctatatagatctccatgggtttgtaatgtttctgcatgtctgcagctttagatctgtastattcttttcacggctgtttgtatagtaaacaatgttggaagatatggtatctccctccaggacagaagaaaaatgtgtttcctgactagaataataaagataatgtcttcctctcagacaaaggttgaacaggtttactagtagccctctttaaaagactggatttcctaagcatgaagtttttcagctatgacacaaactcactatttatagaacatccacgtgaacttacctgtgtatcactgttatgtgtttgaga

SEQ ID NO: 452107 - DNA, 570 bp, Homo sapiens
tgtctgcacaatcaaaactcaaactgttttataactctttaagcatagagcctcttatatttcctaactgtgaaattctctgtgatcatttctggtaaggacaggcagctttctattgaaaaaataagtttctgtaacttagactttcaatctttttcatctaaattaaattgatatatttgatagttggcacatattgatttgctatcaaatcatatctctaggatgtgccacattttatataaactttcttataaactgatatacaagcatcactgtactttgtagtttattttatgagactactaaataaatcaccactaaaggagaatattgttaaggaaaaatcttgttttaaaaaagcccagtggagacacataaaagagaatagagagataaaaagwcaaaaaaaatccaaattgattatttttaagttatgaagtaagtatatggaaatattgctaccacaatataagagacaacaatagactggtcaaagaaaaatttggaatcaccttttgactgtacctacagtacttttggtattgacaaaacaacttgactcaaagt

SEQ ID NO: 452108 - DNA, 624 bp, Homo sapiens
aataatttttggcttgaggctagattattgttattattattcacattaacatttgaaagttaattttaataactttaaagttgacaaagtgttttttcttgctttaagtttagcaaattgtttagtagtaatgtgcctgtaagaagatgctatagcagaaataataaattttaaacattcaaataatatccattaaatttgaatattttagaaaactgattcataagatacaattgtatcttcattgtaattttatggagataagattgattataaacataaattctggttaaaggacaaatgttattttattactgatattgattattggattagtgagacatttatcatggaatatttaactagaktcatgaagaatgtccaaaacattccttaacattattttcagtttgaaagcatttagtataattttcttttcacacaacagaaatttgtttcatggatatgtactaaagaaggaactgaaagtccagttaaacagactacagcattggccacaaaagtctttctagaactgttatctaaatcaattttttgtccattttcaattgctcttacctaactttcccagcccctgcttcaggcaaacaaggttactacaaa

SEQ ID NO: 452109 - DNA, 582 bp, Homo sapiens
tgttctccccatttccaactaaacacttctcaaattgagatataaaacttcacgtgactctttctagctttcttcactacttaagcctagagtgggtagggggaagcagatatttaatttgatgttttttaaatttcagtcaattttccatattcaagactttgctttagctgctttagttatattttmtcatattccttctagaagtaagattaaatgttgcttcttcttcatctttgtctatattgagatcttcacagctaaatgtcctactcatgttcagagcttccttatgttgcaagttgaagcatatttaaagaaacaaacctaaacagaatataaaaatgtataagattttaaactagttacattatagagcttctgatatggaaactaatgctattcttgatcttaatgattttggctagttgctttgaatttatttttgtttttcaacttataattagtctgaacctatccacccataagtactataccaattgcacttgcctgataatacattcagttttattctcctcaaagaagacaaatatttaagatgaatatttggaagaaatactt

SEQ ID NO: 452110 - DNA, 582 bp, Homo sapiens
tgttctccccatttccaactaaacacttctcaaattgagatataaaacttcacgtgactctttctagctttcttcactacttaagcctagagtgggtagggggaagcagatatttaatttgatgttttttaaatttcagtcaattttccatattcaagactttgctttagctgctttagttatattttctcatattccttctagaartaagattaaatgttgcttcttcttcatctttgtctatattgagatcttcacagctaaatgtcctactcatgttcagagcttccttatgttgcaagttgaagcatatttaaagaaacaaacctaaacagaatataaaaatgtataagattttaaactagttacattatagagcttctgatatggaaactaatgctattcttgatcttaatgattttggctagttgctttgaatttatttttgtttttcaacttataattagtctgaacctatccacccataagtactataccaattgcacttgcctgataatacattcagttttattctcctcaaagaagacaaatatttaagatgaatatttggaagaaatactt

SEQ ID NO: 452111 - DNA, 582 bp, Homo sapiens
tgttctccccatttccaactaaacacttctcaaattgagatataaaacttcacgtgactctttctagctttcttcactacttaagcctagagtgggtagggggaagcagatatttaatttgatgttttttaaatttcagtcaattttccatattcaagactttgctttagctgctttagttatattttctcatattccttctagaagtaagattaaatgttgcttcttcttcatctttgtctatattgagatcttcacagctaaatgtcctactcatgttcagagcttccttatgttgcaagttgaagcatatttaaagaaacaaacctaaacagaatataaaaatgtataagattttaaactagttacattatagagcttctgatatggaaactaatgctattcttgatcttaatgattttggctagttgctttgaatttatttttgtttttcaacttataattagtctgaacctatccacccataagtactataccaattgcacttgyctgataatacattcagttttattctcctcaaagaagacaaatatttaagatgaatatttggaagaaatactt

SEQ ID NO: 452112 - DNA, 586 bp, Homo sapiens
atgtaaatttagagagtttgagaaagttctgaaatagagaactgagagatttaaggcagtctctgtaatacataggtatgaaatacacagatgtaggaggaatggtggaagaagagagatattgacaaaaatgggcttaaaaatattttgtttatcatgtaaatggcatcccctttttgtgtttctgagagtctttgctaaagctaaatggttttgcaattacattattgaactgggatatttataaatttaattctaygccaaggtcaacttcaaagcaagagcaacgtggactttgcttatgtgttatgtactatttatggaaataatagtttaagaaacaaatagtacctggctcaagagttacaacatttggagtaggatatatacagacagacttgacaaaataaatgcaataaaaaataaaactctttagaaatattgttaatttcctgcaattaaagatgatatttttcttctcttacatataaatgaagtgaaaggtatccaagctaagtgactactttagcaatattatatgaaaagcataaggcaaaggatctgaaacttgagaaaacttaaaaat

SEQ ID NO: 452113 - DNA, 586 bp, Homo sapiens
gccttcttctgtgtaaaagaaataacagtgaaaaatcacaacaaaagcttgtctgtccagaaacattttcattgccagctacaaatagacttctgctaactttcccaaagggaaaatgtcactcaatttgattggctaaatcttctttaatgttcaaaataaagtagccatgctatggttgaatttgtttgctttttttccacccacacccggtacagaaagcaatgcacccatttatttcaatatgccagcaattaccaaccagagaatgtctgtaataagaacattagtaacaaaactggtcatggcctgttttctcttcctctcttgcttctaatgcaagagaacattttaaaaaccaggtccaagaacaatttggagccaaacaaaaaaattcaaagacttgcagcaggtgggagtaccacctgttcatctcttattccagaaaaaamcaatagcctcttcagttcccagctgtggtgaattcccagctttgaatgcaagcaaatactgagaaaagctctctttgaaagactgagcctgctaggaaaagtgatcatgtaatatagtcaaaatgaagggttaa

SEQ ID NO: 452114 - DNA, 630 bp, Homo sapiens
attctcagagagtacataaaagttatacaagttgaaattttgaccaaaaaaaatctaatttctaggtaaactctcatattctgtgaatgtgtccccattttatcaaattttaarcaaaaaataaattattttaatttggatctcaatgtaatttttattacctcaagtttggcttcttgtatttgaattaatgattataattatttggttaattttctttccttgttaagattatattcatttgttccgcatactgttgcttttttatgttaagtgagtatgtacattaatcatgataatttggtgcctggataattgtcccaaggcacaagggattattttgtaaattatattttagcaatgctatacaatctgatttaaaaattacataaaagtaaatcttaagaagaaaatgtccttaaatgaatatgatagataaatgtatttggggcttataattttttgttaaaatgcaagctatatattttggtttttgtctatgcttaattaaaaaggcaggtgagtgaagtggaaaggtctgagatttgtaggacaaacagcattaagctgaggaaattacatttgattcataaggcaataaaatacgaaagtgctaatacagaccacaag

SEQ ID NO: 452115 - DNA, 630 bp, Homo sapiens
attctcagagagtacataaaagttatacaagttgaaattttgaccaaaaaaaatctaatttctaggtaaactctcatattctgtgaatgtgtccccattttatcaaattttaaacaaaaaataaattattttaatttggatctcaatgtaatttttattacctcaagtttggcttcttgtatttgaattaatgattataattatttggttaattttctttccttgttaagattatattcatttgttccrcatactgttgcttttttatgttaagtgagtatgtacattaatcatgataatttggtgcctggataattgtcccaaggcacaagggattattttgtaaattatattttagcaatgctatacaatctgatttaaaaattacataaaagtaaatcttaagaagaaaatgtccttaaatgaatatgatagataaatgtatttggggcttataattttttgttaaaatgcaagctatatattttggtttttgtctatgcttaattaaaaaggcaggtgagtgaagtggaaaggtctgagatttgtaggacaaacagcattaagctgaggaaattacatttgattcataaggcaataaaatacgaaagtgctaatacagaccacaag

SEQ ID NO: 452116 - DNA, 269 bp, Homo sapiens
tatagatagcaagatagataaacagatacacacacatatatctcaatgagacagagagaaagaagttacaaagatttgttcttacacaattataggagcaagctaaacagtctctgtaaggctgtttcctttacattttatactagagcttgaaatcctcaaggcagggagttgagtgggaagatggagttatggacaggagaacaaaaacaagctggaacccaccaacacaagttggaagccacaakcacaaactggaaactgtcagt

SEQ ID NO: 452117 - DNA, 567 bp, Homo sapiens
acagctgagatttaagggatttgagggactcagaaaagctgagagataattgaaggctcacaagggaggcatagaagggatcagaacagcaaagggaggctcaaggaggattgcaggggctccaaaggagttgcaactggatcagtgtaacaaacagaggttaaaggagctcctaatggcagaggaacagtgagagagaattagaatgtcataggggacaaataagaaagaggatacaagtatgggctaactacactcagaatgctacacttatctggacatcttcccctgtccctgtggactagacccagcctacctgctaactcatccctagtggcagaccataaatccaactgcctgctgaatgtctctattgggttggccatagacactttacgcttagtatgcctgagcttgaattaatcatctcttcttccctgcctgtgacttaggtgtcagastatctcagagaatttctgtgactcataccttccatttagaatctcctggttctgaatggtattcttgtacctggattatctgcctgcttagctatttaaattgacc

SEQ ID NO: 452118 - DNA, 583 bp, Homo sapiens
acaggccatgctcaggggttggggacccctgaattgacatatataagagttcccacagatctcaccttggtattttcaaactctgattttgcaaatctaatgggtgagaaattttatattattataaattaaaattgcattttgtgactactagggaggttgagcatatttgctgttcaacctctcagtttgttgctggtgtttggccactctgtttcttcttttccccatggcacctgctcattctctttttttacttgcttatttttaagtagagattcttatctttttttcattgttttgttagaagttttcatatattcagataatgctttgtcaactatgtgttgcaaataatttcaccctgtctgtgtttttctgttctttttttctttatagtatcatttgctggacagaagtgttttttgtttttgtttctgttttgtgagacagggtctcattgtgtcacccaagctagtggtgcaatcatggctcactgtaaccttgacctcccaggctcaagtgatcctcccrcatcagcctcctgagtagctgggactacaggtatatgccaccatgccca

SEQ ID NO: 452119 - DNA, 591 bp, Homo sapiens
tgcccttgccatgtcattctgctgtactaagtgttgtttttctagcgaggtcttgaaatgtggggcattatgtatgagttatgctaatttgttagggcaatgaatacattaatttcattagtaaatggcctcaaagcaataattaccagtgtaggtgtgtcagaagygatcatgttcagttttgccagttaattattaagattttgttctgaggggcccagatttgacatccagcttcaatttagccataaataaaccctgaagtaggtaaggatgaggaaatgaagccaggaacttcttttgcgcttatacacttccacattttgtccaattgtgactgccaattaagatgccaaaataattagtgtcattgacataaagttttagtgtacctcaaaaatcatattttattaaaaatagcaattatgttttctcaataccctactttgccttccataactggatttcaaattatctacaaaacagtatgtaacttgcaaagatgaattccacttagaattgttgtctgcagttcctttttaagctaaaactcactttatttttttaaataaatggaattttcctctaatg

SEQ ID NO: 452120 - DNA, 566 bp, Homo sapiens
tcaggtccatagaacccagctttaccatacggatgtgcatcataacactgtatcatgataatgcaagactaaacacctgacttgatgcccagggcaatgatgctgtgtttatcaaacaataaaactattatcttaaaaatctgtttaacttgaaaccatcctagatgattcaatacctcaaggctttcaagagaacaaacattgtgaacaacggcttgactttcttacgaagagaattaattaaattgtaaaccaatttttacgcaccctgatgattttttatgttgtttcctgagccgagtatccttgagaaattcaacagtgataagtaaaattgcattgtaactgctcaggatttgttcaacattcagtgtttattgaccagaagcagttaaagtgtttgggtaaggaatatagactcagascagactgccccagctccaacccagcttctccacttaatagctatgaagttgagcaatttagtgaacctctcagtgcttcagttttctctataaaatggggataatttgaatctatctgcagatgccacgtgggttaaataa

SEQ ID NO: 452121 - DNA, 564 bp, Homo sapiens
tggtttggatctgtgtcaccaccctcatgttaaattgtagtccccagtgctagaggtggggtctggtgggaggtgattagatcatggtggagtttctcatgaatggtttagcaccatcctcttggtgctgttctcatgatagtgagtgagttctcacgaaatcttgttgttttaaagtgcatagcacctccccactcctcattctctctcttgctcctgctcccatcagtgaaatgcctcgctcccyctttgccttccattatgactggaagcttcccaagcctcctcagaagcagaagccactatgcttctcgtgtagcctacggaactgtgagctaattaaactattttctttataaattatccagcctcaggtatttttttgtagcaatggaagcatggaccaatacattgttgtatccattactctttctcaccttcatgatgtgtaacgatactagaataggctcacaattccttgtccacagttctgagatccaaaaagccctgaaaactgaaatactttttcacaaacttggtacaagttcagtggcaacaaaagct

SEQ ID NO: 452122 - DNA, 510 bp, Homo sapiens
cacagaagtagtgaaagtggccatcctcagtttattcctgatcttagggagaaagcattcagtttttcaccattaagtatgatagctttggcttttttatagatgatgttcatcaggtagaggatttctatttctagtttgctgaatttttttattgtaaaagggtgttggattttgtcagacgctctttttacatctattgagatgatcatggttttgttcttcaatctcttaatatagtatgttacacaaattgagattcatatgttaaaccaaccttgcattcctgggataaatcccacttggtcatggtaaagaatcctttatccatattgctggattcaatttgctgatattttgatgaggatttttgcaaatagartcttattggatccttgaaacaaccctatgtgattagggtccatatgaagaaactgaggcataagttgtttgcctgtgaccacatagtgtcaaactggaacaggaatgcaagacttttgaatttagtct

SEQ ID NO: 452123 - DNA, 577 bp, Homo sapiens
gtttcactggggtattctacgaaacatataaagaaggaataatgccaattccacacaaagccttctagaacatggaagaagagataattcttcccaactcattctatgaggccagcattattctgaaactagacaaaaacattataagaaaagaaaagcagctgggcatggtggctcacacctgtaatcccaacactttgggaggccgaggttggtggatcacctgaggtcaggagttcgagaccagactagccaacatggtgaaaccccatctctactaaaaatacaaaaattagccaggcatggttgcacgcacctgtaatctcagctacttgggaggctggggcaggagaattgcttgaacccaggaggcggaggttgcagtgaactgagatcacacccctgcactccagcctgggcaacaaaagcaagactccatctcaaaaaaaaaaaraaaagaaaagaaaagctacagaccagtatctatcatgagtatcatgagcacatatgcaaaatctttaacaaatttttagcaaatcaaatccgacaatgtataataagattaatacatcatgac

SEQ ID NO: 452124 - DNA, 544 bp, Homo sapiens
ggcagtggctctggaagcacagaatgccagtattggcatcatctgggaagttgtaacaatgcagatcctcaggccccaaactcagctcaaacacactgagtcagaacgttttgggtggggcccacagacctgtattttaacaagctctccagctgattctaaaggattctaaagattgagaacctctgacctagggcaatacatccctaccttgaaaaaattaaagtcctacctgacaggaccaggagcgacattttttttttcctttctgaygaaacttcatgaaagaattgactagactatgtccatcaccatttcttcacctcctattctcacttggacccactagaaactggctccttcccttgctactgcccagaaaccacgcacggaggccatgaacatcctcccagttactaagtccaggcatttctctgtccttttcgtccatgacctcttaggagaacttgacattgttaatcactccctctctttactttggaggttcctcactgccctggttgcttctgtcactccctgccag

SEQ ID NO: 452125 - DNA, 475 bp, Homo sapiens
ctgtgtggccagattggaaactgagaccctgctagggaaagcaccttaaccaaaaatcgtacggtagccttgttcttcctcccagatgctgacaactcacttctgtgtgcacatactcctccccccgccgcacaaccccatcattctgttttgtgccagacactctacactaattaatgatttcacagcccttttataaatctcagcctaaggactgtaataagaagttccattgaacacccctgctgccagtactgcctgagtctgggaagtctggctggcttagaatctgtaccaacccctragacaatctgatgtttaaatactgtgatgccctttctccccttttcaatgcttcttactctcttttgctggtttctctttcctttttccacatctttccatataaccatctatccccagccattttattctctcattctcttgctcttccctttcttttgtaacttccaca

SEQ ID NO: 452126 - DNA, 475 bp, Homo sapiens
ctgtgtggccagattggaaactgagaccctgctagggaaagcaccttaaccaaaaatcgtacggtagccttgttcttcctcccagatgctgacaactcacttctgtgtgcacatactcctccccccgccgcacaaccccatcattctgttttgtgccagacactctacactaattaatgatttcacagcccttttataaatctcagcctaaggactgtaataagaagttccattgaacacccctgctgccagtactgcctgagtctgggaagtctggctggcttagaatctgtaccaacccctgagacratctgatgtttaaatactgtgatgccctttctccccttttcaatgcttcttactctcttttgctggtttctctttcctttttccacatctttccatataaccatctatccccagccattttattctctcattctcttgctcttccctttcttttgtaacttccaca

SEQ ID NO: 452127 - DNA, 596 bp, Homo sapiens
ctccgtgaatatactagagaccacttagttgtacactttaaaatggtgacgtttatgtcatatgaattacagctctatagcaatttaaaaaaattttaatgctcttaaagtccaaaacaaagcataattatttatgcaataatcagaaggcttcgtgaggtgatgcttgagttggrttcagtctgctgttaatagaacgttgaaaatgtcagtgggaccaggagtggtagctcatgcctgtaatcccagcactttgggaagccaaagtgggaagattacttgagcctacgagttcaacaccagcctgggcagcatagtgagaccatgtctctaaaaaagttttaaaaattagccaggcataatggtgcatgcctgcagtcctagctacttaggaggctgaggtaggaggaccgcttaagcccaggggtttgaggctgcaaagctataatcgcaccactgcactccagcctgagtgacagagcaagaccctgtctcaaaaaaaaaaagaaaaagaaaaagaaaaaatgcagtgagtcttgtgactggaaggtgttattggccatgaataccatgaggagcttggaatttgttttgaa

SEQ ID NO: 452128 - DNA, 599 bp, Homo sapiens
ctcttgggcaagttaattaatccataggagccttaacttcctcatttataaaatggagatcacagtgttgtcagagttaaagcatgcctttgacagaggggctgtacatgtttgctgctgccactgcactgttgattgtgctatgaggtgatgagtctgagaaactaagcttggaatctgaaggtctgagcgccaaccctggccttagggttgacctgctgtgtatcttgggcaagttacttaagatctctgagcttctgtttcctcattgataacatgagagtaacatgcctaagccagagccattgaaagattaaatgtgacatagaaaagtgctttgtaaacagcaaagcactatcaacatcgcttccttcacatcccactagctcagtcagtctcaggccaatgcctgtccatcctcctcaaagatctccaaaggtaaaccttttatatyttccctcggtcacctgcttgagtctttttttatacttcttgatggttaagaagttctttcttgtatccaaataaggcaatagatgctttgaggtccagggtgattggataaagctagcttttagaatttcagtaatggtaaagct

SEQ ID NO: 452129 - DNA, 596 bp, Homo sapiens
gaaagaaaaggtggcagctccctcttcctgccctgcacacaggtgcccagaataaaggctctctttcccctaggccacagctccttctgtrttatagaaactattttcttctcaggccggctctctctggattcccaggagggggacagtggcttggactctgggacagaacgctttccttccctcagtgaggtgagtcccagcaggggcaaggcccattcagaacgtgcattcggggtcccttcccttgacccaagttctgctgcctaccagctgcactgaggcctctgtgtgcctcttccatcgttctagttccaaggatataatcactgtgctctgggttccaaagcagaaatttcagatgcatccaacatgcaagattatcaaatctggctttcattttatcattgtcaactctgttatataaagagtagggtggagagggcggccatggcattaactgtggcaagcctttgagagtgagggagcagagacgaaataatctaaaacagtgacttgaccaaaaacatatttccacctgtccaggaataacatcgtcttagattaatacagtgaacccaacctattcagaagtg

SEQ ID NO: 452130 - DNA, 568 bp, Homo sapiens
cattttctcctacttcccatcttcatatgtcatgtgacmaggctgctctgaatctgccctgccccacccagaagcagttgacttcctgcaagtggaaatcatttcatctgtgctctgattttgggggcgggagtgagatgccaacgttcaccagacccgggtggctttgtgagtgctgtgctgcaactaaacaaacttcactgaggtggttgaatcctctgtcctctataacctctcatctctgcaatttgactctctcccccagggtgtagatcaaagcccaaagcctttaattattggcccagaggaagactatgacccgggttatttcaacaacgaggtaacggtttcctagttttctcctttcatcatttttttttgtcatacaagctgctcttgactagaagcagtttgactagcatcagctgtgaagggaacttgaggcggggagcctcctgttatgaacccaggacggggaatcacatgggagctaagctggaacccgctgtgctgctgtgcccggcttcccaccatgctcatccttctgccttccagagcgacatcatat

SEQ ID NO: 452131 - DNA, 494 bp, Homo sapiens
cagtgaggatctgtatatgtgtatgtgcatgtctatgtttttttttttttttttagatggggtgtcactctgtcatccatgctggagtgcagtggctccatctcagctcactgaaacctctgacccccgggttcaagcgattcttctgcctcagcctccggagtagctgggattacaggtgcatgccaccatacctggctaatttytttatattattagtagagatgggatttcaccatgttggccaggctgttgttgaactcctgacctcaggtgatctgcctgcctcggcctccaaaagtgctgagattaaaggtgtgagccaccgcccccggcctgtgtatgtattttgtttcaattgtgtgtgtgtgtggtggtcggggggaagtaaagaaagtcttggccaattcaagcaaaagaagaactccataaaaaactgaggctttgggttctaaagaaatttacatggggagagagtacatatggtgagccac

SEQ ID NO: 452132 - DNA, 626 bp, Homo sapiens
taaaagatggctcttttactaacgattttgtcatttgctagtaattttttcatgcaactcactgaaatttctgattttataatttcaggcctttgacctcagcttttgcttttcacagaaactggagaattctgtttactagtttgctaagacaatattttatatcaagccaagaactactaaatatgtgatatctgttcagtgaatataaaagatgtcgccggccaggcacggtggctcatccctgtaatcccagctctttgggaggccaaggcgggcagaccacttgaggccaagagtttgagaccagcctggccaacatggcaaaaccccatctatactaaaaatacaagaaaaaaaaagttagctgggtatggcagtgcaygcttgtaattctagctactggggaggctgaggaatgagaattgtctgaatctggcagatggaggttgcagtgagctgagatggtgccactgtcctccagtctgggtgacagagcaagattatgtctcaaaaaaaaaaaaaaagatcttgcctactgaattaatggcagagaacttctttaatacattttttcctcaaggctaataaggtttctctttagaaattgtgatagttaattttat

SEQ ID NO: 452133 - DNA, 563 bp, Homo sapiens
ggaaaaagctggtgttcccctgagtttcactctcagcccacttttcttcttactctacygctcagtaatcttattacccacacagagctgggcatcgctggagagcaattttctgaggcccgtgttctaccagacatcttttattccttgtgccatagaaactccctgccctgcccaaaaccagctcttcctccgatattctctatcatggtgaataccagccccggctccagccccatcatccagttgcctgaagcagctacctagatgtcccccttcttcattgttgtgtcactcaatcccttcaacacgctaaagcccaagcatctgaaatgtttccttcacccctagccccatcaccacttagctcaggctcacattgtctttcatggcttactcaaacagccaattccctagcctccaatgtccaggtttattgtccctttcggtttctttgtcttattccagggaggaagtcaatgtcttattcttctttgtatctcaaaccttaggaaggtgcatggaacatggaaaatgaatgaatgaataaattaatgtgcaca

SEQ ID NO: 452134 - DNA, 503 bp, Homo sapiens
tttgttcattttcacatttactcctcatgagttccaacatttcttaatttaaatatttcttagtttatagcatctccatttttctattaattgacttaatctgccatttaagaaaactccgtaatcaataaaaaataaaatccacaatcaaactgcacatggttgatccactgtgtaggcttcaaaggaattaaactcaacttcctaggaaataattcatcttagtttattaaatgggacagaatatttcactgctaacgtattctaactcacttgtttttgaaattggccagatgatttttaagttataaagtcaatgaaaatgacttttgctattgtgtgaacaacttagaatgtatatattcccagaaggcttatttaatgattgacctatcaccactgattattaatgtctgcatgaatgataacaataagaccaagtcatcaataatgcaatgaaaaytttttaagtgaaagcaagtttattaagaaagtaaaggaat

SEQ ID NO: 452135 - DNA, 477 bp, Homo sapiens
ctacccctctttgcaataactgtgcccacttctgaaagctaagcattacaacctggctcattttattctgagatcttgctattctcgtgtccctcagggaatctagatttacagcagcatctcttcctacagttatccctggcctacagatgatggcactactgagcaccagagctgctacccctctcaccaacacaatcatcatagctttggtaactagagaccttcctgggaacacagttggtgagtggtttggttttcatagctttacagagcaaacccactttagcacccccacttctctgagccttagggtgsttttatccatcatgcaccatggaagttcttatatttttatttcatggagtgtgaatcaaagtgtttgagatactccaagaattgtcctagtagcttattatcaccattcctgggggattttccacaggttcaaatcctgaatcatgggagactgctccc

SEQ ID NO: 452136 - DNA, 532 bp, Homo sapiens
ttggagcaaagtcctgtatgaagttctggctctgctatttgacaccggtaatgttcttgtacccctgaacctccctattccctcacagagtgaaaagtttccattatatattaaattatcttcattatcactgcacagagttgcaaagacggagtaaaattttatttaaaaagttctttatgcattgtaaaaggctataaaatttattattgttttaattaaacaaatagtaagaaatctgtaaattggattttttttttttaataaaaaggggagctatgacaaggaaaataatctaacaggtaaaatttattttttattactgtgacttttccttgggaattaaaaatgaattatttctggagaaaccaaagaggctgtggcttggtcttaataaaatgcatttcatatagaccttatagcctaatttcctgaaagaagtgaattataaatatatttcttgatccctgtggcaaaaaatctaatgacagaattcatctcctttacaamtaaatcaattcctctttttaaa

SEQ ID NO: 452137 - DNA, 363 bp, Homo sapiens
cttttagtgactttggggaaaaaaaatcaaacaacacagaaagcagagactagaaaacaggaaatgtagcattatcttttagatggaagasatggacactaaatggtagataatggctataaaacttgatgtttattttaatattttacaatatcttttattgtctatgaaacttcagaaacaaaactacgctgaataaatttcaaaggtaagtccaatgtgagtaaaataaatttcatctcgaagcaaactttccttctagcaatgctcagaaacagtgagattaatcaatgaatgtgtaattcccagataatggaaacttgccccctttacggtactatctttgtataaccaattttgaat

SEQ ID NO: 452138 - DNA, 565 bp, Homo sapiens
ggaacatcatttctctctattgcatttgatgtttaaaattttcttattttcctcttaatattttagtacagttttataaaaactattcttaccaacactgaatcatgctgttcataagagagctagcattgcataaacactgatatttcattgaggtcaggtaccagtatttttcatctttatatcttaatgcttagtgaagtggctgaaatgtagtagacacaccataaagtatttgataaaaaaaggtgattaaatgttgtgtaaatgagaaaggtcaaatttaaaacaaaacaaaataaaacaatacaccagcctgagtacctaatttagttgaaaatcacaaatgtttactgtgtgactgctatagttaacacactgaattcaatgctgtaaattacaggaaattaggaagcgtctgatcttcaaagaacagttttaatatcagccacatattttgtcatggtgtttttaagtaatcagcatcaagttttgtttaattgacmtaattgtgacagtaggtattgaatattaagaatgccacgattaatcttactaattagtt

SEQ ID NO: 452139 - DNA, 485 bp, Homo sapiens
aataattttaaaaaactcccaaggaaaaaaatcccaggagcaataaaatcacagatgagtactaccaaatatacaaagaaaaactaatttcaattctccagaaactgctccaaaaattgaagaaggaattttttcttaactctttctacaaggccaatattatcctgacaccaaaaccagataaagacacaacaaaaatcaaaactacagaccaatatgcctgatgamcattgatgcaaaacttaataacaaaataccagcaaactgaatccaacagcacatcaaaaaggtaatacaccatgatcaaatggtatttacctcagggatgtaagaatggcttacatatgcaaatcaataaatgtgctacatcacataaacagaatcaaaggcaaaataccatgtgatcatcttaacagacgcacaaaaagcatttgataaaattcatcattccttcatgataaaaaccctcaacatagcaggcagag

SEQ ID NO: 452140 - DNA, 382 bp, Homo sapiens
gagataaaagtctatgagtaaaattttcaatataattatgctttataacatatgtctacttaagaatatcttcaaaaatcttttttggtaacttaaaaccttaatgtgagattaagtaatatgtacttgctatatgcctcagtaaggtaaaatactaaaacattaagtactaagcataagtttaagtttaaatattttagcatcctgtttttatatgtcatagagagctacatatatctgagtctrgtaataagcatgaaaaactgaggaaacatctttctggaaattataaaatggtaaatgctgatgtaagccaatttacaatgcttgctagttttcattagaaattaaggttactagagttaaagattataattagcat

SEQ ID NO: 452141 - DNA, 634 bp, Homo sapiens
atttctacttatcttaacctggatcttttctattatttctttgtctaagcagtagcagctctgtggtgtaaggatgtctaattgcccctaaatgagaaaagctgcccaggcagaggtgaatttcatgtgagtggtttagaggcagacagaggctggccgctggtacatcggagtgatcagataccagatggggaatatgaactagataatctctatgatgacttcccaatcctcttttggtttgtaatcccacagctaaatcgaaaaccaaacaaacaacaatgtggttctgctgaagggaagggaagggtctgggcttttattaaaagaggggtgaggggcactgggaggaatatacaaagcaaagtggttgatgatatctcagagaaaggcagagggaatggcttctcagcttacgtaagggcagggtggagagaagcagattgtggattagtaactcgatyttaatgcaagggcagagaagcattgacctgactgtaagtcttccctggctgcagaaatttgaagataaaataacgaaacagggtaaggaggggactgccaggtgcaggttcaagagtggagtgggagcaaagtgtttagttcagaggcagctccaccagacagaggagtc

SEQ ID NO: 452142 - DNA, 597 bp, Homo sapiens
cactggggcctgttgtggtgaaggggaggggggaaggatagcattaggagatatacctaatgtaaatggcgagttaatgggtgcagcacaccaacatggcacatgtatacatatgtaacaaacctgcacgttgtgcacatgtatcctagaacttaaagtataattaaaaaaaactattttctccctggataatttacwagttatgctatatatttctactctttttttaggtacataacctctaaaatataagcttaaaaaattagcttaattcctacacaaagatgctcttttgtaataaaaaatacatttctgcccaaagagagacctggcctttgcacccagtttctttggggtaacctgaaaaccctcgtaatttctcaataatagaaatgactttgttattcagtgggctctttcgactacatttaatcgtttatgctaatgagatgacttctgtcgggccccttagatagtgtatgcaaataagatggctcaggataggggctggccacattagaaagagcaaccatgtgattagagttctggcacttggagccacataacatcagcccgttcccctccagggaagggtgg

SEQ ID NO: 452143 - DNA, 629 bp, Homo sapiens
tttggggacctcaagtagaaataaatttatccaaatttataggtcctataggttaattttgatggtgagttcttgtcttgacttcctcactgagatttcttataagaagtaccagcaaagcaaatgtaaagagagcttattggtcaatcactattcttgctgcactttttaaaataagcaggtcaagttgaatgaaactaaaccaattttgcaaacaaatcagtctttgatttatttttggtagaatgcgggtgactgtacaaaaaaattctgtttcagaagaaaattatagtgtatctgttattagattctagctcattgtttttgaaggtttgttagttacctaaaatctggactgcattcttgaattttctagtttcctcccatttctggctgcaagtcttcaaataattaatactaatttttctcccactttctggcttggaatcattgaaaaaaatacaaaaacaaaaaaactgctctttycctgaagcctagcaaactgaagctggatcactttatatagacttcagataaattaccacaatttgtgtacgaacaaccttcatgcctgttgctgtagagactattcaggaagttcactggtgcaccccatgcaaacagtaaac

SEQ ID NO: 452144 - DNA, 568 bp, Homo sapiens
gcacagttcccacacaaaaccatcctcacttgtgacatcaattagaagtttacaaatgtttccacaaccacccttaagtttgataattagcttaaaggactcagaatttattgaaagtaattatacacacaatacgatttattacagaaaaaggatacagattacagtcagctaaggggaaaagacacataggctagaatccaagaggatccaaaaagggagttttcaattgtcttctttctgtggtgtcatggatggcactgcctcctcctggtcaccttttataacaatatgcacagagtattgtcaaccaaggaacctcacccaagtcttggtgtcaagagtttttattggagctcagtcacatactacctgcatgactcaccttaaatctcaagcccttcctggaaatttggctaatacctttggtcatcagttcstctggagtttggaatttatatatcacagcccaaagtccccatcataaatcacattgttagactgtccagtggccaaagcccccaaaggcaaataaagacactcctattaggcatgacgttctagggcc

SEQ ID NO: 452145 - DNA, 496 bp, Homo sapiens
acctcacttaccattcaggtctctgcctgctacccagtcacatgccaagcaaggccttatattttatgttgcaaactctacccaagtttatcctttagaccctgagtatctttatccatatctgggcttgactgaagtgacagaatcctggacttggagctggttccataatgggacgtcacttttgaaggagatatgaatgtattttcaggtgaagggagatgtgaattgttgtggcagaggacagagatagatggtctctaaatacggctgtcaacacttctttccatccttgtccatgtctgtcactstctccatcaagaaatggagtctatttcctctctgcttgagattggcctagtcttctgacttcctttaaatgcagctagactggcattctggatctaagtgttaggaagactgcatgttctgctttctaccttttggaaccaagtcacaagactaatgtatgtcaacaaactatttgtacaagcac

SEQ ID NO: 452146 - DNA, 524 bp, Homo sapiens
attctgacaatgttcatacaatattattcaagacagtcatgtccccagccagggtagtggatgaagatttttctatacccacttgacagttttattccagtgttcccatcctctccttgagtgaacatggccatataatccatatttgccagatgagatctaagtagagctctaaggaggatagcatttctgtgaagacttttatctctcaataaaaggaaactgatgtggctataccactagcatgcttcctccttattcctgctttcagtatggatatgacatttagagatgctacagacatcatgcataaaacatgaagaggcaagtataagggaaaaaccaaggaaactgtayacagcaatcttgtcatggttgagctgcagaatcaaggacctcaactgtttatcactaaacttctgtggaaaaaaggtgtaccacttcatttgagccactttcgactaaatgttctattacttgcagctaaaagcaatcctaattgatacagagcatcatggtacata

SEQ ID NO: 452147 - DNA, 640 bp, Homo sapiens
actaaaaaaaaagttctcttgttgaacatcattagtttacttgagactttgggggcactagaaattgacgctgaatggtgagaaagcacctccctttaccagctcccctctaccacaggttacctccctctaattctgaagamcctgctttttaaaaacaaattctcttaatagtctttttaaaatctcttaataaataaaagttcctgaagacttgaaatcaagctcccaaaggggacttcggcataaaggcttatggaaactagccacatggtggccatcagacagaaaagaaacccaggacaccccaacacatcaaagacacccaggccattttcaaagcacaccagtgactgcattataccagtaaagaaatattctttttatggggggaaaaaaaagcaaactaatattacaagtgaatactcacttgatctacctttgttaaaattagcaaaatgtataaagagacattttttaaagtaccccatcaagaatccattaagcagaagaaatgaggctgaggcacttagttttcttccctcaaaggcaggatttttaaaagttaaattttccctctgtaattcccttcatttctcctcctatttctggaaacagcaacactactaacaacagaagc

SEQ ID NO: 452148 - DNA, 640 bp, Homo sapiens
actaaaaaaaaagttctcttgttgaacatcattagtttacttgagactttgggggcactagaaattgacgctgaatggtgagaaagcacctccctttaccagctcccctctaccacaggttacctccctctaattctgaagaacctgctttttaaaaacaaattctcttaatagtctttttaaaatctcttaataaataaaagttcctgaagacttgaaatcaagctcccaaaggggacttcggyataaaggcttatggaaactagccacatggtggccatcagacagaaaagaaacccaggacaccccaacacatcaaagacacccaggccattttcaaagcacaccagtgactgcattataccagtaaagaaatattctttttatggggggaaaaaaaagcaaactaatattacaagtgaatactcacttgatctacctttgttaaaattagcaaaatgtataaagagacattttttaaagtaccccatcaagaatccattaagcagaagaaatgaggctgaggcacttagttttcttccctcaaaggcaggatttttaaaagttaaattttccctctgtaattcccttcatttctcctcctatttctggaaacagcaacactactaacaacagaagc

SEQ ID NO: 452149 - DNA, 520 bp, Homo sapiens
catactcctacctcaggtggatagtaatacagtatactgctggcatattttattattatgattgtasttctcattttatacaagtggaaatcaaggcatagagaggttagatgaattgcccaagaccacactacagacaagtgtcagaggccaatttgaaactgaattctgacccaaggtagttactttttataccgtaccaactagaatggcatttctttcatttactcatccaactttgttgaaatttgcctggagaacaatttcctttctaataaccaagaataaaatttatgttgttaacccactgcccattatgcttccttcccgttcagtcttccagtcaatggcttcaacacgaaccttgaaattcaaataatctctatgtgagagaagtcactattcaaaaaagttacagataacccatacatggacaaaagcttgaatcaaaaaatcccctttcaattctggaactagaatagtttaattatagtttatttattgtttactaagtcccata

SEQ ID NO: 452150 - DNA, 585 bp, Homo sapiens
gtctttgctcaaatagcattttattttaaaggagatgactttattcagattactgcaatagggagaaggttcataaataaggaacatctcaaaaaagagaaaggggcctacaactttacagaggtagaggaatatgggagtcaggacaaagggtagaagtgagtcctatctacaagcacacggtggtcctttgcagttagtcatgtcccagaacataaagggtggggaatttctcaaccactactgctttccaggaggacaggcctctaataaagttcaacattcttattcccttcagttatcagctctcattaaacaactcagaggcggttrtaaacctcctgagtaggtgacacagtctaaaaaacaatcttgttgtcagtgtgcttgtacaaccagttgaacccgctgtggaaggtggtggcaaagagtagttgtttgtgcgtgtggggaggtcaccttaaaagacctcttctcatttgcagccatacccaggggtagatgatggtgcactggctgtcatacactggcactgtgttgcagactagcagatctcatgactacacctaacacagcttcctatag

SEQ ID NO: 452151 - DNA, 586 bp, Homo sapiens
aattagctgatttttaaaaaattgtaatcaccctagtctatttttattcaatgaatgtgacattaaagacagtgagatttgctttttctttctttaaggaaaacaacaaatgccagaaaaagaaggcaaaacgatgaaatgatctttccaggttactaaattattggtcaaattaattattcattattgtcgatgaatattgattaaacacawtatgaagaactattttcttttatttcttagccctctgtctaagcctgaggtctttaatcatttatgtcccttttctaccagaaaaatgcttgtgaaggacagtctggtcacctctttcttactcaaaaccccccatagtttctcccttgccgaccaagtatgaaagctttctgacattttctgactcactttcactcttctcttcatgctctacactgtaccttcctggaactactcactgttgcctatacaaattcctgcatttcctctaactctttgcccattctgtttcctgatcctggaatgcctcttgccccaatcttcataatcttcacccactttacatctctttttctccccatcttcattctct

SEQ ID NO: 452152 - DNA, 586 bp, Homo sapiens
aattagctgatttttaaaaaattgtaatcaccctagtctatttttattcaatgaatgtgacattaaagacagtgagatttgctttttctttctttaaggaaaacaacaaatgccagaaaaagaaggcaaaacgatgaaatgatctttccaggttactaaattattggtcaaattaattattcattattgtcgatgaatattgattaaacacattatgaagaactattttcttttatttcttagccctctgtctaagcctgaggtctttaatcatttatgtcccttttctaccagaaaaatgcttgtgaaggacagtctggtcacctctttcttactcaaaaccccccatagtttctcccttgccgaccaagtatgaaagctttcygacattttctgactcactttcactcttctcttcatgctctacactgtaccttcctggaactactcactgttgcctatacaaattcctgcatttcctctaactctttgcccattctgtttcctgatcctggaatgcctcttgccccaatcttcataatcttcacccactttacatctctttttctccccatcttcattctct

SEQ ID NO: 452153 - DNA, 586 bp, Homo sapiens
aattagctgatttttaaaaaattgtaatcaccctagtctatttttattcaatgaatgtgacattaaagacagtgagatttgctttttctttctttaaggaaaacaacaaatgccagaaaaagaaggcaaaacgatgaaatgatctttccaggttactaaattattggtcaaattaattattcattattgtcgatgaatattgattaaacacattatgaagaactattttcttttatttcttagccctctgtctaagcctgaggtctttaatcatttatgtcccttttctaccagaaaaatgcttgtgaaggacagtctggtcacctctttcttactcaaaaccccccatagtttctcccttgccgaccaagtatgaaagctttctracattttctgactcactttcactcttctcttcatgctctacactgtaccttcctggaactactcactgttgcctatacaaattcctgcatttcctctaactctttgcccattctgtttcctgatcctggaatgcctcttgccccaatcttcataatcttcacccactttacatctctttttctccccatcttcattctct

SEQ ID NO: 452154 - DNA, 618 bp, Homo sapiens
atagtctgacataaaataatgctataaatgtgtggcaaaattaaaaggagaacataagcatccttcttgtaatcccaggatttacycagtcatctagcctaccttgcttttaagctacccatgagtccttttgctacatgacatttcatggatgatcaacccttgcagtgggtctggatctctatagtcaacatctaataggacagcttccctgtcatatttctctggctccctgccacatgtttacacctgatagccctattccactggtcctagcttattgacccagaggtaaataccttcttcacgttgagctcatcaaattccttctaactgaaatttggaattgggaccataaaagaaataatcagtgtctcctttactcgacctaaatcatatatatcctgaaccatggagtgaccaagttcctctttctggactacaggaagaaagaagcacatatatgaattccatgaacttatcctcctaataaatcccactttttttctcaaaccagagctgccgagattttattatttgtaactaaaatcccaaataatgtatctgataatccactaaactcatctactcatcttcatcacttcatcctcaaccctt

SEQ ID NO: 452155 - DNA, 618 bp, Homo sapiens
atagtctgacataaaataatgctataaatgtgtggcaaaattaaaaggagaacataagcatccttcttgtaatcccaggatttactcagtcatctagcctaccttgcttttaagctacccatgagtccttttgctacatgacatttcatggatgatcawcccttgcagtgggtctggatctctatagtcaacatctaataggacagcttccctgtcatatttctctggctccctgccacatgtttacacctgatagccctattccactggtcctagcttattgacccagaggtaaataccttcttcacgttgagctcatcaaattccttctaactgaaatttggaattgggaccataaaagaaataatcagtgtctcctttactcgacctaaatcatatatatcctgaaccatggagtgaccaagttcctctttctggactacaggaagaaagaagcacatatatgaattccatgaacttatcctcctaataaatcccactttttttctcaaaccagagctgccgagattttattatttgtaactaaaatcccaaataatgtatctgataatccactaaactcatctactcatcttcatcacttcatcctcaaccctt

SEQ ID NO: 452156 - DNA, 618 bp, Homo sapiens
atagtctgacataaaataatgctataaatgtgtggcaaaattaaaaggagaacataagcatccttcttgtaatcccaggatttactcagtcatctagcctaccttgcttttaagctacccatgagtccttttgctacatgacatttcatggatgatcaacccttgcagtgggtctggatctctatagtcaacatctaataggacagcttccctgtcatatttctctggctccctgccacatgtttacacctgatagccctattccactggtcctagcttattgacccagaggtaaataccttcttcacgttgagctcatcaaattccttctaactgaaatttggaattgggaccataaaagaaataatcagtgtctcctttactcgacctaaatcatatatatcctgaaccatggagtgaccaagttcctctttctggactacaggaagaaagaagcacatatatgaattccatgaacttatcctcctaataaatcccactttttttctcaaaccagagctgccgagattttattatttgtaactaaaatcccaaataatgtatctgataatccmctaaactcatctactcatcttcatcacttcatcctcaaccctt

SEQ ID NO: 452157 - DNA, 530 bp, Homo sapiens
tcccaccctcccagtaagcggatgtgttcaccaacccaaaagcactctgagccttgttgtttaggggttttgtggagatcccattacatagtcatgattgattaaacaattggccataagggattgaactcaaatttccagccccttttccctccctggaggtgaagtggggctgaaaatgctgaccctctaatcacaaggctggttcctcargcaaccagttgctataccttagctgtctatggaccatgcagtgattccagccaccagccatctcattagcatgcaaaaaaaaaaaaaaaaaattcttatcactcaggagattccaagagtcttagaagctcttgtgccaagaaccgggacagagaccaaatctatattttatattatatcaccaaataatattccccttgaatgaaagcaatctaagacatctctaaacccaggagaattttttaaaactaactgggtcatatagttacaagtaataaaaatccatacaaactagctccaataaaaaggggaattag

SEQ ID NO: 452158 - DNA, 530 bp, Homo sapiens
tcccaccctcccagtaagcggatgtgttcaccaacccaaaagcactctgagccttgttgtttaggggttttgtggagatcccattacatagtcatgattgattaaacaattggccataagggattgaactcaaatttccagccccttttccctccctggaggtgaagtggggctgaaaatgctgaccctctaatcacaaggctggttcctcaggcaaccagttgctataccttagctgtctatggaccatgcagtgattccagccaccagccatctcattagcatgcaaaaaaaaaaaaaaaaaattcttatcactcaggagattccaagagtcttagaagctcttgtgccaagaaccrggacagagaccaaatctatattttatattatatcaccaaataatattccccttgaatgaaagcaatctaagacatctctaaacccaggagaattttttaaaactaactgggtcatatagttacaagtaataaaaatccatacaaactagctccaataaaaaggggaattag

SEQ ID NO: 452159 - DNA, 529 bp, Homo sapiens
gggttgcaatcctagtttcagtcaaaacagactttaaaccaacaaagatttaaaaagacaaagaagggcattacataatggtaaagggttcaaatcaacaagaagacctaactatactaaatatatatgcacccaacacaagagcacccagattcayaaggcaagttcttagagacctacaacgagagttagactcccacacaataatagtgggagacttcaacatttcactgtcagtattagacagatcttcaaggcagaaaattagcaaaaattcaggacctgaactcaacattggatcatatggatgtgataaacctctgcagaactctccacccctaaaacaacggaatagacattcttctcactgccatgtagcacatactctaaaattgaccacacaatccgacataagacaatcctcagcaaatgcaaaagagttgaaatcacaccaaacactcttctgagccacagtgtaataaaaatagaaatcaagactaagaaaattgctcaaaaccatacaattaca

SEQ ID NO: 452160 - DNA, 396 bp, Homo sapiens
attttgagggtgacaatttaggagttactcatgaggttgcaatcagatattggctgaggctgccaatatctaaaggcttgacttggctcaatgttcaagataacttactctcatgactggcgtttgctattggtgatgttgactggagtacctatgggtgagttctccagcatgacaggctcagcataattggacatctttcatggtggttggcttcccctacggtgagaagtccaagaatatcaggcagaagttgcatgatattttcttacytagactcagaagttacatggcatcacttctttcatactctattggttgaaatagtcataaatacacccacatagatcctacctctggatagaaggaatgtcaaagttttggatccattttaaa

SEQ ID NO: 452161 - DNA, 635 bp, Homo sapiens
gttcttacagcacagcagtttgctctcctgggacactgttctttcaggtctcagtggctagtttagggtttaggggatgattgactcagttgctcattctctctggaaccaatgccctcttcaatatccagaccctgtggagcagcttggcccactctactccactcctttgcactcatggtagtgtttttcttgaggccgtccctgtcccccttccactccagtttcctttggggatacacaggttctcaggtctgcacatctcttacctctagttgtaaacagagctcaagttatttctcacaggacttctgagtccatgcaaatcaaggagcatgactgagcctttgctctacatgtctctcaacatttcagaatggtaaagttcatcaagaggcaaacatgaccagaccacatggtggggtggtggggtctaactcccgctgaccacatatcagcaattactcaactcaaatgccacaaagggaagtaacttgcctttcagagcaatcctgggacaattctgggagtggaaaccttctttctttttctttctcccattctgtctgtytttctcagtacaagatctataagtaaagttcccaaaacctgatttgaaaacaatctggaaaaat

SEQ ID NO: 452162 - DNA, 523 bp, Homo sapiens
accatgctctcttctcacagagggacatcatccttctcttctcagccccattttgcttatgcagccataagcaaagtkgagatgggtcccagacctagggtcataacagtaactaaacagatgtgaatgtataattcgtttcaggattttttttaaatattatggaatgtggagaaggaactcattctaatgagagagagacagtcttagaagcaatttcatgctctttttggtattggtcctaactagtttttaagacttcctatagcatacagttgagaccaggtggggtatttatcaaaccaaataacagtctggttcaaaaaccttgggattcttctctagagttgtaacttaaaaaaaattgtttttaatggtagaaggaactttagaaatcttactggtgaagaaaccaaggcccagagagattaagtgacagtttggattataataccaaaagacacatttttaaacaccataattgttaatgttgaaatcctgaaagagcaaaatcctcaaactc

SEQ ID NO: 452163 - DNA, 527 bp, Homo sapiens
tgagttcttcttgatgaattgagtacccagacttataaagcaagttctaagcaacatagactaccacacagtaatmgtgggagacttccacactccactgacagtattagacagataaggcagaaaattaacaaagatgttcaggacctaacattagggttgaaccaaatggatgtgatagacatttacagaagtctccaccccaaaacaacagaatatacatttttttcatcaccatatggcacatactctgaaattgaccacataattggacattaaaaagtcttcaacaaatgtaaaagaggtgaaattataccagacacactcttgtaccacagtgtaatgaaaatagaagtcaacacaatgaatattgctcaataccataacattacatgaaaacttaacaacatgctcctgaatgacttttgggtaaataataaaataaaggcagaaatcaagaagttctttgaagataatgagaacaaagatacaacataccaggatctctgggacacagttaaggcagt

SEQ ID NO: 452164 - DNA, 527 bp, Homo sapiens
tgagttcttcttgatgaattgagtacccagacttataaagcaagttctaagcaacatagactaccacacagtaatcgtgggagacttccacactccactgacagtattagacagataaggcagaaaattaacaaagatgttcaggacctaacattagggttgaaccaaatggatgtgatagacatttacagaagtctccaccccaaaacaacagaatatacatttttttcatcaccatatggcacatactctgaaattgaccacataattggacattaaaaagtcttcaacaartgtaaaagaggtgaaattataccagacacactcttgtaccacagtgtaatgaaaatagaagtcaacacaatgaatattgctcaataccataacattacatgaaaacttaacaacatgctcctgaatgacttttgggtaaataataaaataaaggcagaaatcaagaagttctttgaagataatgagaacaaagatacaacataccaggatctctgggacacagttaaggcagt

SEQ ID NO: 452165 - DNA, 646 bp, Homo sapiens
gtagtatcaaccacatatttatacagttaagtgttccaacaataccacttaaactgagcaataaaaaacatcatttggatttttgacattgctttcctaattccaatgcagggctatagtaaaacataactataatctttaatttttgtgtactttttacctgcagtatatatgttctataaatgatgtgtgtgtgtgtgtctgtgtatagtgtcttaaagcctgagwtcaaaataataaaagactttgtcagagataaaaatacaagttaaaatcctagaagaaaaagaaagttaagtaatgccgggtagaaacatttataaatatacatacattattttatgaaacaagaaacagatttgaggccaatatgttttattattaaagaaattaaatagaatttgtctctggttgctgaatgtcagaatttacaatgtatcgacattactatgtgtactatgaaaaatgataagacacaaaagataagaatttatttcaaaaattctacatctgtttgacaaagtggcacatagattcatgataaattgaattacttagtttaatctgcttatactaatcttgctcacaaaggatctaagatttagaaaaatttagctattaataaatataaagtgtttatattcca

SEQ ID NO: 452166 - DNA, 585 bp, Homo sapiens
gatggagctggaggccactatccttaacaaactatcacaggaacagaaaaccaaataccgtatgttctcgcttttaagtggaagctaaatgatgagaacacatggacacgtagaggggaacaacacacactggagcctattgatggtggagggtggaaggagggagaggatcaggaaaaataactaatgggtactaggcttaatacccgggtgatgaaayaacctgtacaacaaacccccatgacacatgtttacctatgtaaccaacctgcacatgtacccctgaacttaaaaaaaaattataatgtctgtaaataatagtaatatttaacatttaatactattttattatgaatgtcctttagttaattatttttggcctcattttacaaatgaggaaaaataaggaaaataaaagctaaataatgcgggcactgttacacaactagaaggtggcagagcctggattgaaatgcagctatgaattccagagtccatgcatctaattgcaaagttttgtaaggtaagtgtgggaaaagggtaagaaagaggagggaagagatgctaccaagcagcttaaccaaa

SEQ ID NO: 452167 - DNA, 564 bp, Homo sapiens
tcatacctcatttctttcctgagacctagactaccttaaactgagagggaggatctcatctttctttcccttgcccaccatactcacacacacagacatactgacatactcccaaaacaaacacatgtcccccaagcttaagtctcttaggaaacaaccacatatcctaatctggtcttgatagtcagctcacgagaacaaaggagaggaagattaatgtagaaacctgcactaaaggctgagtacagtggctcaggcctgtaatcccaacactttaggaggccaaggcaggtgggtcacctgaggtcaggagttctagaccagcctggctaacatggcraaacccatctctactaaaaatacaaaagttaggtgggtgtggtggcggatgcctgtaatcccagccactcgggaggctgagacaggagaatcgcttgaacccgggaggtggaggttgcagtgggacgagattgcaccactgtactccagcctgggcgacagagcaagactccgtcaaaaaaaaaaaaaaaagaaagaaaaaaacctgcactagaataagtccta

SEQ ID NO: 452168 - DNA, 594 bp, Homo sapiens
tgctcctgggtaagcagccatcctgccttgcttttctccattttctatgggttgagttgttttcttgatgaatcccaatgtgtgtacctagatgtttcagttcaaaatcctgtatttactcatgccttctatttctctccatgagagcagcacacattagctgcttctagttgaccatcttggccaggctcttatttatttatttaaaaatgaggtctccctctgtcacctaggctggagtgtaatggcatgatcatagttgattgcagcccttgaaccctgggctcaagtgatcttcctgcctcaayctccctgagtagctgagactacaggtacaggccaccacacccagctaatttttttttattttttagacacagggtctcactatgttgcccaggctggtctcaaactcctgccttcaagtgatccttccacctcagcctcctgagtagttgggattacaggtgcaagccaccatgccctactcttttaccaattttaaaatcagattatttgttttcttgctattgagttgtctgagttccttatatattctggttattaatctcttgtcagattaacagtttgaaa

SEQ ID NO: 452169 - DNA, 521 bp, Homo sapiens
aagcatagcacaagcagagggagtcaaggagaaagtaacaggagagtttgaccacactagataatgcagaataacgggctttattcyaaatgcaatgggaaccaatgagaagctgatcacagaaatggcacagaggaagcatgaagcccagtgaagaggctatggtgggaggccaggcctagcttgacggtcaactgttccagaatgggtgggagcagtgacaacagtgagaggtgatcaggttcaggatgtattaggaaagcagatccaacagcgctggttaatggattgggtatggagggtaaagaaaagagagaaatccactatgcttcctagtttgaggacctgaacaaatataatgctacttattcagttggagaagcttagagtagcatatgttttgggtaataatataaagaattatgttttggacatgttaacatttgagatcccaattagacattcaagcagaaactgaaaataactagttacacccacaaatctgaatttcaggagggaag

SEQ ID NO: 452170 - DNA, 624 bp, Homo sapiens
aaatatcttttcagcaggaggagtatccttctcttcctgagtgaaactgactagagatgtgaagtgaacaaaaaaaaagtaacctttatattaacactagtgtatcaaatttttatttttcatatttttcatttractaatgaggcatgtcatgattcaatttccagctgttgacattaaggttaaaatgaaaatgcatttgaaacaagttagggaactccataaaaagcagattaaaccccagtactatgttttgtcagcttttgggggcccccaaataattgaaatgcagcagttactgtattaaatttagttagaatcaaaataaatttttacacatagagccatccagccaaataagtctaaaagatagggaataatatgattaatgccttgtacattttttacttgtggttatatttggaagatttgaaataaaccagtgtccattatttctatggaaatatgtgagaatgtagtttttagaggaaatctgcctgatttaaataatgaacagacatgatatctttctgttgggaaatgaagaataacttgaggtaagaagcaaacacaaagagggtgtgtaaagccaaagacccataaatgtcctctgagttgtttata

SEQ ID NO: 452171 - DNA, 643 bp, Homo sapiens
ttggttttccctctgaaactggctcctgatcctctgctttactagactacagagtttagagtttgacaaatgttaaccagtagtgatatccaggccaacatggacattttataaatagcctcagctggctgactacccctaggctttgctatcttgaagaggacaaaaataagcatgacaacaaaaataaaaaaaatatgaaatacactaattgtttctcatgcttatcttcaaagcttgatcaagasaggtggcaacaacagttcaatggctagttacaccagcatgtagtgtgtcaacagctgctgcattagggcaaagtgaaaccacattcccaatgatcttccatctcttccctatttaactctactgctgtccctcctactgctcaccgctaggccttacacatgggacccactcaatgaaaggaggatagatggacagatagaaagctgattgcacagagtagagcacatttattcccagttttttcttctgatcaaatgttgtcaagctcaaatgaaaatcatctacctatatatactatctacacatcagacttaaagttccttgggggcaggtatcttattatttatctttctagcctcaatacttagcaaaatgttttgtacacacatagcaa

SEQ ID NO: 452172 - DNA, 594 bp, Homo sapiens
tatggtaaactaatagcagatgaaggctggttactaaaatttgttgtatagattcctctggtgccatccctaggctgataaaagtttaaatttgccctctctgggagagaggggaggagggatacctttgtaaatttatgtcctgctttgtggcaaataggaggagggcagrgagcttttcttgtgtctgtttcttctcagctgcctttagctcaaaataattcttatgccaaagtgacatattttggagaggcatattttgatctcctacaagcccatcttatatatatcatattattaaccctctcaacaactctaggagggctgtatgatcgcgattttacagatggaaaaagtaaggctgagagaagttgcatgaaattctcttagccacacatctccaaagtccagaaagcagcctgattgccaggcaaagtaagatcacctgatttccttcttaccagggccacaaattgctggtgctgtttagagagggacatgttcttagaactagaagttgcttcaacattgtaattctgtcaaaaaaaaaaaaaaaactgccttgggaagcagttgagactccaaaactataat

SEQ ID NO: 452173 - DNA, 605 bp, Homo sapiens
acaaattgctggtgctgtttagagagggacatgttcttagaactagaagttgcttcaacattgtaattctgtcaaaaaaaaaaaaaaaactgccttgggaagcagttgagactccaaaactataattttattagcttattttcctactttgaatttgttacattaatatgtcgaattaacccagagccacatgtagagtttaatttgtatgtcttccttggggaattctgggcctattgcagaaattcacttccacatgtagccctggaccctggagggtaagatagggaggagttgcaggaggcgcctcagatggagtcctgtggtccctgggcttcctgggagtggcctagcctggctgtgcgtcagttctgtgtcatcttctccagactcttkattcctctcagaacagcatggaaatccccaagtcacttagtgctactctcaaagtcaccagaagacacctcgtcccaaaatcattcaggagcataagcccctggaaggctggatgacactgtaaggctgtttttagaaatgtaataacctgtttgccacttgtatgtcttcttttgagaaatgtctattcaaatcttttgcccattttt

SEQ ID NO: 452174 - DNA, 521 bp, Homo sapiens
ggcctagcctggctgtgcgtcagttctgtgtcatcttctccagactcttgattcctctcagaacagcatggaaatccccaagtcacttagtgctactctcaaagtcaccagaagacacctcrtcccaaaatcattcaggagcataagcccctggaaggctggatgacactgtaaggctgtttttagaaatgtaataacctgtttgccacttgtatgtcttcttttgagaaatgtctattcaaatcttttgcccattttttgattggataattggattttttcctatagagttatttgaatcccttatatattctgatggaacacatcatataccacaaaaatatatatacctactatgtacccacaaaagttataaaaaataataatttttttaaaaaatgtggtaacctcctgagctataataatctgtgctatggaagcttttcagggagactgagccgggggccctgagtctcaggatgggctcatgagttttttttgctgggggctgcggtgaaggg

SEQ ID NO: 452175 - DNA, 521 bp, Homo sapiens
ggcctagcctggctgtgcgtcagttctgtgtcatcttctccagactcttgattcctctcagaacagcatggaaatccccaagtcacttagtgctactctcaaagtcaccagaagacacctcgtcccaaaatcattcaggagcataagcccctggaaggctggatgacactgtaaggctgtttttagaaatgtaataacctgtttgccacttgtatgtcttcttttgagaaatgtctattcaaatcttttgcccattttttgattggataattggattttttcctatagagttatttgartcccttatatattctgatggaacacatcatataccacaaaaatatatatacctactatgtacccacaaaagttataaaaaataataatttttttaaaaaatgtggtaacctcctgagctataataatctgtgctatggaagcttttcagggagactgagccgggggccctgagtctcaggatgggctcatgagttttttttgctgggggctgcggtgaaggg

SEQ ID NO: 452176 - DNA, 521 bp, Homo sapiens
ggcctagcctggctgtgcgtcagttctgtgtcatcttctccagactcttgattcctctcagaacagcatggaaatccccaagtcacttagtgctactctcaaagtcaccagaagacacctcgtcccaaaatcattcaggagcataagcccctggaaggctggatgacactgtaaggctgtttttagaaatgtaataacctgtttgccacttgtatgtcttcttttgagaaatgtctattcaaatcttttgcccattttttgattggataattggattttttcctatagagttatttgaatcccttatatattctgatggaacacatcatataccacaaaaatatatatacctactatgtacccacaaaagttwtaaaaaataataatttttttaaaaaatgtggtaacctcctgagctataataatctgtgctatggaagcttttcagggagactgagccgggggccctgagtctcaggatgggctcatgagttttttttgctgggggctgcggtgaaggg

SEQ ID NO: 452177 - DNA, 643 bp, Homo sapiens
cttaatggtaatcataagtactgaagtatttacggtgctgtaaatttttgatttattgatgcaataaataaaagaattgctaagaaagaatgtttcagccatacaatactgtgaagcatgccattttaactacagatcttcacaatgtgaacagcaattgtataayttgatggtatatattgtattcataagcaacattttaacaccagttagaagaaaaatatgaatacatttgctggcttcaccaatcctataaatgtctttgaataatttttctaccaagaaagccaaatttcttgaactgttgttaaacaccatcagcatatacaatttgtatttgtccatttaaaaataaattttaaaaagatagctaaatttcaaaatacctgtattcctgattccttccaatacaccttagtctcagaacttccaataaagattttcgtgccttgctctttcttcatgctctcatctacaatcattaaagaccacatggggaggagtggagggagaagaaagatcgttttaaaaactaggtggcagaatccttttaaaacagaaggatcatttgtaacatattggcttttgattgtaaaaagatcccccttaagatgggttcaggataggccacggatgaagtaga

SEQ ID NO: 452178 - DNA, 567 bp, Homo sapiens
caggggaaaagatactgtatctgtctaggatttgaggctgttttttaaatgcaagttatacatatttgctcatgtttgcaaaaagaaggataaaccaaaactttttttaagtagttaattattggaaggagaaggggacagtgttggaagcaagatttatctcaacatactgtattatatggttttatttttgaatcatatagttgttttatatattgtaaaatacataattaagttaaagagcaatccttagaaattgaatagaaacagaaatgaacttamttgtatgtcagttggttacataacatagagaaaagtatttcaagtgactttagaatacactgatttgattgtaattatttagtagaatatattctaaggataaataaggatgcaaagaaatctttaacctcatccaatagtcttatggttaatataatatttgctattattattttgaaactaattaatatcttctataggataaatcaaataaagacttatattaatattattaggaaccagaattttcactgtgagattttaaatatacaatttaaaaagtca

SEQ ID NO: 452179 - DNA, 605 bp, Homo sapiens
ggtgattctgactagagtaaaggtggtggtgatcgcacaccattctgagtatcctaaatgcttctgagtgggtcactctcttttgcttattttgggttatgcacattttacctcaacaatcagtggttttaagaagagaaaacaggcttaagaaacaactacaacccataacttactaagatgactgttctctgttttataaatatttgtgtgacacgtgcctgccatgtaaatgcctgccgttgtcctggcccagctcagctcttagttctcccagctgagttgctgcacttcagagattcacacccctgcccatctgcctgcccccartggggcccgctcacctgagctcctcagcttgcctgagcttctctgccagcttctccatggactgcagttcatccctcagcacagagtctatgatgtctttgtactcttcacactctgagaaaagacagacacgcctgcctcagtggaaggtgggacatgctgctggggtcactgtctatagggcaggcggcagcatccatcccaaggacgaaagcagctccagtaccaggctccaggcaggcatttccacatctttatttatcaacctcccaact

SEQ ID NO: 452180 - DNA, 203 bp, Homo sapiens
acttgacaagatgattcacctggaagaaggcggagtcagaattcacagcccctgargtctgactctgaatcctgggccactttcccaagccttgcggcctctcctgtaaaacactgcactggtgcatgaagtagtgattttctatacagtcaggaaggccctaggactatgggacccaaagtttcccttgtactgggaatttc

SEQ ID NO: 452181 - DNA, 555 bp, Homo sapiens
cacccaactcatcaatttcacctctaattctacacttgcaactttatcagccatgtcttctgagagcttgcactcatattcaccaacacatccaaaaccaaaacagatttagaaacagctctagactccttgcagagagggagtctcaccttatcattcttttcagcattccaagtaattgtaccctctcccatccttcccatctyctccccaggccattgaaaagggttgaattttaagtacatagttgacccttcaacctggacaccgtttattgaactgtctggttgtgaaactgcattgccacatatcaatatagttgtgggaacttggagattcaataggtataacaatctgtttatgttaaaacaaacaaaacagccatctccttttatgtgcagagcctactgctgtaaggcacaaggcttactcctgagacagagtaccaggagacaggaggcaatttgagaggctatagcaagataactgagtaaaatactaacttgtatttatgtccctatattttcccttttttctcatttcagagcaggagtc

SEQ ID NO: 452182 - DNA, 634 bp, Homo sapiens
agacaaattgccagcagaaaaatgaatcctttctgaacaaattcaaggcattaaraatttttgaaaacaaaattgccagtttaaacactttgtttaccatagacattttatttatagaaatattcatgacttaggtagttacattttatttattcttgatactgctacaaactattactgtaattgaaaatatttaattttaattagcatattttcatatttaaaatatatataatatcaatatgacaaatatttactagttgtaaaataactgtggacaagtgtgaatatattagttaaaatatagtattgtgaatattaatatatagaacaaatgctaacattcctccaaattatcaactaaaaaaggtcacttttttagttacaaattagtaaatagaaaaaaaaaaagtagattttattccagtaattatgtaacccagtatttagactaagaaattatgaagcacatatttatactctattgttgcttacagtagaaaatactcaagctttcttgaaatatatttttgagcattataaattccactatggtaccacaaataattgtacaaaaaattataattatgtttttgcattaaatatttacagattatttaaattaatttcaata

SEQ ID NO: 452183 - DNA, 508 bp, Homo sapiens
taatccacaggccaaaagaaaatgtggtattacagatacagaacaaaattaatatatttcaagtagagatccatattttatgaggtctgaagcatatgtaacttttatatctccttttaaggaaaaaaaatttaaatacaaattataaaagcacttattttaagaaaagagaaattaaaacaaatcacaaatttgaaaaagctgaaaaataccacaattcagtttgcattttgacttcccctgagacattaccaacatgtttgaattttggtattaccagtaatttatttaaaawtataaatattctaaaatgtttatatacatacatatttatatgcatatctgtgtatgtgtgtgtgtgtgtgtgtgtgtgtgtgtgtaggcaaatgcattttaagatttccttatactatatctgcctatatattcgtgtcaccaaattatccccacattatatgcatttgcttattaatggatatgtgtaagaatttttatcactgaatatttt

SEQ ID NO: 452184 - DNA, 514 bp, Homo sapiens
ggcttgctgcagcctcaatcagctaggctcaagtgatcctcctacttctcagcctcctgagtggctaagactacagacatgtgycatcatgcctggctaatttttgtatgttttgtagagacagaaattaactagtgaaactggcctgctaaaacatggccagctcagtaaaattctagaagtagtatttcaccatgttgtgccagctggtctttgaactccttggctcaagcgatctgcccaccttggcctctcaaagtgctgggattataggcatgagccactgtgcttggccaggtctatttttaaaatagtatatttctattttatttatctttttgactatccacatttgaataccataatctctaaattacagtattcttaatagtcttggaatctattaattgtatttcctctaacattgtttttcttcttcattttcaataaggtcttagcctcttatgccctttgcatgccaaatgagtaatagagtcagcttgccaaattctat

SEQ ID NO: 452185 - DNA, 514 bp, Homo sapiens
ggcttgctgcagcctcaatcagctaggctcaagtgatcctcctacttctcagcctcctgagtggctaagactacagacatgtgtcatcatgcctggctaatttttgtatgttttgtagagacagaaattaactagtgaaactggcctgctaaaacatggccagctcagtaaaattctagaagtagtatttcaccatgttgtgccagctggtctttgaactccttggctcaagcgatctgcccaccttggcctctcaaagtgctgggattataggcatgagccactgtgcttggccaggtctatttttaaaatagtatatttctattttatttatctttttgactatccacrtttgaataccataatctctaaattacagtattcttaatagtcttggaatctattaattgtatttcctctaacattgtttttcttcttcattttcaataaggtcttagcctcttatgccctttgcatgccaaatgagtaatagagtcagcttgccaaattctat

SEQ ID NO: 452186 - DNA, 599 bp, Homo sapiens
cctgatagatttaatcaaattacatctggtgctttctcttaaagaatggagaaaaagccgttagcagatggagagttgcatatcaggggatgcattaattttctccgcagtaatttttcaggacacgtctgtacagaccagttaagtaagctaaatatgggtatggtatgtacacttttcaggtgttcaataatagcacttatttatgcagctcacccagaaatgttgtattgctatcactttgctcttttgttaaggaagttaagttctagaggttccatttctctcattttactgtaataacacttacgtctaaggtcaggaaaacaagsttgtatttctgttaaatgtcaaatatatgtatatgaataacgtattcaggatctgagaaagtactcattggttaaattgatgaatatagaaaacctggccaggcgtggttttctataggccaggcctataatcccagcattttgggaggccaaggtgggtggatcacttgagatcaggagttcaagaccagcctggccaacatggtgaaaccctgtccctactaaaaatagaaaaattagccaggcatggtggtacacgcctgtaat

SEQ ID NO: 452187 - DNA, 615 bp, Homo sapiens
gcaggtttcccgccctggctgtgggctctgtcctatgtatttgaatgttgtctccattagaaaaatgatttaagggaggaaaaattacatttagaagctagaatggaagaacgtgcaaaatacaaagataattccataaagggattctgatgataggatatcatttaagtagattatcatcaacggaagaatactgattaggggttagaagtcccacagggaatctctctagaagaatccaaaagtagaactctccatttctcctggatacatggacatacgtactgagtagaaatgaagagcttgggctgggtgggggagagcattaggaaaaatagcaaatgcatgctgggcttaaaacctagaagatggctgacaggtgcagcaaaccaccatggcacacatttacctatgaaacaaacctgcacatcyttcacacgtacttccagaacttaaaaatttaaattaaaaaaagaaaagaaatgagcagctcatctggaacagacagaaatgcagagtctaatcctagacacagtccacacattggtttctggaccaaacattctattactctgccatttctaccaactggtcaggttaaaactttattaaggc

SEQ ID NO: 452188 - DNA, 549 bp, Homo sapiens
ctgtggttcctccagtggtttcatatactttgattcagacccttagaagttcctggtgggcagttgacaattgagtatcagtcttgatgctccagatttgaataccatttcagttggaggcatggtgcgcctgatatagatgacgtgtgaatgtttcaatgtcaacaggagatgcgggttgtgaagatatgtgttcacatgaaacagactgcaagtctaagtctccaaggatgagctgatatatgtaaccctgttcatgatgggcctgtgtttttttcattttctgttttcctctctggcagatgatagatcatttaaatctgtactggcacatggacgtggtttcccaccccaactgaacttgagttagaagaacctcagctctgtagtgatcttattttactgttttcccaggataraatgcccttggtaccacatactgtatgcagagtatttatgattgcttgagtacagttccttggaaaggacacaaggggtttcataaagcggtactaaaaatctgcttttctccctagcatttaccaacaa

SEQ ID NO: 452189 - DNA, 550 bp, Homo sapiens
attgtgtttcacatagaaaaactttgttgaaaaatcagtgtggagttgagttcatctgggccctagctgaaactaattttacttttggatattccataaactgcatacatctctttcttactgttttgtttttctatgtatgagaaatccatagacacagaaaaaagatggagagccttcatttctcttattttcacttttgtsccatccctctgtgcttgttctttgtttaaataaacttttgttgtatgtctttcacacatcatcactctctgcttcaaaggcttcttttaataacttagccctggctcacttttcttttgcatatgaaattgatttaactaaagtgtatgtgtgtgtttgtgtgcgcatatgcctacatacacatgcatccgtacaaataaaaatttcactggaaagggaactccgtgatctctttactacgtacatacacacaccttgtcgaagtgggaaaacttaagtttggagttaatttggttttgagttccagctttttctcttagtgctgtctgtttcctcaccctgaaat

SEQ ID NO: 452190 - DNA, 556 bp, Homo sapiens
tgtatcattctgcaacctccttgtgcatgtagaaaaataacacattgatgagtaggtgataaggcagttgactcactcttcaacttaaacagtcttatcatcgtacacagtaccgactaaacagatgggccctggaataccaacattaatgaaataccagaaaagttgaatttctgtaaatttaatatttcacaaacttgtggccagaaaggcattacaaaaagaaaagttttsagaaagaaaatggtagtaacctagattatgtaacagtcttaagtaggccttgacaatgcggtacaggggagtgactaaggggtggatctccagagcagctggcagcccccagggtggtctggtggagggagcccttccaagtggctgctgcaggaacacagaccttgctccctgtctgaatcaggagtagaggagatgaggaccaatgcgtgcaaactagcctggtccttttggagctaggagttcccctgcaccccgccacagctccccatctcccttcgataaaggacttactctgcatacattaattactgcagttacc

SEQ ID NO: 452191 - DNA, 578 bp, Homo sapiens
ggtgcagtggctcacacctgtaatcctagcactttgggagactgagatgaaaggatcgcttaagcttaggagtttgagaccagcctgggcaacaaagtgagacctcgtctactacaaattaaaacaattagctgggcatgatggtacacacctgtagtcccagctactcaggaggctgaggtgggaggatcgcttgagcctgggagatcgaggctgcagtgagccataatcttaccactgcactccagcctgggcaatagagaccctgtctgactgaatgaatgaatgaatgaatgaccaaccaaccaatcttaccactggtgtcaactctggagtgcgccacacgtgatctttgctcctytcatttggtagagtttcagggcaagctgctttttctattttctcagtggtaatcagtagtgtgaggttacagggaaggttaaattaggttaccacatgacagttacttgatacagagcagcaggcacctgttatgttgggtcctttatttcttccctcatcctttcattaggaagagaatatttctatagggtcaatcacagatgcagaagaggaga

SEQ ID NO: 452192 - DNA, 578 bp, Homo sapiens
ggtgcagtggctcacacctgtaatcctagcactttgggagactgagatgaaaggatcgcttaagcttaggagtttgagaccagcctgggcaacaaagtgagacctcgtctactacaaattaaaacaattagctgggcatgatggtacacacctgtagtcccagctactcaggaggctgaggtgggaggatcgcttgagcctgggagatcgaggctgcagtgagccataatcttaccactgcactccagcctgggcaatagagaccctgtctgactgaatgaatgaatgaatgaatgaccaaccaaccaatcttaccactggtgtcaactctggagtgcgccacacgtgatctttgctcctttcatttggtagagtttcagggcaagctgctttttctattttctcagtggtaatcagtagtgtgaggttacagggaaggttaaattaggttaccacatgacagttacttgatacagagcagcaggcacctgwtatgttgggtcctttatttcttccctcatcctttcattaggaagagaatatttctatagggtcaatcacagatgcagaagaggaga

SEQ ID NO: 452193 - DNA, 425 bp, Homo sapiens
aaccatcaggtgatggtcaggtagttgttaatggtctctctaaaataataattggtcgcagccagtaccagggaaaggcagtttccctataaataaaaacacttgaaattggtaactggcagctcagaaattgggccactagactttggtttgcacatttagagacaaaatggcaaagcatgatcttctgggggcatgccactggaaaagggaagaatgcctcaggtgggcatgtgtacaactgcagtaaacacactgtgcacgctcaactcttaagtgttagcaggtcactgtgcatgcgggcggcccayccagaggaaagaatcatgggaaaaaggacacaagacccctgaaatatgtcgatatataaaaatgccacacttgagctccaaggtgcctgcttgggtctcttccaagtgtacttt

SEQ ID NO: 452194 - DNA, 318 bp, Homo sapiens
ctacagctgtgtgaatcctccacatttttttttttttttgcmtggaaaagtgtttcagtttgtcattgcttcatcatttcgaattccatattaggttacctttttttttttttttttgcctgaccatagtacttaagaaaaatcttgcaactgtccttcattctgttgaaccaactatatcttatgttttcacttgacattttgttttagatctacttggggctttatttaaatttttttaacatttaaaaaaatttttttacttaaataatgaggcagtgtctcattattatccaggctggactgcatggggcattc

SEQ ID NO: 452195 - DNA, 558 bp, Homo sapiens
aagttattggctggacgccatggctcatgcctgtaatccaagcactttgggaggccaaggtgggtggatcacctgaggtcaggagttcgagaccagcctggccaacatagtgaaaccctgtctctactaaaaatgcaaatatcagccgggtgtggtggcacatgcctgtaatcacagctactcgggaggcttgaggctggagaatcgcctgagcacacgagatggaggttgcagtgagccgagatcgtgccactgtgttctagcctgggcracagaacaagactctgtctcaaaaaaaaaaaaaaagtccaagttactgttgcagggattgggacatcttgcctttctcaagttgagcaatattcccaaatataaaaatgtaggatcttagtccaatcagagcagatatttggtgtagggcattttctaatgtagtaccaataaattagacgcatacctcaaccaaaaaacagcccatatccagtaagtaataaggcaatgatttacatttcacatattaccagagtaatgactaatagcatacatgtataaactgaa

SEQ ID NO: 452196 - DNA, 558 bp, Homo sapiens
aagttattggctggacgccatggctcatgcctgtaatccaagcactttgggaggccaaggtgggtggatcacctgaggtcaggagttcgagaccagcctggccaacatagtgaaaccctgtctctactaaaaatgcaaatatcagccgggtgtggtggcacatgcctgtaatcacagctactcgggaggcttgaggctggagaatcgcctgagcacacgagatggaggttgcagtgagccgagatcgtgccactgtgttctagcctgggcgacagaacaagactctgtctcaaaaaaaaaaaaaaagtccaagttactgttgcagggattgggacatcttgcctttctcaagttgagcaatattcccaaatataaaaatgtaggatcttagtccaatcagagcagatatttggtgtagggcattttctaatgtagtaccaataaattagacgcatacctcaaccaaaaaacagcccatatccagtaagtaataaggcaaygatttacatttcacatattaccagagtaatgactaatagcatacatgtataaactgaa

SEQ ID NO: 452197 - DNA, 546 bp, Homo sapiens
ggctcacagcagtaggctgcaatttctttctgttaccctttttatttggaatgactcctatgcgtagataaatattgccgtattcctacgaagtgggcagctctgtgctccatgcggaggggaactcaagccaagcactacagctgtccctaagtgccatctgccatgatctgccgtggcttctaccacccccttttttgtgtgtgttaggaggaaaatgaagttcattttcaatgctaactgtcagtgaagaaatcactatgcttggtgtcttgaattagttggattgaaaaaagctttttcatatctgaagccaaagaacagactatataccccttttgtcacacacccatgttgcttctctgactgggktgtggaactaacgagtgcctatgcctctttgttcaattgaacagaagcaaccaaattgcccattcagttgatgatggattagccacctggatggttgatattggattctctgagatagtctgcagagttgattctgagataagaacagttcttaattgtatcaactaactgaat

SEQ ID NO: 452198 - DNA, 605 bp, Homo sapiens
cagagaaggaataggtctcaactgttgccaaagcaaagacatttatacgaaatcagtcagatcagggcaactggtaactctattcgatgtgccacattctaaaagacaaagcgcaagaaatacgaacagttttctgtctgattgtctacaaatgtgtgtgtgagtaggtacagtagatttattgaacgctgtcccagaagtgagatttccagataagacatttaaaaatatccttctagatgctatttttaacattatcttatttatttwaaattttgtttatattcaatcttgttaagcttattataagggcaaaattaattctttttggatgatacaatgtcatcgtgaacactaattctggtgttaatagagaaaatggaaacaaagaggcctcttcattaagcagtttcaaaacagtgaactgagcaaccaattttgcaaatcttccccctgcatggcccataactaaaaatatagtcactcaaacatcgtagaattggagacggaaaacagctcaatggaatgaaacatagagttcagaaacagacccaaacacaggcagaaatttggatctcacaaagtggcatttcaaatcaacaagg

SEQ ID NO: 452199 - DNA, 587 bp, Homo sapiens
gtatgttgagaaattctgggaaataatatgagtaggcaaagcaagaatatatcacaaagggccaagaaagcttagatgtggacacaatccagtagatagtggaagaaatgttaggagatacttgagaaaagtactgttttaggaaatagagattagcggttcactrttttattaaaaatagctgaaagacagaagctgagtcacttcaacttctgcagtaagcaaagccatagtatgcaaactggcctttaaatccatgggggaatgtattatctcactttcatggtgcacatctatcatgggtaggtgaaagcaagggaaggagagatccactccacctagtcactcaaagataagggctgactgaggcattaccttttacagctgaaccatctgtgatacatatcttcttaagttgttctggcagaagagcgagaaaatgaagaatttcacatagatttttgttgcatcagcccaacaataatacgtcatacttacttatatttcactgcccagagatagttatacagttctgcctaataggtgaatatttaaacaactcatcagaacaaactgaatatttgcaa

SEQ ID NO: 452200 - DNA, 625 bp, Homo sapiens
caattgcaagtatcaacgcaaaatcaaccaagtggagcaaagaatctcagaggttaagtctggtactacaaattaattgtcatmcaaaaataaagaaaaaagaataaagaatggacaaaacctttgagaactatgggattatgtaaaaagaccaaatctctggctccttggcatccctataggagaaagagtaagaaagaaagcaagttggaaaccatattttgggatataggccatgaaaattctccaacctcacccaagggccaacacttaaattcagaaaatacagagaacccctgtgagatactatacaaggtggccatccccaagaaatgtagccggaagattctcctaggtcaaaatgaaagaaaaaatgttaaatgctgctagaaagaggcagcaagtcacctacaaaggcaactacatcaggcaaacagtggatcttttagaagaaaccctaaaagcctgaagagattaggggcctatattcagtatattttttaagtgataatgcttcagatttcttcctacataattagaaaaaataatcacaacaaattggagaggaaatacaataaccttaaagataatctgggtcttatctaattccaaccaaaaatttcat

SEQ ID NO: 452201 - DNA, 595 bp, Homo sapiens
tagaagaaaccctaaaagcctgaagagattaggggcctatattcagtatattttttaagtgataatgcttcagatttcttcctacataattagaaaaaataatcacaacaaattggagaggaaatacaataaccttaaagataatctgggtcttatctaattccaaccaaaaatttcatatctagccaaactaagtttcataagtgaaagagattaagattcttttcagataagcaaatgttaaggaaatttgttagcacrtgacctgccttaaaagaggtccttaaaggagtgttaaatatggaaaggaaagactgttacaagacattataaaaacacactttagtacataaatcgacattctaaagcaactacacaatcaagtctgcataatggccagctaaaaacatgattaaaggatcatatctgcacatatcagtattaaccttgaatgtaaatgagctaaataacctaattaaaaggcatagagtggcatgctgaataaagaagaaagacccaactgtatgctgtcttcaagagaactatttcacaagcaatgacacacagaatctcaaattaaagggatggagaaaaa

SEQ ID NO: 452202 - DNA, 498 bp, Homo sapiens
ataaatatatatatatatagtatataaatatactatataaatatgtacaactcttatgtatccattaaatgtaaatacatgaatagattaacaaatagaacaagaaaaaatgattagtacagaatatttagcctttttctaagtttcatgagaaatctgcaratttcctagggaaacttatgatagcctattaacatgcaaatataacgtattagatctaatttttaaaagtaaaaagggatttttttaatcgactcgaagaagaaaaagatcttttaccatggttttcttgtcctgggctcaacatgtaatgatgaaagcaaactagaatagaaagtaaggcaaagaaaaataaatatatatttttttcagtggtctctaaatgtcttataaactttgttatgtctcttgtctagctttattccaggcacaaactgatcaaaaattggttcactgaatgagcttgccatatcagatatagaaattttgagatttgct

SEQ ID NO: 452203 - DNA, 498 bp, Homo sapiens
ataaatatatatatatatagtatataaatatactatataaatatgtacaactcttatgtatccattaaatgtaaatacatgaatagattaacaaatagaacaagaaaaaatgattagtacagaatatttagcctttttctaagtttcatgagaaatctgcagatttcctagggaaacttatgatagcctattaacatgcaaatataaygtattagatctaatttttaaaagtaaaaagggatttttttaatcgactcgaagaagaaaaagatcttttaccatggttttcttgtcctgggctcaacatgtaatgatgaaagcaaactagaatagaaagtaaggcaaagaaaaataaatatatatttttttcagtggtctctaaatgtcttataaactttgttatgtctcttgtctagctttattccaggcacaaactgatcaaaaattggttcactgaatgagcttgccatatcagatatagaaattttgagatttgct

SEQ ID NO: 452204 - DNA, 496 bp, Homo sapiens
tgagcttgccatatcagatatagaaattttgagatttgctaattcaaagtacaagaacacagtaaatagtaagagaatacatgagcctgtgagtatattaaattcactggcatgttttttcatctatttccctttagaatctattacaaaacctagagaaatgtgactcctatgaaccactgttatgcaaaggtgtgccagattcattgtgtttagggtagaaaatatagctgggagtaagaaaataaaaaataaagattttaattccaagaatgccccaaactaagtaaatgatgtattaccaaatttttattgctgcataaaatacctctttgtgacaacccagtttacaggcaatttcagtgttgactattagagaactattaagctgagaaggtcatgtagcatagggtaaacctcatgaccwcatctgttagaacatgtgttgatacgatagaccaaggaaaaaatatgctctgagtaagaggtaagcatg

SEQ ID NO: 452205 - DNA, 578 bp, Homo sapiens
ttatgtctatagtcaaagattatacacttaaaaattggttaagaggataggtctcacgttaagcattctaaccacaataaaataaaattaaaaaaattwaaaaaagtctttactagcattaaaaattattaattatttatggatgacagatctgtcctcaattaaattaaaaaataaaattgtcagcccaatgaaggcattatcttaaaaattagaattaatgtgcaaagagtagaataatgggagtggtaaaaattgaagttataaaagttatgttctaccctcaaccatcccattagttaggtaggctgggtaagtcatttttttttctctaagcctcaattgtacttctttagacttgggctaatcatactaaacaaatgggattgctattatgttaaaacacagacattaacaaacagcagttcaatctgactctggctaactatatactgaatagaatgcttaatgtattttaaccattctcacagaagtagaataaacaatataaacaataaatttccgaatccaaagtttaagagatgttaaggcaaatactgtattgtctgaaaagtata

SEQ ID NO: 452206 - DNA, 582 bp, Homo sapiens
atggtatttctgcctctaggtctctgaggaatcgccaccctgtcttccacaatggttgaaataatttacactcccaccaacagtgtaaaagctttccctttcctccacaacctcaccagcatctgttgtttctttgaacgttaataagagccattccgactggaatgagatgttatctcattgtggttttgatttgcatttatctaatgatcagtgatgttgagctttttttcatatgtttgttggacgcatgtatgtcttcttttgagtggagcttctgcacaacaaaaagataagacaaaattttaaggtgatttttccaagccataattgtattatacattctgaatgcagttataatacaaggaatgtcttaaattatttattttacaaagactttacttttacatattgaaaaatatgtttgaacatgaacattacaagtaggaaaatatgcctgagaaygtgcatttaatggctcttcctaaattaacttgcttaagttttggaatgtagccgaagagccaataaaatacaagtaactatttaaatgtatgtaatattatatagctataaaaatat

SEQ ID NO: 452207 - DNA, 594 bp, Homo sapiens
tatcttggtgacgcacacactaatttggtgagtttgcaaaggatgctggtttcyttaaagtcactaatttttgaaaaaaaaaaaaatctcaggatgttcctgagaaacatccctgcaagtgttttaagcatcctttcacttaacaaatttaattatgtatgcttgataaaatagaaaaagagtgggagatttaaaaaaaaaaaaaaaggcattgcgtactctgctgtcaagcatgcctgccattctattcaataagcttacaccctggagtgagcagtgacaccaggtcgctgttaactttatctatggctgtgtctttgtagttctcaacatgaagtgtcttgcaactttgattattattagtgtttagcaacagatttttaaaattcctgttggctcctatacagaagttaacaactcactgaaatctgatatattatatacaaaaatttcatctgttttaaatcatttgaatgattgagagaaatgttgggtgcatcatttctgcaggctcagataatcaaaacaaactgaggaattaaaatgaacgagcatttccaaaccaagtccaaaagttttacacttctttcccag

SEQ ID NO: 452208 - DNA, 579 bp, Homo sapiens
aaatctttaattatattccagagctgataatttaaaatttatcttcaataattttatttgtttccaaactacctgctgctgagaggaaaataagaatatgcaatttgaaggcatggcttgtagtgtatcatagctctatttattatattatkatattcatctacatacactgaactgaaattgtagagttcatttatcatttagatcaacttttaagaagatatatttccaattcttacctgtccatctcaaattgagctcactatattcactttatgtataaatggtatgtatacataagcaaaatataaatacaagcagtgatatatttattgcactttgtatcttaaactagtatacgtttgcttccagcagtattttgattttactgcaattcagatattctgattatcttttacctaaactttaacaatcaaaacaacttatcagtcatctaactttaaacttcctctgaaatcatagtctttgtacacgaaatctaactggggttaaatgttcttcttgttctctctgattgagccttccctgggacatctcatgcatagaaaagagttcaca

SEQ ID NO: 452209 - DNA, 552 bp, Homo sapiens
gtgaatgctcacaatataggtgagcaatcctgcttacagaaaaggtaatgagttagtaaattccaaatgtatgaaattgaaaagagtgttaactactagtgtaagtacaaaattatacaaatactttgctgaaaagtcagggccattttcttattctaattttagtgaaaacagctgtgtgacctctctgggcctcactttttttcatctgtgaagtcaaaagcataaatttgatgacatttaagattttagtcaaactttgaaactgatgtgtttgaagttctgaatctatggcaaataaataattaaatattaatttattaggtatgattgagtacaaattgtgagttaggcacctctccagttcctaagaatacagtaatgaaaaagcagatatgaatactgccctattcgagtttaaatcctaatgtggagagtcacaaagcaaaataaatatctatgcartatgttagaagtggggaggccagagaactgcattgcatgtttactcgggtggccagggtaggagtcactgaaaagctgagctgaaag

SEQ ID NO: 452210 - DNA, 526 bp, Homo sapiens
tgggatgctagataagtcttttcctttcctcataacttttgtcagaatctatgtgaatatatatagcagaatatgtaccatcactatttcaaggctatcccatttaatttttgttatgaggtcattgactctttacagaaaacatctaacatgtcagcgctttgtccttattattgtatttatctgtgtggtcatgaaagaagtggtctatgtgggagacttttccaaattatgaatctagaatacccataaatatttagtctcacttattcctacagtgtgtatgggtaagtgtattatttttcataagatgwtggctggggaaattgggaatacagaacatgaagacagttaacatacgtgccagcctagttgttacccctcattatattacagactggtaaatgtatctacctaaatggaatgatgatgctactcaagactgaagaaggtagccttagaaaattttctaatgtagatcgttgaatgttgaagaccttgccatgttaagtgatgtagagaaagg

SEQ ID NO: 452211 - DNA, 526 bp, Homo sapiens
tgggatgctagataagtcttttcctttcctcataacttttgtcagaatctatgtgaatatatatagcagaatatgtaccatcactatttcaaggctatcccatttaatttttgttatgaggtcattgactctttacagaaaacatctaacatgtcagcgctttgtccttattattgtatttatctgtgtggtcatgaaagaagtggtctatgtgggagacttttccaaattatgaatctagaatacccataaatatttagtctcacttattcctacagtgtgtatgggtaagtgtattatttttcataagatgatggctggggaaattgggaatacagaacatgaagacagttaacatacgtgccagcctagttgttacccctcattatattacagactggtaaatgtatctacctaaatggaatgatgatgctactcaagactgaagaaggtagccttagaaaattttctaatgtagatcgttgaatgttgaagaccttgccrtgttaagtgatgtagagaaagg

SEQ ID NO: 452212 - DNA, 608 bp, Homo sapiens
ttttgacactattgttgactatcacataatgatatgtaaaamcttagacatattttctaaaaagtcaagttcaaaacttgaaaaataaatgcttttagataaaggattgtatcatacactttatatatttgtgtaactgtcacaaagcatacattaagatgatttttgtaaaaattgtttttttttcctttttatctttatgtagaatattttggaaaccttttaaatgttggcctatatttataccctgcttttagcatatatttgtcaaccatttaggactttttccacatttttatagataattaatgaaccaattaactgcattatgtgattcacatgtacagcaagatcaagttttttagaatcaaaattggcattctatctaaagatgataccttcaaagttagataattaaaggccatggactttgtaggataatcttctaggttagacaagtaaaacctagaacaaacaaatctagagatattatatagaaatataatatctttacatagttaacttttgaggaaattagcaaagaaaattgcaatggatacaagttataaaagaacaattgtaataataatatgaagacctgccatacc

SEQ ID NO: 452213 - DNA, 619 bp, Homo sapiens
ataatggttaccaggggcggggagcagggcttaatggggagcacctatttaatggatagagttccagtttgtaacgatgaaaagttctgaagatggatggtggtgatggctayacaacaatgtgaatgtccttaaagccactaaactgtaaacttaaaatggctaaaatggtacattatatgttatgtacattttaccacaacaaaatcttaaaatttaaatgaaaaaaattaaaaatatttaaaaaatctgaacaatagcaaagcctaatatgactttcaaagtcttataatatctcagaattttgttcctcaaagatgcttggttttgcacatttttaaattatagattcagaggctgcatgtataaatttgttgcatggatttattgtgtaatgctggggtttgggcttttccctgagcaacacttccatattaagcaattcagagcccaaagtcctaaatccaccttagtatgctatcaagcaaatcttgaacaaatcttttaatttctctgggcttctgttttcttatgggttaacagagaagaattagcaagatatgagcttcattttagctaagattctttggaatttacgactcagttaagaacttctgac

SEQ ID NO: 452214 - DNA, 565 bp, Homo sapiens
tcctttaataccctagcaatcttctccctactccaaccttctttctctcyctgtattagttgttctcaggctgctaataaagacatacccaagactggataatgtataaaggaaagaggtttaattgactcacagttccacatggctggggaggcctcacaatcatggcagaaggtgaaggagcagcaaagtgatgtcttacatggcagcaggcaagagagcttgtgcaggggaactcccatttatagaaccagatctcatgagacttattcactatcacaagaacagtatgggggaaaatgccccgtgattcaattatcttcacctggccccacccttgacacatggggattattacaattcaaggtgagatttgggtggggacacaaccaaagcatatcactccctttacacctttcttcaagcattaacacaacctaaactatatttgtattatttcttcttttcttaaaaaaaaagaaagctccacaaagactttgtgaagcaatacatttcaaacaaggtgaaaagagtcttaaaaatatgcctgatcattatattttaa

SEQ ID NO: 452215 - DNA, 615 bp, Homo sapiens
cacatatgcatagaaatcttagacaaacattctttatcaaatatgtgacactctcaagaattaaaattatacccaagattcaaaagtttacaagctattggaaaaaatgagtgtctgcttaatttgtttttaagaaactaaagtaacaataatgttttaagaatatccagggattcatttcagtttgtggcattattttacttctaatggtagtttaaacaaaacttttctaattagactaagtatgttcattctcttattagtttttctttctataaacaaataactatttccagactcttaactcctctgtaattactgttgctcaagaaagctccattcagaatgagattacaagaaaattatagacataagccatacttaaagttgtttaatatgwcagttggaatagcttatgctctgtatttaatacttagttagtggaagatagtggatgataccattttagttataactgagagtattaaaattagtttacttatgtgttttcacgaagaatgatttttggaagctaatttctgtgaacagtatttctccctttaattaacatgaaacagagtgtgttttgctagtgtgttttttatttgtctacaa

SEQ ID NO: 452216 - DNA, 570 bp, Homo sapiens
taatattaagttcagttttcaccagaagaactggttatgcttttagaaatcttgatattgtgattaacataaatggctgatatttttaaactattatttttatttgatttacagcatttaattatcaagctataagagtcaacttttatggagtatgtacatgtttatagtcttttgcttttgaatctgtctagtggagtgtgacaatatgaaccgctttgaccgaccagacagaaatgttcggcagcctcaggaaggtttttggaaaaggccaccccagaggtggagtggacaggagcattaccacctcagccaccctgaccactatcatcaccatggaaaaagtgacttgagcaggtaaktactgttctgacttagatttcatttgctgtcctctgattttgaattataattctccctttcccagaaccctcaaaaaacctgtttttgtctggtttgtttttagaggcaccaaaaagcacttcaagttttatgtggtactaattggaataatatgtctaatttgttctttttggcccaaatattttttcattagttttatcttaaata

SEQ ID NO: 452217 - DNA, 545 bp, Homo sapiens
atggtctaattcctggaccctgtgaatattttactacacatggcaaaaggaattttggggatgtgattaacattaaggactttgaaaaggggagaatggcatataaagatgtgatgctggaataagaataagagaaatgtgagaagaaacttgactcactggctttaaagatgggtaacagacaccatataccaaagaatgtggacaacctctagaggtggaaaaggcaaagagacctatttttcctcgaggacctcaatacagccctaccgatatcttgattttagtccaatgatacccatgtcagacttgtgacctatmagataataactttgtgttgttttaagtcactgtgtggtaatttgttacagtaacattagaaaactaatataatttttttcagatctttgaataatgtcacttttgtaaatggggcttttgtaatttatctatctacagcaatcaccaatgactctctattcccttgccctgtttggttttcttcataacaactagtatatcagagattatataatctgtttatt

SEQ ID NO: 452218 - DNA, 491 bp, Homo sapiens
tattagaaattctagatggtaaaatttagacaataattagtcttctgatttttcctaatgacagtttgtaggaaatacaggttgagcatctctaatccaaaagttcaaaattggaaatgctccaaaatctaaactttttgattgctgacatgatgccacaagtggaaaattccacacttgatttcatatgacaaatctcagtcaaaacacagacagaactttgtttcaggtacaaagttacgtaaaatattatataaaattatcttcagttttgtgtatacagtgtatattaaacataaatgaattttgtgtttagacttgtgtcccatccttaagatrtctcattatgcatatgcaaataaatattcccaaatctgaaaaaaaaaaaatctgaaatctgaaacacttttggttccaagcattttgcatatgcgatagtcaatctatactgtacaatgctaggttatattcacaaaagagttgttcacaac

SEQ ID NO: 452219 - DNA, 593 bp, Homo sapiens
gtattgagtcttgtactcagtagttattttcccttatcctctccctcatcccaccctccaccctcaggtaggttccagtgtctgttgttcccctccatgcatccaygtgttgtcatcattgagctcccacttataagtgagaacatgtggtacttttctgttcttgcattagtttgctcaggttaatggcttccagtttcatccatgttcctgcaaaggacatgatctcattcttttttagggctgcatagtattccacggtatatacatacctatatatatacaccacatttctttaatcagtctaccactgatgggcatttaggttaattccatgtctttgcttttgtgaatagtgctgcagtgaacatatgtgtgcatgtgtttttatgacagaatgatttgtattcccttgggtatatgcccagtaacaggattgctgggttgactggtagttctgtttttagctctttgaggaagtgccacacttcttttcacaatggttgaattaatttataccatttacatttttatatcactatggtctcataggatacaagtttattcaatggttataatctgtaactattaat

SEQ ID NO: 452220 - DNA, 593 bp, Homo sapiens
gtattgagtcttgtactcagtagttattttcccttatcctctccctcatcccaccctccaccctcaggtaggttccagtgtctgttgttcccctccatgcatccacgtgttgtcatcattgagctcccacttataagtgagaacatgtggtacttttctgttcttgcattagtttgctcaggttaatggcttccagtttcatccatgttcctgcaaaggacatgatctcattcttttttagggctgcatagtattccacggtatatacatacctatatatatacaccacatttctttaatcagtctaccactgatgggcatttaggttaattccatgtctttgcttttgtgaatagtgctgcagtgaacatatgtgtgcatgtgtttttatgacagaatgatttgtattcccttgggtatatgcccagtaacaggattgctgggttgactggtagttctgtttttagctctttgaggaagtgccacwcttcttttcacaatggttgaattaatttataccatttacatttttatatcactatggtctcataggatacaagtttattcaatggttataatctgtaactattaat

SEQ ID NO: 452221 - DNA, 585 bp, Homo sapiens
acatgcctagttatttcatgacatactagacattatgaaatttacattattgggtgatggatttggggtctttctttaaataccattgagttttttggggttgtagttcattacctggagtcaggtaayaagcatcgatcttaaaattgttgaaacaagccaataagactctttattctaaggctaatttgggctcacttttaatgcgattatactgtgaggagtttacccaatgtctcctgtattaggaggtctgtccactttggctagtgtgatcccaatgtattttcaggcctgtgtgaagtccagggacaattttgcctattttttattggttctttttctcgtaccatgtagttttctaatatgttggctcagttcagtgttcagcagtgactcacaggttcgcctctgccgtagtttgctcttctttctctctttacttctgtatcacttcatattctttcccataaattccatccaacctggctttctcaaatttttcattgttttcacaagtcagcaaaactcttaagatctatttgtattttgaaagctctcctgtgatgtttccttgaagatcct

SEQ ID NO: 452222 - DNA, 585 bp, Homo sapiens
acatgcctagttatttcatgacatactagacattatgaaatttacattattgggtgatggatttggggtctttctttaaataccattgagttttttggggttgtagttcattacctggagtcaggtaacaagcatcgatcttaaaattgttgaaacaagccaataagactctttattctaaggctaatttgggctcacttttaatgcgattatactgtgaggagtttacycaatgtctcctgtattaggaggtctgtccactttggctagtgtgatcccaatgtattttcaggcctgtgtgaagtccagggacaattttgcctattttttattggttctttttctcgtaccatgtagttttctaatatgttggctcagttcagtgttcagcagtgactcacaggttcgcctctgccgtagtttgctcttctttctctctttacttctgtatcacttcatattctttcccataaattccatccaacctggctttctcaaatttttcattgttttcacaagtcagcaaaactcttaagatctatttgtattttgaaagctctcctgtgatgtttccttgaagatcct

SEQ ID NO: 452223 - DNA, 489 bp, Homo sapiens
aatattaatatagaaagaattgtcagcataaagcaaggagatctcccaccaaatctttttttctgttgctttccagtgctgtgaattaaggttattgatacaattatctgattttcattgtgtatttcttcaaaatagggtacattgatgtgtcatatgarttgttatggactatcaaatgagatggtgcatgtgaaaacatatatcatcgtgctgcaatgtgtttgcatattaattaaaagagggagtgtgatctaatacaaatttccagagttttggaatgagaaacatttatcttttatcatctatgagagcttcagagaatcaagtcagtgctcatgtgcttatttctaagaagctggataaaatctcattcccttcaaagacttataagcaaccacatactttatacttgatttctgtttataaaataaggagaaccatggatatgctcctgctgctcacattataagaatattgctaacttga

SEQ ID NO: 452224 - DNA, 562 bp, Homo sapiens
tagtaattacatcagctttaggctcctgaaatattttcaaatgtctagggttgttgaaacaatgaatgtttcattcttcactctttttaattcttcataaaccctttaactctctttaggtartaagagttacacaaaaataagaatgttatttctaattgcaaagagaatatgtaagatttagaggtgttttttaaagaacatttgtaagatgtatctcattattggcctttatacaactgataccaaaaatggctatttgacacatttatcatctgcgtttttgaccaaaaggcaaaaaatatccagaaaagccaaacctttatctattataataaactagaaaattgaacatctaatcttaaaagccctataataagtgctataagtttaccattaaaaatgctgtggaactctgaagaaaattaatggaacttaaatgattttaatgaattaaaatcacagtgttcagcagtcgtcagttatgtaactaatatgtcctaaaagcaattgttctctctctgccaattgattgagtgttgcatagggatcctgtaggtct

SEQ ID NO: 452225 - DNA, 562 bp, Homo sapiens
tagtaattacatcagctttaggctcctgaaatattttcaaatgtctagggttgttgaaacaatgaatgtttcattcttcactctttttaattcttcataaaccctttaactctctttaggtagtaagagttacacaaaaataagaatgttatttctaattgcaaagagaatatgtaagatttagaggtgttttttaaagaacatttgtaagatgtatctcattattggcctttatacaactgataccaaaaatggctatttgacacatttatcatctgcgtttttgaccaaaaggcaaaaaatatccagaaaagccaaayctttatctattataataaactagaaaattgaacatctaatcttaaaagccctataataagtgctataagtttaccattaaaaatgctgtggaactctgaagaaaattaatggaacttaaatgattttaatgaattaaaatcacagtgttcagcagtcgtcagttatgtaactaatatgtcctaaaagcaattgttctctctctgccaattgattgagtgttgcatagggatcctgtaggtct

SEQ ID NO: 452226 - DNA, 562 bp, Homo sapiens
tagtaattacatcagctttaggctcctgaaatattttcaaatgtctagggttgttgaaacaatgaatgtttcattcttcactctttttaattcttcataaaccctttaactctctttaggtagtaagagttacacaaaaataagaatgttatttctaattgcaaagagaatatgtaagatttagaggtgttttttaaagaacatttgtaagatgtatctcattattggcctttatacaactgataccaaaaatggctatttgacacatttatcatctgcgtttttgaccaaaaggcaaaaaatatccagaaaagccaaacctttatctattataataaactagaaaattgaacatctaatcttaaaagccctataataagtgctataagtttaccattaaaaatgctgtggaactctgaagaaaattaatggaacttaaatgattttaatgaattaaaatcacagtgttcagcagtcgtcagttatgtaactaatatgtcctaamagcaattgttctctctctgccaattgattgagtgttgcatagggatcctgtaggtct

SEQ ID NO: 452227 - DNA, 600 bp, Homo sapiens
tgcatataatggaaaattacttagccacataaaggaatgaagtactgatacatgccacaatctgcatgaaccttgaaacattatgctaaagaaaacaaagacagacataaaagtccacatattgtatgatttcatttgtacagattaatcaaattcatagaggtggaaagcagattagtggtgggcgggggctaagaggagagtggaatgagaagtggtagcttaatggctgtcaggtttattttgggatgataaaaatattcttggattagaaagtagttgtggttttgtaaccttgtgaagtactaaaaaccactgaattgtacaacttaaaaatggttaaagctgtgaattttatgctagygtaaaatagaaattacataataaaatgcatagctgcatacctgaaaatactgactacaacaaccaacgttgagtcatagcctattaaacgtagttgactttacataaaactcatttaggcatataaataaaaagaacaaattataagaaaaaatagattgttactggatttttaatagcaatatttcatattagaagaaaattgagatgtttaagatactcaaggaaagaaaatgg

SEQ ID NO: 452228 - DNA, 600 bp, Homo sapiens
tgcatataatggaaaattacttagccacataaaggaatgaagtactgatacatgccacaatctgcatgaaccttgaaacattatgctaaagaaaacaaagacagacataaaagtccacatattgtatgatttcatttgtacagattaatcaaattcatagaggtggaaagcagattagtggtgggcgggggctaagaggagagtggaatgagaagtggtagcttaatggctgtcaggtttattttgggatgataaaaatattcttggattagaaagtagttgtggttttgtaaccttgtgaagtactaaaaaccactgaattgtacaacttaaaaatggttaaagctgtgaattttatgctagcgtaaaatagaaattacataataaaatgcatagctgcatacctgaaaatactgactacaacaaccaacrttgagtcatagcctattaaacgtagttgactttacataaaactcatttaggcatataaataaaaagaacaaattataagaaaaaatagattgttactggatttttaatagcaatatttcatattagaagaaaattgagatgtttaagatactcaaggaaagaaaatgg

SEQ ID NO: 452229 - DNA, 552 bp, Homo sapiens
ctattaactgatgagtgggtaaacaaattatgatatatccatacactaggacacaactcagcaataaaaaggaacaatttgttgataaatgcaacaacataaatgaatctaaaaagtattatgttaaataataaaaggcaggcacaatatattatacactatatgatgtaaattttgtgaagttctggaaatgatgaaataataatgatagaaaacagatcaattcttgtttaagaccactttggaggaggcttagctgcaaaggggcaggaaagaatatttgtaggtgatgaaaatgttgtatattagcactatcgaaaataactttctgtgatratggtattgttttacaaattttcactgtccaaatgcagtagccactagccatctgtagttattgaacatttaaaatgtggctcatgtggtcgattaaatctattttacattttaattttaattaatacatttaaatagaaaatactgattaatttgggtgatatgcatcacttcttttgacatcatttgtcaaaatacgttacattgtacagttaa

SEQ ID NO: 452230 - DNA, 629 bp, Homo sapiens
attctgccactgtactccagtctgcgcaacagagcaagactctgtttaaaaaaaaaaaaaaaaagtagagcaaggcaatggctataccgtaaatgacattcttttgctctcttatttaatgttcaatatgtgctgctataattttttctaccataaaaattttaaaaatccaaacaataaaatataatcacacatattggattcaacaacaaaaggatcaccaaaatcaaatatctcactgaagtatactttgggactaagaatagcaatcactgtgcataaaaatgaaattcaagaccttgaaaattgcattgctacagcaaaaaaagaatagaccaaagtaaatccactagacagaagaatgtgaaagaataaaaggacctgagaaatgtgtcactcccaacatcagtcaactacattttttaaagtttaaatgctgatgcccaactgacagagattctatgattacatttgatacaaatgccatttatatttcccggttactaaaaaaaaaaaatattctttagggaatgtggctgaataaatgtttaatggatggcaggttctcarataaattaacacagatttcttatttcaaaatggaacactaataataacctaggtaatgt

SEQ ID NO: 452231 - DNA, 621 bp, Homo sapiens
ttatgtaacacatattctaagttaactggcaccctacaagtctacagaaaatgtttcattactagtttatcaaggatttatccatgaaattattgcatgtatataataattgtatgggtaaaccttagatgaattaagttaaaatagaaggaaagatgtttttcagatgtaaaagaaatggcttctctaaagtcaacatattaagaaaaaagagtcatgtagtttctaatgatcatctggtaaccagaaagcatacactccaaatatttctaatmagactaccatattagggtgattatgtagcctgaaaatatgccatgtaaattaaaacacttaccttccaaatagccaccctcgtgggatcacatgatacgttgaacagtacatgatttcagttttagcaactttagacttttaaaacaagatttaaaaatgatatctaatattactgtaatcagagtttcaaacagaagtagagtataacatgaaaaaagagaccctatttgtgagagagactcctaaaattctctacagcctaggaaacccaaattaactttttgtctgtttttgacataacagtgactatccatttaacagagtagagtgcacggtctgaaatat

SEQ ID NO: 452232 - DNA, 617 bp, Homo sapiens
ttctagaaacagtaaaattccggatttataccttcagtgagattacaaatttgttgaacatcacagaacacttaattctgacataagatgaatattaaaccatgggacactagaataaaatgattgagatgaaaattttacaaataagacataaggacctctattccatttcaagttactgagtactcaagttctgagtttcaataaccaatggattaggttgcaatttaagtcccaaaatttacaataattaacaccttctttgaactacctctrtcatcagaaaacaaacctctttcctcagttgtgttttccaagctttgtttaaattaaatgaatcatatattttggaagttttcccattgtgttagaattaactgtgtgaaacatccacagaataagagatgtaagacaatggataaaatgtccatttgttgttgattcttggaatacagatatcagtaaggacagcacattcttctatttgtgtaaaatgtgataaacatatatgcatagatttatctaagaagacaatgaagtggtagaaacacaagcaaacatttaaagtgtcaggtaatataaatgcatatgttcatttctgcactattcacgaaagc

SEQ ID NO: 452233 - DNA, 605 bp, Homo sapiens
ttttagtcgtaataaaaaagagttaataatacactcttctctctgcaaatggagaaatgagtacagaggagaaaagtgccttatactttcgtaggtgcaatattttatagtgaaagaattatgactgggaccatggttcttaaacttccaattctttctaccatgctccattgcctttattaaataatagatttgttaaagacatggaagattaagaaaagaaatattacaacaactttcttggagaaaataaccaaaaatctactacctccataggatggtctccgttttctcacttacattcctccaaataggaggcaggatttgaatctcygaattcatttggccatgtaactttctgctgagactgcctgaagaggagacaattatacccaaaaggcagtctaattaataaattaaagtaaaattactcattgaaattcttattatcaaatacagcattagtccatttgtcaggtaattcgtagtaatgtttagtagttgatagcaatttgtagtaattacatgtcaagccatttcttcacttcatattggtttcacttagtaaactcaatactaagaaaaggaattagtggttgatggcc

SEQ ID NO: 452234 - DNA, 605 bp, Homo sapiens
ttttagtcgtaataaaaaagagttaataatacactcttctctctgcaaatggagaaatgagtacagaggagaaaagtgccttatactttcgtaggtgcaatattttatagtgaaagaattatgactgggaccatggttcttaaacttccaattctttctaccatgctccattgcctttattaaataatagatttgttaaagacatggaagattaagaaaagaaatattacaacaactttcttggagaaaataaccaaaaatctactacctccataggatggtctccgttttctcacttacattcctccaaataggaggcaggatttgaatctctgaattcatttggccatgtaactttctgctgagactgcctgaagaggagacaattatacccaaaaggcagtctaattaataaattaaagtaaaattactcattgaaattcttattatcaaatacagcattagtccatttgtcaggtaattcgtagtaatgtttagtagttgatagyaatttgtagtaattacatgtcaagccatttcttcacttcatattggtttcacttagtaaactcaatactaagaaaaggaattagtggttgatggcc

SEQ ID NO: 452235 - DNA, 523 bp, Homo sapiens
tatgaacgttaatgaattcctttcacacgtcccgtatttcaaactagatctccaggatagtaaaatgccattaaaatgttgtaaggacatggcacagtgggaagagtatcaagactaaagtcagatgatgtgagaactgcttgcagatttacaatttgctcattgtttagcctgactactactgcctctttagaaagctgaaattgagccgggtgyggtggctcacacctgtaatcccagcactttgggaggccgagactggtggatcacaaggtcaggagatcgagtccatcctggctaacactgtgaaaccccatgtctactaaaaatacaaaaatattagccaggcatagtggcaggcacctgtagtcacagctacttgggaggctgaggcaggagaatggtgtgaacctgggaggcggagcttgcagtgagctgagatcacgccactgcactccagcctgggcgacagagcgagactccatctcaaaaaaagaaaaaagaaatctgaaattctccatct

SEQ ID NO: 452236 - DNA, 552 bp, Homo sapiens
attagtcttctttttctgtgaattctctatcatattcttggccagaatagtatggtacttgggaagcctgtttccctaatgtgccacaacagcctgattattattattattattattattattattattattattttgagacagagtctcactctgtccccaggctggagtgcaatggtatgatcttggctcactgcaacctccaactccctggttcaagcaattctcctgcctcagcctacgaagaagcagggattacaggcacacaccaccatgcccagctaatttttatattattaatagagacagggtttcaccatgttggccaggagrgtcaccatctcctgacctcgtgatccgccagcctcagcctcccgaaatgctaggattataggcatgagcgactgcacccggcccagcctaattattaattgtaaatattagcctcctaaccatctgaattaaattgctcacaatttcatctgggtttttaaaagtctttttatttgcttgttttacagaaggggtggagctggaaaataaatggtattc

SEQ ID NO: 452237 - DNA, 552 bp, Homo sapiens
attagtcttctttttctgtgaattctctatcatattcttggccagaatagtatggtacttgggaagcctgtttccctaatgtgccacaacagcctgattattattattattattattattattattattattattttgagacagagtctcactctgtccccaggctggagtgcaatggtatgatcttggctcactgcaacctccaactccctggttcaagcaattctcctgcctcagcctacgaagaagcagggattacaggcacacaccaccatgcccagctaatttttatattattaatagagacagggtttcaccatgttggccaggagggtcaccatctcctgacctcgtgatccgccagcctcagcctcccgaaatgctaggattataggcatgagcsactgcacccggcccagcctaattattaattgtaaatattagcctcctaaccatctgaattaaattgctcacaatttcatctgggtttttaaaagtctttttatttgcttgttttacagaaggggtggagctggaaaataaatggtattc

SEQ ID NO: 452238 - DNA, 552 bp, Homo sapiens
attagtcttctttttctgtgaattctctatcatattcttggccagaatagtatggtacttgggaagcctgtttccctaatgtgccacaacagcctgattattattattattattattattattattattattattttgagacagagtctcactctgtccccaggctggagtgcaatggtatgatcttggctcactgcaacctccaactccctggttcaagcaattctcctgcctcagcctacgaagaagcagggattacaggcacacaccaccatgcccagctaatttttatattattaatagagacagggtttcaccatgttggccaggagggtcaccatctcctgacctcgtgatccgccagcctcagcctcccgaaatgctaggattataggcatgagcgactgcacccggcccagcctamttattaattgtaaatattagcctcctaaccatctgaattaaattgctcacaatttcatctgggtttttaaaagtctttttatttgcttgttttacagaaggggtggagctggaaaataaatggtattc

SEQ ID NO: 452239 - DNA, 552 bp, Homo sapiens
attagtcttctttttctgtgaattctctatcatattcttggccagaatagtatggtacttgggaagcctgtttccctaatgtgccacaacagcctgattattattattattattattattattattattattattttgagacagagtctcactctgtccccaggctggagtgcaatggtatgatcttggctcactgcaacctccaactccctggttcaagcaattctcctgcctcagcctacgaagaagcagggattacaggcacacaccaccatgcccagctaatttttatattattaatagagacagggtttcaccatgttggccaggagggtcaccatctcctgacctcgtgatccgccagcctcagcctcccgaaatgctaggattataggcatgagcgactgcacccggcccagcctaattattaattgtaaatattagcctcctaaccatctgaattaaattgctcayaatttcatctgggtttttaaaagtctttttatttgcttgttttacagaaggggtggagctggaaaataaatggtattc

SEQ ID NO: 452240 - DNA, 623 bp, Homo sapiens
tgtaacaaacctgcacgttgtgcacatgtatcctaaaacttaaattacaaaaaaaaaaaaaaaaaaaacaaagtcttaagagctgagctttcctgcaagaagttgctgttacgaataacttcaggacaaaggatattaaactaaaagctaacagatggtgcactgatgtgaagaggtaaacactgtgagtgtgtgtattagcctgttttcacactgccaataaagacatacccaagactgggtaatttacaaagaaaaagaggtttaatggactcacagttccatgtggctggggaggcctcccaatcacggcagaaggtgaaargcacatcttccatggcagtagacaagagagaaaatgagaaccaagcgaaaggggtttccccttataaaaccatcagatctcatgagatttattcaccaccatgagaacagtatgggggaaccacccctatgagccaattatctcccacctggtccctcccacaacatgtgggaattatgggagctacagttcaagatgagatttgggtggggacacagccaaaccatatcagtctgtaatacagtatcgagacaaaaatctgtagctgtaaaatttatagttctgtagagattagaag

SEQ ID NO: 452241 - DNA, 426 bp, Homo sapiens
ataaacccttgaaaaatattgcacattggcaatttttatatgtaaatcaatacaggatgatgytttaggaagtggctccatgtatctgttttagattgaggtgtcagaaattaccaaacttaggagttgagatgaggctgtttgagactggctgcgcctgatcaggctgtctctgaaaggtggcagaagagtaactgtatgggacaaacctgatgaaagacgaggtaaccacctggagagcgctaaaatgcaaaagaacacatttcattgccatcgtgatttacatggctcagcagaagtgaggcaggagttattttaaaaaacaattgtgaaccgtatgcaaaaataagggacagaaaaactgctgaatctaaaatgttaagaaagcttcgttttcaaagtttactagggcaggaagatatgcca

SEQ ID NO: 452242 - DNA, 426 bp, Homo sapiens
ataaacccttgaaaaatattgcacattggcaatttttatatgtaaatcaatacaggatgatgttttaggaagtggctccatgtatctgttttagattgaggtgtcagaaattaccaamcttaggagttgagatgaggctgtttgagactggctgcgcctgatcaggctgtctctgaaaggtggcagaagagtaactgtatgggacaaacctgatgaaagacgaggtaaccacctggagagcgctaaaatgcaaaagaacacatttcattgccatcgtgatttacatggctcagcagaagtgaggcaggagttattttaaaaaacaattgtgaaccgtatgcaaaaataagggacagaaaaactgctgaatctaaaatgttaagaaagcttcgttttcaaagtttactagggcaggaagatatgcca

SEQ ID NO: 452243 - DNA, 606 bp, Homo sapiens
gtttgtctcagtctctattttataaccacagctcactgctatctgacttataactctcccttgtgcctggattgaaaaactcaaatgctaaatagaaagactatgccgcatagcattgggcctctccttctcatttcacatggttgcccrctccctctgagaattcactcttgccctggctctctggctgcctttgttagacactctacaggccccttgtatgcctcacttttaccactaggaatccatctgcagcccttttcccaacatgtacattcttcctagacagttttacctgaaaaggtcactctcttttatgggtattccaaaatttgtatgtccaactaaacctattttgaatactggactcctttttcaatggacaattggctgcttcctcaatgcaaatgccccagaagcgtttcattcataccactgtcaaaacagaatgtatcctctccccaaaactaccttcccatctttttagatccccttctctatgagttgttcaagccagaaacccaaggggcatcttggactcttctgttttccccagtaataccgctgaaaacatttctccaaaccctgaaaattttacctttaaaa

SEQ ID NO: 452244 - DNA, 598 bp, Homo sapiens
aaataacactccgtaatttctctgtttaaaatttctgtgtgggggtccaacatcgctttctggattaaagtctagaatccctaacatggtatggatcactgctggctttgcctctgccttcagccaatttcttcactttcagccattttctttgcttccactatttgtatcttcttacagttctttgtagataatactgtacatatgatgctgcctctgcttagtgaggcccatcctgtcttccttcatctggttaattaccatttgccctttagtaggtcatttaattctgcaaccrtctgtctcaattggtgtgagtagagtaatcctcctctgttctcaccagtttctcataattccctgagcataccttttacggaccttattgtctgcaaattgttactgccttttctgcatcactattgaagaaaactcaattctaaggcatctttttattagcccttagcaatatggttcaatctatgtattttgtattacaaaatatatacaaaatataaaagattttgactttatttatgtggatttttctttttttggtctcacatgaaccacatgtaagaaggatatttgggtttca

SEQ ID NO: 452245 - DNA, 646 bp, Homo sapiens
ggcattaaacatacagcaggaatgttttatgtaaaagcaggtcctgccccaagggggtgactgttacagaattttcttctgcacaacacccaaaggaagaatcagtacagaagtgtccaagaatggagtcttacacaacactccataaccggcacctttaaccaaaagatagtctattaaatatcacaatactccatcggttcttgtttggggggttgtttgttttttttaacataaggtcttcgtaatcagcacttcatggaagtgatcaaaattggattgtcagacttcaacagtatgttgatgatcacttacaataaaatcagaatgagaaagggaaattgtctgaaaggaccattgagccaggtaatagattcagtctaatatatccacacagcaggaaccaaattaaaatgtagatggaattctaatatagtccaactggaaagactcgctccagtttcttacagaggcttgcttgctgtttgcaagcagctaatcttaaagacacaaaattggttatattaattacttcagacacttttacatgtataaacakgtaagttaaaatagtatcaaggttatggtgcctgagataaaaagggaaaaacacacataagctagaactactctcttacctgattca

SEQ ID NO: 452246 - DNA, 581 bp, Homo sapiens
tgcccctacaataaatatgacattaaagatgaagagcaagtgagtgtgaatgagatcaagaaagcaagaagattatagacaatttaaaaagtaagactgttgaaaaaatatattgttaagaaaaataccagtaacttgagagctgagacaggtctagtttaaaaattgattaaggtaagtgaatatgtcccaagagcaattattcagcttatatttctttttgttttgaaacgatatagattcagatgatgctgcaaagaaaaaamaatgtacagagaagtcccttgcaccctttactcagcctcccccaggggaagcatcttgtataactatagtacagtatcaaaaccaggaaactgacattggtagaatctacagagcttactcagattttgtatgcatttgtgtgtgtgtgttgtgtgtgtgtagtgctatgcaattttatgacatgtagcttcatgtaaccatcaccactatcaagacacagaactgttccattgccacaaagctccctcatactatccctttatagacacgtccacctttccctcttcccgtccctaaccccagggaaccacaac

SEQ ID NO: 452247 - DNA, 594 bp, Homo sapiens
tatgaattaatgagatggattttcttttgtaacttatgtaaattaatttcactactttacaaaagtgcattgttcccatgatgactgaatttaatgtttttacttatgtatatttttttaattatagtattgagttttaagtgtgcacattattatttgtgttagatagtttctatggactggactcttatgtgaatgaattatataaacagaatttttttaatgatgatgtttacttatggctattctgtgtccaaatgctcaaaaataacaattatactaatcagtcatcaggcttgatttatgataagataaaaatataaagaaacttggtagctagtaacttaagcattctgaacatacaaatgttaagagtagttatatttttagtaactgtatacaaataagatgcaacaagatgagggaaagactgacatttagccaaatgagaaaacaagttccatcacagattagtatcyctgcaaggataattataagtatggaataatatttcataggaaatttttaaattactaggcatttaaaaagatgtctagtcaagcgatgaatacactaaaatctcaggccactcta

SEQ ID NO: 452248 - DNA, 500 bp, Homo sapiens
tgaaattaaaaaataaataggtgattaaaatattatagtaaagataacctttggcacttgtagaacttctttttcaaaataactgaaactatatactttatactagtagatcatatacttcaattagtatatgttaactagtattgcaaatcttgttttgagctcaccttctgatgaatatttttctttatatrgctttccagttagttaattttgagcctaccaataccctagtatacaacttatttttgttaggtagatgaggagggggcactatttctatcccttttcatgccagaaactgcattcctaattcctgactttacatgatatacttgtttttgccctggggtcatatgacatttagaaaaatatatttatttttctaaaagtatatgacatttagaaaaatatatttaatatgaaatcaatgctcctgtataaaacaattaaatacaacatatcaaaggtagaaatgaaccaagggatacaagaacttt

SEQ ID NO: 452249 - DNA, 609 bp, Homo sapiens
aacaatagattaaaattataagaatgaaaaaatatatatcaaaaagatacattgctttattaattacattaaaccagaatggctatatgaaatatcaaaaatatttcagaagaaaggatattatcaactacaaagatcattcctaatgataaaaggatcaatttatcacgaaggtatagcaatcactaatgtttgtgaactcaataacaaaattcaaaatacctgaagcaagaaatacttgaactacaaagagaaaaaggaaaaatccacaattaaagtcatagatttcaatatcctgatttcactcattgatagaatagtagatagataatcagtccaaaacaccaccactggatttggtaacatcgaggtcactaaagcaattgcagaagaatggtggggacagcaagccagstaacatgggtcatgaagagaaagggaggagactaagtggaaacaccaactctatgggctccttcaaagtcttttgctgtaaagaagagctgaaaaatgagttgtacaaggtgcaatgtgagtcaaggttttctttgctttttgaaatataaaacaaactagaacaaatgcgcctgcttaaagggaagttcagat

SEQ ID NO: 452250 - DNA, 551 bp, Homo sapiens
cttggggaacataaaacataaagggatctaaaactaaattactaagtaaacttgacagtcaagcttatcaaccaaataacagatcaatgcttaaaagccaacctgcaaagctcaaggagagacatactatttaagtaggwttccatttacattgacaattctgtcatttctgttttctatcaaaggcaaacagaaatacacaagatcaatggaacaataaattccttgtatagaaataatgagaccatacagtcatatctgaaaaatgcacacactaagctaccaaaggccttggaaggcctcttttttcaccacacactattgacacatgtccagacattgaggtcatagaaactaatcatactcctttaaaaaaactgtactttttcttataataaaatgacataacattattttctaatcctttgcctctggcctaaaaatcataatctgcattaacttcaagagaaaattaatgtctaagaaaaacccatgaagaaagattatagcatgggatataataaattattggtcattccaaaagatgggat

SEQ ID NO: 452251 - DNA, 551 bp, Homo sapiens
cttggggaacataaaacataaagggatctaaaactaaattactaagtaaacttgacagtcaagcttatcaaccaaataacagatcaatgcttaaaagccaacctgcaaagctcaaggagagacatactatttaagtaggtttccatttacattgacaattctgtcatttctgttttctatcaaaggcaaacagaaatacacaagatcaatggaacaataaattccttgtatagaaataatgagaccatacagtcrtatctgaaaaatgcacacactaagctaccaaaggccttggaaggcctcttttttcaccacacactattgacacatgtccagacattgaggtcatagaaactaatcatactcctttaaaaaaactgtactttttcttataataaaatgacataacattattttctaatcctttgcctctggcctaaaaatcataatctgcattaacttcaagagaaaattaatgtctaagaaaaacccatgaagaaagattatagcatgggatataataaattattggtcattccaaaagatgggat

SEQ ID NO: 452252 - DNA, 621 bp, Homo sapiens
aaattaatttgtccatttatttaaatagtttataagacaataaaggatggcataccagtgattaatacaaggacttggagggagaagaaaaagagggaatgagtaaaaagggaaagaagtagtaagttctaagaggacaaaatgaaacatgtaaaattaagcccctgggaaaagcagtggtgactcaatgtgtggaaatkcatacattcaatgttcttgagcaaacaagattatttttgtagtaaatttgcttaatttttattttacttcagaggactattaaatttactaatatattaccaagggtaagataatttatttctgggtaaagggatctcaaagaaacacattaaattcttatagctggaacataaacaaacatatacaggcatggcattagtttattaagagaaaatataggaaaacatattatgccatatatgttcatgttttccagttggattgctaaattattaacaaataggtgaagaaaatcgaatgttattgaggggaataatttgaagatcttatgagtcattaaatatttatgaaataagccgtaataatcaaaaatggcaagcttaatcaaatattccttttaaatatattagaaatattact

SEQ ID NO: 452253 - DNA, 621 bp, Homo sapiens
aaattaatttgtccatttatttaaatagtttataagacaataaaggatggcataccagtgattaatacaaggacttggagggagaagaaaaagagggaatgagtaaaaagggaaagaagtagtaagttctaagaggacaaaatgaaacatgtaaaattaagcccctgggaaaagcagtggtgactcaatgtgtggaaattcatacattcaatgttcttgagcaaacaagattatttttgtagtaaatttgcttaatttttattttacttcagaggactattaaatttactaatatattaccaagggtaagataatttatttctgggtaaagggatctcaaagaaacacattaaattcttatagctggaacataaacaaacatatacaggcatggcattagtttattaagagaaaatataggaaaacatattatgccatatatgttcatgttttccagttggattgctaaattattaacaaataggtgaagaaaatcgaatgttattgaggggaataatttgaagatcttatgagtcattaaatatttrtgaaataagccgtaataatcaaaaatggcaagcttaatcaaatattccttttaaatatattagaaatattact

SEQ ID NO: 452254 - DNA, 441 bp, Homo sapiens
agatcatcagatatttggggctggctttgttctcttttacccttattacctgcattgtgaattctctatttttttttttttttttttttttttttactgttgctcctttttctcttttgataacatgtttggtttaaggggtgagggaataactcccgttaaactcagtggtggcctatgttaaatgagtttgagatgccagagcttccctggcatgaactggaggaggaatagagatattattcagagataactgagttcagttaactcagtaaatatgtattgaattattatgtgcaagacaattttgaaacctctgtaatggtacaaagtagatggcattcaagctgtacacatttctagtgataacttgcaaattggtcttgctaaacagtcattarccaggtgtgtagctatatggaaattactaggtaccatgtt

SEQ ID NO: 452255 - DNA, 566 bp, Homo sapiens
atggtattgccactcaaacgtgccagggatgagtgtcactggatgtcccacatactaaccaagtgctacaggagcaagcacagaggatcacactggatccagaacaaagtcccttcttcctgcaatgtccctccagcaccttatactaacagtgcttagcatcatgcctgctggtaagtgacaaatatttacatggtccacatccaatattataagccacaaaatgatgggtagattgaaactaagaggcaagaagtgtaactaaaacaatatrcttccctttcccggtgataacagtactaggataaaatgtcacttcctatctttaagttaactaataccgagaccaagtaaaataagctagttgtatgctccaggaattacctgctcccagatgataagactgtgagcaaatacacatggtacttaccaagagtaacaacttactcaccaagaattgttttgacagcctcacttctcagcaacaaccaattccaaagttacagcttcagtagaaactgtcaattccaattcctttcctattctgtaagctccaccttaaaacc

SEQ ID NO: 452256 - DNA, 555 bp, Homo sapiens
ggtacttaccaagagtaacaacttactcaccaagaattgttttgacagcctcacttctcagcaacaaccaattccaaagttacagcttcagtagaaactgtcaattccaattcctttcctattctgtaagctccaccttaaaaccacccagttcatggcctaaaacttaaaaaatatgctccccctgacttttatcttttgagcttttgctaagactmtctcaaaacagagtttttccttattgcaaaaggcttaataaacttagcttgtctcaatcccacgtttttctggtagtccttggggactttaagtcaacaacagaattcataagccaatcagaagctgtagaacctgtgctttaaacggctaaagctctgggactaatgtaaaaggtatttatttgaaggcagaaatgcctctttgcacattatgtttgccatctgagaacatctttttcttgcaatgtatttattactgggctgacgactaataaccacgtacttgttcaagcagttttggagagaatatgaggaatctgtttgaatgaaaggattc

SEQ ID NO: 452257 - DNA, 449 bp, Homo sapiens
ccataaaatacaacattcctgttgggagcaggccccccaaaatctggccataaactggtcccaaaactggccataaataaaatctctgcagcactgtaacatgttcataatggccctaacgaccaagctggaagcttgtgggtttaagggaatgagggcaaggaacacctggtctgcccagggtggaaaaccccttaaaggcattcttaagccacaaacaatagcatgagcgatctgtgccttaaggacatgmttctgctgcagttaaccagcccaacctattcctttaattcggcccatcccttcgtttcacataagggatacttttaattaatttaatatctatagaaacaatgctaatgactggtttgctgttaataaatatatggataaatctctgttcagggctctcagctctgaaggctgtgagacccctgatttcccacttc

SEQ ID NO: 452258 - DNA, 449 bp, Homo sapiens
ccataaaatacaacattcctgttgggagcaggccccccaaaatctggccataaactggtcccaaaactggccataaataaaatctctgcagcactgtaacatgttcataatggccctaacgaccaagctggaagcttgtgggtttaagggaatgagggcaaggaacacctggtctgcccagggtggaaaaccccttaaaggcattcttaagccacaaacaatagcatgagcgatctgtgccttaaggacatgctyctgctgcagttaaccagcccaacctattcctttaattcggcccatcccttcgtttcacataagggatacttttaattaatttaatatctatagaaacaatgctaatgactggtttgctgttaataaatatatggataaatctctgttcagggctctcagctctgaaggctgtgagacccctgatttcccacttc

SEQ ID NO: 452259 - DNA, 449 bp, Homo sapiens
ccataaaatacaacattcctgttgggagcaggccccccaaaatctggccataaactggtcccaaaactggccataaataaaatctctgcagcactgtaacatgttcataatggccctaacgaccaagctggaagcttgtgggtttaagggaatgagggcaaggaacacctggtctgcccagggtggaaaaccccttaaaggcattcttaagccacaaacaatagcatgagcgatctgtgccttaaggacatgcttctgctgcagttaaccagcccaacctattcctttaattcggcccatcccttcgtttcmcataagggatacttttaattaatttaatatctatagaaacaatgctaatgactggtttgctgttaataaatatatggataaatctctgttcagggctctcagctctgaaggctgtgagacccctgatttcccacttc

SEQ ID NO: 452260 - DNA, 445 bp, Homo sapiens
ccataaaatacaacattcctgttgggagcaggccccccaaaatctggccataaactggtcccaaaactggccataaataaaatctctgcagcactgtaacatgttcataatggccctaacgaccaagctggaagcttgtgggtttaagggaatgagggcaaggaacacctggtctgcccagggtggaaaaccccttaaaggcattcttaagccacaaacaatagcatgagcgatctgtgccttaaggacatgcttctgctgcagttaaccagcccaacctattcctttaattcggcccatcccttcgtttcacataagggatacttttaattaatttaatatctatagaaacaatgctaatgactggtttgctgttaataaatatrtggataaatctctgttcagggctctcagctctgaaggctgtgagacccctgatttccca

SEQ ID NO: 452261 - DNA, 553 bp, Homo sapiens
tacatattttgttagatttttatctaagtatttcacttttggtgctgatttaaatggtattgtgcttttcattttaaatcccatttgttcatggctgacatatatgaaagcaattaagttttgtatgttaaccttgcgtcctacatccttgccataattgattattagttccaggtgttttgtgtttgttgattcttttggatttcctacatagatgatcatatcacttgcaaacaaaaacagtggtatttcttcccaagctatatgtcttttctttccttttattgtattattgccttagctaygactcccaggacaatgttgaaaaggagaggtgagagagaaaataattgctttgctcctgatcttgctaggaaagcttctagtttctcttcattaagtatgatgttagctgtaggttttttagagatattctttatcaagttgaggaaattcctctctattcctaatttatttcgagttttaatcatgaattgatgttggattttgtcagatgcattttctgcatctattgagatgacaatatgatttt

SEQ ID NO: 452262 - DNA, 577 bp, Homo sapiens
ctaaaatgattttatagaagtcattgtggataaagcgaagaacataggggttttttttcctataaaaattcatggcaagcctattgactttctttgagctatggggtaaagccggctgttagataaaatccctaactctcttttaaaacttacaaaggaaagatactttttagtataaattttgaaagctgtaagtagccctagactcctttargaacttgttcttcactcttgcagaagaaaacagaagggagtgtgccgttattaagtattaggtatactagaaaaaggtagaagacaaacgtctttatactcagttcttattcaaagagtagctgtgtttatgtccttcactttctttttgttctttatacaaaagtagcagcttgaatagaaactgtgagaagtgtactctaaataggaactggtatgtgtgataaagctttaaagggtaaatactttggatctgacttttcacttttattcagtttcactgtattttgtcattcaacttgatgttttcttgtgcttccagattgggaatggtggctgaaacactctctttcattgtttccat

SEQ ID NO: 452263 - DNA, 264 bp, Homo sapiens
gttttaaagtctccaacagccgtatctgttttagagccatagaatatttacttactgaattgcctgtttaaagatgaactttctaaatgcagggaatagtaacttgcaaaaaagctatggtctctaagtaatgaaggctgtttcagtacctagaaaaatcaaaatcaaggttttgatgctgctartgtaaaagatgcaatccccttcttaatggcctgcttatttattaagctcctaggcactatgctgaatgccctacttgca

SEQ ID NO: 452264 - DNA, 485 bp, Homo sapiens
taactttgtaataattacattattacaaaaatgttatcttaatacagtattgaaaataaattacaacatgtagtgagtatatatacagaatgagcctccagttgaagatccctataataggttttttcactgtgaaaaattgtyatctaatatgttgacactaaaaatggttccacattctaacatcagtaattaaccaggcgtggaaacatattttctattctgttaaatttgattggctctatttgcttattgctattcttaacatttaaaatagaaatttgcagtattccaaacctttctttatcaccatagagttctcgaaagaactataatgttccttggatataagatttagggttttatggctttttgtcccagtgttctttttaaaaatcttagtctttagattttcctaaaaggaattggggcattcttggtatcttcgcaaaataattgtttattgtcttaatagatttgagcat

SEQ ID NO: 452265 - DNA, 589 bp, Homo sapiens
aaacatttccggccttttgttctctagtgacattccaactccccaagcttcaaactcctgttccccgactctatttttaaaatctcgaaattcttgcgaaaaatctaaactccattgttcatctcttcaacctgtagttttcagtttcctttacacagtcctccggtggtgcctctaagcaggaaaaaaaaacaaacaaactcctggccagtcgattttcgaaacagactttttttgtggtcttttttttctctaggcgtccacagaaacccacagctactagaaattaatacttcaggtactgctatragaacttcttaaggaaattccaaagttggtcaacattaatcttcttgtcattcttcactccccacagcgctccatacagctttttggaaactttggctcaattttatttcgccctttccaaacgtctcgaaaccctgtcctacaaactcaggcggctgcgtccccgggagcaaaccctccgcccaagttcttctaactcaggctgcgctccgatctgtcatcgcgttatttcgcactccaccccccccccccccacccccgaaaagtgaagttcaactcc

SEQ ID NO: 452266 - DNA, 352 bp, Homo sapiens
caagcggagacaccctgacttacaggagccaggcgtgcaggagcggcaggtccgagggcacacagggcgtctccgggactcagcgtggccccaaggtcttccagtgcagggagaggaggctgtgyatgtggcaaggtcaaaccttggagggcctggaggccatcaggagtgaaggttttgtcctgtttctccttacacttcccctaaaggggccccattgttacaggaaactaaacttggtcccccttaacaggtagcaataacatgaagagccaaagttcctgtattatcctagaattcaaggaaattttgcttttttccataattaaaatgaaaaataatggtgtagtct

SEQ ID NO: 452267 - DNA, 352 bp, Homo sapiens
caagcggagacaccctgacttacaggagccaggcgtgcaggagcggcaggtccgagggcacacagggcgtctccgggactcagcgtggccccaaggtcttccagtgcagggagaggaggctgtgtatgtggcaaggtcaaaccttggagggcctggaggccatcaggagtgaaggttttgtcctgtttctccttacacttcccctaaaggggccccattgttacaggaaactaaactyggtcccccttaacaggtagcaataacatgaagagccaaagttcctgtattatcctagaattcaaggaaattttgcttttttccataattaaaatgaaaaataatggtgtagtct

SEQ ID NO: 452268 - DNA, 352 bp, Homo sapiens
caagcggagacaccctgacttacaggagccaggcgtgcaggagcggcaggtccgagggcacacagggcgtctccgggactcagcgtggccccaaggtcttccagtgcagggagaggaggctgtgtatgtggcaaggtcaaaccttggagggcctggaggccatcaggagtgaaggttttgtcctgtttctccttacacttcccctaaaggggccccattgttacaggaaactaaacttggtcccccttaacaggtagcaataacatgaagagccaaagttcctgtattatcctrgaattcaaggaaattttgcttttttccataattaaaatgaaaaataatggtgtagtct

SEQ ID NO: 452269 - DNA, 404 bp, Homo sapiens
gttccccaccacacagcaatggaaggaaatagaaagggaatccacagagcagcaggatggggtgagggcttgacatctggtgacagggagcttagagagagaacgagtgccctggcccccctttcccttgctgaggttatgggtcacagggtgtcacaccaggtcctgtaggagaccagacacatgctaggaacgatggcagggcagacctttctcaaggcagaggagcaagggcatcacctcgcaggctggaggcaatggaggccttgagagagtgcgtggcggggawgccactgccacacaggggtagggcagtagccagggttcagaggctgggtgggctccagaagtcttggagaggggacagagctggaccgaggcactcggtgggcctgatgactcga

SEQ ID NO: 452270 - DNA, 520 bp, Homo sapiens
gctaattaccctgatctgatcactatgcatgagaggtattgaaacaccaccatgtcgyccatgaatatgtacaatgattatttgtcaaatttttaaaaattaaaattaaaaagaatcagggctaatctgccagtgaactcgcagcccatgggcagagctcgccaaatgtggcattcgaaatagacttcccacgggaagctttctcagcttgcatctctcaacttctcatttaccattgtccacagctggcacattctaaaatcgatttctatctgacccatcatttaggtgaatcatgtggccatggagattggtgggaggggcttgcccagggaagccagtctggatttgaatctgtgccccttcactcgttagctgtaatgcgagcaagtggctaacttctctgaggctgttccctcatctgcaaagcaggactgaccctacttaccttgcttccaggactcctggggttacagaagaccacacacaggacatctggtcttgcaaggtgcttgacaaa

SEQ ID NO: 452271 - DNA, 471 bp, Homo sapiens
ccctctctcctctttctcatgtctatttttctttcttccttttaatctttctgacttatctctaacctcctaattctcttttaaagtattctcatctgattaagtcacacacatccargagagttcctttaattagcttaaagtgaactgattagggacctgaattatatctgaaaaatcccttcatcttcatcatataatataacataacataagtcatgaaattatagtacattacaatcacagtcaagtagagaggattatctagggttagcacacccagaggtcaagatttttgtagccatcttagagttctgcctactacagccaatatgcatattttctggtcctgaatagctttactgttccccccctatctccatatatgcctccattatattaactaaatcttatatttcttttggacaaggctggagaatgaaattgcactagacactaacattagactta

SEQ ID NO: 452272 - DNA, 558 bp, Homo sapiens
agatggggtggggctgttttatgatatttgggtaggtaaaggaaaattacagtcaaagggggttgctctctgccaggcaggggtgrgggtcacaaggtactcagtgggggagcttttgagccaggatgaaccaggagaaaggaatttcacaaggtaatgtcatcagttaaggcagggaccggacatcttcacttaatttcttgtggaatgttatcagttaaggcaggaacgggccattttcacttctcttgtgattcttcacttgcttcgggccatctggacatatacgtgcaggtcacagggtatacgatggcttagtttgggctcggaggcctgacattcaggaccaatgcacaatctggaaaacttgtttgggaatactttctcagtggtaaaaaaatgaaattccagttatacctttattagattttctcacaactaactttccaactgaaaaatataaacaaaatcaggttgatagtagaaaaaataactaagggtaagtaacatttttaattaaacaaccctaaatgaatttaatttacctagtccatctat

SEQ ID NO: 452273 - DNA, 564 bp, Homo sapiens
ctcttaataataacacctaacatttattgagttcttacaatatgcaaattgttccagttatctattacaacctaataaacaacctcaaaacttattgacttaaaacaacatttcttttgttccccaatctgtgatctgggcagtacccagcaggagcagtttgtctgtgctctatgcagtgtcatctggtgtagctcaaagtctggaggccagaaycatctgaaggtttgctcgcttatatacctggaggtaaatgctgactgtcatctgggacaattgtaataaagacctactcatggcatgggctttttcaagacctataggttgtgttccaaggacaagcatcccaaatgagagattcaggaagaagccacagcagcttttttcacctggcttcaaaagtcaggcagcatcactcttgagacaatctattgctcaaggcattcacaaaggctgcccaatttgaattgaaaggaaatagaattcttctgttgatggaggagtgacaagtttctggaagaacatatggcccaaaaatattgccatatcttcttttgggaaata

SEQ ID NO: 452274 - DNA, 586 bp, Homo sapiens
ttcgaataaatgtgtgtaattggattttctaccttttgcaatcactatttcaaaacatctccaaagctttcacctcttgacccatgtttatttcaccttcagaagtggtggtgcccatttcacaccaaaaataaaggctatcagacagaacttacatcggcatctccacaccaaatccctaaccctgtgattggcactatcttttttttttttaatcttccctcttttattatcttactctactacaatagttatcacactcctttactttccccacagccaatcatttttcgaagacttatttcacactggggtctgcatatactcaacacccatctattccttaatccccagaagtcagaattaactctttccttgaccgctctgaaatttctatagatgaaataagaaaccatgtccactaaataaaatggttgcatctcagtcctttcccacagcagcattagacatatttgattactccmaatgggtgaaaagctgactttaacttccttagccacagaatatatcattcgtttccttttttctctgtgggcattcctagtatgcatgctatgattgttac

SEQ ID NO: 452275 - DNA, 613 bp, Homo sapiens
ttcataaaaatcaattattaaaaaccatgtttaaagttaacctataacattcacagcaaacacagtaatgacaaatgacatgactaagtgattcttgcaactgatgacactaaatataagatagatctcatccttggacttgttctgtagtaagatacaataaagagctctgtcaaacatgagagaaagggcatttggcgattggggaatttttccatagctgcatttattaaggtttgcatcacatccgagaaacagatctatgtaagtaggaattaaaatgtgttatcagaacaccaaagaatgrcgtttataattatatacctttatgcttgaaaatatgttgtatgttgtatggcatacaacatatgtcattccagcagttttaaatgggtgcttaaaaagttttaagaatttaattaacttagattttatcataagcatattaatttgtttttcaagtatgacacttaaaagtatgatgtttgcactcttaagagagcaaagtgatcaaatacattcttaggaatatatatgcagagactgtaaagtgatttgttgatagcctgtagaataggatatccatttttttgtcagatgagaatgaaaagta

SEQ ID NO: 452276 - DNA, 564 bp, Homo sapiens
gagacctcctcatcaatggcaacagttttattttaatggtaaaaattaagtaatggagtgtctttcgaaatgacactgctcaaatgctagtcttgagcaaaaggaaatagaatagaagcaatgaaagtctggtgataaccagtagccgtagagtgataaacttgcctcatctccgcaatttctaccagaatcttaagttcaccatagtgcctgagattcrctctctcatttctacacttccagaggatcctaaaaacatgtaaggattcttcatttggcttcatattgtatggctataaactctctcagtatccaaacaacttcctctggcatagttttaatttgttagtaaattttaaatcacagaagtctataaaatatcaatctagcttattataatcagagatttgactgactgctggtccctaaaagctttttggtaagtgttggaaaactaaaagcttttggtaaatgtgtgaaaacaatttatacacaattcaatagactttgtaagatgcaaattattcatgaagctatggtaaaaatttctccaaaacagattta

SEQ ID NO: 452277 - DNA, 564 bp, Homo sapiens
gagacctcctcatcaatggcaacagttttattttaatggtaaaaattaagtaatggagtgtctttcgaaatgacactgctcaaatgctagtcttgagcaaaaggaaatagaatagaagcaatgaaagtctggtgataaccagtagccgtagagtgataaacttgcctcatctccgcaatttctaccagaatcttaagttcaccatagtgcctgagattcgstctctcatttctacacttccagaggatcctaaaaacatgtaaggattcttcatttggcttcatattgtatggctataaactctctcagtatccaaacaacttcctctggcatagttttaatttgttagtaaattttaaatcacagaagtctataaaatatcaatctagcttattataatcagagatttgactgactgctggtccctaaaagctttttggtaagtgttggaaaactaaaagcttttggtaaatgtgtgaaaacaatttatacacaattcaatagactttgtaagatgcaaattattcatgaagctatggtaaaaatttctccaaaacagattta

SEQ ID NO: 452278 - DNA, 608 bp, Homo sapiens
attatttaaatgtgaacacagaagcctatcttaattgctgctaaataattacaaaattggccatagatctgaatataaactttttgctttgggccaggcgctgtggctcacgcctgtaatcccagcactttgggaggctgaggcgggtggatcacaaggtcaggagttcaagaccagcctggccaagatggtgaaaccctgtctctattaagaatacaaaaattagctgggtgtggtggtgkgtgcctatagtcccagcttcttgggaggctgaggcagagaattgcttgaacttgggagacagaggttgcagtgagcagagatcgcaccattgcactccagcctgggagacacagccagactctgtctcaaaaacgaacaaacaaacaaacaaaaaaaactttgctttgtaaagaacaaatataaaataattacagtggagtaaaattgtaataaaatttagtagaaattaataacatataaattttcacttaaaaacgcaattagctgtaaccatatttgccctttaaaggcaggggccatcagctatcttcatagtcttctcttttctttgcagaaatgataggaacaggttgagaactggagca

SEQ ID NO: 452279 - DNA, 608 bp, Homo sapiens
attatttaaatgtgaacacagaagcctatcttaattgctgctaaataattacaaaattggccatagatctgaatataaactttttgctttgggccaggcgctgtggctcacgcctgtaatcccagcactttgggaggctgaggcgggtggatcacaaggtcaggagttcaagaccagcctggccaagatggtgaaaccctgtctctattaagaatacaaaaattagctgggtgtggtggtgggtgcctatagtcccagcttcttgggaggctgaggcagagaattrcttgaacttgggagacagaggttgcagtgagcagagatcgcaccattgcactccagcctgggagacacagccagactctgtctcaaaaacgaacaaacaaacaaacaaaaaaaactttgctttgtaaagaacaaatataaaataattacagtggagtaaaattgtaataaaatttagtagaaattaataacatataaattttcacttaaaaacgcaattagctgtaaccatatttgccctttaaaggcaggggccatcagctatcttcatagtcttctcttttctttgcagaaatgataggaacaggttgagaactggagca

SEQ ID NO: 452280 - DNA, 512 bp, Homo sapiens
  misc_feature (1)...(512): n = A,T,C or G
tggagcattaaggtcatttacattcaatattattattgagatgtgagatactattctattcatcgttctatttgttgcctgaatgccttattattattattattattgtgtcattgttttataggtcctgtgagatttatgctttaaggagattctattttggtgtattttgaggatttgtttcaagatttagagctctttttagcagctcttgcagtactggcttggtggtggcaaattctcagcatttgnttgtctggaaagactgaatttttccttcatttgtgcagcttagttgtgctgtatacaaaattcttggctgataattctttcatttaaggaggctaaaattagggccccagtcctttctggcatgtagggtttctgctgagaaatctgctgytaatctgacagattttcctttataggttacctgatgctttgcttcatagctcttaaaattatttcttttggcttgactttagattacttgatgactatgtgcctaggca

SEQ ID NO: 452281 - DNA, 531 bp, Homo sapiens
tatatgtccattttatataactaggtgctataataattatatttctggcccattctgaaactatctatctatctatctatctatattctttctactattaatatacagtctacctagtgagttaattgtatatgtttattattcctattcttcctcgaattctgctgaatgtgcacagggaagaataatctcaraggtacacactgaagccctgccttatgctatgtatgaacttgtcattcaggggcataattagaattccatatctcccaactccaaacccttgtatcttctgcactatactatcatgcctcttttgtctacactctatattatagaacaagattggtatttgctttattatctttgcactttatttaataaagcaccattattgattaagaatatcttatcaatacttttggagctgctgctgattaatatcaaagcaaaacttgcacccaacaactctaaacaggcaagaaagactttatttaatacttctgttgcaagaagagaaagactgaactc

SEQ ID NO: 452282 - DNA, 531 bp, Homo sapiens
tatatgtccattttatataactaggtgctataataattatatttctggcccattctgaaactatctatctatctatctatctatattctttctactattaatatacagtctacctagtgagttaattgtatatgtttattattcctattcttcctcgaattctgctgaatgtgcacagggaagaataatctcagaggtacacactgaagccctgccttatgctatgtatgaacttgtcattcaggggcataattagaattccatatctcccaactccaaacccttgtatcttctgcactatactatcatgcctcttttgtctacactctatattatagaacaagattggtatttgctttattatctttgcactttatttaataaagcaccattattgattaagaatatcttatcaatmcttttggagctgctgctgattaatatcaaagcaaaacttgcacccaacaactctaaacaggcaagaaagactttatttaatacttctgttgcaagaagagaaagactgaactc

SEQ ID NO: 452283 - DNA, 584 bp, Homo sapiens
ctaaaatagtcgctagattctttttaggttctttgtaaagtaggagtaataataattacatcatatgtttgtcttaaggattgaatgagataatgttttcaattacttagaattgatgttacttagaatacttagaataatgccagcatacrttgtatttattaataacagttatcattatttgaaattttaagagtgtggttcttaatgagcaatcataggcttttactgttaataacttcccctcttaacagcttcccctgctggtatcttcctccccctatatcctcccagcctccagagcacctcaaggacaatgatgcccactattgcacaagactgtgtataatataccaacacttgtttctgcaattttaaaaaaatctacctaccagttatagttactggttctatttcttgctctagctctacagaaagcagatagaacataggttaacttaaaataaatttgcattgtttggcaaatatgcttataaacataaattttacttctcaggattttgacttattacccaaattaacaaaatttaaaagaaaacaaaaccctatagtgaacgttgctt

SEQ ID NO: 452284 - DNA, 575 bp, Homo sapiens
tgagtctatgtccttatctttacccaaaaattttaaaattttgcatgggaagcaagacggcaaaaatggaacagagcaccacttgttaattatatataatgttttaatttagattcagtatctctcagtacttgtgacaaacaagtgtatatcatgtctaattggcttcttccatcattttaattaggatagctataatttttggtactatgataaaatatatttcttagaaacagaaaagtcttaaattgattacatttcagttacaggttactaatgaaaccgtttacttcaggaagtagtaactttcatccaatcctgtttaatgcacatgctctccctaagagggcttttcatcttagcaattgccagcggtatctacccagtggctcaagacaaaaacccaggcaatttcatcaatttgtgattttttttcctctttacatgtctaaagtccaagttactgtgatttttttcytctttaactatcacgtctaaagtccaagttaccatcatctttgactagcattaggacattaactagtctcttaactagtctccaatcttccactcta

SEQ ID NO: 452285 - DNA, 673 bp, Homo sapiens
attaactagtctcttaactagtctccaatcttccactctaaactgtctataatataatacctaaaaagaccgatgaggttttgcatcttaaaatgttcatgagattatttactttttttgtttaaaattgttcagaatttcccattatacttagagtttaaatctagattaaatgcatacataccagcaccagcctgatccatttcatgcccattatttttatggttgttattagttaagaacaatatagaatccaagtatattttctatacatgaattgaagcatgacagataaaactaaattctgctttacacattcatgggactgatgttgaatcaattatattyatcactcactttgccaatattttcttctatgcttttatacccattttacatatatttatagtgttatattaaattttaaaattaaaataattttaattttgttcactcacatttaccaagttatttatttatgatttgttcaacacacttttcaatattgacattacacaaattctttcataattgctctaataattttagtttaagctttttttattatgctttttattcatttaaattttatttgcatctatacataagtgatgttagaattccaaaaccacttattaaagatatcactttttccaaaatcctaaatttatgt

SEQ ID NO: 452286 - DNA, 608 bp, Homo sapiens
aaacttttaacagaggttttccagtaaaacagattataataaactatataattattgatgataaaatgataaattgataaaatgataaattgttttgaaaaccacatagaaaataaaacagtttctttaaatgtagcagaattatgaaaaattaatttttttctgaacttaytggaaagtcattcatttaattgaaaatcattttcattaatttggattttaactgtttatgatactaagacattttatcttaattcaagctaattttagatggtactaccactgctaactttagcatttaaaaatatacacaaagctataggcccacttaattaagaaaatttctctattttcagagaggagaaactttttaagaagctagtaacaacatttcattagtttctataattcagttccaacattttggaatttaaacatttaaaaaatctaggatatttttagaataatcataagctattatcatcattaaagctctagaattaaagaaatgaggaagtagtatggcaaagattaagatatcttaaaagtttttccttgattagttgtgtaagacattttttagtgatattatagaagttcacagaatc

SEQ ID NO: 452287 - DNA, 586 bp, Homo sapiens
atctgtagagaccattattacaaaaataaatgggatggcaggcacagggaggaaggagcaggagcggggggagaggcagagatgaactaacaagtaaaagcacgtgatagatatattttggaggaagaactacctcaggaaatgggagamtttttcaggtaaaattttctatattctaagagaaattaaagtagtcatggtactgatgacataagagattagacatgaaataattataagattagatgataagtgagctggcagagcagctctcaaataaactgagagcagaccattaagaaaagaaaaagcatcttagaaaaagcagatgatagaatcaacactgctgaaaataaaatcagtgatacagagcccaaacttatgaaagatcatataaaatgatgctggaataatcagccatgaaaactactgcagaaaaaaatgctagatatggaaagcagacagcagagatcatacattcacataactcatatttctaaaaaagaaaacacaaagataaatcagaagaaaactttcatgaaagaaagttaggttgaaagtctagattcaaagtgttcattgttta

SEQ ID NO: 452288 - DNA, 586 bp, Homo sapiens
atctgtagagaccattattacaaaaataaatgggatggcaggcacagggaggaaggagcaggagcggggggagaggcagagatgaactaacaagtaaaagcacgtgatagatatattttggaggaagaactacctcaggaaatgggagactttttcaggtaaaattttctatattctaagagaaattaaagtagtcatggtactgatgacataagagattagacatgaaataattataagattagatgataagtgagctggcagagcagctctcaaataaactgagagcagaccattaagaaaagaaaaagcatcttagaaaaagcagatgatagaatcaacactgctgaaaataaaatcagtgatacagagcccaaacttatgaaagatcatataaaatgatgctggaataatcagmcatgaaaactactgcagaaaaaaatgctagatatggaaagcagacagcagagatcatacattcacataactcatatttctaaaaaagaaaacacaaagataaatcagaagaaaactttcatgaaagaaagttaggttgaaagtctagattcaaagtgttcattgttta

SEQ ID NO: 452289 - DNA, 453 bp, Homo sapiens
tcatatacgaaaagtctcttgaataaattagayattttagaccttttctcatctaatctggtatttagtttcctgggaagttcagtccatgttcaactttaaattgtatattatatctctcagttcatgttcactttcaaattgttactattcattttgcctattaatactgctattatatattgaagtatgactaattactggccaaagaaaacaacaacaaaatatttggaggaaaaaaaaaaaagtacagctacaaagttgttccctcagaaccccttaacttgtttctttctgagacttctctttttatattttgtgtattttatgctatatgaagacactatttttagcacctatttttcctagcttcctctttatattttggtatctgtgtataccatattactttggattcctagcatggagaaaacgttgcaagtctatgtcctc

SEQ ID NO: 452290 - DNA, 529 bp, Homo sapiens
acttcctgtctagtaattcctttgcaattactagaatccaaaggcacttcagaaagtaggaagatctaagtcttatcttttgggtttccttcaagccacaagatgacactgggcccatgccatttgaatgtcagagtgcttttgtatatgaaaaaacaatccaccaaacatttttttaataaagaagtcactttgatggaaagtcattcattgcaaaaatattcagtacagtatctcttgatatagtgattagcagtagattttaaataattatatttacccagaaaagttaataaagtttcaaattctgctgcatgcagtgtagtatacttatagattcagaataaagtcatgaattatctaaccaaaaatgcattcactaatcattagggtaaagcaaatcaaaactacaagataccacttcacatacattagaacgactattaaaaaaaaaaaagaaaataacaagtgttagcaaggatgtataaaaattggaayctgtgcattgctggtgagaataacaatggta

SEQ ID NO: 452291 - DNA, 560 bp, Homo sapiens
gctgagatcatgccgctgcactccaacctgggtgacacagcaagactactctgtctagataaataaataaataagcattgaatgtcttaaagccagaatccaggatgtgtgtcttggtaacggggtctcgcatcttttgttgagttctcactacatgtcagacacatcaaacaattcctatgaagcaagtagggttttctaaagtttattgcataaagcattatttctgcattatgtttatgggtgttcattttaaaagaagccacgtgttcaagttggagaaacactgaattacaggaccaaagtttaaaagtttctttgactaggcatggtagctcactcctgtaatcccaacactttaggaagctgaggcagaaagaatgcctgagcccaggagttcaagaccaacctggacaacatagagagatctcatctctacaaaaaaataaaaaataaaaaacaacaaaaaaaagtttgtttactgcagaatttctcagagtctttgatatactaayggcattgtgattctctgagagttattcacatagcatttcctaaac

SEQ ID NO: 452292 - DNA, 548 bp, Homo sapiens
ttaaaattgatgatgaactctttaggtcttctstaaaacactaagaaattgcagtgtcatatagtgaccatattagtaattaatattaaatattttgaaattagtaaagcaaattgattttatgttcagcctgttaccttaggcctaatgattatggttctttatgcagtgtttctttttgcccaaataatataacaaaaacagttgtctcttagcatatactgtcctccatattacagataagattgcttgtttcaaaatgtcagcacattctttgatcactgccactactctaattttctcctctagatagaagacattttgcaggacgcagtggcaagagcctgcagtaccaactactcgagtggctaaggcaggaggatcacttaagcccgggaatttcaggctatagtgcactataattgtatctgtgattagccactgcactccagcttaggcaacatattaatagcaagactgtttttttttttaaaaaaaaaaagggcacctgtttgatttgtccattttttcatgccctttactgatga

SEQ ID NO: 452293 - DNA, 548 bp, Homo sapiens
ttaaaattgatgatgaactctttaggtcttctgtaaaacactaagaaattgcagtgtcatatagtgaccatattagtaattaatattaaatattttgaaattagtaaagcaaattgattttatgttcagcctgttaccttaggcctaatgattatggttctttatgcagtgtttctttttgcccaaataatataacaaaaacagttgtctcttagcatatactgtcctccatattacagataagattgcttgtttcaaaatgtcagcacattctttgatcactgccactactctaattttctcctctagatagaagacattttgcaggacgcagtggcaagagcctgyagtaccaactactcgagtggctaaggcaggaggatcacttaagcccgggaatttcaggctatagtgcactataattgtatctgtgattagccactgcactccagcttaggcaacatattaatagcaagactgtttttttttttaaaaaaaaaaagggcacctgtttgatttgtccattttttcatgccctttactgatga

SEQ ID NO: 452294 - DNA, 574 bp, Homo sapiens
gtagtttgtgtttccttctcttttagggagttagtaatatggcatatttcctcatggccagatgtttagtattgaggactttagcacacttgctaaggttcttaactgttaaattataggcagcctttgctttccrtggtagtgtgtgaccatataaatgagcaggtaagctgaaaccctgcaacttggcgttagcagtaaatggacaaatgtttacaatgcggtcttgagcagctccctataatcaaacacattaatgtttttacagcaaaactttttggtgtttatatcaagcataaaaaataatttgtcttttggagtgttttttttttattggatgtacaattatggacctgcatggtaacgtgtctataggaaaatgcatttatattcacacactgggaagccagaagcatagcactgcctctggttacttttgtaagctgtggtaggggtctgggatgtctttccttatttatgaccgtatttgtcagaaattcaagaaccctggggaaggaactcctatagaataaggtttaggtgtgaggtaggaagtagtatgactgtgtttttt

SEQ ID NO: 452295 - DNA, 574 bp, Homo sapiens
gtagtttgtgtttccttctcttttagggagttagtaatatggcatatttcctcatggccagatgtttagtattgaggactttagcacacttgctaaggttcttaactgttaaattataggcagcctttgctttccgtggtagtgtgtgaccatataaatgagcaggtaagctgaaaccctgcaacttggcgttagcagtaaatggacaaatgtttacaatgcggtcttgrgcagctccctataatcaaacacattaatgtttttacagcaaaactttttggtgtttatatcaagcataaaaaataatttgtcttttggagtgttttttttttattggatgtacaattatggacctgcatggtaacgtgtctataggaaaatgcatttatattcacacactgggaagccagaagcatagcactgcctctggttacttttgtaagctgtggtaggggtctgggatgtctttccttatttatgaccgtatttgtcagaaattcaagaaccctggggaaggaactcctatagaataaggtttaggtgtgaggtaggaagtagtatgactgtgtttttt

SEQ ID NO: 452296 - DNA, 533 bp, Homo sapiens
ttcaagtttcacttgtgatgtcacatgaataagcaagtacagagatcctggaatcctgaaagcttgatagtttggggcaattttttttagtttcaagtagttcttgatctgaagcaagttttctattgtttgggggcagttattttggtcaattttccaggcartttttgtcaaaaaggctcttgtctcacaaacactgcaatagaaccgcaaatttgctgtaaacctaaaatacaagttttgagctggttaattaaaggaattgtagagagctgtattttctgtaacttcctagtttctcttgaatttatattttgaatttatattttacacattaaatattaattttatatgtaaaattatttgacataattttatataaaatttatttctatatatcagtactagaaatatatgtaatcttatttttcagagctttgtgccattatactcataaatagttttctaaaggaaattagttgtgcttggattcatcattgattttaaccttggttgaatacatagacatattt

SEQ ID NO: 452297 - DNA, 533 bp, Homo sapiens
ttcaagtttcacttgtgatgtcacatgaataagcaagtacagagatcctggaatcctgaaagcttgatagtttggggcaattttttttagtttcaagtagttcttgatctgaagcaagttttctattgtttgggggcagttattttggtcaattttccaggcagtttttgtcaaaaaggctcttgtctcacaaacactgcaatagaaccgcaaatttgctgtaaacctaaaatacaagttttgagctggttaattaaaggaattgtagagagctgtattttctgtaacttcctagtttctcttgaatttatattttgaatttatattttacacattaaatattaattttatatgtaaaattatttgacataattttatataaaatttatttctatatatcagtactagaaatatatgtaatcttatttttcagagctttgtgccattatactcataaatagttttctaaaggaaatwagttgtgcttggattcatcattgattttaaccttggttgaatacatagacatattt

SEQ ID NO: 452298 - DNA, 573 bp, Homo sapiens
tttttttgagaaactaccgaactgtattccaaagcagcaataccctccaccagccaagtattgaaagttccagtttctccatatcttcttcaaaacttgtatgagtactctttgtaattttagttattctagttggtgtgtagtatcatctggttattttcatttgtatttccccaatgactaatgatgttgagcatctttttatgttttttttttttgcaactatatgttttctttggtgttgtgtgtattcaagtcttttgccctgtctaaaatatttcaagtgggtagtttgtcttgcaattgagctgtaagatgtatgactgaatacaagctctttgttggatacgtgttttgcaagcatttccttccaactagtaggtttgccttttgacgtttgtaacagtgtcttttgaacttccagcatcaaattgacttgacacctctattgaaaacaaattgactgtatatgtgtgggtttatttttggattctrtttctttgcatcaatttatatatttatctttatgctaataccatactcatgattttataactatatgttaagttttga

SEQ ID NO: 452299 - DNA, 554 bp, Homo sapiens
gtatatgattacctaaaagtacataccacaaaataaatagtatataatagctagtaaaaactctgtaagttgaaaaatggacatgcctcctgaataaaacatcgaagactgcaaaatgaccctgtrcaactccaggattttaacacattcaaattagtaactggaaatactatttttattagtttgtcatttcataatttatcattataaaagttaattttgatgttatcctatattatcaagttacctatagtcttcacagaaaattagaaagcagcttgacttctagaccttgtctctttatattacatatttaggcacagaaattgttgttactatgttgattgtactttgctctggaaaatacagttcagttttataacctacctataataatcagtaatctttgcccctactcctccattctccttcccagtgctctatttggtataaagagctaaaaataaaataaaataaatttaagctacttgataaaatatggaataaaaaactaagggaaagtaaaatgatacacggtgtagatttttatcagc

SEQ ID NO: 452300 - DNA, 554 bp, Homo sapiens
gtatatgattacctaaaagtacataccacaaaataaatagtatataatagctagtaaaaactctgtaagttgaaaaatggacatgcctcctgaataaaacatcgaagactgcaaaatgaccctgtacaactccaggattttaacacattcaaattagtaactggaaatactatttttattagtttgtcatttcataatttatcattataaaagttaattttgatgttatcctwtattatcaagttacctatagtcttcacagaaaattagaaagcagcttgacttctagaccttgtctctttatattacatatttaggcacagaaattgttgttactatgttgattgtactttgctctggaaaatacagttcagttttataacctacctataataatcagtaatctttgcccctactcctccattctccttcccagtgctctatttggtataaagagctaaaaataaaataaaataaatttaagctacttgataaaatatggaataaaaaactaagggaaagtaaaatgatacacggtgtagatttttatcagc

SEQ ID NO: 452301 - DNA, 621 bp, Homo sapiens
accttcggcctatctagcaatttcactttttaaaaatgtatccaaaaatatacttacacatgtgcaaaattgtgtatgcataagattatttatcacaaattatttgtaataccaaaaattagaaacaatccgaatttcctcaatagtgtaccactggaataaattatggcatatccatacaatgaaattctatgcctccataaacagaataagaaagttttctgttttctgagatgaaaagatctttttatggccaaaaaaaagcaagytgcagaatagtattataatatgctattttattgtccaaatttgaggagggcaggaaataattatttatatttgcttgcagaaattctgaaagaatacataaaattaaatacactgcttattaatgaaagaagtcagggacctgggaagataaaagacacaaataaaaggcttctcagtatgtaaaggttgctagtttttgaaaccatatgataatacctatgccaaaaaaaaaaagaaatatgactgacatcttttaagaaatggaaaaactaaaaacatgtctgatttagtggaaaagcctaaatgagctctcatgtattatataaatatttcatattaagttcttctcat

SEQ ID NO: 452302 - DNA, 621 bp, Homo sapiens
accttcggcctatctagcaatttcactttttaaaaatgtatccaaaaatatacttacacatgtgcaaaattgtgtatgcataagattatttatcacaaattatttgtaataccaaaaattagaaacaatccgaatttcctcaatagtgtaccactggaataaattatggcatatccatacaatgaaattctatgcctccataaacagaataagaaagttttctgttttctgagatgaaaagatctttttatggccaaaaaaaagcaagctgcagaakagtattataatatgctattttattgtccaaatttgaggagggcaggaaataattatttatatttgcttgcagaaattctgaaagaatacataaaattaaatacactgcttattaatgaaagaagtcagggacctgggaagataaaagacacaaataaaaggcttctcagtatgtaaaggttgctagtttttgaaaccatatgataatacctatgccaaaaaaaaaaagaaatatgactgacatcttttaagaaatggaaaaactaaaaacatgtctgatttagtggaaaagcctaaatgagctctcatgtattatataaatatttcatattaagttcttctcat

SEQ ID NO: 452303 - DNA, 538 bp, Homo sapiens
ctattacctactgtggttggacaagtgaaattttaaatcttagracataaatatccaataaaaatgcttgtacatacatgtatatcaaaaataggtgcattcattgcaacattatttgtgatagccttaatgtagaaacaacccagttcattgttaaaaagcttaagttgtagtatgtagactgccttatagcagtaacggattacagctatgtataacattgtaagtgaatcttataatgttgacaaaagaagccatacaacacatattatgattccattaatatgaaactgaaaactaggcatgaccagtctctggttttagaagtcaggatagtggctgcttttgaggaaggaggtagtgactaggagtgaatatgagggaggtttctggggagctgataatgttctgattcttgaagtagttaaccagattacacaggtgtgttcgttttttgataattctttgaactgtatgtgtactgtatattttcttgttatattcaataaaaagaattactatgatttttatattacat

SEQ ID NO: 452304 - DNA, 532 bp, Homo sapiens
tctgtctttaggtgtgcacagctccagaatctgaccgcaccttatcacccagtacaaagccacctttctcaarccaccatcctgattccactcttgcccaatctacagtctgttcgccacacagcagcaagactgagcctttggatatgtaaatatgatcatgtcactcctgctcaaaatcctcaaacggcttaccatcaaacatgtgtaataaaatccaaagacctctgcatagctatgtcctgccccttggttatcttttgatcttatctgctatactcaccccctcaatctaactctttgctccaaccatcctgcctccttgctgttgctgaatatacccagcatgctactgccttagagttaccaccccaaatttatactcaccaaaactcaagttttttctagaatggttgacataaacatccttgaggttatttaaacatttctttcagtattttgcatttttccataagattaaaaaaaagcataaaaacaaatgaaaagtaggtcatagctagtaaccgaaaca

SEQ ID NO: 452305 - DNA, 532 bp, Homo sapiens
tctgtctttaggtgtgcacagctccagaatctgaccgcaccttatcacccagtacaaagccacctttctcaagccaccatcctgattccactcttgcccaatctacagtctgttcgccacacagcagcaagactgagcctttggatatgtaaatatgatcatgtcactcctgctcaaaatcctcaaacggcttaccatcaaacatgtgtaataaaatccaaagacctctgcatagctatgtcctgccccttggttatcttttgatcttatctgctatactcaccccctcaatctaactctttgctccaaccatcctgcctccttgctgttgctgaatatacccagcatgctactgccttagagttaccaccccaaatttatactcaccaaaactcaagttttttctagaatggttgacataaacatccttgaggttatttaaacatttctttcagtattttgcattttkccataagattaaaaaaaagcataaaaacaaatgaaaagtaggtcatagctagtaaccgaaaca

SEQ ID NO: 452306 - DNA, 559 bp, Homo sapiens
gcaacaaagtcataggcatcaactcctatatgactgtcttttagacatatgatgggttatgtttttcaaacattagtattttttttttaatatgcacaagttctagttttcttttatgttgacattaatccattatcaacacaatttggatacagctgtttagtgttctaatagtactgacatgtagaatgcttttccccatcatcttcaaagatgtcacacttccagttgctttgccaatttaggaactgctaacctaataatctcataagaattaagattattttgtcatgacttttttttgtaaattcacattgccatttgttgatgttaagcttacaattaagtagttttcacaatccatgacttttatcttttcttttttcaaattggggacttttgccttcatctgacacttactattttttaaaaaaatatttctcaagagatagcagtgattctgagatcaaatgtataagtggttcttgaacctcatgatatgctctgtcagggtctgcatacctgaactcatytgaagggctaggatgttccttactac

SEQ ID NO: 452307 - DNA, 453 bp, Homo sapiens
agtttgttttatgaatacctaattttctgggataagaaagcaatggtctgtctgcttaattagaatattcttggtcgcatccaggtagataagagatttagattatagagctaagctatttttaggtgctgtgtacacaccactaggttaagatttatatagcttacataaatttatttgagatacattttatttctgtgctcaatgtaccttttaaaaattgttgttatttagaagtagaaaggagaaaaatgaaatataagcattattgcacttgattctttaaagattgaaacacatttcaaaaaagaaatgtataccttaataagtaaacatttgaattgtgaaaaarcaaaattggaaagaacattaaatcaaacttaccaagtggtgttatctataaataatatctaaaaatgtactgaatcctaaatagtcactcagaaaatttca

SEQ ID NO: 452308 - DNA, 582 bp, Homo sapiens
tatctggtctccaactcctcacctcaagcaatcctcccatgtcagtctcccaaagtgctgggattacaggcgtgagctaccacatccggccttgggttttctaaccgcataaaacgcatttcaaagcttttctatagtccccttgtgataccccttgcttcccttgaggttagaaggtaatactcatgtatgcctattccctagagsgggtgggtactcataacactgtaacagctctcccaagaagtttctcctctacttctctgacactttttaaaaaatatctttgatttctggttgaaggctcaaagaatcatgtaacagtttcttggatccatttctttagtaaacctgtatatgtagggaagaatatatctcatactcaggtgtcttatcatctattggtgcctcaatagaaactaggacaaacagaaagaagtctgttctaagatccttttagaaatataggcacgaataagcagacacattatagaacctaggtgaaagcagcgttactatatatcacaccagggtttaaatatttcttaaatttatgtcatttcccccgtctatatttaccca

SEQ ID NO: 452309 - DNA, 600 bp, Homo sapiens
atcatctgtaaaaggtgcaacatcgttttcttgtcttgttactttgccaactcatagtagttgctcaatatatatcaattgaatgaatggatgaaacttcaaattaaccaagagaactagctaaataaatattttagtttcagcctcttgagyctatgaaatccgaatctcatgcctgacttgaaccttgcccttcctgacccataattctgtaaaagctgcctgcctggcctgtgatttgattgacttcaatttccccagtcctgcttgagctgctaaggtggcatttcagtctccagcctgtttcatccatttaagttctgtagaaacacagaacttgttaaatatcttaacaagaagaaaaaaaaacttggcaactcatatctaaacttggaagggtgctaaatctatcaaaatagttattgaaaattattttaaacagaaacttgacatgaataatactaagtagccccttaacttttaaatattttaatttcacttttactataatagttccatagtgatgactcttcaacatatttatgtaaaaaaaatttttcttcaaaatttagatacaatttttgaggaatttactgtttc

SEQ ID NO: 452310 - DNA, 515 bp, Homo sapiens
ttgcccaggccagctctctgtgctgagtcagtgtgtgcttcctactggctctgtttctctcattgaactctgactgacacagattttggcaccagaagtgtagagaaaagcaaaatgactgaaagctgagaacccatgccaaaaaagcaaggacactgagctccatttcacttcagagaaatagacctggggacccccaagcagtagggacggggaggtttttgcatcatatggcagaacgattttggaacaatgtttaaaaatccctgttattgaagccacagtggtcaatagcrttggactcaggcggtcttgaacctgcacccgggctcaacttggacagaggcaccgtctccagcaggaagtattcagtcggtgatggctgccgttggtgattggtatcccccagggataccatccatacttgttctgttgacaggggcttctgaagaccaggatctgtgactctctaaagagacatggaaggtggcagaaaaacctccctgggctcccta

SEQ ID NO: 452311 - DNA, 604 bp, Homo sapiens
tgccattactcatggtgcaaagacctgtgtcagcctttgctgcrctaacattaatgacacgtaaatatccagccctcctaacactgtctgacatttagctatatgtgatttctctactactagactgttatgaaaattggttattagctcactatatttaattagtcagctgaattttctttatccacagagattcacaaatgtcctctgacctagtttcagaattcaaactacttaaacatcttaacatttcattgtttaacttttctcttcaaaccaaaaatgcattttccaataacttattacacaaactgatagttttttctcttagaatagctactttatgtttttatttcaatttttatcttatttctttacttaaatacttcctacttttccttcactattttgtttatttattttatatattcattcattcaagaaacatttatatattgaccatctaccaggtagaaggcaccacgctaggcacatcagtgaccaaaatcaacaacagcaacaaaaatctctgcccttcatggacttacagtgtagagaaaaggaaacaaataataaacataaccaaacaattacaacgtatgat

SEQ ID NO: 452312 - DNA, 604 bp, Homo sapiens
tgccattactcatggtgcaaagacctgtgtcagcctttgctgcgctaacattaatgacacgtaaatatccagccctcctaacactgtctgacatttagctatatgtgatttctctactactagactgttatgaaaattggttattagctcactatatttaattagtcagctgaattttctttatccacagagattcacaaatgtcctctgacctagtttcagaattcaaactacttaaacatcttaacatttcattgtttaacttttctcttcaaaccaaaaatgcattttccaataacttattacacaaactgatagttttttctcttagaatagctactttatgtttttatttcaatttttatcttatttctttacttaaatacttcctacttttccttcactattttgtttatttattttatatattcattcattcaagaaacatttatatattgaccatctaccaggtagaaggcaccacgctaggcacrtcagtgaccaaaatcaacaacagcaacaaaaatctctgcccttcatggacttacagtgtagagaaaaggaaacaaataataaacataaccaaacaattacaacgtatgat

SEQ ID NO: 452313 - DNA, 550 bp, Homo sapiens
ttaaacacccatatgcagacaccattatactcattaatgagggcacagaagagcagttttccactagaattttgactatgagctgttcacagttccatgtcttgttagcatactattttttgaagcatgcaactaacaaacttctaacgtcatacatttctccattatcaatatgggaacgttttaggcaggtgattttacatggagctaatgagaatgaycttcattaaggttgtttaatgaaattttacaattgaaatttcagcggttttggtatcacttaaactaagaaactatttttcttttagttttcaagaggaaattaccaaccctcctatactcttacagttgaaagaggacaaatagattttgttctagatgttctaacaataagaagaatattaatcattctactcagaacatacatttcagaataaattgtaccttttcatgaagttgtcaggaaatgaaatggaaataatttccaatggctatcactattaatgtatttaacagctcccttttcttttgaataataccttaaaaatta

SEQ ID NO: 452314 - DNA, 604 bp, Homo sapiens
  misc_feature (1)...(604): n = A,T,C or G
ttgaacaaccactggattcctagtatttggtatggagcctgtcacatagtagatactcaacaracttttggtgaatgactggcaaatgaatttctaggtaataactgtggtactatttaaatttgatttgtaatgtttttctgacttgacactttaaatttatttttctaacacaaatacattacaatgaatgcagagccaatttatttgcaccatgaagctcatcagataattagacagttgcttcatctatgagtttagatttggggagaagaaatttcagcctgcacactagctgtcatagaatgagactgaactttcactgctcgtttagaaatgtgaaaataactgaccatcacacttttcagctattctgggatttttccaaacataatctgtctttttggagtagaaacacctggacagaacttttataccctttaaaaaataccaaactaattaaacanaacaaaaaattaaaaacatggtagtctgtaataaactcttacggtttaaccaaatcaattaatcccattctaattagagtgtaattaacatttattgagcaccaagtaccatccttatagactatgttatgttttat

SEQ ID NO: 452315 - DNA, 539 bp, Homo sapiens
cttaaaggactttgccatgcatcctctcactccatccctgaaagtgacaaattggtctattctgctttcctacctgtcctgcaacttgctaattcttgccttctccaataagcttatctatattggcagaagctgaagaataaccttaaaactggcacttgttttctgtatgtcagagacagatgaagataatatttcctttacatacagctaccaactatcagactctcttttgcatttttatgcttacccttcattctttttagaatccatttcagattctgttgtaacagcatgattattttaatttctgagattctctgtggaaccattttaaaagaatctgcaaccttctcattctctcaactcaatgatagcttctgaagtctttgtattcacgtgaaatcattctgaaaaatgcccatgtgtttgaaacratgttcattgatttagattttatttatatcatgttcacttaacaaaaggatttcagaattcttatcattgttgctacctgctgatcacatcaggaaagagct

SEQ ID NO: 452316 - DNA, 551 bp, Homo sapiens
ttaagcaacgtacgttgggtcgcacagcgggtaagtggcagagctgagactagaacctaattttccctctcctggtttagtgattcttctaatgtccatgctgcttctctgtccaagggctggactaggtatacctagtgctcctgggtggggaagggaccccattctgtgtattcccaagggtcccattggccctgagtggaacatgggggkaccttcaagactgtctgcaaagctcagccctctcaggctggaattgattcttaaagtgcttctaagtcttgtctccccctgggaagccaggtgcgcaccccagtgtacatttgctcctaggtggttagaggtttaccctgcagcctccgcagaggagatccagctggcattattgtttgtacccatgaattattgataaggcatgaaatggcctcaaccttggaatagcaaagctcgagggagggcagctaccgtgctgaggaggagcatggagctgacagacccccctccctggggcccaaccttctctgggctaaagaacacttttgaatgtccaa

SEQ ID NO: 452317 - DNA, 551 bp, Homo sapiens
ttaagcaacgtacgttgggtcgcacagcgggtaagtggcagagctgagactagaacctaattttccctctcctggtttagtgattcttctaatgtccatgctgcttctctgtccaagggctggactaggtatacctagtgctcctgggtggggaagggaccccattctgtgtattcccaagggtcccattggccctgagtggaacatgggggtaccttcaagactgtctgcaaagctcagccctctcaggctggaattgattcttaaagtgcttctaagtcttgtctccccctgggaagccrggtgcgcaccccagtgtacatttgctcctaggtggttagaggtttaccctgcagcctccgcagaggagatccagctggcattattgtttgtacccatgaattattgataaggcatgaaatggcctcaaccttggaatagcaaagctcgagggagggcagctaccgtgctgaggaggagcatggagctgacagacccccctccctggggcccaaccttctctgggctaaagaacacttttgaatgtccaa

SEQ ID NO: 452318 - DNA, 527 bp, Homo sapiens
gtcttataatgatccagctgggccacatccccatttttggggtcccagttgagatccacaaatggagttgyccatctggggttgggaattctgttggaatttttctgatgtaggtgctgagccgccttatttaccttatctatcaccagccttctctcatccacagtcaaaagtatgtttaacaaggcctgtaaagggggctggtgggtagcaaagatacagacaaagagattagttattttctgtgggtcatctctaaagggtggattggagcttttccaatttagcaagtcagaggcagagaacaggctgtaagtccaacaatatccagcagccttccctgttgttttattccaccaatgagtagttgggtgggtattctttcattggatattgccctgccctagtcacagtaaggcccattgggtgccctgtcaggtcttggaggggaagaacattccaattccttcattctattgaggtagggcagttgcccctcattcctagtccagggcctccagtggtga

SEQ ID NO: 452319 - DNA, 550 bp, Homo sapiens
agattcttctgttttgacacctcctttttaagtccttccaggatacatgtcttataatgatccagctgggccacatccccatttttggggtcccagttgagatccacaaatggagttgcccatctggggttgggaattctgttggaatttttctgatgtaggtgctgagccgccttatttaccttatctatcaccagccttctctcatccacagtcaaaagtatgtttaacaaggcctgtaaagggggctggtgggtagcaaagatacagacaaagagattagttattttctgtgggtcatctctaaagggtggattggagcttttccaatttagcaagtcagaggcagagaacaggctgtaagtccaacaatatccagcagcyttccctgttgttttattccaccaatgagtagttgggtgggtattctttcattggatattgccctgccctagtcacagtaaggcccattgggtgccctgtcaggtcttggaggggaagaacattccaattccttcattctattgaggtagggcagttgcccctcatt

SEQ ID NO: 452320 - DNA, 528 bp, Homo sapiens
ttctgctgcttgttcttctgcatggtttatttcaaggttatccctgaaatttccaagcaagcacatatttagttcagcaagtgcagtgcaaaagagtgctggtggaagggagggaaacaaagagtttaaaagtacattttaagtctaagttaagagagaaggaaaaacaagtttcaaaatagattttaatgccaagctgcttggttgtagaaatcctcgcagtaatataagctgaacaaattgaaagttaataacttttctaagattcattagagaattgatattacagggaaaaccattgcccccaaaataagagaggcaagcaaatgcagggaatactgtttatgggttgcagaatacactgccagacctgatagtaatgcttaaaggataattgactaatggctayaagactgaatctagattagcttgggagaagaaaatctcctggaggcctgagctttttacttgggaaggcagagtaccctttcataagttttggctctaggaaccccatcaggttctcag

SEQ ID NO: 452321 - DNA, 527 bp, Homo sapiens
gatctatatgtttggtaatcaaattaatcataattcaattatagattgaaaaattgagytcagtaattattttcctccttcctgattttagtgacagagcagccaatctaaaacaaaacagttgaaactaagtcaaatgtaaaagatacagatttcaataaagagaaattttataggagatcagaaaatcatggttcaagaaagctagcacaaaatcattgtcttggatttgcataattgatttaagtcccaaaaaaatatcatctgcccttactaagacttttgatttagacagctttagttcacatcctgacattgtggctgtctggagtgtacaatcttggacagccttctttgcatcagtagtttatttcgtcctgcgacagaaaaaaataaaataaaataatataagcatagtacttagcataatatctggaacttcaacatgagggaattaggggctagattttaaaatttcaattgaagttaattgactagaaaaggaggaggatactccaggtgaaatg

SEQ ID NO: 452322 - DNA, 527 bp, Homo sapiens
gatctatatgtttggtaatcaaattaatcataattcaattatagattgaaaaattgagctcagtaattattttcctccttcctgattttagtgacagagcagccaatctaaaacaaaacagttgaaactaagtcaaatgtaaaagatacagatttcaataaagagaaattttataggagatcagaaaatcatggttcaagaaagctagcacaaaatcattgtcttggatttgcataattgatttaagtcccaaaaaaatatcatctgcccttactaagacttttgatttagacagctttagttcacatcctgacawtgtggctgtctggagtgtacaatcttggacagccttctttgcatcagtagtttatttcgtcctgcgacagaaaaaaataaaataaaataatataagcatagtacttagcataatatctggaacttcaacatgagggaattaggggctagattttaaaatttcaattgaagttaattgactagaaaaggaggaggatactccaggtgaaatg

SEQ ID NO: 452323 - DNA, 603 bp, Homo sapiens
caaacacatgcaaaacaaggcaaggccaaggacaaggtcctactaactctaccaataaaataaaatgagccacacttggattcatatagtttattacttatatggagagtgaaatgaagagtagccaaaatgccagctcttcataattcctgccccactgattaaaaaaaaaaaaaaaagctgcaatgaaataaaaggagctttgtaacaatattatgagctgcatggtaccccatggctgaatagcaaactgtagactatagccaagaagttttatagtctgcagctgcatcctaaaatgtccaaggcagaaagcctcatgacccatcagagcttaggagacaatgagaaaccctctctcaagacagccacccagaggagatggggaggggagtaggtgatagtacttargagctcctcataggcctcccatcctctcatttgctggaagaatcataaggcattctgccaaatttcaaatgaactgaagttccagcctttgcctgcatgatctacggggagatatgcaaagttgccagagtgtcatgggaaagacattcctctatggaagattcatactttattagtggaattaaattagta

SEQ ID NO: 452324 - DNA, 603 bp, Homo sapiens
ggaaataagtaaaaagcaggaaaataagattcacacctaggagcaatatgggacccagaaatgacaaacatggtgtaattagtagaaaaagacctaaaacatctaatatcaatcttataaaaatgttcaaggatataaaagaacatatgaatgaaatgaaaagagaaatgaaagatattaaacaagtaaatacctaaaggggactaatacagtttggctgtgtccccaaccaaatctcatcttgaattcccactcgytgtagaagggacccagtgggaggtaattggatcctagatgcaagtctttcccacactgttctcgtgatattgaataagtctcaaaagatctgatggttttaaaaagaggagttcccctgcacaagctctctctctttgcctgctgccatctatgtaagatgtgacttgctctttcttgcacatcttaccttctgccaggaatgtgaggctttcccagccacataaaactgtaagtcaaattaaacctctttcttttgtaaattacccagtctcaggtatgtctttattagcagcatgaaaatggactaataccaggacttacagagataagcaataaaaaagaaaa

SEQ ID NO: 452325 - DNA, 583 bp, Homo sapiens
tctgaaataatctgaaacactgttatctcaatggtcccacatccttccaatgattaaaaccaaactctatcagcaaaatattcaaagtctttcactctygctacttcctcccttgttctaaaaaatccagctatatggacctccctacatttcattgaatgtaacttgattgattttattcataatgccccaaagatgaaaacaactaatattcatcaacaggtatatgaataaacaaaacatgttatagtcatacaatgagatattacttaaaaacagaaacaaactatcaatatgtatataatatggatgatctcaaaaacagggtaagtgaaagaagccagaaatagatgaacacaaattatataattccacttctattaagtttgagaataaacacaatttatctaatctaataaaagtcagagtagaagttgcctctactcagtgggagaaagtcactggaaagaggcaagaaaaacttttctagaaggatgaaaatattctatgtcttgatttggtatgggttacatggacatacacattgatcaagactcattgaactgtacatttagaatgcaca

SEQ ID NO: 452326 - DNA, 596 bp, Homo sapiens
gagggtgcaagccccaagcctagcagcttacatgtgatgttgggcctgcaagtgcacagaagtcaagaactgaggtttgagaacctccacctagatttcagagcatatatgcaaatgcctagatgtccaggcagaagtattatgcaggggtgaagccctcatggagaacctctgctagggcagtacagaagagaaactaggggttggagctaccacacagtcttgactagggcactgcctagtggagctgtgagaagtatgccactgttctccagaccccagaatggtagatccaacaacagcttgcactgtgtgcctggaaaagctacagggactcaatgtcagcctgtgaaggagctgcccaaactgtaggagcccaccccttgcatcagtgtcccctggatatcagacatggagtcaaaggagatcattttggagctttaagatttgaggacttccctactggattttgaacttccatggggcctgtagcccytttgttttggccaatttctcccatttagaatgggagaatttacccagtgcctatacccccattgtatctaggaagtaactaagttgctgtttattttaca

SEQ ID NO: 452327 - DNA, 608 bp, Homo sapiens
ttagtcatagcctacttaagcaaatatgtttaaaggccttgaaatcacaaggcaattactctggrcttgggaatagtgacatctaattaaaacgttaaattaagttcagtagtgataccaacttgtttacacattcaaactaatttcagtaaagtaaatttagcctacagaggtcatttactttggcaccatcccttataatataattatgaatgagattttgagattaaatgatgactaggtaactcctcaaatttcccattgaaagattcattgagggggaggagagaaggagggggaggaggagaggaggagggaggggaatggagaagagaaggaaagggaggatggacaggtggatgaaaacctgtgcaccaagaaattgaaacttctaacttccttggcaggcagcaatattcatcaatgccttgtcaggcctcagaaaaaatttccactaaacaaagaatagttgagttcctgaaaacaacctaacagagccttacacatactcctaccacagtgatagagaacattcacagtccaaaaagtcctggtagtcaaccttcatctactgcatgcccctttctaaagaattttttttcttatct

SEQ ID NO: 452328 - DNA, 611 bp, Homo sapiens
ttcttcaatattgtttctcttcaattgatattataatctaatttgcagtaaactaatagaaataagccactaaaatttaaggataatattcaaataaataaacattttgggatctaaagttgtcccaattctactacaaaaatctaatatcttataatgatgtattatagcattgtgaccacctaaccctttaaaagagctatgatacattgatttctgtccacaggtttactctggaacttatcttttctaatatcttcttctttgtttttaaattttactttaagttcttggatacatgtgcagaacatgcaggtttgttacataggtatacatgtgccatgatggtttgctgcacctatcaacccatcatccaggttttaagccccacatgcattgggtgtttgttcaaatgctctccctccccttgcccacaaccccycaacaggcatgggtgtgtgttgttcccctccctgcatccataggttcttattgttcaactcccacttatggtgagaaaatgtggtgtttggttttctgttcctgcgttagtttgctgagaatgatggctcccaccttcatccatgtcactgcaaaggacgtgaactcat

SEQ ID NO: 452329 - DNA, 641 bp, Homo sapiens
ggctgaactgacttacattcccaccagcagtgtataaacattcccttttttccacaaccttggtagcatatgttattttttgacattaataatagtcattatgaccgacgtgagatgttatctcattgtggttttgatttgcatttctccaataattagtgatgttgagaattttttcgtatkctttttggccacatgtatgtcttcctttgaaaagtgtctgttcgtattctttgctcactttttttatggagttatttgtcttttgcttgttaatttgtttatgtttcttatagattctgggtattagaactttgatggattaatagtgtgaaaatactttctcccatttgtaggttgtctgtttactcttgacaatttctttttgctgtgcagaagatctttagttaaattagaaccatttttcaatttctgtttttgtcgtaattacttttggcgtcttaatcatgaaatttttgccaggccttatgtccagaatggtatttcctaggtatcttccagggtttttgtggttttaaagtttgcatttaagtttttaatcaatcttgagttaatttttgtatatggtgtaaagaaggggtctggcttgagccttctacatattgtcatggatccttggg

SEQ ID NO: 452330 - DNA, 536 bp, Homo sapiens
tctgggcttctgaaaggccacagctcttctctccttatttcttttctcctttttgtcacctgcaatgtagtgagcaaggggcatgtttcakccccgtttgtgttacagctcttttagccctgccattcggcagatcctgagttcttgtcctgcatccaggaagaatgaggtacgtggactactggagggcgaacaaggtgaagaggagctttattgagcgaccaaacagctcagaggatacctgcattgggtagatcctctctgcaggcagggtgtcccggtgagtgttcatctgtcagcagagaggagaccctggagtgggtagctcctctctgcagctggtagtctgacatctccacagctctcagtggtaaggtcccctttatcatttctgattgtatttatttggacctttctctttttttatatattagtctagtgagtggtctacctatcttatttattctttcaaacaatcaccttctagatatggtgatcttttgtatgttttttcctgtcacaatttccttcagttc

SEQ ID NO: 452331 - DNA, 555 bp, Homo sapiens
ctccaattggtggtgctgaccaagtcacttcatcagggtggtggcattgggatccattcttgttcacacatgccagcagctgtggcagcatggcagagtgcatcattgttagctgggctggggtggtggcagacatgggactgctggtatctgtgcatttgtttgaagtggtggtggtggtgrtgtggggcagagggcagggccactggcatctgtatgcatgtttgtattggcagtggtgttggcatgggggaagggaactgtcaagcatggagctaccagcctctgtgcatttggaccagctgcattggtagtgtggagttggtggcagggccactgccattcatgtacctatatacaccttggcaatgtcagcataagggcaacatgctgcctggcatggggctattggcctccatgttcacatttatgctggcaatggcagcttgttgaggggtgcgcactcacaccagcaacagtggtgtggtggaggggaggtgatatcctcccatgtgtgtgttgcagcaatgcagtgggggggtgtgatatggtttc

SEQ ID NO: 452332 - DNA, 553 bp, Homo sapiens
aacaatacgtatatgaaaatatgaagaatctcactagtaagagctcagtaagaggtctaaattttactttcattagtttggcagaaagtaaaaagtgtatcaatatcaggcatttatagacatggagcaataagaaacaccacctgacgttgctagaaattaattatataaaaccaaactgagaataatttgccccaccgtatagaaaaatttatattaactctaagactcaataatcttactcttagttataaactctagagaaactcttgcacacaaacacaaagaaacatacrtaagaattttcttagaagttctggttgtaaaaaaaaaaggaaatggagggctgggtgctgtgactctctcctgtaatcccagcaccttggaaatggaggcaggaggattgcttgagcccaggagttcaagaccagcctggacaacaaagtgaaatttcatcaatgcaaaaaaaaaaaaaaaatttcaattagccaagtgtggtggcatgtgcctgtgttcccagtgaatcaggaggctgaggcaggaggactgcttg

SEQ ID NO: 452333 - DNA, 553 bp, Homo sapiens
aacaatacgtatatgaaaatatgaagaatctcactagtaagagctcagtaagaggtctaaattttactttcattagtttggcagaaagtaaaaagtgtatcaatatcaggcatttatagacatggagcaataagaaacaccacctgacgttgctagaaattaattatataaaaccaaactgagaataatttgccccaccgtatagaaaaatttatattaactctaagactcaataatcttactcttagttataaactctagagaaactcttgcacacaaacacaaagaaacatacataagaattttcttagaagttctggttgtaaaaaaaaaagraaatggagggctgggtgctgtgactctctcctgtaatcccagcaccttggaaatggaggcaggaggattgcttgagcccaggagttcaagaccagcctggacaacaaagtgaaatttcatcaatgcaaaaaaaaaaaaaaaatttcaattagccaagtgtggtggcatgtgcctgtgttcccagtgaatcaggaggctgaggcaggaggactgcttg

SEQ ID NO: 452334 - DNA, 580 bp, Homo sapiens
aattgctgtatggaaactggaagtatggtttctactcatgtgtatagcttctgtactattgcaaagttgagaaatcataaattatatatcataagttgggggacatctgtacctggataawctaaaagtacaagaatgagaaaacatagactgtgctaatacagtagccactagccaaacatggctgttgaacatttgaaatccttgttaggacaaatacagatgtcctagcagtgtaaaacacactgagggtatctaagatttagaaagcaaaagttacataaatgtattgctaaaactaaaaatcaatcacaaaaggaaatttatcaaatattggaaaaattagacaatgtaaccatcagtcaactataagtaaaataagaaattataaggcaattttaaaagtattttgaacattggcctagatgcaaaatttatgactaagacctcaaaagcaaatgcaacaaaaacaaacagaaaacctggattaattaaaccaaacagtttctgcacagcaaaagaagttatcaacagaataaacagacaacctgcagaatgggagaaagtatttgcaaactat

SEQ ID NO: 452335 - DNA, 457 bp, Homo sapiens
tattaagcatgtatatattaatttatgtctttggagagaggattagctgaaattggtagtatccaggaagaatcttcagactctatcattctttattaatttatttgactagagcaattaaacatcagacctataagcacaaaactttattttgtattcatcctctctgagtatggttattataaatttatattccatcttcttaaagcatagtaactcattttggctaattctttaaaygatttctgctaaatgaccatgtttagaaaccttatctgtttaaaataacacaggctatcaaaatatgactttagaaaacatgccttatagcttatcctagcataagtgaaacttttgagagcaacacaccatatagaactgatttgtcagcaaaaagaaaggagaggatatctcagaaataagtagaattttagatttccaaacagattatgaaatg

SEQ ID NO: 452336 - DNA, 562 bp, Homo sapiens
tgtaagaagtctaccttgagattttcatattctgagacagtccaagctagccaagaggaaagccacatgttgggagagaacatagccagccctcagctgctttagctatcacagctaagtcaccagatctgtaaatgaagawgtcaccttggatgtccagttccataaactcagcaagccttctgaatccagccctagctgcatttgaatgcaatcacatgaaagactttaagtaagaaccacatatctgaatgcagccaatcccagaacccttgacataataaattgttattttgagccactacgttttggggtggtttgttactctgcaacacctaatcaaaacaggattttctctaagtgagattgaaagctattgtaagattctgagcagaggtatgacatgtgttgaaggatcacacatgtgtggtgtggtatgaaaagactataagaattattggagggcaatggtagaagtaggaagattgcttaaaattctgttgctgtctttgcacttcttataacacttacacagttctaataaaataattcattttgtaac

SEQ ID NO: 452337 - DNA, 546 bp, Homo sapiens
tattttgttcatgaatatgaaattcaggcaggaaatagccagaacagcttatctctgctccatgtagcatcaccttgggctggaagctcactcacatggctatcargtttaggctgctgattgactgtgaactcagctgaaattgtcagctgtagattttggttccttttcacatggagctctccttgaggcttcttgggatttctcataacatgtcaactagattccaatagcagttgtctcaagaggcctgggaaaaaaactacaagactacttatcacttggcgtcaaaagccccatctttctgctgcattacattgattaaataagtaactaagtccagcccaaattcaaaagaaagacaatttgattcaatctctaaatgaaaggaatagcgaaaaaagttgcagctttttaaaagctaccgtatcatccatgggaagtgagaaatgattgcactttgaaacacctacaactaaaaaagcaatagagcatttagtagacctctttagactttggaaattgcacattcaacaccttgaaata

SEQ ID NO: 452338 - DNA, 617 bp, Homo sapiens
tttctcatttttttttctgggttattctagctagaggtttgttgactgtgtttgtttttttcaaaaaaagcttttcattttattgatcttttgaattagtttttaaatcttgattttgtttagttctgctctgattatcattatttctttccatcagcttattttgggtttggtttcttgatgttcttctagctccttaaggtgccaccatcactggattatttgtttagaagctttcttcttttttgatgtaggcatttattgctatgaatttcccttatagcactgcttttgctgtatcccattgggcttggtatgctgggtttcaaggtattttttattttcatttgttttaagaatattttttattacctccttaacttcctccttgacccagtggtcattcaggagcatgttgtttaattttaagtgtccgaggttcttcttgttattaatttctagttttaatttgttgtggtctgagaagacacttaatatgatttcaatatataaaaatgtgttaaaatttatttatgtcctaacatatggtcggttctggagaatgttccacrtgctgataagaagaatgtgtatactaaagctgttaaataaaatgt

SEQ ID NO: 452339 - DNA, 582 bp, Homo sapiens
gtagtccattatttgagtcaaataatgaatcaaatcactgatgcaacaaaaaaattagaaattgttagctgtataaaaaattgaccaaaaaaaaaaaaaaaaagctgaccaaggctgggcgcagtggctcatgcctgtaatcccagcactctgggaggctgaggtgggtggatcaactgaagtcaggagttcgagaccagcctgaccaacatggtgaaaccccatctctactaaaaatacaaaattagccaggcgtggtggcacatgcctgtaatcccaattactcgggaggctgaggcagaagaattgcttgaacccggaaggcgaaggttgcagtgagccaagactgccccattgcattccagcctgggaaacaagtgcgaaactccgtctgaaaaaaaaaaaaaaattgaccaagaaattaaatcatcctaatggagcttgctccagaaaacaytcaaaatatccccacggttgaccaagaaattaaatcggcctaatggagcttgctccagaaaacactttcaaaatatccccacggttgaaacagcaggtcaaaacgttctgtatctactaagcatc

SEQ ID NO: 452340 - DNA, 620 bp, Homo sapiens
tctcattctttggacatctgtttccctattctgtgttaggcatcatttgtaaaaatctcaggagagtttattctttgggaaccatattgccttttcatgtctgtagtcaggagaccttttgtttccagatgagttccatccagcttccacagctgcattcactccaaacatttttaaatgtacttgaagtcaacagcattcattctagcccgctgtttccttttcttgctgttgtaagttttagtatgaaaaggttgtgttttctcatgtttcattttttaatttctttctttttctttaaatagagacaggatctcactgtattgcccaggcttgccttgaactcaagggctyaagtgacccactcgccttggcctcccaaagtgttgggattacaggcttgagccactgtgcctggcctgttctctcatttctaaggatcacatcattaccatattggcagccttttcttcccccacactctagccacattaaaaaaaaaaaaaaaactgggctgggcatggtagctcatgcctgtaatcctagcactctgggaggccaaggtgggaggattgtttgagctcaggagtttgagaccagcctgggcaacgtggtgagac

SEQ ID NO: 452341 - DNA, 620 bp, Homo sapiens
tctcattctttggacatctgtttccctattctgtgttaggcatcatttgtaaaaatctcaggagagtttattctttgggaaccatattgccttttcatgtctgtagtcaggagaccttttgtttccagatgagttccatccagcttccacagctgcattcactccaaacatttttaaatgtacttgaagtcaacagcattcattctagcccgctgtttccttttcttgctgttgtaagttttagtatgaaaaggttgtgttttctcatgtttcattttttaatttctttctttttctttaaatagagacaggatctcactgtattgcccaggcttgccttgaactcaagggcttaagtgacccactcgccttggcctcccaaagtgttgggattacaggcttgagccactgtgcctggcctgttctctcatttytaaggatcacatcattaccatattggcagccttttcttcccccacactctagccacattaaaaaaaaaaaaaaaactgggctgggcatggtagctcatgcctgtaatcctagcactctgggaggccaaggtgggaggattgtttgagctcaggagtttgagaccagcctgggcaacgtggtgagac

SEQ ID NO: 452342 - DNA, 542 bp, Homo sapiens
tcagtgtttctctgggggatggggtaatgggggatagatggtaagtctataatcaagaccatctctaaggaagaggattgatactctttccacgggtgacactgcattattttccatgtaaatggtgccccaagagtactatgggcagtcttgttgcagatctatttcatcttcctttcccctgccctcacctccctgctatttattgtttcccttcactgtcaaattctctgaaacattgtctgtattcaccgtgactcctttgcaatgcactttcactgcaatcctttaaaaaagtttgtcttcctcctacatttttctgataccactttctctgagaaattcartgtataaatctaccagctcaggaatcccttcttaatttttctctgagactagtcactattttatccactctttctagaagttcacttctttctttatttttcagtttcactttagcctctaataggaggtggttgtctaagggccttgaggaggctgagcttgcacagtgatagttaattcttgttagtggctct

SEQ ID NO: 452343 - DNA, 582 bp, Homo sapiens
gtgtttgatccctctttcttgttacatataaagacaatgcactttaaatactactttaaaatctgcatcagcgttatatgcctgyttggccctaggctccagcttcaccacatgattttctctccaaatgaaatatacacactaccttgggttcttctgtgatttttcctgtctactcacatttctttatttttcactcttggaatatctgaattcatcatgcataatttctgctgtttcatgtacttgaggaatgcaaatatttgagatctgcagctacagacaaatcaatagccttgtggttccatttgttcccttctagcttttaattctgatttttgacagtttctgaatatggtaagttatagccctgcattactaagagcaataaaatataaatatatcaattcctaatgaatttaaataacttgtgaaataaatcaaggagcccggaaaatttaaatgataaaatttaaggatgagattcatgtgctatttgctgactaatgtaaaaaaaaaattcaacctgtttatgactaatgttaaatcttaaaatttaaattgcacatgaccttggtctgt

SEQ ID NO: 452344 - DNA, 609 bp, Homo sapiens
taataaatatagatacagatttttgttataccacccattatcagcataatgcaatttccatactgtatttatggtccatrgttaaaatgatgtgtatacacatgtgatgttttaatatattagagctcatttcaaagaaaggcagtgcaaggtctgttattagcaatgtgtggggtcttttaaagtcaacacctggtgaaaatcctcactgcccggagtacttttgaaactccttttctgagccctttgtggagcctgaggcacactgttctcatgctgcttattgaacagcagagctgatctttgcctttcaggaacgatttcagttttcaaaatagcctaaagtaaaataagcatagcaatcaatatgggcaaaactacatttagtcaaaggccagctgtgtctagcagataaaacgacatgatcttcttgtgtagatcttacactgaagctggcaggaaattagaaggcagtggctgctcctgtgtgaatagtgcctccaaaggtgccgtctttgaaggatgacattactttgggaacatgggtgcattctgctaaaactgtatgattattatcttatgatcgtatctctgtgtcaaagacaacag

SEQ ID NO: 452345 - DNA, 604 bp, Homo sapiens
gaatctctgctttattctacctctataaatgtctaatttgcctaatagtgatcccctggttttgggttttgacaagataggggcccacctaccatttcctcggctattctatagttgtatgttataaggagaccttaaaataaagatatgatttgtcttgctaggagcaaagcatgtatgcatagctcatataagaacacatttctatggagataacattttgaaccaaagtggctttaaaaggcagcagagatgtgtatatttcctgaaggcatagaacctttttctccctctagttaacatggcccttcttttcttaagactgacagttgtattcttgttgggcagtcactagaatttgttctgttgccagacctcctggggcatcaaagtgctgtctgaattagakaataatggcatgatgaggtcaatgacagctctgaaaatgacatgttgccatagtggtaagaaaatttcaaaaatataaagaactccattatcttatgatattttattagtatctattctcctggcatagtacagtttttattcttctaggaatgggttgaataagttgagtccactcttatttttatgatctaat

SEQ ID NO: 452346 - DNA, 294 bp, Homo sapiens
gttatttcagactatatagttttcatctctcatttgttttccatttctcaagaatcactgtccttctttgccagaaatctaaagtcttagtccatgatactacattttggccaggactggaaatttctcatcacctttaatgtatgtaatctttgccaaatgaattaaattctctctcaattttcttttaaaamattgtaattacaaattagctatgtcaaaaaaagattgtttaaaaaataaggtgatccagaaagacagcttagtatattctttgaagcatcttaattagta

SEQ ID NO: 452347 - DNA, 513 bp, Homo sapiens
atcaggtttataatcaggttaacagatgcttcataaacatcacctttgacaactgcatgaaattccactgtatgactccaaatgtaatttactgaactgttctattaatggaaatttatgcaattttaatatttctattcatatagatatatggcaatacagatatttgaacaacattttttttctgatttaggatgttttctttagacagattccatgtggaaatatgaggtcaaaaattagaaatatttttaarcctttgataaatagcgttttccatactgtttcctacctcgttgtaagtacaagtttgtccacctggcttcctaagttggtcaacataaatttgcaccaacttaacatctgaaatataataatatacactgaggttcttagcataatttgtgtttcttttaaattggcattgctgatgacattaaccagtgtgactggggaatgattctgttgtccactgatccatttaatgtctcagttctggccatctagtggtct

SEQ ID NO: 452348 - DNA, 576 bp, Homo sapiens
attggcattgctgatgacattaaccagtgtgactggggaatgattctgttgtccactgatccatttaatgtctcagttctggccatctagtggtctagtctgtgttttctactgaacaacatattgagcttttctctgctgcttcctggctttcatatttactgcagagaaatctcattgtctgcaatgattggacttttagaatagaatcttagtcatctgtattctacggcatgaaaactaggcccacactatttactactgacctgaggactcagctctgcctgcatgtagacctggaaaaacaccttctgcctgtgctcagaatacctgctggacctggtcactctctacccatgctcttttcctcaatgctttccttcctttcacctgttgtcttttcatcttctctctttttattcttggtctggcactcgtgcaagtagaagtgatttkatagcttcctcaggcttttcataaaaagggaccatttccatgcaagtgctatttttaccagtctcagaattgtgtaaaaggctttggttctgtgatattttctggaccacactataaaaa

SEQ ID NO: 452349 - DNA, 493 bp, Homo sapiens
ggaaaaacaccttctgcctgtgctcagaatacctgctggacctggtcactctctacccatgctcttttcctcaatgctttccttcctttcacctgttgtcttttcatcttctctctttttattcttggtctggcactcgtgcaagtagaagtgatttgatagcttcctcaggcttttcataaaaagggaccatttccatgcaagygctatttttaccagtctcagaattgtgtaaaaggctttggttctgtgatattttctggaccacactataaaaattccctgatgctatagacccatgggttttactttaactcagtatttcctaaactgtgcttctgtggaatttcagttcaatttcaatgggagccaggaactaaggttcccatggtcaaataaactgcaaactgtgcttcctaaatggtcttcttgaagatttgcagttcatgttatcatatctaatggtttggagacatcagaaggaaaaaaaaat

SEQ ID NO: 452350 - DNA, 422 bp, Homo sapiens
atcttctctctttttattcttggtctggcactcgtgcaagtagaagtgatttgatagcttcctcaggcttttcataaaaagggaccatttccatgcaagtgctatttttaccagtctcagaattgtgtaaaaggctttggttctgtgatattttctggaccacactataaaaattccctgatgctatagacccatgggttttactttaactcagtatttcctaaactgtgcttctgtggaatttcagttcaatttcaatgggagccaggaactaaggttcccatggtcaaataaactgcaaactgtgcttcctaaatggtcttcttgaagatttgcagttcatgttatcatatctaatggtttggagacatcagaaggaaaaaaaaaktatgttttaacttggtcactccccactgaggaac

SEQ ID NO: 452351 - DNA, 592 bp, Homo sapiens
aacaaaactgaaggaatcatatttcctgacttcaaattatactacagaggtttagtaaccaaaacagcatggtactggcatacaaaaagacacagacatcaaaggaacagaatagagagcccagaaacaaatacacacacctacagtatactcatttttaacaaaggtaccaagaacatacactgtagaaaagacagtcacttcaataagtggtgctgggmaaattggatatatgcagaagaaggaaactagacccctatctatcaccatatacaaacatcaaatcaaaatggattaaaaagttaaacctaagacctcaaactatgaaagtactacaagaaagcattgcggaaaatatctaggacattggtctaggcaaagattttttgagcagtaccccagcataagcaaccaaagcaaatggacaaatgagatcacaaattgaaaagctactgcatagcaaaggatacagtcaacaaagtggagagataacccacagaacgggagaaaatagttgcaaactactcatctgacaaggaatcgataaccagaatatataaggagctcaaacaactctataggaaaaaatatc

SEQ ID NO: 452352 - DNA, 433 bp, Homo sapiens
catacttgtaataatgggggatccaccaccctacatggcagccctatggttagattttgaatgataactaggctttkgtgaaattcctgtttcgtgaataaatcaaaaagaaggcaaattccatgttgtctcatctctctactggcatgagatcaatatcaaggagacaatcaatcacttatctttcatgtctctgatgtgatccatttgctatattttggtctcaaatgcttgggaagacagtagatagagaaagaaactgatacttatgatccaaaatgatctgccaaatccaatctcttgaggcaattaaattagaaggatatataggtcttcccaagaaacagaactaggcaaacataggcatttatatttggtgcaatatcctcaccctaacaaaaaaagaatgtttttctacttatatagctgatca

SEQ ID NO: 452353 - DNA, 529 bp, Homo sapiens
cacagctgaattgactctgagttgcatgtgggaaaatggatgagatttcaaaaggcagagattaaagagttactgctacatggaggcatttttctagaatgtccctcagtataggaggcaggggctttcaaaactctgtattcatcattttctatagacatttttccttgtagtatgtcttgtcactgtatccatagctaaagttttggagatttgtatgcttatatcattgatgggattgttttaaataaatgtcttataatttagcaattttagttcctggagtcttttcacacttactgagaaatctacaaggtactcttcttggttcataggtaggtacccattgcattgacttttaattttgggtggagtctgagtstccttattctcttttctcatggaaaaatgtcgtgccctggccagggaggaggaaaagaaaaacagcatactgctggatggctccaatctttctgtagtattgaagacagtgggagaaggaaagagagaaaaagggatgggagccggg

SEQ ID NO: 452354 - DNA, 483 bp, Homo sapiens
cctcccaccttcccatcttttgtagtctccagtgtatattatttaccactaaatgtccatgtgtaccctttgtttagctcctggttataagtgagaatataaagtattttactctgtttctgagtttactctgtttctgagttattttacttaggatcgttgcctccagttcctgttctattgatctgtatctatttttataccagcaccatggtgttttggttactaagccttgagagtcctagatttcataaaatggtatgatttcttttttatggctgagtagtactttatggtatttayggtatatggtatttctggtgtgtgtatgtatatatatcatactatatgatatatatatatggaatatggtatttatgttatatatatgcacacacacacactcattaatcatccattaatgaatacttaaggtgattctatatctttgctattgtgaatagtgctgccaaaaatatgcaa

SEQ ID NO: 452355 - DNA, 544 bp, Homo sapiens
actgttaagaaattacaataattttattctatatggtaactaaccactgctcaaatcccccctgaaaattgtccccccaatgccaccctggatgcctgggttcccaaatctcctcagtgttaatccagaaacaagagttaacatttagccccagagggacctccaggacgctgcttctctcttatgaccgtacagatttattctgattagtcctgtaatttccatatgacttattaaatattttgaacatcacatccatacatactttccagacaagaaatttggatgtgggagaacattctttaataaagaaacacataaattctcatttaaaaaaactgctttttttttctttcttttttttttattatactttaagttttagggtacatgtgcacattgtgcaggttagttacatacgtatacatgtgccatgctggtgtgctgcacccactaactcgtcatgtagcattaggtatatctcccaatgctatccctccccsctccccacaccccacaacagtccccagagtatgatattccc

SEQ ID NO: 452356 - DNA, 499 bp, Homo sapiens
tgctgtggttcattctttgctggaattatctaaagatatccacctattgtctaaaacccacctaacagccctaaattgagctgacctgtggacacatttggtgtaaactccaggtaaaaaaattccctgcagttcctgaggcacatgactttgccatccctgctcttgacttcctgcatcccattgtccctattatttgtctatctagatgaatgtattaattcattgatttaataagcatttattgagcactgattatttacctgcaggagatatgtagtgaacaagagaggcatgaagcttaaaatctaggggaaaaatgcagagactacataaagagcgaatcaagtggtaggaaatgtaaggtgattagtgctaaaacatgctaagaacaaaaagttaytatgacgtcataatatcttttgatttgatggtcagggagaacaactttccaagacatgatattcagcttgagatgataaaatgaggtaggttgttc

SEQ ID NO: 452357 - DNA, 532 bp, Homo sapiens
agtctcactttgttacccaggctggagtgcagtggcatgatcttggctcactgcaacctctgtctcctgggttcaagcgattctcctccctcagcctcctgaagagttgggattacaggtgtgtgccaccatgcccggctaatttgggtatttttartagagacagggttttgccatgttggccaagctggtcttgaactcctgacctcaagtaatccccctgcctcgacctcccaaagtgctgggattacagaagtgagctacaatgccagaccttgatttccattttataaaaagtctattctgactgttgtataaaaactgattgtagaggaacaagaaatgaaagaaagcagatacagagaaaattgtcagtgtctgggtagaagtttctggttgctagacctaggatagttctggtggagatgaaaagaagtggagtgattagaagaacatttggaagtggattgccattgctggttgacagaattgatgtgaatggtgagatcaagaatgaaattccgaatggtgc

SEQ ID NO: 452358 - DNA, 590 bp, Homo sapiens
aggcttttggcttggaagttactggaagtctttaaaaaagaacagtcttattagtaagaaaacaaagcttgttccatttgaaatgccattagacatccaggtaaactattggataaataccctaaggggagtagtcattaccgtagatataaatgttgaggcttaatggcattgacactgaataaccctggaccagggtgagataaacatcaggaacagaaaacagaagagatctcaggattgagttgtgagtttttgcmacatttagaggttccacagcgaggaagaattggcaaagaaaattgagtaatagctgctagtcaggttgaaggaaaactaggaaccactccagccaagagaacctttaccaagaagagaaaccttaacgatgtgaaattttactgagagtaagaagaaagcaaagctgtggtctttccatttggtaatgtggaggctgccactgaccttgtcagaacagctttagtggagtttttaggctacatatatgatatgtgtgggttgaaaaaaaaatgaggtgaggaaatgaagacagcatgcacagatgatttttggagtgctgtgacaaagaa

SEQ ID NO: 452359 - DNA, 534 bp, Homo sapiens
ctttgcacttcactttggtcaaagagtattttgatgtgtatcatgaaataaacatacaaataataaaaatcataaacaaaactctcagcatatgggtcagaaatcctactcagtttgtcatttatggtgggactcaagtactatcagcaccaactccacagcccagggatgaactttgttgtggtgtctgataggaaagttcaatcgaacaagctccccccaccatatctctataaaacagtcttatgctatgctatggaaaaggtttcagttatttgtctgaatrtggtgggaggataatatcacctgcaccacagatacccatgccccaacccccagaacatgtgaatatgttatttgacatggcaagagggaattaagtttgtggatggaattaaggttgctaatcagttgacattgaaatggggagattatcctgcactacctgggtaaaattaatgtaattacaagggctcgtataagtaaaccagagaggcaagaaagtcagtgtcagagggacacagcatgaaaagg

SEQ ID NO: 452360 - DNA, 534 bp, Homo sapiens
ctttgcacttcactttggtcaaagagtattttgatgtgtatcatgaaataaacatacaaataataaaaatcataaacaaaactctcagcatatgggtcagaaatcctactcagtttgtcatttatggtgggactcaagtactatcagcaccaactccacagcccagggatgaactttgttgtggtgtctgataggaaagttcaatcgaacaagctccccccaccatatctctataaaacagtcttatgctatgctatggaaaaggtttcagttatttgtctgaatatggtgggaggataatatcacctgcaccacagatacccatgccccaacccccagaacatgtgaatatgttatttgrcatggcaagagggaattaagtttgtggatggaattaaggttgctaatcagttgacattgaaatggggagattatcctgcactacctgggtaaaattaatgtaattacaagggctcgtataagtaaaccagagaggcaagaaagtcagtgtcagagggacacagcatgaaaagg

SEQ ID NO: 452361 - DNA, 534 bp, Homo sapiens
ctttgcacttcactttggtcaaagagtattttgatgtgtatcatgaaataaacatacaaataataaaaatcataaacaaaactctcagcatatgggtcagaaatcctactcagtttgtcatttatggtgggactcaagtactatcagcaccaactccacagcccagggatgaactttgttgtggtgtctgataggaaagttcaatcgaacaagctccccccaccatatctctataaaacagtcttatgctatgctatggaaaaggtttcagttatttgtctgaatatggtgggaggataatatcacctgcaccacagatacccatgccccaacccccagaacatgtgaatatgttatttgacatggyaagagggaattaagtttgtggatggaattaaggttgctaatcagttgacattgaaatggggagattatcctgcactacctgggtaaaattaatgtaattacaagggctcgtataagtaaaccagagaggcaagaaagtcagtgtcagagggacacagcatgaaaagg

SEQ ID NO: 452362 - DNA, 357 bp, Homo sapiens
ttcagccactccttgatcatctccaattagaaatctatttatttttcatcagaaatgatcaatgctacaagtctgattaatatgagtggtgtgtatatgtgtgtgtgtgcacatgaattttagacagttttctgcagaatcatcttctgttactatttttcaagacaatactatgacaagccaatgtgttctgaataaattatgcaatygatgggtgaagcaggcatttgctttccagtattatacatcccaacttgtatcacacaggcagacttctgttgacaacactattgacctatatatgaaactttgaaactctgttttacatttacaaaatttgatatttctgatattcta

SEQ ID NO: 452363 - DNA, 479 bp, Homo sapiens
atgtgtgtgtgtgcacatgaattttagacagttttctgcagaatcatcttctgttactatttttcaagacaatactatgacaagccaatgtgttctgaataaattatgcaattgatgggtgaagcaggcatttgctttccagtattatacatcccaacttgtatcacacaggcagacttctgttgacaacactattgacctatatatgaaactttgaaactctgttttacatttacaaaatttgatatttctgatattctatgggcttcactttttgacatcatgccttygtacttttatgcaatttgataatttgataattatattcagccctttataaatagttaaaataatgtttaatcatctatggtaaatgtgtaaattccttactacacactttctgattttgtgtgtgatttgtcaggaaaaattcgtggtttgtttatattttttatgttttccttttttttttgagacag

SEQ ID NO: 452364 - DNA, 527 bp, Homo sapiens
ttgttttattttctctttttcttctgtccctgttatttccttttgtttttaatacagactgcttaactttttctctttgtaaccctgttgtgcattaggtttgatttttttctgctttgatgagcattatgtggaatcatctctcaatttctacctgcctgcatctaatactaaggaaacgagtcctggcaggttttgtagagtcataaactgcatggtcagaggaattgattgaagccarttgggcactaggatcaaaaagctgcattatggagcggggctggaaggctgttcattaatgatgctatctgaaaaatgttgaaacataaagaagacagcaaagtctgagagaatatataagacacaaatttggaatgactgcttttgacttttacattttgtggcctgttttttttttttcctctttctctgtcttgccaatttttttttttttggcagtgagtgaaactcaaattaaaatatatgtctagaaaaaaatcctcagttccaaatcaagcctactccac

SEQ ID NO: 452365 - DNA, 527 bp, Homo sapiens
ttgttttattttctctttttcttctgtccctgttatttccttttgtttttaatacagactgcttaactttttctctttgtaaccctgttgtgcattaggtttgatttttttctgctttgatgagcattatgtggaatcatctctcaatttctacctgcctgcatctaatactaaggaaacgagtcctggcaggttttgtagagtcataaactgcatggtcagaggaattgattgaagccaattgggcactaggatcaaaaagctgcattatggagsggggctggaaggctgttcattaatgatgctatctgaaaaatgttgaaacataaagaagacagcaaagtctgagagaatatataagacacaaatttggaatgactgcttttgacttttacattttgtggcctgttttttttttttcctctttctctgtcttgccaatttttttttttttggcagtgagtgaaactcaaattaaaatatatgtctagaaaaaaatcctcagttccaaatcaagcctactccac

SEQ ID NO: 452366 - DNA, 551 bp, Homo sapiens
tgaaaaagcattgattaaatatattcctaatgatcctgaacaactgttgttttattttttgagacaatagtgtcttcttctgtcacccaggatggcatgtgatggtatgatcatagctcactgcagcatccaactcctgggctcaagcaatcctctgaagcagctggaactgcaagcacaagtcatcattcctgactaatttttaaatwtttttttgtagagataggatttcactatgttgtccaggcttgtgttgtaagcctcttgcctctgtctccctagcagctaggactacaggctatgatgctcagctataactgtaattttaaaactagtatcaaaactcaaaatgaaatttggtaatcaaaaatagttatatggcatgtacaaagcatgtggtattgagaaacaggtgtgatattttggagttttttgcaaggtatggaagcatatttctaataaaagccctccagattctcctctatgtccaccctcagctaaatgcctgcccccaaacctcaagaaaaatctcccagatcttcttcctgtag

SEQ ID NO: 452367 - DNA, 551 bp, Homo sapiens
tgaaaaagcattgattaaatatattcctaatgatcctgaacaactgttgttttattttttgagacaatagtgtcttcttctgtcacccaggatggcatgtgatggtatgatcatagctcactgcagcatccaactcctgggctcaagcaatcctctgaagcagctggaactgcaagcacaagtcatcattcctgactaatttttaaatttttttttgtagagataggatttcactatgttgtccaggcttgtgttgtaagcctcttgcctctgtctccctagyagctaggactacaggctatgatgctcagctataactgtaattttaaaactagtatcaaaactcaaaatgaaatttggtaatcaaaaatagttatatggcatgtacaaagcatgtggtattgagaaacaggtgtgatattttggagttttttgcaaggtatggaagcatatttctaataaaagccctccagattctcctctatgtccaccctcagctaaatgcctgcccccaaacctcaagaaaaatctcccagatcttcttcctgtag

SEQ ID NO: 452368 - DNA, 568 bp, Homo sapiens
tcatcattcctgactaatttttaaatttttttttgtagagataggatttcactatgttgtccaggcttgtgttgtaagcctcttgcctctgtctccctagcagctaggactacaggctatgatgctcagctataactgtaattttaaaactagtatcaaaactcaaaatgaaatttggtaatcaaaaatagttatatggcatgtacaaagcatgtggtattgagaaacaggtgtgatattttggagttttttgcaaggtatggaagcatatttctaataaaagccctccagattctcctcwatgtccaccctcagctaaatgcctgcccccaaacctcaagaaaaatctcccagatcttcttcctgtaggatccccctaacacaatacacttgatttcaatttcatcccatacataacaaagtgaaggtttcctgaagctgtttttcactctaggctcacagacacaagaaatccactcctttcactcctgtccccagctggaatccatgtgcttggatttgagctggccttcctaagaccttttagttgctatatccctgaaaatat

SEQ ID NO: 452369 - DNA, 568 bp, Homo sapiens
tcatcattcctgactaatttttaaatttttttttgtagagataggatttcactatgttgtccaggcttgtgttgtaagcctcttgcctctgtctccctagcagctaggactacaggctatgatgctcagctataactgtaattttaaaactagtatcaaaactcaaaatgaaatttggtaatcaaaaatagttatatggcatgtacaaagcatgtggtattgagaaacaggtgtgatattttggagttttttgcaaggtatggaagcatatttctaataaaagccctccagattctcctctatgtccaccctcagctaaatgcctgcccccaaacctcaagaaaaatctcccagatcttcttcctgtaggatccccctaacacaatacacttgatttcaatttcatcccatacataacaaagtgaaggtttcctgaagctgtttttcactctaggctcacagacacaagaaatccactcctttcactcctgtccccagctggaatccatgtgcttggatttgagytggccttcctaagaccttttagttgctatatccctgaaaatat

SEQ ID NO: 452370 - DNA, 496 bp, Homo sapiens
ttggatttgagctggccttcctaagaccttttagttgctatatccctgaaaatatggtctgtattgttaggtcccctaaattaaaaattgtcaatctgttctgagcaaggaaagagtattcaaaggccctcagcagataaaaacacacacacacacacgcacagtaaagataaatgcccacatgattgaagaatcataatatcttcccactcttggtttttctcctatcttgacagcaaaatgattatctcactttaatttgcattatttgttgttttgttgtctatttttctctactcacgtcttctggttgactttggtatttgtgattttcttgcaatgatctgtatcagtatatgtgtgtgtgtatacatatatatctttacttattatttactctcgtaaagttgtgtgtatgtrtatcttattgtgtttctaagtttttctccctgtatcgtgatactgtattattccctttttcaatggatttgcagca

SEQ ID NO: 452371 - DNA, 417 bp, Homo sapiens
  misc_feature (1)...(417): n = A,T,C or G
aattcttatataaagtagccttatttcattattattaatgacttcatcatatttaccttcctatttgcatggaatagaataggtkatatctcacatgtagattaaacacaggatcgactcattcatacctattggttttagttcatcaatatttcaaaaaatgtattttctttgggtatttgagattatacagtactagaatgttgaaataaattatctaggaaatatccagactaaaaagaaaatgagaaaatttggaaatgaaagtaggggctagaaaaaaaaattcatagtgaaataaaaattaatttcattaagaaagtaaaataagataggccttttgagtaatacaaaactaatacaaatattatggaatgaaattttaataacactgcannnnnnnnnnnnnnnnnnnnn

SEQ ID NO: 452372 - DNA, 417 bp, Homo sapiens
  misc_feature (1)...(417): n = A,T,C or G
aattcttatataaagtagccttatttcattattattaatgacttcatcatatttaccttcctatttgcatggaatagaataggttatatctcacatgtagattaaacacaggatcgactcattcatacctattggttttagttcatcaatatttcaaaaaatgtattttctttgggtatttgagattatacagtactagaatgttgaaataaattatctaggaaatatccagactaaaaagaaaatgagaaaatttggaaatgaaagtaggggctagaaaaaaawattcatagtgaaataaaaattaatttcattaagaaagtaaaataagataggccttttgagtaatacaaaactaatacaaatattatggaatgaaattttaataacactgcannnnnnnnnnnnnnnnnnnnn

SEQ ID NO: 452373 - DNA, 590 bp, Homo sapiens
cctcagaatctagcaagttcccaygtggtcctaatgttgtaggtcaggagaacaaatattggaacatctgagctaagaagtgtgttaagagagatggcacccaggtagctggaaagcagactccacactaactaccagcttacagcttgccagaggcacagccacattacacacatgacaaagatggccagccccacaggcaccctcaacaaaaccttgtcacatggagtaaaagctgctgtttcttagttttaatttgttccattctagaccttcctaggaaatgaacagtttcaggaaagaaaatttaataaataacttttaattgaaaaaaagtcatgctaattaacttctttctttgaattgtgaaacaattatctaaattccaagtgagcaacaggatttgttttgtctagatttgctcagtatgagtgaactgcagaaacaaaatgagaacttcttaagccaaatggcatactgaataagatcagacaacctgatatttgagatctgatcttcacattaatttgctaatttaaaaaaagcattaactcgctatacttgctatcactacactaaaaagtaatgtg

SEQ ID NO: 452374 - DNA, 590 bp, Homo sapiens
cctcagaatctagcaagttcccatgtggtcctaatgttgtaggtcaggagaacaaatattggaacatctgagctaagaagtgtgttaagagmgatggcacccaggtagctggaaagcagactccacactaactaccagcttacagcttgccagaggcacagccacattacacacatgacaaagatggccagccccacaggcaccctcaacaaaaccttgtcacatggagtaaaagctgctgtttcttagttttaatttgttccattctagaccttcctaggaaatgaacagtttcaggaaagaaaatttaataaataacttttaattgaaaaaaagtcatgctaattaacttctttctttgaattgtgaaacaattatctaaattccaagtgagcaacaggatttgttttgtctagatttgctcagtatgagtgaactgcagaaacaaaatgagaacttcttaagccaaatggcatactgaataagatcagacaacctgatatttgagatctgatcttcacattaatttgctaatttaaaaaaagcattaactcgctatacttgctatcactacactaaaaagtaatgtg

SEQ ID NO: 452375 - DNA, 590 bp, Homo sapiens
cctcagaatctagcaagttcccatgtggtcctaatgttgtaggtcaggagaacaaatattggaacatctgagctaagaagtgtgttaagagagatggcacccaggtagctggaawgcagactccacactaactaccagcttacagcttgccagaggcacagccacattacacacatgacaaagatggccagccccacaggcaccctcaacaaaaccttgtcacatggagtaaaagctgctgtttcttagttttaatttgttccattctagaccttcctaggaaatgaacagtttcaggaaagaaaatttaataaataacttttaattgaaaaaaagtcatgctaattaacttctttctttgaattgtgaaacaattatctaaattccaagtgagcaacaggatttgttttgtctagatttgctcagtatgagtgaactgcagaaacaaaatgagaacttcttaagccaaatggcatactgaataagatcagacaacctgatatttgagatctgatcttcacattaatttgctaatttaaaaaaagcattaactcgctatacttgctatcactacactaaaaagtaatgtg

SEQ ID NO: 452376 - DNA, 590 bp, Homo sapiens
cctcagaatctagcaagttcccatgtggtcctaatgttgtaggtcaggagaacaaatattggaacatctgagctaagaagtgtgttaagagagatggcacccaggtagctggaaagcagactccacactaactaccagcttacagcttgccagaggcacagccacattacacacatgacaaakatggccagccccacaggcaccctcaacaaaaccttgtcacatggagtaaaagctgctgtttcttagttttaatttgttccattctagaccttcctaggaaatgaacagtttcaggaaagaaaatttaataaataacttttaattgaaaaaaagtcatgctaattaacttctttctttgaattgtgaaacaattatctaaattccaagtgagcaacaggatttgttttgtctagatttgctcagtatgagtgaactgcagaaacaaaatgagaacttcttaagccaaatggcatactgaataagatcagacaacctgatatttgagatctgatcttcacattaatttgctaatttaaaaaaagcattaactcgctatacttgctatcactacactaaaaagtaatgtg

SEQ ID NO: 452377 - DNA, 587 bp, Homo sapiens
gtctgcccctcaaataaactaagtgacctgacgatagtgactcttgtattcatctttgaacttctgacraacccagcacaattcttttaagtaagtccttgcttactaattatttggttgaataagcaaacaaatggaaacatccataatattagcaaatatgatgcaagacatgaaaagccttatgcattgaaatctacatgacttaaccctagaaggctgaagtgataccacaccaggaaaattactaacttaacagaacacatcaaaataaaacattgttcaaatctatataattatctcaattgccaaaaaagtatctgataaaaattcaatagctattcatcataagcacagtaaaaatcataggaaagagggtttcttttttcacaggggaaaaattaaatgtttcaacaagcattacctttaatgtagaaatatgagactttctaaaacaaacaagaataatatgaacatagctcactttaccattgctgctacaattatttattattttaatagtaaaattattaaatattaaggaaaagaatattaaaaataaaatcaccagacctcacaatattcag

SEQ ID NO: 452378 - DNA, 438 bp, Homo sapiens
cacagtaaaaatcataggaaagagggtttcttttttcacaggggaaaaattaaatgtttcaacaagcattacctttaatgtagaaatatgagactttctaaaacaaacaagaataatatgaacatagctcactttaccattgctgctacaattatttattattttaatagtaaaattattaaatattaaggaaaagaatattaaaaataaaatcaccagacctcacaatattcagtatacttttaaaaatgaacttgcaggaaaattgttgtttcaaatgtgtttactaggaagaaaaaaatgcaattatgtaggattatgattaagaccacaaaagataagtaaaaatgatacattaaatgctaaygtggggaaatagaagacaaaagagatgcatgttaaaaaattacaagttctaactacggtattaacacctaa

SEQ ID NO: 452379 - DNA, 467 bp, Homo sapiens
aaaattgggggaagagctaattacttgtattgtagaagaagactttggaattcttgtggaggagattaggtggagagagagggtgggggtgtgaaagagagtaagaaagaaaaagtgaagtacatgtgtttcccaaatgttgtgtttctgtacatctcaggcagggaacccattctccacccatctgaccacttctgccttatttacaaattttgatttgctggaaagggaattctactggcaaatgcacagtctgtttctcactgatacaccttggctgagtttctacctacagtctgacccttttgaacagaaagtgttaaggacttcccgttagkgctcgtgcttaagcctcaggttgaacctacttgatccttaagaaaagcaaacaaagcaaaactctcaaacagaaagcactgtgtacttatttccttccataaaattttattgtgcactgtgttgcaggg

SEQ ID NO: 452380 - DNA, 593 bp, Homo sapiens
atttttgtgggtaacaattttttcacaggccagggggtactgagagcgggggatggtttcgggataactcaagtgcattacaattattgattgactgattgattggagacagagtcttgctctgtcacccaggctggtgtgcagtggcttgatctcggctcactgcaactgccgcctcctgggttcaagcaattctcctgcttcagccacctgagtagctgggactacagatgcccaccaccatgcccggctaattttttgtatttttgtagagacggggtttcaccttgttgcccaggctggtctcaaactcctgagctcaatctgccctcctcagcctcccaaagtgccaggattacaggtgtgagccaccgcacccagccagtgcattacatttattgkgcactttatttatattatcattacattgtaacatacaatgaaataattatacaactcaacataatgtagaatcagtgggagccctgagcttgtgttcctgcaactagagggttccatctgtgggggatgggaggcagtgacagattatgaggcattagattcccatagggagagcataacctagatccctc

SEQ ID NO: 452381 - DNA, 419 bp, Homo sapiens
atgagtttggagggggcccctcaaccacttctcaattatttggaagatttgagaagaactgttgttaattcctctttaagtgtttagtagaatttaccagtgaagccattggtcctgagtttttccttgttggatagttttttgttgttgtttttgtttgttatgtttggtgttttaactgattcagtcaccttacttgttataggtctgttctgatttttcatttctttctaatttagtcttggtagactgaatttatctgtttcttttagtttatmccatttgttggtgtttaattactcatagtaatttattataaccctttatatttctgtggcatcaatgtctcctctttcatttctaattctcttcatttaactattttctctcttttcttagtttagataaatgtttatcaa

SEQ ID NO: 452382 - DNA, 634 bp, Homo sapiens
tctgatctaacccaccccccatcttgtcttccccttaattatttctgggctttgtggctgagctaacttcagaagacatttaggttagagcttaaatgatgatagcccttcccccaagttctacagcctctgtaaagctaatgaaaggccatcagggcaggggaggagaggagcctggttctgccaaggtgtggactggtcaggagatactcctgcaaataacagcattgtggtagatgggcctgttgagaaatcttttcaggatttttgcatgtgtgacacgcacggctccacctggacctgatggctctgcctaaacccaccaaccccacccttgtggccccacccagaagtgactcagtgggcaggaggacagcttcaaccccctgtgatttcatctctgtcccaacccaccagcagtaagcactcattacctggccacctctaccccttccctaaaackgcctttgaaagccccctaacccaggagcctgagatgatattgatttgagtaatgactctgtctcctacgtgaggtggttggccttgtgtctattaaactctttctttctttctttctttttgagacagagtctcactctgtcacccaggctggagtgcagtggctcactgc

SEQ ID NO: 452383 - DNA, 440 bp, Homo sapiens
tgctggtatcttaaattcataattaggctgcattaacttttcttcaaattcttcactgaatttaatgaatcataattgtcccaggcaaccagacttgaaaattgaaaatattttctctattctttcctttattccctgtagccaaataagtcactaaatcagctctttcctcctttgacctacctcctggtgctgttcagtgcctttattcatgtgtccaccatcctaggctgtgctctcctctcaaccccagcttgagaggtaagtcttctccacttctcccctttctcccatctctgtgggctcccatttaacgtgccttctcaaaacactgtctttaacatcatactcccttgctcaagagcttccagcagcttccctggtgcctgctattcaagtccaaagtccctgctctycagtctagaccatcttcagagcag

SEQ ID NO: 452384 - DNA, 585 bp, Homo sapiens
atttagtaagttttaaatgaaacttcaggtttcctaatttacagttctttaaaaactatcaattacttaataaaatttctattttcttaccgtgcctatttaaggcttagattttggaaagcagcaagactgttttccatttgtttgccatgatctcatgcagcaatctaaaatagcaaatgtgtagtgaagcgtctgatgatactgaagtaaaaaatgctgcaccctgagaacgtactgttattaatagcctggagccaggaaaagcttcctcaaatcttgaaattaaagtgtgttgtttatttctctaataagaacattacttttcttccttgaatttggtttgaaaagtaaaatgcagaaaaatagcactctttaaaagctgagggatcctatcatgaaaataagaagctgggaagattcgcattaccaccagccgtgggtggctgttaagaggcaaacacagctggtcctcactgacatccacggcaaaggtcaaatgtgccagattctgaagatttatcrtgaaaaaaaaagaatgtacaatcttttattaatgtgtttattttgattacatgttaaaat

SEQ ID NO: 452385 - DNA, 318 bp, Homo sapiens
gactttgtttcttttcggtcctaccattcagtttagatggtacaaagacttcattccagtgttgaagtgtgaaggtgtgagataaagatcaaattacctgtacaagaaagagaaatggatgacttatcatgttttcacattcttaagatttctaggtgaaacttcctacccataaatgtcagttaaataaatgtctgaaactgcatgactttcttttgctraaaatgacattagaattgctatgacttattttgcctgtaggactaaattacagacaaagccctagaattttttctgctattacttttatacttttag

SEQ ID NO: 452386 - DNA, 524 bp, Homo sapiens
acattagcaacattttctgtggccctgaaagtagcaatacactgctctcccaccatagatgtttaagaacctccaagtttagtgacagccagtgctggagtccatcactttttattaagagatctctcttcatttggtttacttctacgttttatttagccagtactatcggtatgttaataattacaataaacactgagctgatgttttaaagattatatatgcatggtttatttactcctcataagtgccattttaaagttgagaaaactgactcagagaggataaacgacttacctaaagtcacacatactgrataagaactaaaatttaagtttatttcattctaaagtgttcatttagtacagctgtaagaagctacccttagttgctataagaagtaataataaacaattaacacttatatggtcattaaacatcagagttaattttaatgttatcagagatattaactcatttaatccttaaaactatattatgaaaactagataggttctattatt

SEQ ID NO: 452387 - DNA, 524 bp, Homo sapiens
acattagcaacattttctgtggccctgaaagtagcaatacactgctctcccaccatagatgtttaagaacctccaagtttagtgacagccagtgctggagtccatcactttttattaagagatctctcttcatttggtttacttctacgttttatttagccagtactatcggtatgttaataattacaataaacactgagctgatgttttaaagattatatatgcatggtttatttactcctcataagtgccattttaaagttgagaaaactgactcagagaggataaacgacttacctaaagtcacacatactgaataagaactaaaatttaagtttatttcattctaaagtgttcatttagtacagctgtaagaagctacccttagttgctataagaagtaataataaacaattaacacttatatggtcattaaacatcagagttaattttaatgytatcagagatattaactcatttaatccttaaaactatattatgaaaactagataggttctattatt

SEQ ID NO: 452388 - DNA, 408 bp, Homo sapiens
tttaagttgacctcaattactgccaaaagttcctgggacatgtattccaaatgaagcacccacatgccacatacaacacatacaggtgtaccaacaaaccacaatggggtgtattaataaatggtacaaattataaatgtgtatgaatgtgtttgtgtgtgtgtatgtgtatgtgtgtggtgttgacctatttcctcctgtcagatgggtgtagtactttccatgatcattatatttatctagtttttccttgtctctctcattagacactaagcatctgaagacaaggaaattttaaactagtgcaacaatacaacttaaaaacaatcttaaataaaatttacttcctaaagtctagggaactttaatrtttgtgggactatgactttgatctatttgcaaataaat

SEQ ID NO: 452389 - DNA, 531 bp, Homo sapiens
ccacatcgatggtggtaagtcttgttgattacatgtatccttgccttgatatgatgtattgagaaggcactttacatgtgtggtcttcctccccataacccacagtcctaagagaaaaacatcagacaaacaccagttgagaaacattttacaaaatacctagaattttgggacyagtagtctccaaaactgtcaagggcatcaaaaacaagaaagtctgagaaactgtcacagcccagtcaagtctaaggagacatgacaactaaatgtaatgtgttgctccaaatgggattctggaacagaaaatggtcgttagggagaaagtacaaaaatctgaatgaagtctagattttagttaataataatgtagcaatattggttcattggttgtgataagtgtaccatactaatacaagatgttaataatagtaaaaaccgaatacagtgtatgtgagaactcactgtactgtccttgtaacttttctgtaaaaaaagattttttaattaaaaatttatttagacatgaaaaaa

SEQ ID NO: 452390 - DNA, 476 bp, Homo sapiens
atgggattctggaacagaaaatggtcgttagggagaaagtacaaaaatctgaatgaagtctagattttagttaataataatgtagcaatattggttcattggttgtgataagtgyaccatactaatacaagatgttaataatagtaaaaaccgaatacagtgtatgtgagaactcactgtactgtccttgtaacttttctgtaaaaaaagattttttaattaaaaatttatttagacatgaaaaaatcatgcacctacagaaatgttctttttcatttagatacaagaataccttgctgtaagcaaaggtgcatggttgtcctgttttactccaatgaccaaagctgttacataattcctgattatgataaatgttagtattggggttggttatctgtatggatatttgaaaatccagaggatttaatcagcagttcagcctcttaaaactaaaccaatggcttcttatcctttga

SEQ ID NO: 452391 - DNA, 647 bp, Homo sapiens
ctttctgtgataatggaatttatctattctgtgagttaatgtagtagccatagccatatcttgccattgagcatgtaaaatgtggcatgtgaatgaataattaaattttatctaattttaatacatttatgttcaatttaaatagccttgggtgagtactgattattacgttagacagtgcagcttcagtggattcagtctgcttttcttcttccctcagtttctgcaatccatttgagactgagtttctctggtggcaacatctactttccccttgtttaattttgacacagggctttctccatgattccagaacatcatgtttcatgtcagacatacacacaatcacactgtttggaggctcagccacttctgtagtgctgcatcaagagttaaacgttaatggttttaacatttaacatttcatcagggtgatttacttccactcatttaacattaaatacctttagcytcctctatgcaaaaacagtatcttctgaatccatatttttatttatttattttttaataggaaaaaaggtttatttttatttttaatttttttatactttaagtactggggtacaagtgcagaatatgcaggtttgttacatagatatacacgtgccatggtggtttgctgcacc

SEQ ID NO: 452392 - DNA, 539 bp, Homo sapiens
acaaacataaaaaataatgtggcttcatctttagcaactgttcagggcrtagattaagttgaaatatgtgatttctttgctgttacagagatgatgcttgataatatatatttatcacttcactactagtttggaaataaatatgacacagtgagaataaaaaaatatatgaggtactgaaaataatgtgacttaaggaatttggaaatcatcatgtgttaaaatgcaaggctttaaaaatattccatatgggtctttattatatacagatgcatttttgctacatattaaatagtagacatacagggcagaagacataaactattttctaatcctgattctatatctcaccagaatgagaccacaaaatttttttgctatctcttgtcacagtttatttacttattaaattgcaataatttccaacctgttcaccttataaccatgaagtgatgattaaatgataaaattagaatatagggaatttataagactttttgaccgtagacggtgagctactgaatagtcaaagcacacct

SEQ ID NO: 452393 - DNA, 574 bp, Homo sapiens
ttcaaaacatactggaagtagtaagtatacaaaaaaacacagaccattataacactgtaactgaggtgtgtaaactactcttatcctaagtagaaagattaaacaattaaccaatyaaaaacaataactgcaacaacttttccaggtatatgcagtacaactagataaaaacagaaactataaaaagttaaaaagcagggtgacaaagttaagggaagtttttattagtttctttttgcttttgtgtttgtttaagcaaatagtgttaagttattattaggttaaaataatgggttataagatactatttgcaagcctcatggtaacctcaaaccaaaaaacatacaagggctaaacaacaaataaaaagcaagaaactaaatcataacaccagggaaaatcatcttcatgacaggaaggcaggaataaaagaaagaaagagaagaccacaacaaaccagaaaacaaataataaaatggcaggagtaagtcctcacttatcaataataatattgaatgtaaatggactaactttccaatcaaaagatatagaccaacggaatggataaactaaa

SEQ ID NO: 452394 - DNA, 491 bp, Homo sapiens
acacctgactttaatgccaggaactggagtgtttaaagatctgcagacaaagtagcagcaagtcatccattagaatggataaaaacacttggtaactctgtgatttcaatgatgattgtacttttaatctttattgtttgtctttgtatagtctgcagatgcagaccctgactcctgtgagaagcagctcaccatgacaaagctgcctttgcttttatcaatttgaaaatcaaagaaggggtacatgttgggagcaagctccccaaaaatctggccataaactggccccaaaactggccataaacaataagcactgtgacatgktcatgatggcactaatgctgacactgaaagattgggggtttaccagaatgaaggcaagaaacaactggcctgtccagggtggaaaaccacttaaaggctttcttaagccacaaacagcatgagaaatctgtgccttaatgtcatgttccagctgcagttaactaccc

SEQ ID NO: 452395 - DNA, 442 bp, Homo sapiens
ttgtgatgtatgcattcatcttacagaggtaaaactttcttttgattcaagagattataaacactgtttttgtccattctgtgaatgaacatttgggagcttactgaggccaattgcgaataagcaaatgtaccatcataaagagtagatggaacctatctgacaaactgcttcatgatgtgtgcattcatctcacagctttaaacctttcttttcattcagcagtttggatacatggtttttgtrgaatctatgaagagataatagggaaagtactgaggcctaaggtgaaaaagaaaatatcttcaggtcaaaagtaaaagaagcttttggagaacctgctttgtgatgtgtgcattcatctcacagagttaaacctttcttttgatgcagcagtatagaaacactgtttttctcctaactgcaaatggacatttgggag

SEQ ID NO: 452396 - DNA, 511 bp, Homo sapiens
tttgtgatatgtgcattcatctcacagagttcaaccttttttagattcagcagtttgtaaacactgttattgtccattctgtgaatggatatttgggagctcattgaggccaatggtgacaatkaaattatcccaggataaaaactagaaggaagctattagagaaaccactttgtgaggtgtgttttttcttgcagagttaaatctttcttttcattcagcagtttagaaacactatttttgtacaatcaacgaagggatatttgggagttcattaaggcctatggtgaacaagaaaatatattcagaaaaaaaaaaaaaacagaaagaagccttctgagaaactgctttgtgaggtgtgcattcatctcaaagtgttaaaacctttcttttgattcggagtttggaaaagctgttattgttgattcagcgaatgaatattttggagctcattgaggacaatggtgaaaaagggaatatcccaggatacaaactagaaagaagctatctg

SEQ ID NO: 452397 - DNA, 586 bp, Homo sapiens
ttttgtacaatcaacgaagggatatttgggagttcattaaggcctatggtgaacaagaaaatatattcagaaaaaaaaaaaaaacagaaagaagccttctgagaaactgctttgtgaggtgtgcattcatctcaaagtgttaaaacctttcttttgattcggagtttggaaaagctgttattgtygattcagcgaatgaatattttggagctcattgaggacaatggtgaaaaagggaatatcccaggatacaaactagaaagaagctatctgggaaaccactttgtgatgtgtgcattcatctcacagagttaaacttttctttcattcagctgtttggaaacactgtttttgtagaatctgtgaatggatatttgggagcacattgaggcctatggtgaaaaagaaattatcttcagataaaaactagaaagaagctttctgaggaactgctttgtgatgtgtgcattcatctcacatagtttaacctttcttttaatttagcagttcagaaacatggtttttaaccatctgcaaatggacattcgggagctcattgaggcaaatgccaaaaaagagaacatgc

SEQ ID NO: 452398 - DNA, 572 bp, Homo sapiens
cagcttggaagcttttaagtttttaacagtgcaatttttctgagtatgaccaagttgagcatgattatagcactctccaagaaaagaattagtggggccagtttgattggtatccttcatggcctgtgcccacaggatagccttgtgggtgtctgatccaatgtcttcacatgctttaatatatgcaggcaacacctcatgatcaggcaaattttgtcattggacagaatgcttgaccattttacactcatggttcgcattttcaaaagctaacrtacaaaggagaataccttcagcacgctcatcagagacagacttttcaacaacatcttgcaattttgctaaaaaatcagggtacaattcagtgtgaccttgtttaatggtagtaaaagaaacaggaggttggcctgggtcgtgtcatttatcccaagctctcatacacacctttgttacttgttccgtggtaagagcatcaaagtttaattgggcataagtatcaaagaaattatcggagcctgtgagctgagtctgagtaactagaatgccattagtccaacttagctgagcctgca

SEQ ID NO: 452399 - DNA, 572 bp, Homo sapiens
cagcttggaagcttttaagtttttaacagtgcaatttttctgagtatgaccaagttgagcatgattatagcactctccaagaaaagaattagtggggccagtttgattggtatccttcatggcctgtgcccacaggatagccttgtgggtgtctgatccaatgtcttcacatgctttaatatatgcaggcaacacctcatgatcaggcaaattttgtcattggacagaatgcttgaccattttacactcatggttcgcattttcaaaagctaacgtacaaaggagaataccttcagcacgctcatcagagacagacttttcaacaacatcttgcaattttgctaaaaaatcagggtacaattcagygtgaccttgtttaatggtagtaaaagaaacaggaggttggcctgggtcgtgtcatttatcccaagctctcatacacacctttgttacttgttccgtggtaagagcatcaaagtttaattgggcataagtatcaaagaaattatcggagcctgtgagctgagtctgagtaactagaatgccattagtccaacttagctgagcctgca

SEQ ID NO: 452400 - DNA, 435 bp, Homo sapiens
aagggacagactgcttcctcaagtgggtctctgaccctgcatacctcctgatggagagacacttcccagcagggktttaaaagacaagtcatataggagagctccggcaggcatctggtgggtgcccttctgggatgaagcttccagaggaaggaacaggcagtaatctttgatgttctgcagcctccgctggtgacactcaggaaaacagggtcagcctgactgttagaagtaaaactaacaaacaaaaaggaatagcatcaacatcaacaaaaaggatgtccacacaaaaaccccatccgaagatcaccaacatcaaagaccaaaggtagataaatccatgaagatgaggaaaaactggtgcaaaaaggctgaaaattccaaaatccagaagccctctttttccccaaaggatcacaactcctcaccagcaag

SEQ ID NO: 452401 - DNA, 580 bp, Homo sapiens
tctttgtactatcgatgaatgaatgttgattcatcattctatttgccacataacttttctcttctgtgacttgtccattcatttccttcatccattttccaacttggttgttttacttttgttattatttataggaggattttttgcccaattttattgcaaatcacaacacaaagtaatgaagttgaaaatttgtcaaataaagatgaactctcaaaaatatctcagcaagtctacagagtctatgactccaaycttttctttgttaaaacagcaggaatgaaaatattagtgaattattattctcaaacagaggttagcttattgacataaaatttctagatatctgtaaaattattctaaatttctcttaaattccttatattttgtttaatgcagtagtgtcctactccatgacacatttaattacaaactttacccctatagaggctatttattgggtacagtgagcctataagaccaatgttgcaaaatggctcctccataggccaagccactcctctcctttaatgacctatgaatcatcattttttctagtgatttggaggatgatactggc

SEQ ID NO: 452402 - DNA, 580 bp, Homo sapiens
tctttgtactatcgatgaatgaatgttgattcatcattctatttgccacataacttttctcttctgtgacttgtccattcatttccttcatccattttccaacttggttgttttacttttgttattatttataggaggattttttgcccaattttattgcaaatcacaacacaaagtaatgaagttgaaaatttgtcaaataaagatgaactctcaaaaatatctcagcaagtctacagagtctatgactccaatcttttctttgttaaaacagcaggaatgaaaatattagtgaattattattctcaaacagaggttagcttattgacataaaatttctagatatctgtaaaattattctaaatttctcttaaaytccttatattttgtttaatgcagtagtgtcctactccatgacacatttaattacaaactttacccctatagaggctatttattgggtacagtgagcctataagaccaatgttgcaaaatggctcctccataggccaagccactcctctcctttaatgacctatgaatcatcattttttctagtgatttggaggatgatactggc

SEQ ID NO: 452403 - DNA, 340 bp, Homo sapiens
caagctacccatatttagccttactgaaattgcagaattktgagcaaattaatggtgattgttgttagctcttaagttttaggcatgatattcttatatggacgtgatctgaactctacccctctgtgaaatcctatggcattttatttctcacttttttgtggtatatcacttcctacactgtgtagaataaaatatctctcagactaaattatgtgtaaaattcttgagagaaatgtattatgtcatatttatcttgtatttccaagctaaggcaatattttcttgtatgggactcaacatttatacatgagtgattgtgtgtgtgttttcatatatg

SEQ ID NO: 452404 - DNA, 340 bp, Homo sapiens
caagctacccatatttagccttactgaaattgcagaattgtgagcaaattaatggtgattgttgttagctcttaagttttaggcatgatattcttatatggacgtgatctgaactctacccctctgtgaaatcctatggcattttatttctcacttttttgtggtatatcacttcctacactgtgtagaataaaatatctctcagactaaattatgtgtaaaattcttgagagaaatgtattatgtcatatttatcttgtatttccaagctarggcaatattttcttgtatgggactcaacatttatacatgagtgattgtgtgtgtgttttcatatatg

SEQ ID NO: 452405 - DNA, 459 bp, Homo sapiens
aacacttagggaaaatagaaaagaacatacattgaaatactgggggctggtttccccagtaaagatccagaatcaccaaagctatcctaagccaaaagaacaaaactggaaaaatcacattttcccctggcttcaaattctactacagagctatagtaaccaaaacagcatggtactggcatacaaacagacacatagaccaataaaacagaatacagaacccaaaaacaaatccacacacctatagtgaattcatttttgacaaaggtgccaagaaaatacactggggaaaagatattctcttccataaattgtgctgggaaaactggattaccatagatcyatggatcacaaaagaataaaactatttgcctatctcataccatataaaaatagcaaatcaaaatggattaaagacttaaatataagatctcaaactatgaaactaccacaagaaaa

SEQ ID NO: 452406 - DNA, 609 bp, Homo sapiens
atatgaaaaggtgattaccatcacagatcgtcagagaaatgcaaatcaaaactacaatgagatattatctcattccagttaaaatagcttatatcccaaagataggcaataacaattacttgtgatggtgtagagaaaagggaatccttgtacatggttggtgggaatgtaaattagtaaaatcagtataaagaacagtttggaggttcctcaacaaagcaaaaattgagctaccatatgattcagtagtcccactgctggatatatactcaaaagaaaaaatatcagtatatcaaagagatatctgcacttctatgtttgttgcagcactctttacaatagctaagatttgaaagtaacctaagtgttcattaacagatgaatagataaagaaaataggatacacatacacaatggagcacactgttcggccataaaaatgaatgagatccagtcatttacaacaacatggattgaactggatatcattatgttaagtaaaacaagccagrcacaaaaagacaaacatcacatatactcaactgtgggatcccaaactcaaaacaattgaactcatgaacctagagagtagaagaattgttaccagag

SEQ ID NO: 452407 - DNA, 609 bp, Homo sapiens
atatgaaaaggtgattaccatcacagatcgtcagagaaatgcaaatcaaaactacaatgagatattatctcattccagttaaaatagcttatatcccaaagataggcaataacaattacttgtgatggtgtagagaaaagggaatccttgtacatggttggtgggaatgtaaattagtaaaatcagtataaagaacagtttggaggttcctcaacaaagcaaaaattgagctaccatatgattcagtagtcccactgctggatatatactcaaaagaaaaaatatcagtatatcaaagagatatctgcacttctatgtttgttgcagcactctttacaatagctaagatttgaaagtaacctaagtgttcattaacagatgaatagataaagaaaataggatacacatacacaatggagcacactgttcggccataaaaatgaatgagatccagtcatttacaacaacatggattgaactggatatcattatgttaagtaaaacaagccaggcacaaaaagacaaacatcacatatactcaactgtgggatcccaaactcaaarcaattgaactcatgaacctagagagtagaagaattgttaccagag

SEQ ID NO: 452408 - DNA, 481 bp, Homo sapiens
acctaagtggcgaaatcaataatgaatccttatggtattatggtattacaggctttgtctccttctcagtttcattttccctgcttttctactcctgcgttctgggatcatgtcctaaataacctacctgcacccaacttgtttcctcagactctacctttggggacacccattctaagatagtagatttgaagaatattattttataaataaggacactgagacacagtccaaagtcatgtggtcaataagtgatggagacattattacaaatttartctgctataaatcccatgcttttatgctttatcaccccagatgatctctaagtctctttttcagttctaataatctctgaaattatgcatatacattattttttctgctttgcaatatgttttcaatctcatcaaatattcactgagtaattagtaccacgacaagtataaatggtgaaaagaaacttttttttttgagacag

SEQ ID NO: 452409 - DNA, 594 bp, Homo sapiens
agggagacagtgaggaaagacagagcaaaagtagcataatttggggtcattgggttgaaaatgattgactactattaataatgttacattaacctgtttttctcctgttctgggaagtgaactgaacactccaaataattttggcattcacagcaattcaaacatcatctacaaagctccatttggttggttatgayctcaaatggaaatagaaggtgctggctaatccagcgaatgcaatatatttatggaaaatcaaatctttttattacattggaaaactttgaattaacagcatagagaaaaagtgatgaatacacttgcaataacatatattttcatttgatttggccttatgtaagtaaattatttagaacagttatatgtccttagtgatcttccttctattcttccattgatatgtgcacatgactctcttttctatccaaaggaattttctttccctgggtgttacaccgtaaacaataatgggggaagaaacaaagattggctatgtaatcagccgattatgaatgactttcagctcctattaaggcaaaccaaacatgattcaactaaattcactcagaaagc

SEQ ID NO: 452410 - DNA, 577 bp, Homo sapiens
tttattgaggacttttgcatctatgttcatcagagctattggcctgaagttgtcttttttgttgtatcyctgccaggttttgatattagaatgacggtggcctaatagaatgggttagggaagggttttggaatagtttcaaggttttggaatagtttcagtaggattaatacagttctctttaagtctggtagaattcaactatgaatccatctagtccagggattttctggttggtaggttttttattattcattcagtttcagaactcattattggtctgttcagtttcttcctggttcaatcttgggaagttccatgtttccagtaatgtatccctttcttctacattttccagtttgtgtgcaaagaggtgtctgtaataataaatttctgtgggggtagttgtaatgtcacctttgtctattctgattgtgtttgttgggatcttctctctctttttattagtctagctagtggtctatcaatcttatttcttctttcaaataacaaacttctaattttatcaatcctttgcatagtttttttgcatctcaatttaattcagttcagatgt

SEQ ID NO: 452411 - DNA, 587 bp, Homo sapiens
gcacaaagccacaaagaagtataacctgagttagtattctcattttgttaactctcagtgaatttttatttacattaactaagctttacatttgattaatagtcaggataagaagattaaaaattagatgggtaaacctaattgtctcagagaaaaatagtttgtagtgtattgtactgggcagcacacagacctattaactcaaatattttaattttaaaaggcttttcaaagtgttagccctcataatatatcaatttgcttatataattaygttatatattttacagttactatttgtttacatacactttaagaaatctatatacttgatttatatgtcatagtacacatgcacaatattgggacataatttgtgttttagtcatagatatagggacattcctaatagggaaatttctagaaatatctatatttggagaaaataaatcatcttataatgcaagaaaattgaagtcatggtttcaaatatgagaggttaattaaaaattttattacattgagattacaatacattgataaataagagaactgtttcatacatatatacaggagaaatggataaa

SEQ ID NO: 452412 - DNA, 561 bp, Homo sapiens
tttaaaattggtcatcaatttttaatcccaactccttgggaggctaaggcaggaggatcccttgaacataggagttgtaggtaagcctgggcaacacagcaagatgccatctcaagaaaagagtagtcatctgtttttaattttattacaatttcatgagatgctatcatactcattaagtgaagaatgttgactgctgttccaggaagatatttatttactcttatgtgtaacaatacaacaatcctagagatgttataatagatgtaagagttgatgctacaaattttggggtctaacccagtgcttctgaaacttgaatatgcaaacataccaaacacggaatcttgctaaattcagattctgtttcagtaggtctggaaaggaatttagattctgcatttctaaccaactcccaagtgragtcaatgctgctgactgatgcatgccactttgagtcagaaggtacagaggaattgtgcctgggctgactcacagacaagttgtacttggttctttctcacagtgaatggctttggagctgacttcactttatctgct

SEQ ID NO: 452413 - DNA, 384 bp, Homo sapiens
catgagccagtttctttgaataaatcaatatatttgagatatatgtgtgtatatatgtatagacatgtatgtgtatgtatatgtgtatatatatatgtgtgtgaaacgtatgtatgtgtataaaaaatgattgctctatatacacttattgctatttgttctgtttcctttaggaaccctgactgatagagttggcttagccrcctgacctaaggattctttccctaaggagaagagtggggaggaaaaatagggaagatattgcatctattccaagcaaagtgtggcatgggacccaaagatcgaaaatgtttggaattaacttatcctgacagtggttcctattcttttcaatttctggatctactcgtctcttttattatg

SEQ ID NO: 452414 - DNA, 556 bp, Homo sapiens
tacaatgtaaagggtatcgttgcaaacctcagggataatattactgggtagagtgtgcatttggcttggtcatcaagagtgtaaattggatcaatggtttctgtctattcttagaagcaaggaggatgtaacaatcgagttttctttcccctgttgaaggaacccatttgcaaagggcaagaagctttttcctccaggcaccttcccctcccctgcacttaagttgttttcttctctttcctctatcatgtcagcagtcaacaaagttctatgaatacagggagattttctattgatttttcctcttgggaggcaccttgttaggccagttacccaatgcccaggactccctttctctcccttgyttgaggaggacctggtcccacagtttcagctgcttatgataggaaagcaagggaaggggctgccccaccagctgctggcagcagtttggtgagggccacctgggatctattgagtccatacaccctctggaggcaattccaagctttgggttgaagccctggaaagcaaaattagtcatgcaggttagcat

SEQ ID NO: 452415 - DNA, 556 bp, Homo sapiens
tacaatgtaaagggtatcgttgcaaacctcagggataatattactgggtagagtgtgcatttggcttggtcatcaagagtgtaaattggatcaatggtttctgtctattcttagaagcaaggaggatgtaacaatcgagttttctttcccctgttgaaggaacccatttgcaaagggcaagaagctttttcctccaggcaccttcccctcccctgcacttaagttgttttcttctctttcctctatcatgtcagcagtcaacaaagttctatgaatacagggagattttctattgatttttcctcttgggaggcaccttgttaggccagttacccaatgcccaggactccctttctctcccttgtttgaggaggacctggtcccacagtttcagmtgcttatgataggaaagcaagggaaggggctgccccaccagctgctggcagcagtttggtgagggccacctgggatctattgagtccatacaccctctggaggcaattccaagctttgggttgaagccctggaaagcaaaattagtcatgcaggttagcat

SEQ ID NO: 452416 - DNA, 521 bp, Homo sapiens
ttgcagcagcgtcccactaccagcttccaatttactgtattagtccattcttacactgctgtaaaggagttcctgagactgggtaacttacaaaaggaaggagtttaattgcctcacagttccatatggctggggaggcctcaggaaacctgcaagtatggcagaaagcaacccttcacaggacagcaggggagagaaggaatgcctagtgaaggaggaattccattataaaaccgtcaaatttcatgagaactaattcactctcagaagatcaggatggggtaaccactgccatgaaacagttatctccacctagtccttcccaccacacatggggataaygggaactacaattcaagatgagttttgggtgggaacacagccaaaccatatcacaccctgactcccagtatttgtttgcatttgagaatccctccaaccaagacacccagttaatctagactgtgttaactcagggattctgagatggcccccacctgtttgggcagacatcattaatt

SEQ ID NO: 452417 - DNA, 521 bp, Homo sapiens
ttgcagcagcgtcccactaccagcttccaatttactgtattagtccattcttacactgctgtaaaggagttcctgagactgggtaacttacaaaaggaaggagtttaattgcctcacagttccatatggctggggaggcctcaggaaacctgcaagtatggcagaaagcaacccttcacaggacagcaggggagagaaggaatgcctagtgaaggaggaattccattataaaaccgtcaaatttcatgagaactaattcactctcagaagatcaggatggggtaaccactgccatgaaacagttatctccacctagtccttcccaccacacatggggataacgggaactacaattcaagatgagttttgggtgggaacacagccaaaccatatcacaccctgactcccagtatttgtttgcatttgagaatccctccaaccaagacamccagttaatctagactgtgttaactcagggattctgagatggcccccacctgtttgggcagacatcattaatt

SEQ ID NO: 452418 - DNA, 579 bp, Homo sapiens
gtgaaggaggaattccattataaaaccgtcaaatttcatgagaactaattcactctcagaagatcaggatggggtaaccactgccatgaaacagttatctccacctagtccttcccaccacacatggggataacgggaactacaattcaagatgagttttgggtgggaacacagccaaaccatatcacaccctgactcccagtatttgtttgcatttgagaatccctccaaccaagacacccagttaatctagactgtgttaactcagggattctgagatggcccccacctgtttgggcagacatcattaawtgatctctcttgagtcccttaatcatcaggttaaagttttacaatatgtagatggcattctcctttgtgccccaactgaggaaatctctcaggaaggcagcaaggctcttcttactttctcgttaacagagtctagaaggtttcaaaatctaaggctcggttctgtcaggctttcagtgaagtacctaggtctagtcttgttagagggaaccagggcactaggtgaagaaaggatcaagcccatctcctcctttttccttacccaaa

SEQ ID NO: 452419 - DNA, 579 bp, Homo sapiens
gtgaaggaggaattccattataaaaccgtcaaatttcatgagaactaattcactctcagaagatcaggatggggtaaccactgccatgaaacagttatctccacctagtccttcccaccacacatggggataacgggaactacaattcaagatgagttttgggtgggaacacagccaaaccatatcacaccctgactcccagtatttgtttgcatttgagaatccctccaaccaagacacccagttaatctagactgtgttaactcagggattctgagatggcccccacctgtttgggcagacatcattaattgatctctcttgagtcccttaatcatcaggttaaagttttacaatatgtagatggcattctcctttgtgccccaactgaggaaatctctcargaaggcagcaaggctcttcttactttctcgttaacagagtctagaaggtttcaaaatctaaggctcggttctgtcaggctttcagtgaagtacctaggtctagtcttgttagagggaaccagggcactaggtgaagaaaggatcaagcccatctcctcctttttccttacccaaa

SEQ ID NO: 452420 - DNA, 639 bp, Homo sapiens
tgcagtccagttaagaacctgcccctcccagctcatgcctgtaatctcagaactttgggaggccaagatgggcaaattacctgaacttgggagtttgagaccagcctgaccaacatgaagaaatcccatctctactaaaaatacaaggattagccaggcatggtggcacatgcctgtaatcccagctactcaggaggctgaggcaggagaatctcttgaacccgggaggaagaggttgtggtgagcctagatcgtgccattgcactccagcctgggcaacaagagcaaaactctgtctcaaaaaaactaacagacaaacaaacctgtccctccctaaacccagccaccttcctccaccttcctccaagagaaagatgaggagcttgaaaatggctgcgaacaggtaatagtgcaaacctgtggccagagaggacctcaaagaaacccccttagagaacacagactagattccctttatggacagaagttcctttgtagagmaagggatctgtaaggcagggtatgcaatggccaccctaagtgacattattgagagcacagctctctcggtggacagaaatgttcaactagctaagctaattgccttcatgaggtcacttgaattaagcaaagggaaac

SEQ ID NO: 452421 - DNA, 639 bp, Homo sapiens
tgcagtccagttaagaacctgcccctcccagctcatgcctgtaatctcagaactttgggaggccaagatgggcaaattacctgaacttgggagtttgagaccagcctgaccaacatgaagaaatcccatctctactaaaaatacaaggattagccaggcatggtggcacatgcctgtaatcccagctactcaggaggctgaggcaggagaatctcttgaacccgggaggaagaggttgtggtgagcctagatcgtgccattgcactccagcctgggcaacaagagcaaaactctgtctcaaaaaaactaacagacaaacaaacctgtccctccctaaacccagccaccttcctccaccttcctccaagagaaagatgaggagcttgaaaatggctgcgaacaggtaatagtgcaaacctgtggccagagaggacctcaaagaaacccccttagagaacacagactagattccctttatggacagaagttcctttgtagagcaagggatctgtaaggcagggtatgcaatggccaccctaagtgacattattgagagcacagctctctcsgtggacagaaatgttcaactagctaagctaattgccttcatgaggtcacttgaattaagcaaagggaaac

SEQ ID NO: 452422 - DNA, 451 bp, Homo sapiens
tcttcactaactagatagaagcatttacatgttgmacagagaaagcctctgaggtgataaaagtactgattaatgaaataactcctcactttggacttcctgggtgcctccagagagataatggcccctcattcaaggcagctgtcaaagggtatctcaaaggcactaggcatagaataccatcttcattgtgccaggagaccacactcctcaagaaaggtagaaaagacaaatgatattattaaaaggcacctcagaaatctgtctcaagagactcatctcccttggattactcttctcttcatagccctactatgtgttagaaataccccttcaaatctgagtttaggtaaccctgaaatgatgtgtggatgacctttactcaccaataatttcttgctagaccaagaaacctctgatttaactaaatatgtacattatttggcccatt

SEQ ID NO: 452423 - DNA, 516 bp, Homo sapiens
tttcttccttgccatagggcatcttcatcaaggaccccttaatcytgaactcccaagggattatctactcccctaaacagttatttctcttttaaagtttaactgcctccatacaagatttaattccttttaccagggtgaaacagctctagccacaacactgttttcagaatgattagtctattttatttcttatttctgttatcttttggcactagattttttcctttgcatacttaacctccttgtaaaatttgtttcttctcacctagaaaccatcaaactccaagtggacatgcaactggagcctcagaaaatggctctccttttaccaggggcctttagataggcctctgagagagatctgactgccatttttcccagaatgccccctgtcagcatgaaggagttaagagtggtcattgtctgtatcctaatggcagttagatgtacctcttcgggtgaagcagggtgatggcagcggtggcttgtcttgagcagctgctgcaaaaagac

SEQ ID NO: 452424 - DNA, 516 bp, Homo sapiens
tttcttccttgccatagggcatcttcatcaaggaccccttaatcctgaactcccaagggattatctactcccctaaacagttatttctcttttaaagtttaactgcctccatacaagatttaattccttttaccagggtgaaacagctctagccacaacactgttttcagaatgattagtctattttatttcttatttctgttatcttttggcactagattttttcctttgcatacttaacctccttgtaaaatttgtttcttctcacctagaaaccatcaaactccaagtggacatgcaactggagcctcagaaaatggctctccttttaccaggggcctttagataggcctctgagagagatctgactgycatttttcccagaatgccccctgtcagcatgaaggagttaagagtggtcattgtctgtatcctaatggcagttagatgtacctcttcgggtgaagcagggtgatggcagcggtggcttgtcttgagcagctgctgcaaaaagac

SEQ ID NO: 452425 - DNA, 504 bp, Homo sapiens
attttctgatttttttttcttgggtggattccaaagatttaggatagcttttttttttttcagaaacacatatagcacagtgtaaaaataatttgcattgctatgactatctcataggatatctctctttcaaggtgcycagcaaaatttttggcatgaatcaaatttatttggggcctcagttacagagtagacacagtatgtaagcaaaaatgtaaatgcattttttgctttcataatacagaaagagctcataaagctctgttggataaacaagtgagtgactcgatatttaagcaattaatcaatatttaagaattatgtatatatatttatttatatccaagcttcaagattggaaatttaattctttgtatatagaaaataattgacgtaagattttttccctgacacacaaactctaagatttatgcaagagttctgaagtgtactttttatcaaataaaatggaagagttagaagagttttaaaagttagttaact

SEQ ID NO: 452426 - DNA, 556 bp, Homo sapiens
gaaatgtgtgtgtgtgtggattcaccctagatgccaggaacttataatgtgtttataaccaagtttacttggtcccaaagactgggggttttatattagccgaatgggtcacaagctctactttcatggaaggttacattgctccagcaaacaccttgacttcagaacacaccttccctacttctactcctgcctcttttccatcctgacttgtgaaygttgatgactccagaggaagctgactgcttcacacacatcaggaaaaatgtgctagctgcctttagcccgaattaacattatgcttctgatgtaagcctaagaaaagagaatctattttgactttcttctgtaagcaaaaagtgatcatttgctgatggctccttgtgcaattcaaaaagaaaattattagatgtatgtaggcaagtactgacttgcaatgacagtttttgcgaagatgtagaatgtatcaagaatatattgctaggaattttctgtttgttttcattatctaatgtgcactaggtttgagggaggtgagtgtgtgtatatatgtgtt

SEQ ID NO: 452427 - DNA, 630 bp, Homo sapiens
aataaacttcttttcacttgatctacagatttttctgttttttctttaagagggtttatggtagacacatcccttaacaatatcttcaacaggtttcataatattctgagcacactggaattaaaacacatacatatctgttcaggcttacaaagttcaatttatatcctctcgaaagcactcgcccaatcttacttcaccctcgatgggtggctcaaggaacttggaatggggaggtagcgtggtcttctctttaaatgggagtgggacaggaggtggaggggatatttggtttgagatgaccctacttcctttggagacctaacacttccagrgaaaagggatcttcttgggtaactggttacttaattgtcagcagtgtggagggctgctttttcatttggctgctctggctggttccatatgttcttaggtcatagtgagcatcatgctggcctctccatcactgatggctcactcctttttttttttttttttgagatgaagtgttgccctgtcgcccaggctgaagtgcagtggcatgatcttggctaactgcaacctccccctcccaggatcaagtgattcttctccttcagtctcctaagtagctgggattacaggcacccg

SEQ ID NO: 452428 - DNA, 527 bp, Homo sapiens
ggaggttgcactatgattaagacatattttctgctatccatagggtaggaaagacattcatctatagggcataaatacagcatatggtacagataacaacatatgagtcttggtgcaagacagtctgactcctacatcagaagsgaaaaggccagacactcattttcccagcctcccttgaaactatcaagtggcatattgacctagaccccagtggtcagattcaaccatcctagacttttcaactcttggttcagacaactagggacaaccaaggattctttctgagagagaagaaggtgaaggcatgatgcacgtacccactgtagtaatgacaatgatgttaatgacagcaatcagggctaggggttaggttgatggtataagtgatgtcatcaagtctcctaaatgaagcagttctgtggcttgaaatgaggcacatagattacagaggcacatgtcatcacatatcttggtacatacattaaactgggatgtaatggtacattccaaagatttgaagaact

SEQ ID NO: 452429 - DNA, 527 bp, Homo sapiens
ggaggttgcactatgattaagacatattttctgctatccatagggtaggaaagacattcatctatagggcataaatacagcatatggtacagataacaacatatgagtcttggtgcaagacagtctgactcctacatcagaagcgaaaaggccagacactcattttcccagcctcccttgaaactatcaagtggcatattgacctagaccccagtggtcagattcaaccatcmtagacttttcaactcttggttcagacaactagggacaaccaaggattctttctgagagagaagaaggtgaaggcatgatgcacgtacccactgtagtaatgacaatgatgttaatgacagcaatcagggctaggggttaggttgatggtataagtgatgtcatcaagtctcctaaatgaagcagttctgtggcttgaaatgaggcacatagattacagaggcacatgtcatcacatatcttggtacatacattaaactgggatgtaatggtacattccaaagatttgaagaact

SEQ ID NO: 452430 - DNA, 605 bp, Homo sapiens
gatgtaatggtacattccaaagatttgaagaactgccctaaatcccttttttaagtgacatttaaaatcagctttattgagatataattggcatataatacaccacacatacttaaagtgtacaatgggacagtttgacatacatatgtacacctgtgaaatgatcattacaattaagataaagacagacctgtaaaagtttcttcagacctttgatcttctagcagatcagctgcattttctagaactttatataaattaaatcatacagtgcaatggacagagygaatgtctgtgtcccttccagatgcatttgttgagatcttaacccctaacaagatgctattaggacgtggggcttttggaaggtgagtaatcttgagggtggtcgcatgttctcactcataggtgggaatcgaacaatgagaacacttggacacagggcggggaacatcacacaccggggcttgttgtggggtggggtgctagaggagggagagcattaggaggaatacctgatgtaaatgacgagttgatgggtgcagcaaaccaacatggcacatgtatacctatgtaacttataagtgggagctaagcattgggta

SEQ ID NO: 452431 - DNA, 605 bp, Homo sapiens
gatgtaatggtacattccaaagatttgaagaactgccctaaatcccttttttaagtgacatttaaaatcagctttattgagatataattggcatataatacaccacacatacttaaagtgtacaatgggacagtttgacatacatatgtacacctgtgaaatgatcattacaattaagataaagacagacctgtaaaagtttcttcagacctttgatcttctagcagatcagctgcattttctagaactttatataaattaaatcatacagtgcaatggacagagtgaatgtctgtgtcccttccagatgcatttgttgagatcttaacccctaacaagatgctattaggacgtggggcttttggaaggtgagtaatcttgagggtggtcgcatgttctcactcataggtgggaatcgaacaatgagaacacttggacacagggcggggaacatcacacacyggggcttgttgtggggtggggtgctagaggagggagagcattaggaggaatacctgatgtaaatgacgagttgatgggtgcagcaaaccaacatggcacatgtatacctatgtaacttataagtgggagctaagcattgggta

SEQ ID NO: 452432 - DNA, 603 bp, Homo sapiens
gctttctgttcctgcattaatttgcttaggataacggcctccagctgcatccatattgctacaaaggatattatttcattctttttatggctgtgtagtattccatggtatatatgtaccacattttctttagccaatccatcactaatgggcacctaagttcatttcaggtctttgctactgtgactagtgctgcaatgaacatgtgagtgcatgtgtctttttgatagaatgatttgttttcttttagctgtatgtccagtaatgggattgctgggtcgaattgtagttctgttttaagttctttgagcaatctccaaactgctttccacagtaactgaactagcttacattcccaccaacagtacataaacataatgttgaacatctttttatgtgtttatttgggtatatgtatcttcttttgtaaaatgtctgtccacattgttttgcccytttcaattgggttgtttattttcttattatacagttttgaacactttttatatatacacatgccctttatcagacatggattttgcaaagatattctctgagtccatggtttgtgtttttattctcttaatagtatttttctaacag

SEQ ID NO: 452433 - DNA, 614 bp, Homo sapiens
tatgtcccaaggatttactaaaatcgcttactagtttagtagctttttacaacattccattggattttctacatagaygatagtgacatctgtgaataaagagcattttacccctttctttacaatctggatactgtttatttctttttcttgtctcatttcattgtctagaagctccagtaaaatgttgattaaaagtgatgagagacaaagtgatgagcagtaagacatctttgttttattcctaatcatagggtgtgatggctagttttatgtgtcaacttggctgggctatggtatccagttagtcaatcaaagactaatgtaggtgttgctgtgaaggtattttatagatgtagttaacatctgcaagcagttgactttaagtaaaggagattatctttgataatatgagtgagactaatgcaatccaagttgaaaggtcttaaagagaaagactgaagtttcccgaacaaagaagaaattctgcctcaagaatgtagtagcatcagcttctgcttaagagtttccagtctgctggcctgccctattcaaacttgccagtccccacaatcacataagccaattccttgaaataaatccctgtagatata

SEQ ID NO: 452434 - DNA, 487 bp, Homo sapiens
attacaatattttagaataatatcaatactcctttcaaacaacaagcctattgagtcaagytgaattccttgcacttctcttatgtccttaacctatatcccattaagggcagacagtcagaggaatatgctcaaaactcacgtagattcattccttttttttccttctgtgtggttatgttaacaatttcatacacaaatgaatttgtttccatttgtattaacatttagctcctcctcatcctttctaattttaagtttgaaaaacataaacatgatttaaaagtcaaaactatatactgatagaaatcttacttcctctctttcccttccactatgttcccacccacctcttgaaactagccaattggattcacttcttgcttaggcttcctgcatttcttttggggaaaaagatcttatttctctttctgtcttacacacaaataactatatatatatatatcactatatatttttttcctgt

SEQ ID NO: 452435 - DNA, 487 bp, Homo sapiens
attacaatattttagaataatatcaatactcctttcaaacaacaagcctattgagtcaagctgaattccttgcacttctcttatgtccttaacctatatcccattaagggcagacagtcagaggaatatgctcaaaactcacgtagattcattccttttttttccttytgtgtggttatgttaacaatttcatacacaaatgaatttgtttccatttgtattaacatttagctcctcctcatcctttctaattttaagtttgaaaaacataaacatgatttaaaagtcaaaactatatactgatagaaatcttacttcctctctttcccttccactatgttcccacccacctcttgaaactagccaattggattcacttcttgcttaggcttcctgcatttcttttggggaaaaagatcttatttctctttctgtcttacacacaaataactatatatatatatatcactatatatttttttcctgt

SEQ ID NO: 452436 - DNA, 487 bp, Homo sapiens
attacaatattttagaataatatcaatactcctttcaaacaacaagcctattgagtcaagctgaattccttgcacttctcttatgtccttaacctatatcccattaagggcagacagtcagaggaatatgctcaaaactcacgtagattcattccttttttttccttctgtgtggttatgttaacaatttcatacacaaatgaatttgtttccatttgtattaacatttagctcctcctcatcctttctaattttaagtttgaaaaacataaacatgatttaaaagtcawaactatatactgatagaaatcttacttcctctctttcccttccactatgttcccacccacctcttgaaactagccaattggattcacttcttgcttaggcttcctgcatttcttttggggaaaaagatcttatttctctttctgtcttacacacaaataactatatatatatatatcactatatatttttttcctgt

SEQ ID NO: 452437 - DNA, 569 bp, Homo sapiens
gttgtcaaatttttaacattttgcctatcagattcataagaatttatatctccgtgcaattttaactgagatttttcttatagtaagtgaaattaaatgtcttttaatatataagggtcaactgtatacatacttatatacattgtgtatatgtatatacacttgcattttgtgtgtgtgaattctctatctcttttgcccattttcctgtcaggttttttttttcctcttatagtttttgagtttttgaaaatatataagggatattaactctttctctgtgatatatgttgcaactcttttattccagtttaacaattgkgtttttacttatattcttttttgacaatttttaaaaaattcaatgttttctttgctacatctggattttgagtcataattggaaaacttctccccatatccaacttatataatgaaattcacctgtgttttattccagtacatgtatggttttatgttttacatttaaatttctcacccatttggagtttatttttgtgtatggtgtgagggaaaagaagattttaaattaattttgagctggctgg

SEQ ID NO: 452438 - DNA, 596 bp, Homo sapiens
tgacttaggccaaaggattaaaaagtgaactgtttggtaactccacacagcggaaaatgctgacaaatggtatctctgcacgggagatattaacactctgactgcgagggtgcaaagttgaacagatggcacttctaaatgcaagactcatataatctatttccactagtgttttttgtaaacttttattttaaatttggtgctaagaacaacaaaaaaaaagtgtgttaatggcaccatccagggacaaacttgcagcagcttctctttaagagctcaattcatgcacctctaatttagtctgtgattctcatcctcttcctgttcttaagttttcctgggaaccagcaaaggtgagactttgagggaactaggctgtctggccagataataactatactaacggttgtactaaaacaggacctctgagtcactttacgtcaaaataaaaacccgaatcattctcactctggcctgtctgcgttaytgtgtctgcatatccgcgctgagcattttattgagctgcaactatgggcaaaaggtgtgcaaaaatcttaccatggattgtttattttttttaaagataatgggttgac

SEQ ID NO: 452439 - DNA, 458 bp, Homo sapiens
ggagctgcatttttatgttgacaaatgtacatgtctaatcttctcaaccaaaccttaagagccctcagagcagaggctacatactgccttgcatccccacttcaccagttacaaagactgtattaagcactcactaaatgtgtgtcaactgagctctctagccaagtttaaaatgasagtggaaagatcacagtcagataatatacaaatataaaaactgtttaggaaagtgagtgttgaagaaaatcactttgttaaaaaaaaaagcctcatactcagtaagctctgggtctcttcctgttggtacacttgagtgtcagctacaagaacatcatcatttctacagaagaactgggtgaccccataggagttcggatgcacacatcaccatcactactctgccccgtgctggccacagacaagcatggcatcattctaaccctcaggtgcaaggcaca

SEQ ID NO: 452440 - DNA, 598 bp, Homo sapiens
cccacttaactccattttgttagggttttgacataagtgacttcattttggtactggcaactttcacaatattattagtatgagagaaaaaatgtatgctcccaagccttggtaattatttttaattcatttgatcttgtttaatgcaacatttctatccaagaaagatggcagaggggagtgattgcgagcatgcacttaacagctaacaccaacatctctgtctctcagcttcctcttctgggaaatggggaaaatacaagctacctcayagtgttgtgttatactatgtgtacacacacacacacacccacacacacattctatccctattctgaaaattcaaaatttgaaatgctccaaacccaaaaccttttgagcaccaacataatgctcaaaggaaatgctcactggagcattttggatttcagattagggatgctcagccagtaagtgtaatgcaaatattcccaaatctaaaccaatccaaaatctgaaatacttcagggtccaaacattttggataagggacactcaacttgtgtatctgtctaattgtaatagatagagtagctatagatatatagatataggtatt

SEQ ID NO: 452441 - DNA, 598 bp, Homo sapiens
cccacttaactccattttgttagggttttgacataagtgacttcattttggtactggcaactttcacaatattattagtatgagagaaaaaatgtatgctcccaagccttggtaattatttttaattcatttgatcttgtttaatgcaacatttctatccaagaaagatggcagaggggagtgattgcgagcatgcacttaacagctaacaccaacatctctgtctctcagcttcctcttctgggaaatggggaaaatacaagctacctcacagtgttgtgttatactatgtgtacacacacacacacacccacacacacatwctatccctattctgaaaattcaaaatttgaaatgctccaaacccaaaaccttttgagcaccaacataatgctcaaaggaaatgctcactggagcattttggatttcagattagggatgctcagccagtaagtgtaatgcaaatattcccaaatctaaaccaatccaaaatctgaaatacttcagggtccaaacattttggataagggacactcaacttgtgtatctgtctaattgtaatagatagagtagctatagatatatagatataggtatt

SEQ ID NO: 452442 - DNA, 591 bp, Homo sapiens
gattcaatgaacatgatattctcaaactagcaaacactgtgttctccactaaaattccctcaaagtaaaacatatgcagggtgagatgaattaatggctgacagtattaactattaaattcctagattcaaacaatacaattgcctaatttttacctaacaaaagtaggcaattgttgttttgcactcaaaaactcagaagaaagaaaacaagacttcctttagcactgtagttttcaaccaggggcaattttatccaccaggggacatttggtaataggtaatatctggagacaattttggttgtcatgcttgagggattgctactggcatctagtgggtagaggccagggaagatgctaaacattctactatrcacacaacagcccccacaacaaagaattatccccccctttatgtcaatattgctgaggttgagaaccctgccttagcactaaatgcctgaggtgctttcagtcattcttcacttaacaagcaacatttactaaagcttactgtgtgtctgatgtggcccaggtactgtgagttcagagtcctgctcttgagaaactcacagtctccaaggagaagc

SEQ ID NO: 452443 - DNA, 587 bp, Homo sapiens
cattgattataaaaccaatggagtataattgtttatgtccttcctgtacagtctgttatcagaatttaccatctgtcaatctatgttttgtaaagaagctttccctactgtaaggaaagcgctatcaaagctttcttatattagggaaagctaacattttggggatcatgactttttaaaaaaaaaaacatattcatgggtgcagcacaccagcatggcacatgtatacatatgtaactaacctgcacattgtgcacatgtaccctaaaacttaaagtataataataaaataaaaagaaaaaaaagaaaatgcaagaaaaacacacaaaaaacatattcaatatttaaaagataaattaattaggaatataagtgagtattcaaagttgcaaatgatgcctggaattgagtagtattcaatgccaagaacaaggtggtygagaaccataatctgtgtttatttatgttgttagcatcagttatagaagttttataacaaatgcattttttaaaattatggtgaactaactttgttaattaaaatcctcgtcattaaaacaaattttaccttagaaaatggccttagg

SEQ ID NO: 452444 - DNA, 468 bp, Homo sapiens
cttttgactgatcttggcaaataataaccagccttcttaatttactatttgaatcctctgtgtgttccttgtactggtaaacacacacacacgcgcacacacacacacacacacatacactagataccgatgaaaattcagataaaacaacacaatggagctagtcaccttttgctgtgcatttcaaaatgcatgtttcagaatgcacagtgaaaggattcatagcctggcattgtactgtagggtcttcacacgtagatttttcagtatttacacaataatagtattaagcacccatgtggaagatcaaactaagatttattacaaaatgagaaataatccatgacataaggttaaaaaatgtaaaggaaaattggtttaatagttcctaagstaaattgtgtcactcctactcaatgttgattacatttaacaaatcatagagatcggggagaaaacttaactaga

SEQ ID NO: 452445 - DNA, 579 bp, Homo sapiens
gtgtggtctccaacaaatgatcctttaaaatcatccaaagatgaggcacagatgaatagtccccaagaagcagatcctccttcactaaggaacaaccctacaggtatcaatagtatgaacgtattagcacaagagagaactactgatatgtctacaactccaactctactctgaagaacattttatgagagctgcaacataccttgtgtgccccacaggaaagtcaagcaaagtctcttgagaaaatgggactctcagaagsaaaaatgagcaggaaactaacacttctgagggcctacatagtgctgggcaccactctaattaccttactaataatagtaatatttttctttccttctttccttttttccttctttcattcagtttctttccattgtctcataatagtctacatacattatgtcatttctgtgaaggatgaatttggagattaatggttacaacaaggagactaccagtgctagaatcagataaaacctgtttcttcaaactcccagatatatgtgctttataaaaagttctactatttttcagatagcagagcatttaaagatacac

SEQ ID NO: 452446 - DNA, 484 bp, Homo sapiens
acagggtgatattttgatacatgtatacaatatataatgttcaaatcagggtaattagcaaatccatcacctcaaacagtaatcgtttctttgttktgggaacattcaaaatcctctcttctagctttttgaaaatacacaataaattatagttaaccatattcaccctacagtgcactagagcactagaacttattcctcctatctagctataattttatatctgttacccaacatctctctatcctcccttccgcatcccacccttcccagcctctaataatcacaattctactctgtacatctagaaacccaacgttttttagctcccacatatgaatggtgacatgcggtatttatctttctgtgcatttcactcaacgtattatccaccatgctcagccatgttgctgcaaatgacaggattttatgtttatggctgcaaacttcagaaggatttccctcccagctccacttgtgggct

SEQ ID NO: 452447 - DNA, 551 bp, Homo sapiens
caaatatgtatagcaaagacattgcataacacagcttcatgaatatgccacaaataaaacaattaagccacataaayactttacttatattttacaatacaccctgacatttacaatacaccctgacattatggagagacaaagacacaaatattttattgacagggtttcacagatcattgataaacttacactcctttctcatcccatgacatcaggtttaaattcaactcactaaacagtcatggtaaatttcaagttaaagagtagagtttctagaagtgacatggggtagaggggaaagctctccttattactcactaataatacaaggtattttgtccatataccaatgctgacttgctgatccattaatctgtaaaaatttcttgatttctagagactcactgaaacccaaggatctggattagaaaacacatacagcattcttaaaagttaaaagaagttgagtagctatttgtttatagactaactcatccatctagagattgatctcttccaaattctctgtaattctgttactgtgttat

SEQ ID NO: 452448 - DNA, 511 bp, Homo sapiens
ttttacagtccaacagaaacactttcttgctgggtcctggggcactatacgaagtttaaaagaagggtaaggattttgagttctaaacaactttataaatgtccttcaggattaccccctgccccaagggcatttcttccacwgtagaaataaaaccaaattacttttttcccccttttgtttgtttttgtaaaggcaattattcttattattaaagaacatggtagccttgtattgtctttggaagaaatgcttgctgagcatttatgtggccatcattttgctaggcttttacatgaatcttaaattattcatctgtcatatgaagtcccactgaacagatgactgactgaggctgaggttaagcaacttgccttaattcattactaagtgatggtaaggctattggaatatatgccttttgaactccaaagccagtgctccttcactatattatactgcagctttggttgctattactactgaaaattttgaataatatagaaataag

SEQ ID NO: 452449 - DNA, 511 bp, Homo sapiens
ttttacagtccaacagaaacactttcttgctgggtcctggggcactatacgaagtttaaaagaagggtaaggattttgagttctaaacaactttataaatgtccttcaggattaccccctgccccaagggcatttcttccacagtagaaataaaaccaaattacttttttcccccttttgtttgtttttgtaaaggcaattattcttattattaaagaacatggtagccttgtattgtctttggaagaaatgcttgctgagcatttatgtggccatcattttgctaggcttttacatgaatcttaaattattcatctgtcatatgaagtcccactgaacagatgactractgaggctgaggttaagcaacttgccttaattcattactaagtgatggtaaggctattggaatatatgccttttgaactccaaagccagtgctccttcactatattatactgcagctttggttgctattactactgaaaattttgaataatatagaaataag

SEQ ID NO: 452450 - DNA, 537 bp, Homo sapiens
tatacgctctttttgatattgccaagggagtttctgaggctgtattccaataaaacagctgtttaagatgagagctctctaaatagtattctttcatatatagtcagcttatttgtttcataartgattcaagccaatgagcctgttttcatacaaagtcccagaggtaacttttaagattttgaataccatggacatgagtggatttttaaaagtgggtgcagaagatgtagcccccccaaaaaattttctcaaaaattcactccaagaaataagctaagatagtgaaacactcttgttgccacagatggttaaggatagtgtttgcacatatggtgtcttcagtattccatgaatttatggagggttggcagtcatagaaccattaaatctgacacccagtaggccctcctaggattgaactttcccaggattagccaggcaacaagggttgagacaacagaaacctttcatggatgggatttcttataaagacaaactcctgtgagaacttagcccattcagaagacagaaggt

SEQ ID NO: 452451 - DNA, 537 bp, Homo sapiens
tatacgctctttttgatattgccaagggagtttctgaggctgtattccaataaaacagctgtttaagatgagagctctctaaatagtattctttcatatatagtcagcttatttgtttcataaatgattcaagccaatgagcctgttttcatacaaagtcccagaggtaacttttaagattttgaataccatggacatgagtggatttttaaaagtgggtgcagaagatgtagcccccccaaaaarttttctcaaaaattcactccaagaaataagctaagatagtgaaacactcttgttgccacagatggttaaggatagtgtttgcacatatggtgtcttcagtattccatgaatttatggagggttggcagtcatagaaccattaaatctgacacccagtaggccctcctaggattgaactttcccaggattagccaggcaacaagggttgagacaacagaaacctttcatggatgggatttcttataaagacaaactcctgtgagaacttagcccattcagaagacagaaggt

SEQ ID NO: 452452 - DNA, 271 bp, Homo sapiens
ttacaaaaactgtgtttccaagctcctgaatgaaaagtaagttttaactctgcgagatgaatgcacacatcawaaagccatttttcagataccttccttctagtttttatcctgggatatttgcttttgtaccattggcctcaatgagcacccaaatgtccattcacagaatggacagaaacagtttttttattctgttgaatcaaaagaaagttttaattctgaatttattttgtttttcatcatagaccacaatgtgctcccaatgtcc

SEQ ID NO: 452453 - DNA, 521 bp, Homo sapiens
gtgtgcattcatctcacagagttaaaacattctattgattcagaaatttggaaatactgttttttgtgcattctgagaatggacattagggagctcattaagaccgttggtgaaaaagtcaatatcccgtgataaaaactagaagtaagctatctgagaaactgctttgggatgcatgagtttatatcacagagttaaacctttcttatcattcagcagtttggaaagactgtttttgtagaatctgtgtagttatatttgggagcacattgaggcctatggtgaaaaagaatatatcttcagatgaaaactgaaaagaagctttctgaaaaactgcattttgatgtgtgcattcatctcacagatttaaacctttcttctgtttcagcagttttgaaaacmctgtttttgtccattctgtgaatggagatttgggagctctttgaggccaatggcaaaaaatggaaaatcccagtataaaaattagaaggaagatatctgagaaacctctttctgatgtg

SEQ ID NO: 452454 - DNA, 591 bp, Homo sapiens
taaacctttcttttccttcagcagttatgaaacagttttagtccattctatgaatggactttagggagctcattgacgccattggtgaaacagtgaatatcccagcagaaaaacaaaaggaagctatcttagaaacygctttgtgatgtgtgaattcatctcacagagttaaacctttcttttcattcagcagtttggaaactatattttgtacaatctgtgaatttgggagaccattgagacctctggtgaaaaagaaagtgtcttcagacaaaaaggagaaagaagatttctgagaaactgctttgaatgtgtgcattcatatcacagagtttaacatttcttttggtttagcagtttcaaaacactgtttttgtccattctgcgaatggacatttgggagctcattgaggccaatggcaaaaaagtgaatatcccaggataaaaactggaaggaagcactctgagaaactgctttgtgatgcatacattcatcttgcatagttaaacctttgttttcattcatcagtttggaaacactgtttttgtagaatctgcaaagtgatatttgggagcaaattgaaacctatc

SEQ ID NO: 452455 - DNA, 591 bp, Homo sapiens
taaacctttcttttccttcagcagttatgaaacagttttagtccattctatgaatggactttagggagctcattgacgccattggtgaaacagtgaatatcccagcagaaaaacaaaaggaagctatcttagaaaccgctttgtgatgtgtgaattcatctcacagagttaaacctttcttttcattcagcagtttggaaactatattttgtacaatctgtgaatttgggagaccattgagacctctggtgaaaaagaaagtgtcttcagacaaaaaggagaaagaagatttctgagaaactgctttgaatgtgtgcattcatatcacagagtttaacatttcttttggtttagcagtttcaaaacactgtttttgtccattctgcgaatggacatttgggagctcattgaggccaatggcaaaaaagtgaatatcccaggayaaaaactggaaggaagcactctgagaaactgctttgtgatgcatacattcatcttgcatagttaaacctttgttttcattcatcagtttggaaacactgtttttgtagaatctgcaaagtgatatttgggagcaaattgaaacctatc

SEQ ID NO: 452456 - DNA, 512 bp, Homo sapiens
gcctgttgtggcctcgggggaggggtgagggatagcattagtagatatacctaatgttatatgaagagttaatgggtgcagcacaccaacatggcacatgtatacatatgtaacaaaccttcacattgtgcacatgttccctaaaacttaaactataataataaaaaaaaagaaaatacctcccattgggttgcttaaagaaagagaatttgtaatatcaaagttctggaggctcaaagtccaagacttattgtcaggyttggtttctcctaaagtctgtctttggcttgcagacagctgccatagggttgcattcattcccacttggcatttcctctgtatgcatatccctgatgtctttctgtctgtccagatttcctcttcttataagaacccataagagaccattctaatggcttcgtatgtgcccatcctaagggcctcataacccaaccatatctttacaggacccagcttcaaacagtcatattcttgtgtactgtggtttaggg

SEQ ID NO: 452457 - DNA, 564 bp, Homo sapiens
agaatgcaatagactcagtacaactcactactatagtcttcattttatccccttgccctacttctctgctgacaactttgcttcctattttattgacaacaaaaaatcagataatgccttcttgtttttccccagctccaaaacaaatagcctatctggacctgtgcccaggtcttctgctccttcttctatcactataarttatcaccaatcctgccctcccactggttccagacagcccttccttccactggttcccagacagtgccaccttcttgaggacttggatcctataatgatccctcttcttatatcatcatcttcttcctctgtattggatcatgtttactaacaaacaaaacataaaaccaaaaatatttccttgaccccaggtcattgtccagttattgcattacttgcctgcttttcttgatagctgaaagacagcagaatatccaatataaaatatgccactttggcttaagaattattttgagctgaaggaaattcagaagcagatacaagaaaagtctctgcctcttctctgctgggactcacaaaaca

SEQ ID NO: 452458 - DNA, 526 bp, Homo sapiens
gcatatgttcattgcagcactatttagaatagcaaagacatggagtcagcctaaatacccatcaatggtaggctcgataaagaaaatgtggtatatatacaccgtatgtatatgtataatacaaaagaattaaatcacrttctttgcaggagcatggatggagctggaggccattatccttaacaaactaacacatgaacagaaaaccaaataccacactttctcacttataactgaaagctaaatgatgagaacacatggacatataggggggaacaacagacactggggcctaccagagggtgtgcggtgggaggagagagagggtcaggcaaaataacttagggatactaggcttaatacttgggtgatgaaataatctctacaacaaacccctgtgacataagtttacctatataacgaacctgcacatgtactcctgaacttaaaaaaaaaaaagagagaaaaggatggctggcaagatagccaaataggaacatctctggttggcagctcccagcgagat

SEQ ID NO: 452459 - DNA, 520 bp, Homo sapiens
ggacctccaagtgggtcattagaactaatggcagatggttagggtgccattttttctccagcccttggttcttgggtccatatagccttcctatttagacctctgacttagcgtatatatcgtgtcccaaagtataccaacccacccttgtccagcattgccatcaaggtgtcactccagcrgtgccatagaagtgccttccagcattatgggacaccagctgcctctgggtgttgtggtatgtgattcaatcagtagcccaattttgtaccatacttgtaatgaagtagttcctcttgttggatgttatgttacagattccatgtctgtggatcaacattttagtaggcaaatggtgcggacttaagtctgtggaaagaaaactcaaagccataagtattacccctactcgtaataaaagtatttctatccctgtgagggtgatctcctggttcttctagaaaggaacaacaccaatgtacttgaattgtcaacaagtgtccacttggtgtttgttgtt

SEQ ID NO: 452460 - DNA, 580 bp, Homo sapiens
agctggaggccattatccttaacaaactaacacatgaacagaaaaccaaataccacactttctcacttataactgaaagctaaatgatgagaacacatggacatataggggggaacaacagacactggggcctaccagagggtgtgcggtgggaggagagagagggtcaggcaaaataacttagggatactaggcttaatacttgggtgatgaaataatctctacaacaaacccctgtgacataagtttacctatataacgaacctgcacatgtactcctgaacttaaaaaaaaaaaagagagaaaaggatggctggcaagatagccaaataggaacatctctggttggcagctcccagcgagatcaatgcagaaggtgggtgatttctgcatttccaactgaggtacccagctcatctcactgggactggttagagagtgattgcagcccacggagggcaagctgaagcaggatggggcattgcctcaccctggaagtgcaaggggttgggaactccctcccctagccaagggaaactgtgygggattgtgccttgaggaatggtgcattctggcacac

SEQ ID NO: 452461 - DNA, 637 bp, Homo sapiens
agtatcatccattacgcatttcaccaattgtgccaaaaatgcccatttacagttagtttgttcaaatcaaaatccaaacaaggtccacacatcacttttggttactatgtctgtacatattatggtttgattatttggttattatatctataacagtcccctcttctttyttctggacatttatttatcagaaaaacactttattttatgttttataaccaggttgtcacaccattttccaattctaaaccaatatcataactatcataactcattcaacatttatttaactactgtataatgaacaattactatgtacaggacagtgtactactaggtgctgagtgtgattcaaagatgtctgtaaatcatggtccctacccccaagactttaccatctgaggaaaaggaaaaataaaaatgcacaaataaaatgacaacatgacagcagaacttaagtagtatagggactatcatttcaaaagcagaagtatggtttggaagatgaggggtggcctttttggaagagttagcatgtgagatggatgagttacagtgaccagcaattcaagaggaggttggattgggagaagggtaaaaagagaaagctcaatctgtgatagaaaaatgttcattc

SEQ ID NO: 452462 - DNA, 637 bp, Homo sapiens
agtatcatccattacgcatttcaccaattgtgccaaaaatgcccatttacagttagtttgttcaaatcaaaatccaaacaaggtccacacatcacttttggttactatgtctgtacatattatggtttgattatttggttattatatctataacagtcccctcttctttcttctggacatttatttatcagaaaaacactttattttatgttttataaccaggttgtcacaccattttccaattctaaascaatatcataactatcataactcattcaacatttatttaactactgtataatgaacaattactatgtacaggacagtgtactactaggtgctgagtgtgattcaaagatgtctgtaaatcatggtccctacccccaagactttaccatctgaggaaaaggaaaaataaaaatgcacaaataaaatgacaacatgacagcagaacttaagtagtatagggactatcatttcaaaagcagaagtatggtttggaagatgaggggtggcctttttggaagagttagcatgtgagatggatgagttacagtgaccagcaattcaagaggaggttggattgggagaagggtaaaaagagaaagctcaatctgtgatagaaaaatgttcattc

SEQ ID NO: 452463 - DNA, 590 bp, Homo sapiens
cttaaatacctggaagataggtcattcacttttttatttgccattatatcacctattacctttgtcttatacctgataatttgacatatttaaatcatttacttgaatgcactgaaatacataactcttcacttaatgtactaagaataatttttaggccaggcrctgtggctcacacctataatcccagcacttttggagtccaaggcaggcggattgcttgagcccaggagttcaagacaagcctgggcaacaagctgaaactctgtttctatattaaaaaaaaaaaaaaaaaggttagccgggcatggtggagtgtgcctgtggtcccagctactggggaggctgaggtgggaggatggcttgagcctgggagcagaggttgcagtgagctgaaatcacaccaatgtactccagcctgggtgacagagtgagactccacatcaaaaaaaaaaaaaagaataataaattttaaataaaaattataagttgcatttaattccacaaagcaggcatgtcatgagcctatgtgcctacataaataatgccatcatgttccaacaaatatgttctaatccacttttggaact

SEQ ID NO: 452464 - DNA, 590 bp, Homo sapiens
cttaaatacctggaagataggtcattcacttttttatttgccattatatcacctattacctttgtcttatacctgataatttgacatatttaaatcatttacttgaatgcactgaaatacataactcttcacttaatgtactaagaataatttttaggccaggcgctgtggctcacacctataatcccagcacttttggagtccaaggcaggcggattgcttgagcccaggagttcaagacaagcytgggcaacaagctgaaactctgtttctatattaaaaaaaaaaaaaaaaaggttagccgggcatggtggagtgtgcctgtggtcccagctactggggaggctgaggtgggaggatggcttgagcctgggagcagaggttgcagtgagctgaaatcacaccaatgtactccagcctgggtgacagagtgagactccacatcaaaaaaaaaaaaaagaataataaattttaaataaaaattataagttgcatttaattccacaaagcaggcatgtcatgagcctatgtgcctacataaataatgccatcatgttccaacaaatatgttctaatccacttttggaact

SEQ ID NO: 452465 - DNA, 590 bp, Homo sapiens
cttaaatacctggaagataggtcattcacttttttatttgccattatatcacctattacctttgtcttatacctgataatttgacatatttaaatcatttacttgaatgcactgaaatacataactcttcacttaatgtactaagaataatttttaggccaggcgctgtggctcacacctataatcccagcacttttggagtccaaggcaggcggattgcttgagcccaggagttcaagacaagcctgggcaacaagctgaaactctgtttctatattaaaaaaaaaaaaaaaaaggttagccgggcatggtggagtgtgcctgtggtcccagctactggggaggctgaggtgggaggatggcttgagcctgggagcagaggttgcagtgagctgaaatcacaccaatgtactccagcctgggtgacagagtgagactccacatcaaaaaaaaaaaaaagaataataaattttaaataaaaattataagttgcatttaattccacaaagcaggcatgtcatgagcytatgtgcctacataaataatgccatcatgttccaacaaatatgttctaatccacttttggaact

SEQ ID NO: 452466 - DNA, 590 bp, Homo sapiens
cttaaatacctggaagataggtcattcacttttttatttgccattatatcacctattacctttgtcttatacctgataatttgacatatttaaatcatttacttgaatgcactgaaatacataactcttcacttaatgtactaagaataatttttaggccaggcgctgtggctcacacctataatcccagcacttttggagtccaaggcaggcggattgcttgagcccaggagttcaagacaagcctgggcaacaagctgaaactctgtttctatattaaaaaaaaaaaaaaaaaggttagccgggcatggtggagtgtgcctgtggtcccagctactggggaggctgaggtgggaggatggcttgagcctgggagcagaggttgcagtgagctgaaatcacaccaatgtactccagcctgggtgacagagtgagactccacatcaaaaaaaaaaaaaagaataataaattttaaataaaaattataagttgcatttaattccacaaagcaggcatgtcatgagcctatgtgcytacataaataatgccatcatgttccaacaaatatgttctaatccacttttggaact

SEQ ID NO: 452467 - DNA, 545 bp, Homo sapiens
acaatacatgtgagttcaatatcctaatgtctttgtttagataaggctagaatctaacttcacattgagaagaaagaatggatagtaataccatcatcatgaaaatgaaaagtatcctaaccttccccagtcatttgaagtcctctatcactacattatcatcatgagccttttccacagctattctaatatgttcagattgcccattcattcagaaaatatttattttgccctgtgtgtcaggtgctgtgctagattcctggaatttagagatgaacacacgttctgcctccaaggacagcaccatatgaagacagacaatcagagactttcaataatatgtggcaaagcaattatatagaaaagtcatagaaacagaaaacaaggcrgtcattctaaccatcctgactggggagggaaggagacagttttatctcaaagaagccaacgtgtggcctgagtaaaatataaatagaaattgatcaagtggtaatatttgtatatttttcctttttactggatctcaaattttataacacgtcaga

SEQ ID NO: 452468 - DNA, 510 bp, Homo sapiens
accttgtaacagtgccctgttccaccctgagaatatgcaaattagaaaaaccctgcatcttcagacctgtaattctccctccaagccccagttgctcaccagtgtcyagctacaggctcaatgactcatgcatgttcttttccatagcagggcctctgcactgctattctttctgcctgcattatgcagctccagcaatttgagtgactggttccttttcttccttcaggtgttgcttaaatgtcacttcctcagagatgccttatgtaatttgcctaacacttccctcaacctccccacctctcatccccattattttctctcctgctttccatttatttctggcataacaatgatttcagtttgtaacttaaatattatgtgtttcgttgattgctccaaactctctctaggcttcatgcaagcagattctttgtctgtcatgccttgttcactgatttttttaaaaaaatgttttttttttttctaatcaggtgtctagtgcagtgc

SEQ ID NO: 452469 - DNA, 647 bp, Homo sapiens
taatacaaataataagaatatgattgataaacatttattgagtgtttcctatgtgctagacattattctaagggctttaggtgctctaactggtttaatgctaaaacaaagcctakgacttagggacagagtgagcattccttatttgaaatgcatgggaatagagatgttttggatttcaattttttttagattttggaatatttgctataatagatacttgctacataatgagatatcctggggatggaacccaagtctaaacatgaaatttatttatgttttatgtacatcttatatacatagcctgaaagtaattttattttcctcttggggatgctgaataaactatgtgttttgcacctacattttgactgcaactagtcacatgaggtcaggtgtgaaattttcctcttgtggcattatatggtgctcaaaaagtttcagattttgtagaattttggactttggattaggtctgcttggcctgaattattatgatgttcattttacaaatgaaaaaacagaggcaaagtaagattacatatcttgtccacaatctcacagctagaaaattgtggaaccaggacttgaaaccaagccttctggctcacaatccttgtcattaataaccacagtcaatactt

SEQ ID NO: 452470 - DNA, 594 bp, Homo sapiens
aaaaaagaagatgaaaacatgaaacaaacacagatgtacgctcataggtatgatgtgatttttgtatgtattacttatacatatacatgcatctactttatatttactatatattttacatatttatatataatttaaacttattcactttatgtgcttattctatacatgttttacatgtgtatatagttacaaattatcacaagtgctatgaaggaaatgaasaggttatttgacagataacaaattattaatgatgggaactactagaagggcaacagtgagtccctggaaagagccaagttaggaatattacttgattcaaagaaaagtggcaaaggggacttgaactccctgtgcttcatagcctagctcccagaatccctggtctggaataaaggaaccacccagagctgtgtcctgtgtgggtgaccaaaatgcccatggatgtagccatgggcacagagtgagcacatcagtgtgctcattttgaaggaactaaacataccagcacagattggtaaaatctagaagacatttagtttacaagcctctgttgtgaacatgccgtgaggagatataaaagaaaaagta

SEQ ID NO: 452471 - DNA, 495 bp, Homo sapiens
ttaagtcacatcccaaatttaccacagccctgctctttctttttcagtaaacatcaggggcaagcagtaatcatcaaagcagggaaggggtcaaggtaaaactttccctttgccttctgaaagtttgctgaaaatcaattgacaaagagcagattaaaaggagaaaaggggccaggtgtggtggctgacaactataaccccagtgctttgggaagccaaggcaagagagggtcatgtgagccaagaaattcaagaacarcctgggtaacatagagagaccctcatctttacaaacaacagaaaaaactagcccagtgtggtggctcaggtctgtagtcccagtgactctggaggctgaggtgggaagatggcttgagaccaggagattgaggctgcagcgaggcatgattgtgtcgctgcactccagcctgggtgacagagcaagatcccaccaaaaaaaaaaaaaaaaaaaaaaagaggaaagagaagaaaaga

SEQ ID NO: 452472 - DNA, 605 bp, Homo sapiens
gcattaaagcctatggtcaaaaagtaaatatcttcagattaaaactagaaagaagctttctgagaaattgttttgtgatgtgcattcatcttgcagagttaaacttttctttttcatttagccatttggaaacactgtttttgtccattttgtaaaaggatatttgggagctcatcaaggccaatggtgaaaatgcgaatatcccaggataaaaactagaattaagctatctgagaaactgctttgtgatatgagcattcatctcacagagataaacctttcttttcattcagcagtttggaaacactgtttttgtagaatctgcaaagggatatatgggagcwcattgaggcctatggtgaaaaggaaaatatcttcacattaaaactagaaggaaggtttctgggaaactgctttgtgatgtctgcattcatctcacagagttaaacatttcttttgattcagcagtttgtaaacactgtttttgtctgttctgtgaatggacatttgggagctcattgagtccactggtgaaaaagcaaatatccagggatacaaactagaaggaagctacctgagaaactgctttgtgaggtgtgaattca

SEQ ID NO: 452473 - DNA, 545 bp, Homo sapiens
cctacaccatcactgacgccaagcttcaggtaactctcacagtggagggtaagtccgtacccttcttaatcaatacagaggctacccactccacattaccttcttttcaagggcctgtttcctttgcctccataactgttgtgggtattgatggccaggcttctaaacctcttaaaactccccaactctggtgccaacttagacaatactcttttaagcactcctttttagttatccccacctgcccagctcccttattaggtcaagacattttaactaaattgtctgcttccctgactattcstaggctatagccacacgtcattgccacctttccccccagttcaaagcctccttcacatcctttccttgtatttccccaccttaatccacaagtataggacacctctacttcctccttggcaacagatgatgcaccccttaccatcccattaaaacctaatcacccttaccccgctcaatgccaatatcccatcccacagcatgctttaaaaggattaaagcctgttgtcacttgcctgtta

SEQ ID NO: 452474 - DNA, 548 bp, Homo sapiens
ccaacttggactgcaccccacaaaacttgccatccctactattttctgtctagtcataytcctattcaccattctcaactattcataaatgccctgctcttgtttacactgctggattacactgcttctccaagccatagcttagtaccataccatagctgatatctcctggtgctatccccaaaccgccactcttaactcttaaagtaaataaataatctttgctggcaggatatgctgaacctctttgggcactctctaattggatgtcctgggtcctcccaattcttagtcctttaatacatatttttctccttgtcttattctgtttagttttttaattcatacaaaaccatatccaggccatcaccaataattctaaatgacaaatgtttcttctaacaaccccacaatatcaccccttaccacaaaatcttccttcaccttaatctctcccactctaggttcccacactgccccaatcccactcaaagcagccctgagaaacatcacctattatctctccataccatctgcaaaaattttca

SEQ ID NO: 452475 - DNA, 548 bp, Homo sapiens
ccaacttggactgcaccccacaaaacttgccatccctactattttctgtctagtcatactcctattcaccattctcaactattcataaatgccctgctcttgtttacactgctggattacactgcttctccaagccatagcttagtaccataccatagctgatatctcctggtgctatccccaaaccgccactcttaactcttaaagtaaataaataatctttgctggcaggatatgctgaacctctttgggcactctctaattggatgtcctgggtcctcccaattcttagtcctttaatacatatttttctccttgtcttattctgtttagttttttaattcatayaaaaccatatccaggccatcaccaataattctaaatgacaaatgtttcttctaacaaccccacaatatcaccccttaccacaaaatcttccttcaccttaatctctcccactctaggttcccacactgccccaatcccactcaaagcagccctgagaaacatcacctattatctctccataccatctgcaaaaattttca

SEQ ID NO: 452476 - DNA, 584 bp, Homo sapiens
catgtacataaacgactcacacattagattgctacttctaatgaaggcttaaaatgctaagatttacaagttacaacagaagtagtagaggagataaaacttaaatttaaggtttcattgtagatattctccaggcatacttacttatcctatccttttgctcacaaactcttagtcttacctctgtaagagtatttactttagccttttctttgcaaatggctccatatgtgtctctttctataaaactatgatgcttttcataaggtgattgggtacttttttcactaggctttgtataccagtatatgcaatagcccaggtgaatgtaaagctctcaagaacagattggtaaatgactatatgaaagaattagtgaatattagagaagtgcaagatatctaacaaatgtcctgtcccaattgcttgattttatacagggtttacatgtcattgattgttttgagttgtatttaactacactgtctttgaaaaagtgtcataagtaacccacttatgcattayttataaaatatttttcccaaagagatgcaaaacgcagtttccatctagatatgaataca

SEQ ID NO: 452477 - DNA, 594 bp, Homo sapiens
cagccaattcctgccattttctccatcagaaagatatcataggggccttcttcagtattaaatcccaacaaccaagtatttccagaatggtccttagcatgttaataggtattattaagttataagagtggattccgtgactatagtagtggatttaaaatgtgttcacaaattatttggtacttctcaacgtgtgagacctaagtcccctcctcttgaataarggttgtagctacttgttttgaacaatgtttagcttttaaaaacactgtcttagaaggcattgggaaaattaaggaagagggacattgtggtttccttcttgttctctctcttggattgcttgctctagggagagacaactactgtgtcatgagaatacttgagtaacactaagcagaggtccacatggtgaggaactaagacctgcagccaacaagtgtgtgcgccatcctggtagcagaccctataggaccagttaagcttttaggtgactacagcctcagccattgtcttagttgcaaagccataagagattctgacccacaaacacccagataaaaggctcccaaattccttatcccaaaaaaagtg

SEQ ID NO: 452478 - DNA, 595 bp, Homo sapiens
aagtctctctgcaaaggaaagcccaggacccaatagcttcactgctgaattttaccaaattcagttgttgttaaaraacaactaatatcaatcctgcttacactattaagaaaaatagagaagagaatacttccaaactcactctatgaggctactactattatcctgatatcaaaaccagacaaagacacatcaaaaaaagaaaactacaggccaataatcttgatgaacattgacacaaaaattttcaacaaaatactagcaaggagtgttttactaaataacagaaaggaaaggcaatgaaagcttccagaagtgtcctaccattcacaatggagatattcagggaaaatattattgctgttttacagccttctgtctgacatggcaggagagacactctctatatatattctatctgtatttctggacactttatttcgctttcttcattattgtttttatttactagaaaaattggatgggaactttatgctattatactgtgattaatgtaagataatatctgtgaagagcattactaaactacaaaatactataaaaaagtataagcatatataatgcaatattatta

SEQ ID NO: 452479 - DNA, 595 bp, Homo sapiens
aagtctctctgcaaaggaaagcccaggacccaatagcttcactgctgaattttaccaaattcagttgttgttaaagaacaactaatatcaatcctgcttacactattaagaaaaatagagaagagaatacttccaaactcrctctatgaggctactactattatcctgatatcaaaaccagacaaagacacatcaaaaaaagaaaactacaggccaataatcttgatgaacattgacacaaaaattttcaacaaaatactagcaaggagtgttttactaaataacagaaaggaaaggcaatgaaagcttccagaagtgtcctaccattcacaatggagatattcagggaaaatattattgctgttttacagccttctgtctgacatggcaggagagacactctctatatatattctatctgtatttctggacactttatttcgctttcttcattattgtttttatttactagaaaaattggatgggaactttatgctattatactgtgattaatgtaagataatatctgtgaagagcattactaaactacaaaatactataaaaaagtataagcatatataatgcaatattatta

SEQ ID NO: 452480 - DNA, 595 bp, Homo sapiens
aagtctctctgcaaaggaaagcccaggacccaatagcttcactgctgaattttaccaaattcagttgttgttaaagaacaactaatatcaatcctgcttacactattaagaaaaatagagaagagaatacttccaaactcactctatgaggctactastattatcctgatatcaaaaccagacaaagacacatcaaaaaaagaaaactacaggccaataatcttgatgaacattgacacaaaaattttcaacaaaatactagcaaggagtgttttactaaataacagaaaggaaaggcaatgaaagcttccagaagtgtcctaccattcacaatggagatattcagggaaaatattattgctgttttacagccttctgtctgacatggcaggagagacactctctatatatattctatctgtatttctggacactttatttcgctttcttcattattgtttttatttactagaaaaattggatgggaactttatgctattatactgtgattaatgtaagataatatctgtgaagagcattactaaactacaaaatactataaaaaagtataagcatatataatgcaatattatta

SEQ ID NO: 452481 - DNA, 578 bp, Homo sapiens
aaagcccaggacccaatagcttcactgctgaattttaccaaattcagttgttgttaaagaacaactaatatcaatcctgcttacactattaagaaaaatagagaagagaatacttccaaactcactctatgaggctactactattatcctgatatcaaaaccagacaaagacacatcaaaaaaagaaaactacaggccaataatcttgatgaacattgacacaaaaattttcaacaaaatactagcaaggagtgttttaytaaataacagaaaggaaaggcaatgaaagcttccagaagtgtcctaccattcacaatggagatattcagggaaaatattattgctgttttacagccttctgtctgacatggcaggagagacactctctatatatattctatctgtatttctggacactttatttcgctttcttcattattgtttttatttactagaaaaattggatgggaactttatgctattatactgtgattaatgtaagataatatctgtgaagagcattactaaactacaaaatactataaaaaagtataagcatatataatgcaatattatta

SEQ ID NO: 452482 - DNA, 577 bp, Homo sapiens
accatgcccctgcactgccaccactgcaggagtgaatgcgcatggaccccagtagctctgtctccctcctccatcctgcaccttggttgctgccactgccaatgcccacatggatgcaggcagccctaggcccaccagtggccccaggtgacaagaactcatcctgtaatgctgccactgcagctggcatgtgcaaacgagcatgaaccccactgccactgcccaatgaattgctttggctaacactgtcctttagagtgttgtggcgagtgatccaggaaaaccttggcctctccagcacagcaggttcccaacctcagtgggccagagaagaaagctgggggccagataacaggcccccaagttaaagcatatagcccaggagtgttgatctgagccttgccctccaaaaaamaatctaccagaagtgaagccagtcaactgaacccaccttatgcgacaatcaaacccctaagggcatcaaagaagatacaagcaagcgaaacaaacaaatgtccaaaggacagcaacttcgagagttgaaggagcatcagcctatacagatgtaaaagaatca

SEQ ID NO: 452483 - DNA, 479 bp, Homo sapiens
acctacaaagggaaccccatcaggctaacagtgggccttacagcagaaatcctataagccagaaggggttaggagcctacatccagcattcttaaagagaagaatttctgaccaagaattttgtatccagccaaagtaagcttcataagtgaagaagaaataaaatgtttttcaggcaagtaaatgctatcggattttgctgtcacgagatttgccttacaagaggtcctgaagggagggctaaacatggaaaggaaagacagttacaagccacgacaaaaacacacaagtacataggtcaatgacaatataaagaaaccacacaaaaatatctgcataataacccamtaacaaaatgataacaggaagaaatttgcacatgtcaatactaaccttgaatgtaaatgggctaaatatcccttaaaattgaaaggtgtagattgacaagttagataaaggagcaagactaaatggtttgt

SEQ ID NO: 452484 - DNA, 626 bp, Homo sapiens
aatgaatccaggagttgttggttttctgaagaaataaataggatagacagactacttgctagactaataatgaaaaaagagggcagatragaataaagtcaatcagaaatgacaaacgggatgttaccacttaccccataacaacaaaaaaactctcagagactactacaaatacctctatacacacaaatgaaaaaatgtaggataaatggatagattcctggacacatacaacctcccaagagtaaaccaggaataaattgaatccctgaacaaatcataagttcaaaatttgaatttgaatcagtaataaaaagcctactatccaaaaaagcccagaaccagatgaactcacagttgaattcaaccacttgtataaagaagagcaagtattattcctatggaagctattccaaacattgaggagagggagtcctccctaagtcattctatgaggccaccatcatcctgataccaaaaccctggcagagacacaataacaacaacaataacaggtcaggccagtacccttgatgaacatagatgcaaaaatcttcagtaaaatattagcaaaccaaattgagcagcacatcaaaaagctaatccaccatgaccaagtaggcttt

SEQ ID NO: 452485 - DNA, 626 bp, Homo sapiens
aatgaatccaggagttgttggttttctgaagaaataaataggatagacagactacttgctagactaataatgaaaaaagagggcagataagaataaagtcaatcagaaatgacaaacgggatgttaccacttaccccataacaacaaaaaaactctcagagactactacaaatacmtctatacacacaaatgaaaaaatgtaggataaatggatagattcctggacacatacaacctcccaagagtaaaccaggaataaattgaatccctgaacaaatcataagttcaaaatttgaatttgaatcagtaataaaaagcctactatccaaaaaagcccagaaccagatgaactcacagttgaattcaaccacttgtataaagaagagcaagtattattcctatggaagctattccaaacattgaggagagggagtcctccctaagtcattctatgaggccaccatcatcctgataccaaaaccctggcagagacacaataacaacaacaataacaggtcaggccagtacccttgatgaacatagatgcaaaaatcttcagtaaaatattagcaaaccaaattgagcagcacatcaaaaagctaatccaccatgaccaagtaggcttt

SEQ ID NO: 452486 - DNA, 561 bp, Homo sapiens
gaaataaaacacatccaagtagtaagagaggaagtcaaactatccctgttttcagacaatacgattctatacctagaaaatcccatagtctccacccaaaagctccttgagctgataaataacttcagcaaagttttagtatacaaaatcaatgtacaaaaatcagtagcattcccatgcaccaacagcatccaagttggcagccaaatcaaaaatgcaatcccattcacaataaccataaaaagaataacaccaaggaatacagttatccagggaattgaaagatctctacaattagaattacaaaacactactcaaagaaatcagggatgacacaaacaaatagaaaaatatgccatgctcatgtacaggaggaatcaatattgttaaaatggccatttaccaaaggcaatttataaattcaatgctatttctatataatatagaaatgyccaaagctccttgagctgataaacaacttcagtaaagttttgggatacaaaatccatgtacaaaaattagtagcattcccatgcaacaacagcatccaagttgggagcc

SEQ ID NO: 452487 - DNA, 612 bp, Homo sapiens
tacacaaacaagtttaaaatttgtctcttttcattttgaatatgataaacaattgaaataatcatataaataaatgttctttgagttattcaaaaattttaagactgtgaaggagtcctgagaccaaatgtgtttgaamcagtaccacagacaactaaaacacattgtttaacattataccactgtttaatgcaatttagattgatccatttgttatttttgtatttttttcttatatctcatactttatggtttttccaatatctattttcattgtttagacaagaagatgccctccttaatctccctattgtcttctaatcttgacaatcctaaggtcattgcattattcaccgtatttcacgttatgtttacatttcttttctttcagaatcatgtgttagaccagaagctacatgccatgctatgttggcaaacccactctgggggacttttttttaagaccccattccaagtgtttgctgagatctttaagctaccaaactgacgtaactatttatggtgttggagttggaaagagatgcacgcagcctactctcctgagtggtagtggccaactccaacataccctggtctaggttgatattaatg

SEQ ID NO: 452488 - DNA, 624 bp, Homo sapiens
tgtcatcatcaatgttaattatagatatgtgcaaataaagtgagaaaaaaatcctaaaagtgacatctatctgcaaataaatattcaaaataaagttgtttgtgtggacattttgtcatctttcagcacaactattatgtatatcattagaagtatgtcagaatagctttgttgttttgattaccaaaataaactctaaacatgttcaaccagttttcatggtttcatgcttatgctgcctgttcttatggtcacaaaataagaaaaaaattgtaatgcataattgtcagtcctaaagattttctcttaatatacaaaagcatgtattttttttcttctttgaaactagtataataatatctgtctacttaaaatgtttactgggcsaacttattctgcctgacaggcctccaaattcagtctgatataagaattcagttaatgaaatttaaagcagcctcattttcatcctttttttaaacacaactatgtattagaaatctggtgaaggcttctgtcaaattgaactattgaactcagggcagtaaaagtccctccccaggcaagagatttaaatcattttcaaagttaatttcctgctcccagatggagaacaaatctaat

SEQ ID NO: 452489 - DNA, 555 bp, Homo sapiens
agctatagtgatgagctaaaacacctaatgccacttgttgaactactgaaaaggcttaggttgttgtcaagaaattgaagtattttttgtcctctttgaaataaagtggcatgatktagtatttacctggcaagactttgtgaatttaatcagaagcttgtcaagtgaattgtgaattagtagttaatcttctgcctttttctttgctatgaactactatattctacctctccttagttttacaaagaaagcgcaataaaacttggttataggagaaggaactcacaatcattggctaaaataaagggaagggacagggtagtccctgaccaactccttacctatcccttgtcaataagaataaaataaaataactaaacattaccattattttccccagttatcccattagactgatcagtaagctttttgcttctcatccagcattccattttatttagcagatagttacggagtaaaatcgctgtttgaaattgagacttggtttccgtacacgagaagttgaaaactttagccaataaacttcaactgaaa

SEQ ID NO: 452490 - DNA, 560 bp, Homo sapiens
gatactgtattgcttcaactaaagttcttttctctgcaagattgcacatcaaaaattacagagttaaattctgaaattttacttatcagtaacatttcatatatatttgagtataaaaattgtcactatttttgtaaagcaagaggaaaaagaatctctcacccagacatcctactcattattctcttttatccatttcaaacagtgggcttgatctgataaagcaatgaaagaacaaccagctataggttgttattcttttgatgtgttaatcaatatgactttttattcactgtaattatttgattgttgttgtggtcttataaacctatgactctctcaccattcagactagatctttataygcattaactcagggcagggttatcgcagcagaaaaattagtgttgaacaagaaaagagaacattatttttaagtacaaaaacaatgatttgcaagaaagggaattttgattttcagataacttcattttgagtaacataagcctgatttactttgaacataaagtttatgcattaaacagtagatataaaagact

SEQ ID NO: 452491 - DNA, 560 bp, Homo sapiens
gatactgtattgcttcaactaaagttcttttctctgcaagattgcacatcaaaaattacagagttaaattctgaaattttacttatcagtaacatttcatatatatttgagtataaaaattgtcactatttttgtaaagcaagaggaaaaagaatctctcacccagacatcctactcattattctcttttatccatttcaaacagtgggcttgatctgataaagcaatgaaagaacaaccagctataggttgttattcttttgatgtgttaatcaatatgactttttattcactgtaattatttgattgttgttgtggtcttataaacctatgactctctcaccattcagactagatctttatatgcattaactcagggcagggttatcgcagcagaaaaattagtgttgaacaagaaaagagaacattatttttaagtacaaaaacaatgatttgcaagaaagggaattttgattttcagataacttcattttgagtaacataagcctgatttactttgaacatraagtttatgcattaaacagtagatataaaagact

SEQ ID NO: 452492 - DNA, 596 bp, Homo sapiens
atggaactgtgaccatttagcttaataaccgttgaagcactaacagtttttaaataaagttgtcacaaaatgatatttagataatatttagtgtaatatttagataattttcacttttartataccgtattaatagaactgtgaccatttagcttaataacagttgaagcactaacagtttttaaataaagttgtcacaaaatgacatatgaaaggttatcaagaattctttgaaaggaaattatttttaaaactatgttattaaatgattactcttgttcttttaggtctttacatgaaaatatatagactagtattttaaaagctacaatgcttttttaaaatgtaactttttaagtttgactaatgagtaaaaatatatagttagaagaaataagaccaagtgtttgatagatcagtagggtgactgtggttcataataatctatcatacatttcaaagtagctggaagagattaattcaaacatttcttgcataaatagagacaaatatttaaggtggtggacatcccaattacactgatttgatctttacaaattatacgaacatattagattatcacctgtactccaaaa

SEQ ID NO: 452493 - DNA, 596 bp, Homo sapiens
atggaactgtgaccatttagcttaataaccgttgaagcactaacagtttttaaataaagttgtcacaaaatgatatttagataatatttagtgtaatatttagataattttcacttttaatataccgtattaatagaactgtgaccatttagcttaataacagttgaagcactaacwgtttttaaataaagttgtcacaaaatgacatatgaaaggttatcaagaattctttgaaaggaaattatttttaaaactatgttattaaatgattactcttgttcttttaggtctttacatgaaaatatatagactagtattttaaaagctacaatgcttttttaaaatgtaactttttaagtttgactaatgagtaaaaatatatagttagaagaaataagaccaagtgtttgatagatcagtagggtgactgtggttcataataatctatcatacatttcaaagtagctggaagagattaattcaaacatttcttgcataaatagagacaaatatttaaggtggtggacatcccaattacactgatttgatctttacaaattatacgaacatattagattatcacctgtactccaaaa

SEQ ID NO: 452494 - DNA, 514 bp, Homo sapiens
tacaaagtttcagtatcaaaaggcctgttgctaaaacaatgtttaacttttactgcaaaaaaatcatgtagtaagtaaatgattgaaaatactgaattgtatagtagttgttaaagttgattacatgatttatgattgatataagggtatatagcattaataacaataatgatagtggaatcttctggtttttgagcatatatgctggacaagttactagaattttcacataaaaacttacttgaagcatctgtaattctttgaacaagaatgcaaatgaagtataattaaactcattwtacagaagaggaagtagtgtcacactgctaagatgtatagcaaagccaaaatttaaaacaaagtttgataacccacacattttccaaaatactgtggagttttctaactgaataaatttgatcaaaaagaggagacagaattccaggtagccttgacataatttctgttctgcagcaatatgaagaatattgatgtaaaaaatgatatgacaaaa

SEQ ID NO: 452495 - DNA, 650 bp, Homo sapiens
tgctatccctttgaattgatagaaattaatttaaagatttcctactggacattttaaaatgcgtattgacccacaaacctgtaaatggttgaaagtactatttgagagaaatcattagctcaggtgttggaatatagaagaactacaagattatatttgacaaagcaagatctgaaaaaatgtattttcattgacagtaagtaaaataatgtggactcttacaaagaaatttgaaatttatcagagaaagctttgcagaaaagtaaattttcactattcacttcatctttattttcaaacacattcatctctattcacagattaggtgttctacactttaaaattcagctttataacgttayagtttttcaatagtattattattgatcagtcaggttcagaatgtataaacctctttaaagcaaatatagacctaatgctgcagagcccatttgcccaaaaagcttagtgaattccctgcagtcacttataggactttatctttctttaaaaacttgtgttttctcaaaccagggccatttctgcacaaggtatgtctctttctattaagtgaatgctgaatcgtgtatcttttttgactagcgagactgaagtcttattttctctttaccagaaaatgaaaaaattga

SEQ ID NO: 452496 - DNA, 650 bp, Homo sapiens
tgctatccctttgaattgatagaaattaatttaaagatttcctactggacattttaaaatgcgtattgacccacaaacctgtaaatggttgaaagtactatttgagagaaatcattagctcaggtgttggaatatagaagaactacaagattatatttgacaaagcaagatctgaaaaaatgtattttcattgacagtaagtaaaataatgtggactcttacaaagaaatttgaaatttatcagagaaagctttgcagaaaagtaaattttcactattcacttcatctttattttcaaacacattcatctctattcacagattaggtgttctacactttaaaattcagctttataacgttacagtttttcaatagtattattattgatcagtcaggttcagaatgtataaacctctttaaagcaaatatagacctaatgctgcagagcccatttgcccaaaaagcttagtgaattccctgcagtcacttataggactttatctttctttaaaaasttgtgttttctcaaaccagggccatttctgcacaaggtatgtctctttctattaagtgaatgctgaatcgtgtatcttttttgactagcgagactgaagtcttattttctctttaccagaaaatgaaaaaattga

SEQ ID NO: 452497 - DNA, 501 bp, Homo sapiens
gaagttctgaggacagtaaagcaaaggagggaggtttctatcaatagctaatgtgttctctatactactggtaatcctgagcctacgcatgtgcttattctgcatttaaacttaamactggagcccacctccctctctttctgctgcaggggctaaaaacaattaatagtttgtgacaagctgtcacactttgtgtttgtttgaatagggataaaactattaccaaacttcctcctgggccaagagaggaaattaccactaacatgtaaatcccatggaaagtataagatattagaggcgaaaggaaagtgctagccaaatgttaacatttgtcttctttaaagaagacaatgaggaaagaaaaagaaaatcctcttctcattgccctcagtaaattggaatctgctttatttaattggtgaagatagtttcactgtccaagcatccgactataatcgctttactaccgacaaatctgtaaaaagataactttattacatt

SEQ ID NO: 452498 - DNA, 613 bp, Homo sapiens
gactgttaaatttaattacataagattctacccacaatacagtaaaagagactggacttatcctcccatctgaaaaactagacatgatctataaatcaacacttttctgaacactagaatcaggcaacaatgtacagtgatcctgagaaataggaaacaaagtagtcaagctaagtttctccaaaggtgaaattagacagtattttaactgcatgaaaataaaaataaaacatattagaatttgtgggaggttgcyaaataagtacttcatgggattacaaaggaggatgatgaaatttttagactttgttccctatcgtgatgtaaataatggtataacagggatagtcttgagttaaaatttatcgaagcatatagtttatgtacagtttattttgtgtcagctacatctcaataaagctatttctcaaaagctcaaaattttgaataaatgtgttaattatgcctaaataaatttgtgaacaaaacatcttttaattacgtcaggcaaaagaaagaaataaaaggcatccaaattgaaaaagaagttaattctctgctgatgatatgatcttatacttagaaaagctaaagactcctccacaaggctcct

SEQ ID NO: 452499 - DNA, 613 bp, Homo sapiens
gactgttaaatttaattacataagattctacccacaatacagtaaaagagactggacttatcctcccatctgaaaaactagacatgatctataaatcaacacttttctgaacactagaatcaggcaacaatgtacagtgatcctgagaaataggaaacaaagtagtcaagctaagtttctccaaaggtgaaattagacagtattttaactgcatgaaaataaaaataaaacatattagaatttgtgggaggttgctaaataagtacttcatgggattacaaaggaggatgatgaaatttttagactttgttccctatcgtgatgtaaataatggtataacagggatagtcttgagttaaaatttatcgaagcatatagtttatgtacagtttattttgtgtcagctacatctcaataaagctatttctcaaaagctcaamattttgaataaatgtgttaattatgcctaaataaatttgtgaacaaaacatcttttaattacgtcaggcaaaagaaagaaataaaaggcatccaaattgaaaaagaagttaattctctgctgatgatatgatcttatacttagaaaagctaaagactcctccacaaggctcct

SEQ ID NO: 452500 - DNA, 613 bp, Homo sapiens
gactgttaaatttaattacataagattctacccacaatacagtaaaagagactggacttatcctcccatctgaaaaactagacatgatctataaatcaacacttttctgaacactagaatcaggcaacaatgtacagtgatcctgagaaataggaaacaaagtagtcaagctaagtttctccaaaggtgaaattagacagtattttaactgcatgaaaataaaaataaaacatattagaatttgtgggaggttgctaaataagtacttcatgggattacaaaggaggatgatgaaatttttagactttgttccctatcgtgatgtaaataatggtataacagggatagtcttgagttaaaatttatcgaagcatatagtttatgtacagtttattttgtgtcagctacatctcaataaagctatttctcaaaagctcaaaattttgaataaatgtgttaattatgcctaaataaatttgtgaacaaaacatcttttaattacrtcaggcaaaagaaagaaataaaaggcatccaaattgaaaaagaagttaattctctgctgatgatatgatcttatacttagaaaagctaaagactcctccacaaggctcct

SEQ ID NO: 452501 - DNA, 493 bp, Homo sapiens
ttctagtttgtgctcataaaggtgtttgtagtagccttggacaatccgtttgtatttctgtgatatcagttttaatatctcccatttcatttctaactgagcttatttggatcttctctcttctttgtttggttaatatttctgatgatctatcaatttggtatatcttctcaaagaaccagctttttatttcatttatcttttgtattttttgttgtttcaatgtcatttagttctgaatttatctttgttaaattttttcttctgctgatttgggtttggtttctttttgtttctctaattccttgagatgtgaccttacactatctatttacactctttcagctttttgatgtaagaatgtaatattattaactttcttcttagtactgcttttgtacaatgtatgctgtctcccagaggttttgcatgtrtttgtatattttgagagttccttttggggttaatttccagttttattccactgtggtct

SEQ ID NO: 452502 - DNA, 506 bp, Homo sapiens
aagtgttctgtaaacgtctgttaagtccatttttttctagggtatagtttcagtccattgtttattgactttctgtctagatgaactattgctgtcagtggaatatcaaagtcccytgttattattgcattgccatttatttcatttattaggtctagtagtaattgttttattaatctgagacctccagtattaggtgcatatatatttagattgtgatcttttcctgttgaactaaaccttttatcattatataatgtccctttttgtcttttttacagttgttgctgtaaagtctgttttgtgtgatataagaatagctacttctgcatgctttaggtttccatttgcatggaatatctttttccacccctttaccataagtttatgtgagtcattatatattaggcgagtctcttggagacagcaggtacttggttgatggatttttatctattctgccattctgtatcttttaagtggctcatttaggccatttatattca

SEQ ID NO: 452503 - DNA, 506 bp, Homo sapiens
aagtgttctgtaaacgtctgttaagtccatttttttctagggtatagtttcagtccattgtttattgactttctgtctagatgaactattgctgtcagtggaatatcaaagtcccttgttattattgcattgccatttatttcatttattaggtctagtagtaattgttttattaatctgagacctccagtattaggtgcatatatatttagattgtgatcttttcctgttgaactaawccttttatcattatataatgtccctttttgtcttttttacagttgttgctgtaaagtctgttttgtgtgatataagaatagctacttctgcatgctttaggtttccatttgcatggaatatctttttccacccctttaccataagtttatgtgagtcattatatattaggcgagtctcttggagacagcaggtacttggttgatggatttttatctattctgccattctgtatcttttaagtggctcatttaggccatttatattca

SEQ ID NO: 452504 - DNA, 506 bp, Homo sapiens
aagtgttctgtaaacgtctgttaagtccatttttttctagggtatagtttcagtccattgtttattgactttctgtctagatgaactattgctgtcagtggaatatcaaagtcccttgttattattgcattgccatttatttcatttattaggtctagtagtaattgttttattaatctgagacctccagtattaggtgcatatatatttagattgtgatcttttcctgttgaactaaaccttttatcattatataatgtccstttttgtcttttttacagttgttgctgtaaagtctgttttgtgtgatataagaatagctacttctgcatgctttaggtttccatttgcatggaatatctttttccacccctttaccataagtttatgtgagtcattatatattaggcgagtctcttggagacagcaggtacttggttgatggatttttatctattctgccattctgtatcttttaagtggctcatttaggccatttatattca

SEQ ID NO: 452505 - DNA, 506 bp, Homo sapiens
aagtgttctgtaaacgtctgttaagtccatttttttctagggtatagtttcagtccattgtttattgactttctgtctagatgaactattgctgtcagtggaatatcaaagtcccttgttattattgcattgccatttatttcatttattaggtctagtagtaattgttttattaatctgagacctccagtattaggtgcatatatatttagattgtgatcttttcctgttgaactaaaccttttatcattatataatgtccctttttgtcttttttacagttgttgctgtaaagtctgttttgtstgatataagaatagctacttctgcatgctttaggtttccatttgcatggaatatctttttccacccctttaccataagtttatgtgagtcattatatattaggcgagtctcttggagacagcaggtacttggttgatggatttttatctattctgccattctgtatcttttaagtggctcatttaggccatttatattca

SEQ ID NO: 452506 - DNA, 591 bp, Homo sapiens
ttcatttattaggtctagtagtaattgttttattaatctgagacctccagtattaggtgcatatatatttagattgtgatcttttcctgttgaactaaaccttttatcattatataatgtccctttttgtcttttttacagttgttgctgtaaagtctgttttgtgtgatataagaatagctacttctgcatgctttasgtttccatttgcatggaatatctttttccacccctttaccataagtttatgtgagtcattatatattaggcgagtctcttggagacagcaggtacttggttgatggatttttatctattctgccattctgtatcttttaagtggctcatttaggccatttatattcaatgtttgtattgagatgtgaggtactgttgtgttcatcatgctagttgttgccttaataccttgtttttttttcattgtgttattattttataggccctgtgagacatatgctttaagaagattctattttggtgtattttaaggttttgtatcaagatatagaactcctgttaccagttcttgtatgcttttggtagtggtgaactcttcagcatttgtttgtc

SEQ ID NO: 452507 - DNA, 591 bp, Homo sapiens
ttcatttattaggtctagtagtaattgttttattaatctgagacctccagtattaggtgcatatatatttagattgtgatcttttcctgttgaactaaaccttttatcattatataatgtccctttttgtcttttttacagttgttgctgtaaagtctgttttgtgtgatataagaatagctacttctgcatgctttaggtttccatttgcatggaatatctttttccacccctttaccataagtttatgtgagtcattatatattaggygagtctcttggagacagcaggtacttggttgatggatttttatctattctgccattctgtatcttttaagtggctcatttaggccatttatattcaatgtttgtattgagatgtgaggtactgttgtgttcatcatgctagttgttgccttaataccttgtttttttttcattgtgttattattttataggccctgtgagacatatgctttaagaagattctattttggtgtattttaaggttttgtatcaagatatagaactcctgttaccagttcttgtatgcttttggtagtggtgaactcttcagcatttgtttgtc

SEQ ID NO: 452508 - DNA, 591 bp, Homo sapiens
ttcatttattaggtctagtagtaattgttttattaatctgagacctccagtattaggtgcatatatatttagattgtgatcttttcctgttgaactaaaccttttatcattatataatgtccctttttgtcttttttacagttgttgctgtaaagtctgttttgtgtgatataagaatagctacttctgcatgctttaggtttccatttgcatggaatatctttttccacccctttaccataagtttatgtgagtcattatatattaggcgagtctcttggagacagcaggtacttggttgatggatttttatctattctgccattctgtatcttttaagtggctcatttaggccatttatattcaatgtttgtattgagatgtgaggtactgttgtgttcatcatgctagttgttgccttaataccttgtttttttttcattgtgttattattttataggccctgtgagacatatgctttaagaagrttctattttggtgtattttaaggttttgtatcaagatatagaactcctgttaccagttcttgtatgcttttggtagtggtgaactcttcagcatttgtttgtc

SEQ ID NO: 452509 - DNA, 588 bp, Homo sapiens
tgtgagtcattatatattaggcgagtctcttggagacagcaggtacttggttgatggatttttatctattctgccattctgtatcttttaagtggctcatttaggccatttatattcaatgtttgtattgagatgtgaggtactgttgtgttcatcatgctagttgttgccttaataccttgtttttttttcattgtgttattattttataggccctgtgagacatatgctttaagaagattctattttggtgtattttaaggttttgtatcaagatatagaactcytgttaccagttcttgtatgcttttggtagtggtgaactcttcagcatttgtttgtctgaaaaaggctttatctctcctttgtttatgaagcttagtttttctggatacaaaagtcttggcggacaattattttgttttaggaagctaaagatgggaccccaatcccttctgagctgtaaagtttctgcagagaaatctgctgtttatctgataggttttcctctataggttatctgatacttttgtctcacagctcttaaattatttccttcatcttgactttagataacttgatgactat

SEQ ID NO: 452510 - DNA, 588 bp, Homo sapiens
tgtgagtcattatatattaggcgagtctcttggagacagcaggtacttggttgatggatttttatctattctgccattctgtatcttttaagtggctcatttaggccatttatattcaatgtttgtattgagatgtgaggtactgttgtgttcatcatgctagttgttgccttaataccttgtttttttttcattgtgttattattttataggccctgtgagacatatgctttaagaagattctattttggtgtattttaaggttttgtatcaagatatagaactcctgttaccagttcttgtatgcttttggtagtggtgaactcttcagcatttgtttgtctgaaaaagrctttatctctcctttgtttatgaagcttagtttttctggatacaaaagtcttggcggacaattattttgttttaggaagctaaagatgggaccccaatcccttctgagctgtaaagtttctgcagagaaatctgctgtttatctgataggttttcctctataggttatctgatacttttgtctcacagctcttaaattatttccttcatcttgactttagataacttgatgactat

SEQ ID NO: 452511 - DNA, 483 bp, Homo sapiens
atgtttagtgtgctggcttccttgaatgctggttatgctagctgtgaagttgtcgcatggacctctgattagccaggatgttgcaggcagtggaattagctgttgatttctcttttctgggatcagggttagtctgtcatgagttgctrtaatggcctgagttgactggcctccagccaggaggtggcattttaaagagagcaccagctgcagcagaaatagggggatctaagcttgctctaatttttccagtgtaagtattttagcttctcaggtgatgggcagggccataaagcccctaagagagtctatcttttgtgtttggctacaagggtgggtagaaaaacaccatcagctggggtcaagattaggagggtctgggctcagactttccttgggcagggcttattgttgccactgtggggaacgggagggtggttctcagacccatggagttatgttccagaggggattttggctgcc

SEQ ID NO: 452512 - DNA, 599 bp, Homo sapiens
ttgccctctgaccccctttctagttacccttgctgccttccctgagggcccctgtgagagatagtcagggatggcttccctgggcttgagctggagactgggagtgcctgtaaggcacttyccactgctgcttctacttttatatttcacacagctccctaaatccatgtaagatctaggtaaggtacaaatccttctcctgtgatgtggattttcagattctccagtgagatgtatgttcaaagtcaggtttcccactctcacattttgggaagtcacagtttttcacctgccttgtagaatttgcagtaacattcaaaggatctgtgatttttttctgttttcttggtatgttcctactgtggttcttggacaaaagttcatactgtgagtctccacatgctgttctgttcatccaagtcagagctgcatattagccctgtctcttatctgctgtcttaacacaccctctcaccagtgtcattattcatagttagaaaaaaacatcctaaaattcatatggaacttaaagagagcctgagcagccaaagaaatcttaaacaaaaagaatgaagtggaaggcatcactttacttgtct

SEQ ID NO: 452513 - DNA, 554 bp, Homo sapiens
gtgcctgtaaggcactttccactgctgcttctacttttatatttcacacagctccctaaatccatgtaagatctaggtaaggtacaaatccttctcctgtgatgtggattttcagattctccagtgagatgtatgttcaaagtcaggtttcccactctcacattttgggaagtcacagtttttcacctgccttgtagaatttgcagtaacattcaaaggatctgtgatttttttctgttttcttggtatgttcctactgtggttcttggacaaaagttcatactgtgagtctccacatgctgttctgttcatccaagtcagagctgcatattagccctgtctcttatctgctgtcttaacacaccctctcaccagtgtcattattcatagttagaaaaaaacatcctaaaattcatatggaacttaaagagagcctgagcarccaaagaaatcttaaacaaaaagaatgaagtggaaggcatcactttacttgtcttcaaattatcatccaaggctatagtacccaaaacaacaaagtactggcataaaaacag

SEQ ID NO: 452514 - DNA, 579 bp, Homo sapiens
aaacttctaaaggcttaggagccaaaccaaagacagtgtctgtaatatctgtatgaattgggtgaattcttcttaaggtcctcaaaatatcttgagtttcctgggcctgtcacattctttacttactgcaaggtcagaaactatgtaaaggaactatatagacaaagtatcaggttaatctttctccaagtctattggctttataaagtcaagctgaacacctcaaagcagcctggtcacatttgaaaatatgacattccagtcaaagctttggtaaaataacagtatctccaattgtgacttgtaataaaagaaaaaakatctttattgagctcatacaaatatgtatactgccataaaataagaataatcccaaacaatttacaaattctggagggattaggtagtgaaaaaggtaaacatttcaattttactcacaaaagtatgattcatccaattcctgtaagctacaaattgcataaaataaaaaagttttcttaactctagaaaagaaaacattaaaaaatgagcaacagtttaaacaaaaaaatataaaaatcatttcaattattcatcagt

SEQ ID NO: 452515 - DNA, 637 bp, Homo sapiens
ttccttgaagacacaatactttagcatttgcaaaaagtttttaggaaaaaaagcatcagaagaaagcaatttactgcagacaaaaggcttaaaatggccatggttagagatgcaattgacaaactcctttagttattttctgtggcctacaatttaatatatcagatttttaagattctcatacaattttggaacacatttatgcaaatataatgcaaagaagagtcaacattattactttttggacaatgcttcccatataacttaacatatcaaataaatatgtttactatctctttttcagatgcctcaggggctgtctgtaacatcccaaagtaagtttgaggtcaaaaagacttaattttgatttgtgaaatttgattttgagaagcctgtcaaatatgtcaaaggcttaaaatacttgaccaaaataggatcacaaatcactgtaaaataacagtcattcatttagccacagtgataatgaaaaggtttcagaaagcaaaaatcttcascaagagaagagactcagttcccaaataatcaaaagacataacaaaatcagcatcagacatacagtctctgtttccttttctctctccccactgttttttgagtttactcaaaggaggtacca

SEQ ID NO: 452516 - DNA, 631 bp, Homo sapiens
cacatagacatgtagtcctatagctactcagacagaagccgatcttctaggtttggataagattctttacttgccagcttccaaagagtgtttcttttcctcatttagaacataactattctgatgacctgttttattgctctaagtagttgttaactaggcaaccctacatttgtacttctttttttaatttaatttaattaatttatttatttttcaaatggagtctcacactgtcaccaggctggagtacagtggygcaatttcggctcactgcaaattctacctcccaggttcaagtgattcttctgcctcagcctcctgagtagctgggactacaggtgcatgccaccacgcctggctaatttttgtatttttagtagagacggagtttccccatgttggccaggatggtctcaatctcttgacctcgtgatccacctgcctcaacctcccaaagtgctggaattacaggtgtgagccaccgtgcccagccacatttgtacttccaaagggatgactcttaggtgaaacaaagtagaaatttatatctcaaagacacagagcttagatctaaatatcatttttttgccaagacaaagaacggcataggtaaaggcctagttaaggc

SEQ ID NO: 452517 - DNA, 631 bp, Homo sapiens
cacatagacatgtagtcctatagctactcagacagaagccgatcttctaggtttggataagattctttacttgccagcttccaaagagtgtttcttttcctcatttagaacataactattctgatgacctgttttattgctctaagtagttgttaactaggcaaccctacatttgtacttctttttttaatttaatttaattaatttatttatttttcaaatggagtctcacactgtcaccaggctggagtacagtggtgcaatktcggctcactgcaaattctacctcccaggttcaagtgattcttctgcctcagcctcctgagtagctgggactacaggtgcatgccaccacgcctggctaatttttgtatttttagtagagacggagtttccccatgttggccaggatggtctcaatctcttgacctcgtgatccacctgcctcaacctcccaaagtgctggaattacaggtgtgagccaccgtgcccagccacatttgtacttccaaagggatgactcttaggtgaaacaaagtagaaatttatatctcaaagacacagagcttagatctaaatatcatttttttgccaagacaaagaacggcataggtaaaggcctagttaaggc

SEQ ID NO: 452518 - DNA, 577 bp, Homo sapiens
ctggtctatctctgacctggctttctgctttgacagatggaagctaaaagaaaaaaggaaaaactgatggtgcaaaagataaacatatttatatgagtataaaaaatgaataaaatgatttatttttaaaatatattcttgatatgatttggctgtgtccccacccaaatctcatcttaacttgtggttcccataatccccatgtgttgtgggaaggacccagtgggaggtaatgaatcatggggacggttacttccatgctgctgttctcataatagtgagtgagttctcgcgagaactgatggttttataaggggcttttcccccatttgctcagcacttctcctttctgccatcatgtgaagaaggacatgtttgcttccccttctgccatgattttaagtttcctgaggcctccccagccatgctgaactgtgagtcaattaaaactcccttttacaaattaccgagtctcgrgtatgcctttattagcagcgtgagaacggactaatacgattcttccgatgaatatattcttctcattgataaatgcttgatgtaaatgcttaatttttcc

SEQ ID NO: 452519 - DNA, 561 bp, Homo sapiens
tgtaagtgctactgttctttttgtctccctgactctcccctgctacccacctgcatcgccttaggcatttattctttgcttaaacatgcctatttgcagagacacactgagctaagcagcaaagtggaggtttccagtgagaagtccaccgtgagggaatagggtgtcaggagargtcctaccagctcatcttgaccgagatgctcgtgtgctgtgcttttgaaaatgcaagcagtcaaagaacatttaaaatgcggtcagtggttactgtccctttgtggaaccgagcagacaggagtgcaggtgtgaaacatgacgtccatatggaaatagaaggacaaaacagtctttgttaacttgattatctaccctgtggttagaaatgagggccgggctaaatgcaacacagagaatctagaaactttgttttgcaaaaaaaggcacctaccccatttacactttactgaactattattaataaggagcttatgagtctattagatatggtctttgccttctttctcgattctaaggttgggtttctggggacagtgaaaagcc

SEQ ID NO: 452520 - DNA, 604 bp, Homo sapiens
cattcaatgctgagggaatgtaaaatcttgtctgttgtggaaaacattttggtagtttctcaaaaattaaaacagagttatcatatgatccagtaattacactccaagatatatacttaaaagaaatgaaaccacacaaaaacgtatacctgaatgttcacagcagcattattcatcawagccaaagtggaaacaagaccactcaagccagccctgcctcggaacctgacaaagttaaatggaagcctacagagctgagctgcatttccatgggagacattttggtcattccaggtgatgatgaactacaccaattgttagtggctgagaagaacctcaggaatgtgccagcatcttttgacttttatttcagggggctgcatctactaccacaacatgcaatatgggtaacactggcatggctggttagatttgagtacctcatgtaaataagtcatgtggtaatagtgatattgatgatcaaatgtattgggagattgagttaaggtctcctcaggatgtaataccaacggaaaatgaatctttagaagaactatatttagttaaccatcacctaatttccagataaatagttctgcacagg

SEQ ID NO: 452521 - DNA, 541 bp, Homo sapiens
agcaggctgacatttttagttagcagttgcttctgctttgactcaagaaaggtaagtatttcactagagcttatattagaaaatctggagtttggaattttcttgcttttctttcagggatgtgagcacatactacaggagagctggctttgaagcctcttaggtttgttttcgtactcagaccaagctgggtcccctgagcacttttgcattgctggtaaggaaggcgagcgcaagcctctctctcacacacaggtggacttcattgtgatgctatagaaatctcctaaaggacgtagtggcaggacatacccagtgtagtaacactacccttcacattggtcattttggtrtaatttcgaaactcatactagtgtatttaaggcattttatagttatcaagcaaattttacactttaatgctaataaataatttatccttcaaaatcttatgtatacatgggatagattaaatatgtaagaaagcatgatatatgtatgctgatcaactataattaatcagcacgtctgactagacctg

SEQ ID NO: 452522 - DNA, 604 bp, Homo sapiens
cattcaatgctgagggaatgtaaaatcttgtctgttgtggaaaacattttggtagtttctcaaaaattaaaacagagttatcatatgatccagtaattacactccaagatatatacttaaaagaaatgaaaccacacaaaaacgtatacctgaatgttcacagcagcattattcatcaaagccaaagtggaaacaagaccactcaagccagccctgcctcggaacctgacaaagttaaatggaagcctacagagctgagctgcatttccatgggagacattttggtcattccaggtgatgatgaactacaccaattgttagtggctgagaagaacctcaggaatgtgccagcatcttttgacttttatttcagggggctgcatctactaccacaacatgcaatatgggtaacactggcatggctggttagatttgagtacctcatgtaaataagtcatgtggtaatagtgatattgatgatcaaatgtattgggagattgagttaargtctcctcaggatgtaataccaacggaaaatgaatctttagaagaactatatttagttaaccatcacctaatttccagataaatagttctgcacagg

SEQ ID NO: 452523 - DNA, 614 bp, Homo sapiens
tgttttcaatattgtaccctttcctcaattggtctcagtggtctccagtccagagactctctgttttatcctctacggaaaatgaacattttgtcctttatacagaaatggacatgtggggccgtcttcaaccactcctaaaacactaaaacagacattcaataaatcctgtttccagccccacttaatcctccaagttacataactgcagattgcagcgctcacatagggaaccctgtgagcagcctcctttraagctggtcatccctccagccttattcccccacactctcaacggtattgtaactaaggacctcagtttttaaaatatacttcagtcatccactctctttatcttccttcctgccgctctcacaccttgattaaaaccattttttccttccacccatccatgtctcttgactctggcttttaggtggcaagctgctggacttaggaccagatacagtatcgtatgtcatgagcctttggggagctcttcagtttacaacttggtggctcaaagatttcctttctactgctttagacagctttttggggggatgtgttttccgaaatcagctgctctttccgtatagaaccatacattgaga

SEQ ID NO: 452524 - DNA, 621 bp, Homo sapiens
ttcaataaatcctgtttccagccccacttaatcctccaagttacataactgcagattgcagcgctcacatagggaaccctgtgagcagcctcctttgaagctggtcatccctccagccttattcccccacaytctcaacggtattgtaactaaggacctcagtttttaaaatatacttcagtcatccactctctttatcttccttcctgccgctctcacaccttgattaaaaccattttttccttccacccatccatgtctcttgactctggcttttaggtggcaagctgctggacttaggaccagatacagtatcgtatgtcatgagcctttggggagctcttcagtttacaacttggtggctcaaagatttcctttctactgctttagacagctttttggggggatgtgttttccgaaatcagctgctctttccgtatagaaccatacattgagattacatgagtggctgtgatgtctaatgtaacagaacatttgattctctttgtctatattgtttatagaaaaacatctcttctcattgatatgtttctttccccttccatctctgttactgtactaaccattaccagatctttaacaataaatttaggattttaa

SEQ ID NO: 452525 - DNA, 646 bp, Homo sapiens
  misc_feature (1)...(646): n = A,T,C or G
ttctgcagataaaagatacatagaggctaaatgaggtattatattaaagacccagctgtatgctgactacaaaagactcacctnnnnnnnnnnnnnnnnnnnnnnnnnnnnnnnnnnnnnnnnnnnnnnnnnnnnnnnnnnnnnnnnnnnnnnnnnnnnnnnnnnnnnnnnnnnnnnnnnnnnttattatataatgataaaagcatcaattcagcaagaaggtatancaattatgagtatatacccacccaacaccagagcaaatattagatctaaagggagagacagactgcatttcaataataggagacttcaaccaccctactttcagcactgaacagatcatccaaagagaaaatcagcaaaggaacattggacttaaactacactctagagcaaataaacctaacttttacagaaaatgtcattcaamagctggagaatgtgtatatattcttctcatgagcacatggagcattcttcagcatagaccatacgttaggccacaaaacaagtctcaacacatttttaaaaattaaaatcagatcaagtatcttttttgaccacaatggaataaaactagaaatcagtaacaagaggaactttggaaaatgcaccaatacaacatgctcctgaacaaccaatg

SEQ ID NO: 452526 - DNA, 646 bp, Homo sapiens
  misc_feature (1)...(646): n = A,T,C or G
ttctgcagataaaagatacatagaggctaaatgaggtattatattaaagacccagctgtatgctgactacaaaagactcacctnnnnnnnnnnnnnnnnnnnnnnnnnnnnnnnnnnnnnnnnnnnnnnnnnnnnnnnnnnnnnnnnnnnnnnnnnnnnnnnnnnnnnnnnnnnnnnnnnnnnttattatataatgataaaagcatcaattcagcaagaaggtatancaattatgagtatatacccacccaacaccagagcaaatattagatctaaagggagagacagactgcatttcaataataggagacttcaaccaccctactttcagcactgaacagatcatccaaagagaaaatcagcaaaggaacattggacttaaactacactctagagcaaataaacctaacttttacagaaaatgtcattcaaaagctggagaatgtgtatatattcttctcatgagcayatggagcattcttcagcatagaccatacgttaggccacaaaacaagtctcaacacatttttaaaaattaaaatcagatcaagtatcttttttgaccacaatggaataaaactagaaatcagtaacaagaggaactttggaaaatgcaccaatacaacatgctcctgaacaaccaatg

SEQ ID NO: 452527 - DNA, 530 bp, Homo sapiens
tacgaatgccaaaatagacttcagagcaaagactattaccagggaataaagagattatttcttactgataatgtggttagttaacgaagaagacataacaaacctatgtgtttttgtacctaacaacaaagcttcaaaacgtatgaagaaaagtaataaaacaatacgtagagatagagataaccatcagagattttaatcccactctcaacacttcatagaataaataggcaataaatcagcaagaatgtattagacttgaacaacaccatcaactaacctgacctgatttatatttatagaatactccaccctataaaagcaaaatacacattttgtcaactgtgcacggaatatttatggagatagaccacattatagmccattaaaaacctcaataaattaaaaagtattcaactacaaaatatgttctcaggtcacaatggaataaaattaaaaaccagtaacagaaagatcctttaaaaattggaaattaactcacttctaaataactcataggtcaaagaaga

SEQ ID NO: 452528 - DNA, 577 bp, Homo sapiens
ctggtctatctctgacctggctttctgctttgacagatggaagctaaaagaaaaaaggaaaaactgatggtgcaaaagataaacatatttatatgagtataaaaaatgaataaaatgatttatttttaaaatatattcttgatatgatttggctgtgtccccacccaaatctcatcttaacttgtggttcccataatccccakgtgttgtgggaaggacccagtgggaggtaatgaatcatggggacggttacttccatgctgctgttctcataatagtgagtgagttctcgcgagaactgatggttttataaggggcttttcccccatttgctcagcacttctcctttctgccatcatgtgaagaaggacatgtttgcttccccttctgccatgattttaagtttcctgaggcctccccagccatgctgaactgtgagtcaattaaaactcccttttacaaattaccgagtctcgagtatgcctttattagcagcgtgagaacggactaatacgattcttccgatgaatatattcttctcattgataaatgcttgatgtaaatgcttaatttttcc

SEQ ID NO: 452529 - DNA, 577 bp, Homo sapiens
ctggtctatctctgacctggctttctgctttgacagatggaagctaaaagaaaaaaggaaaaactgatggtgcaaaagataaacatatttatatgagtataaaaaatgaataaaatgatttatttttaaaatatattcttgatatgatttggctgtgtccccacccaaatctcatcttaacttgtggttcccataatccccatgtgttgtgggaaggacccagtgggaggtaatgaatcatggggacggttacttccatgctgctgttctcataatagtgagtgagttctcgcgagaactgatggttttataaggggcttttcccccatttgctcagcacttctcctttctgccatcatgtgaagaaggacatgtttgcttccccttctgccatgattttaagtttcctgaggcctccccagccatgctgaactgtgagtcaattaaamctcccttttacaaattaccgagtctcgagtatgcctttattagcagcgtgagaacggactaatacgattcttccgatgaatatattcttctcattgataaatgcttgatgtaaatgcttaatttttcc

SEQ ID NO: 452530 - DNA, 565 bp, Homo sapiens
ttcagtgaaattcagagaatatgataggtgtccagcttgttccagcagtaatgtgagtgactctatcatgtacctttgaaaacccagcagatccaatgcagcagaagtgcctgaggttgtgctgaatgttgtatggagcctgtttatgccccagtaagtgaattgcagcaatgtctgttgggttttggcagaaagcagcattatacttgtaagtaggcttatatgaacaaagtagccatggtagactgataacaggttgtatttagtttcacattataaacttttcactttgatatcccagaatacagtcactgcttggtcagtgcaaaatcaactctgaccttctaacacaaaacctactccaggagacaccctcctccttcacatgatgggttgattacatcggaaccctctatgagcagcaatttgtcttcattgaaataarcacttattctggatcataatctttcttcctgtccatggagttattgacagaaacacaaagagtggtttccttgaatatctccttcactataatgatattctgtcatgggatttcttacta

SEQ ID NO: 452531 - DNA, 598 bp, Homo sapiens
ttttcagcatttagatgacagttgtaaatatgcgtgtataaaaatttcctctagtgagaacatggagacaaagaagctgagtacaatatcccagaaatacccacctgtaatgggtgaagrgaggaatccattagtaagaagtcagggagaaagctggaaaacaggaagtaaattgtgtcttgaagcaaagggaatagaaatataagggatcatcgacaatgcaaaacgatgtagagacatcaaagtttggaaacaagacattagatttatcaattaataagtatgctatttggcatattgtctgcattacagtttgaggaatgaggtaattaatgggaacaactcatgtaggtattgataaagaagctcatattaataattgatttactatggctaggattgccaaaacagagtaccacagactgggtaatttaacaacagaaatatatcttttacattttggggtactagaagtccaagatcaaggagttggcaggggtggtttcttcggaggattggattaggccccactctaatagcttcattttaatttaatcacctcttttagggccctccctccaaatgtcatcatattcta

SEQ ID NO: 452532 - DNA, 598 bp, Homo sapiens
ttttcagcatttagatgacagttgtaaatatgcgtgtataaaaatttcctctagtgagaacatggagacaaagaagctgagtacaatatcccagaaatacccacctgtaatgggtgaagagaggaatccattagtaagaagtcagggagaaagctggaaaacaggaagtaaattgtgtcttgaagcaaagggaatagaaatataagggatcatcgacaatgcaaaaygatgtagagacatcaaagtttggaaacaagacattagatttatcaattaataagtatgctatttggcatattgtctgcattacagtttgaggaatgaggtaattaatgggaacaactcatgtaggtattgataaagaagctcatattaataattgatttactatggctaggattgccaaaacagagtaccacagactgggtaatttaacaacagaaatatatcttttacattttggggtactagaagtccaagatcaaggagttggcaggggtggtttcttcggaggattggattaggccccactctaatagcttcattttaatttaatcacctcttttagggccctccctccaaatgtcatcatattcta

SEQ ID NO: 452533 - DNA, 543 bp, Homo sapiens
cacagtttcaaaaatagcctgtgcttttttagacctttaaagacatcatcaatcattgtcttctatggtaatgcttcarttacccaggaggaaaaaaaaatacagtagccatggaagtgacatcctaatgtgctgaaaatcaaaactaaaaaagggcagtgtttgcatattagcaatgtaagcagtgcaagaactgtgatgaaccattaataagccactctcatgctttctaagtattcaggaaatgtgccgcctgacaggccggatctttataggattagcttaatgatttgtcactttctgcattgcttgctgcccttctgccttttttatgctgaacaaaattgtacgaagcattctgtgtggccgaacaagcccactgtttctccatgataagcacccccattttagacacttacagtccgtccatgtttaatgacattcagcaaaaagaagctcaagagccgtcaccttctattcaaatcacgttggtttctttcttactgccacggtggtttcaaattgaccactcccaagtgatca

SEQ ID NO: 452534 - DNA, 633 bp, Homo sapiens
tcttctgtgcagtacaatttttctgtaaaacaactgtacatgtatgtggactttgtttctagatgaccccttctcctctattattatctttgtctctgtgccaacaccaccatactgttttaataactaaacaccaagtatattaaatttgcatttatgtaaaaatttaataaaacttagagtaaatgatttcaaaattagtaaaaaaattagggacaaatttatttgatttcctgaaagaaaatgcaaaattacattttaragaattatttgaatataaataactaggtcaaaaaaacaaaaaattatttcatcttctaatataccagagcatcaaagttttgtctctaatgtaaatctaagttacacaaaacaatgcgttttctatgtgaatgcctcagtgaggtgccattttgagataagatcttgggcacaagttctctaaaataatttttgatatccataaaaataagtctttccactactttttcaagatcagcttagctatgtgtggtcccctgtattacacatactgcctacacaaagttttgctggcatctgattaagatgacatttaatatagagaacattttgataaatgttgacatatttacaacatcacatagtcaaatt

SEQ ID NO: 452535 - DNA, 569 bp, Homo sapiens
atgcagtactgctaaatgcaaactgagtggcataaacaataaaaatgtattgtctcatatttttttagcctagaagtccaagcataaggtgacggcagggctggttccttttgatggctgtgagggagaatctgttctttgcctctcccctggcttctggtggttgggtgggaattttttgcattccttggcttgcaggaacatcaccatgatctctgcattcatcttcacatgatattttcttagtgggtgtgtctgtgttacaaatttcccttctgtaaggacactagtcatataagctgctcaccctgctccagtatgacctcagcttaactaatcgtatctgcaatgaccctatgtccaaataaggtaacattccgaggtactgtggttagaacttcaaaatatttatttgggattgggataaggcattcatgggtgttcaacccataacaacatggcagaaaaaaatggacatgaaatttcaaaatacctaagaccctatctttaaatttggttcttyactacctgcactccgtttggaaaatctcttaatttctttttctcag

SEQ ID NO: 452536 - DNA, 565 bp, Homo sapiens
ctatttcttattgaaaaacaaccttctgtgagctagatatatgatgaaaatatttttatctaaaatgcaggtacctgacactatcagcaacatcatttcttattcagcaattttgaaattcaaaggcacagaaaagagtattataaattgcaagagtatggcaagctacatttgtatatacttttagattcactatctttgaatattttactacttttgtttcatctttcttttttcctttcaactatttgagagatatttgacagacgggatactaacttattcctaaacactttattacatgttgcttaagtgatagcattctcctgcatagccttaatacaatggttatgctcagaaaatttagcagtaaaaacactatctacaatagaccccatatttaaatattctcatttatctcaatggactttttcccagtctttgattgtaygttgtatttaactgatgtgctgcgctagtgtccatcataatagagcattttccccgttgatgttgttgtcaatgacattgagtttttagcaaaaatcagataagttctaggact

SEQ ID NO: 452537 - DNA, 558 bp, Homo sapiens
gactttttctttcatctggcataccaccccagccacagcaggatagggcactggtcagagtcgtgaggcccctatcccaggccctagctcccaaaagaaagttacagacacaccctgggccacaagagaaccaacttccttaaaggagagaactcagttctgacaacattcatcacctgctaactgaagagcctttggtccctgaataaccaacagtgatacccaggtactacactgaaggccttaggtgaacctctgagacttactggcttcaggtgagactcagcacataaccagctagtgtggacakagggcaatttttttctgcttgagaaaagcagaggaaaaagtaaaagggactttgtcttgcaccttagttaccagcatgatcaaagtggggtagagcaccaagctggctgttggggggtctctgatttcaggacatgacttttggatgacatttctggacctgcctggggccagagaggagcccactgccctaaaggctgagtcccagaccaggcagaattaatgacaagctaacttaagagtccctgg

SEQ ID NO: 452538 - DNA, 518 bp, Homo sapiens
tgtggtggtaattttgtgatgatgattttargagtagaaatatatgtcaaaactcaccaaattgtataacttaaatatgtgctattcattataactcagttaaatctcactaaagctattattcaaaccctagtggtttaatacaatattcatttatcctcacagatacacaatgttgtgaagctcggctgatttaaaccaggatcacgtgcagaggcttgcactaacatgcatctttctgaaagcctctagataacactgggtggctctgcctgatatgtttgtcatctatttttgactggcaggttgactagcacagattcttctcatgataatggcagaagtgaaaaagggcaaacagaaacatgcaaggcctcttaaatccttgacttgaaaatagcagtcacttttgactctttctgttcatgaaagcaaatcacacaatcaattccaaagtcaaggggaggaaatatgctccaaccataatgatgtcatagcaggggaatggctacagggat

SEQ ID NO: 452539 - DNA, 567 bp, Homo sapiens
tgtgtcattatagtgtcatcagttgtaacaaatgtaccaatctggtaaaggatgttgttaatagggaaggctatgctgccatggggacagggagtatatgggatatcactctactttcaattttgctcttaacctaaaactctctaaaaataaaagtagtctttcccccaaaaaaatcactctgctataaaatctcaaaaataacgtacaattacgagtaatttttaaatgccctgctctcaagctacaaaaggccaattagtagtatccttctagaaaaatcagtctcatatttgttgacagctatacactaaaagctagaaagggcaggccagtggaagatactttgagaacattcttctaaattccttctgagaagtgcctcttcaacctccttttatatatggctgttttcttactgcatgaggaaaataaaatgagatgtcttggatgacagtttcaattctcctaactagttagatgttccctagacgatgaagtatcacgtcctactgcaccagaataagaaagcacagstttcctcttattaaagtcatccagctatct

SEQ ID NO: 452540 - DNA, 421 bp, Homo sapiens
aagtacgggactggatggcttcattgccaaattctatcagacttcaaaaactaacaccaaattttcaactattaaaaaaactgaagaagagagaattcttcctaatttattctatgaggaagacattatcytaataccaaaaccagtcaaagacgcatttgttgggggggggaaagattttcataccaacaggctaatatccccgagaacgtggaagcaaaaattctccacaaaatactagcaaactgaatgcaagagcacaataaaaagataatgtaccatgatcaagaggggtttattccagggatgcaaggttttccatcatatataaatcaatcaacatgatacataacatcaacaaaatgaagggaaaaaaaccatatgaccatctcaatagatgcagaaaaatcatttgataaaa

SEQ ID NO: 452541 - DNA, 539 bp, Homo sapiens
ttaaatgttggtatatctttaacaagtgttatttatgtgttgttacttggtcagttttcatccataaccaatactaccagtagtactctttcatttataatgaacaatgttgtgtttgatgatttcagcttttaaaggtaaataccattctcctttgttaaagagcaatcaattatcaagacaccccaactaatatagtcttagagttagctctccaaacatcactgacatgaaatctttcattgttacccaagacttataaagagacttaataaaatgactaatatactatatcaaaaaagtaacacactatatgtgaataaacacacacaatacacactatgcatgagtgtatgtacatgtgtgtatgcatatgtactgaaartgtcattttgtatacacaaaaagcaggaaattcatattaactgagttttgcaatatatttatatcataacactcctgaattttacagtaaggatgaatcattagtctctagtatttctttgctgaaatggttactcacattcatgtttaatagc

SEQ ID NO: 452542 - DNA, 512 bp, Homo sapiens
ttaaatgttaatttaatgcatttatattctacacacacacacacacacacacacacacacacatatgtatataatttctaatcacttttttgtctgaaaccttgacctagagttgacataatatggctcctcctcaraaaatttgttcccacttcttgtttcttgaagccctcccaccaactccacactgtttggattatactacagcagaatctttgcctcaccacccatcccttctccttcttcctgaccacctcccctccccaattttctggaaatgataatccatttaagaaaataaaatacaattaaagtatttggccattaaaagattaatagattttgttattaaaaaataataaaatgcaatgtaaaaaaccccacaaatttgaagaatctaggtcttaacaaggaggattttcaagagggtggagacaaatgcttccattctgtaggctctgcaatgtggtgttcctcaaatgacagcaagcaagccagcatttcttgccaaa

SEQ ID NO: 452543 - DNA, 597 bp, Homo sapiens
tgaaagtatgaattactctaaaatgtgattgtaactttatgtttatttatttgtgtatatgaaaaaatctacttcagtgagacttggtggcatgcttggtgtgtctcctggatagcaaaattatggtaaaatatggtaaaatgctaatatttgggatatgtttctttgactgtcgatattgtattgatttaatggaacctattcatgatagaaaggaaagagaaagacaagattcctatgctaacatcatccttctacttcaattcatctaataagtgtaaataacaagtaacagaattgcctcctttaatttattttgaatattattttaatgaaaatatccagtgtctaaatttcaaatgatgcttacataaaactatkaaagagaaatcaaatacataaataaatgaataaattaataactataattcaaaattaaatcatctaccaataatctagtttaatttttattaacatcattctaaaatgtgctttatatacacatagagattttataataatgataattacactataatgctatttaataaaatatttaatttaattttactcaaattaataacaaaaaacattctg

SEQ ID NO: 452544 - DNA, 558 bp, Homo sapiens
agggcactaagtcccaagacttcaaaagcagcaaagccctgggcccggcacatgataacattttttcctcctaggcctccaggcctatgaagagaggggctgccatgaagacctctgatatgccttggagacatcttccctattgtcttggctccacattacttaygcaagttcctgcagccagcttaaatttctccttagataatgggattttcttttctattgcatcaacaggctgcaaattttctgaacttttgtgctctgcttcccttttaaacataagttccaattccaaccctacctttgtgaatacataaaactgaatgcttgtttaacagcacccaagtcacttcttgaatgctttgttgcttagaaatttcttctgccagatgccctaaatcatctctctcaagttcaaagttccacagatctctagggcaggggaaacatgctgccagtctctttgctaaagcatagcaagagtcatctttattccatttctcaacaagtttctcatctccatctgagatgagcagcatttggtcaaagccattcaac

SEQ ID NO: 452545 - DNA, 518 bp, Homo sapiens
tctgcatgtccagaatgagaattgtgagtggagaagtaggagatgttcccgctctccatggaccttcagtgctgagctaagatgtttggaatttatcctgaaatctttaagctgttaatcaaaggttttagaaggggctaccactccaagtggaaaattgagaaggggagttgacatctactagttgggttttaagtaagcttttgttcaatcctataggctaggaattcatggtcctgtgttgtaagaaataggtgattgctttaaataaagacatggaatattaattcaaatcaaggtaggttattcctttaggtacctggacacaccacacacacacacacacacacacacagagcytagattatcttgttgaaataacataaaataatagaatggcttcttttgagggcacattaacaaaattggagcatcttagtctgtcatgaagaaaggagtggctattctgatggacaggtatatatatttaaaggttccagagagtataaaccagactt

SEQ ID NO: 452546 - DNA, 518 bp, Homo sapiens
tctgcatgtccagaatgagaattgtgagtggagaagtaggagatgttcccgctctccatggaccttcagtgctgagctaagatgtttggaatttatcctgaaatctttaagctgttaatcaaaggttttagaaggggctaccactccaagtggaaaattgagaaggggagttgacatctactagttgggttttaagtaagcttttgttcaatcctataggctaggaattcatggtcctgtgttgtaagaaataggtgattgctttaaataaagacatggaatattaattcaaatcaaggtaggttattcctttaggtacctggacacaccacacacacacacacacacacacacagagcctagattatcttgttgaaataacataaaataatagaatggcttcttttgagggcacattaacaaaattggagcatcttagtctgtcatgaagaaaggagtggctattctgakggacaggtatatatatttaaaggttccagagagtataaaccagactt

SEQ ID NO: 452547 - DNA, 576 bp, Homo sapiens
gatgcacagtagcacagaggaaagtacaggccaatgggagcccagtggaggggagcctgggaagccttcaaggaggaaaaaagaagatcaagtgttaggcaggcaaggggcagcaatgggagtggagagtacaggaagcatctgggcaggagatgcaaatgcaaatatatggggaggaagaggagaactcactccaggcactttgggaagtgaatgcattgtctctacttgacagaagatagccaagagctggaagaggcaaagagatttgcctggggcctcacagccagtagactgcacagagaaggttaaaatctacatctgcttacttcagagcctgagctctttgcattacacgctctgcctttccaagtagagggtggtcaaggcaaccagaagggcagccctagatcaaagcagaaggcactgcagcctttgccagaaatcccattctactggagctaacatgggccccmgaagcagccacgtttacatttcatccttgccaataatgaacgtgccaactaaggggcaggcaacctaggttacccagtggggcatcctttttttctcctt

SEQ ID NO: 452548 - DNA, 576 bp, Homo sapiens
gatgcacagtagcacagaggaaagtacaggccaatgggagcccagtggaggggagcctgggaagccttcaaggaggaaaaaagaagatcaagtgttaggcaggcaaggggcagcaatgggagtggagagtacaggaagcatctgggcaggagatgcaaatgcaaatatatggggaggaagaggagaactcactccaggcactttgggaagtgaatgcattgtctctacttgacagaagatagccaagagctggaagaggcaaagagatttgcctggggcctcacagccagtagactgcacagagaaggttaaaatctacatctgcttacttcagagcctgagctctttgcattacacgctctgcctttccaagtagagggtggtcaaggcaaccagaagggcagccctagatcaaagcagaaggcactgcagcctttgccagaaatcccattctactggagctaacatgggcccccgaagcagccacgtttacatttcatccttgccaataatgaacrtgccaactaaggggcaggcaacctaggttacccagtggggcatcctttttttctcctt

SEQ ID NO: 452549 - DNA, 583 bp, Homo sapiens
gctgtccgctattagcagacactggctggggactagtgctctactgcagtcttaactgagcctcaccagggccctaagaggtacagatcattatcatttccatgttgcaactgtggagactgaggaatgaggggtgctgtgtaacctactcaaggtcccatggttagtaagtgactaaaccaggatccaagcctacgtttctctgacacccaagtctgttctcttaaaaaccatgctatttccctcccagagtcagggatggctgggggtcaccaggraggtgatcatggaagccttacccagggggtgagacttgccagggaggaagccttccccttgagtatggaagggtgattaagagttaaccaagtgaagaaaggggaactgcaaatattctggaagactgcatcagagactgggcaaaagggaatagcactgtcaaagcctgaagaagcaagcaggactcaggcatggaaaaacctttcatgccatgaaaaggagtttggactcctgaaggcaacagggagtcaataagggcttttttcaaaggaggaagctgatcagatttgcattttaggaagct

SEQ ID NO: 452550 - DNA, 583 bp, Homo sapiens
gctgtccgctattagcagacactggctggggactagtgctctactgcagtcttaactgagcctcaccagggccctaagaggtacagatcattatcatttccatgttgcaactgtggagactgaggaatgaggggtgctgtgtaacctactcaaggtcccatggttagtaagtgactaaaccaggatccaagcctacgtttctctgacacccaagtctgttctcttaaaaaccatgctatttccctcccagagtcagggatggctgggggtcaccagggaggtgatcatggaagccttacccagggggtgagacttgccagggaggaagccttcccctygagtatggaagggtgattaagagttaaccaagtgaagaaaggggaactgcaaatattctggaagactgcatcagagactgggcaaaagggaatagcactgtcaaagcctgaagaagcaagcaggactcaggcatggaaaaacctttcatgccatgaaaaggagtttggactcctgaaggcaacagggagtcaataagggcttttttcaaaggaggaagctgatcagatttgcattttaggaagct

SEQ ID NO: 452551 - DNA, 617 bp, Homo sapiens
cccaagttcacacagatcttcgatggatactcaaaggggctcacattacaaattgtctttcccattggctcaggagagattctgagaacttggagagggccggtgagcaagatggttaaataaatgggccaccacctccatgatgccattctgtggggctactttttactccagaatgcagtaccaacacaagcactgcctgagaactccccaccctattgtcatccctgatagaggagttcaccctaaagcctttcccccccgtcatagacagttaaaaagctatcagcctttcctcacagtcatgtacagtctcacccacacaagtgagttgtgcacaattttggagacattctgtgaccccaacttaaaacacttctcccacacacaaagttaacacttcagttaccaggtgatgattgagcagagattcttttacawcccagagcagtactaggactttgttagacaccctggagtgtatttacatcctaaggagggagaggggaggtggggatggtagtagaggacctctgtgtagagattccttttagcaaagagtctcagccatggggaagaaactcctgggagaaagggctcacccggcctggcagggg

SEQ ID NO: 452552 - DNA, 589 bp, Homo sapiens
gcttatgtttcagccatttcctctagtcctttgctttccaaatgtacaatattagctctgaggccaactccaagactcgatcccaattgcctgatgaatattaaaatttttttttaaagttagcatttrttgagcatctatctgttgccagacaattttctatgcctcaatctttaaagcaaccctgtatctgttttcccttttagcaggtgaggaaatggaggcacacagaggtcctgaaatttatccagtcacacagctagtaagaggcagagctgtgaccaggcctgtctggctctttggacttatatactgctgcttctctggatggccagatgtaaagtcaagctcaacatacatcagatcaaattccccaccttcacccttaagctagcccttcttctctcattcttttgcattcaggcactaggtcaaaacctcaaagacagcttgggcttctgcctctctttcactcctgcatgctaattatgcacgaagggctgaccagctgtccttgtcaatatcaccggaagtgcctcttttcccttcttcccactgctgcaaccctagactgggctcagttccttca

SEQ ID NO: 452553 - DNA, 500 bp, Homo sapiens
aaggtctatgggtgttagctgggtacacagtctcctatatgaagatcacattcctcagcctctttttgtagacaggtatggtcgtatacctaggtctggccaatgaagtataagcagagggctccaaaagctgtttcttcccctgcctacttcagtctgattcttggaacactggggtaacagtcagagttcattctggacsatgagaatacctcagcatggggcagcagaaagctggaagctgcctggtccccaaagacttgatgggactgagctaccatggcccaggactgcccatcctgagcttggacatgatggagccaggtgtccatcctgtttcaactcccatgagtgtggggttttctacttctttcaaccaactgaattctaactgatacgctcatttgtagattacacagaggtccctagtcaaactgttatcttctttctctgtggatgataaagaaaaaacatcattctttcagtctccctcaaaggga

SEQ ID NO: 452554 - DNA, 522 bp, Homo sapiens
tggctggagtgtggggatccaggctcccgcaggagcctcattttgtcagtgaagcctttagagatggcatgtggcctggccctttgcagaactggccagagatcacacaatcacgggctcagagagttgaaagggaccttaaggtcacctaatcctccagatggaaggcttctgccctgggatgcccactcccgccaggatcacaggcttacacctcaaacgccacctggcctctgactgcatrgtgccatggcctcaaacactaagtctgcactacacagagaaggcgtgaggactggccctggctttagaaaacctggaatccaagagctgccctggcttccccgcttagtagctgtggacttcggcaaatgacttttcctcttggatcctcagtttgagcatctgtaaggaagattgtcaatgcctaccttacactgtgattgggaggattagacaaagcaagagaagggagacagtggacactgcatgaagataaaagcaccaagataaaggaggatg

SEQ ID NO: 452555 - DNA, 586 bp, Homo sapiens
tattacgtgtctggttggcttttgtaaccaggagacctatggtcttctccgggtctcagtatgttgtcagaatgacacccttcttgcaagcaggcttgtatgccaaccagaaggctaacagccttaattacagaatgtccttcccctaggagtaggtcaaagtcatcttgacatcctcagctgggtggaaaatcttgggttatgtagaaaatctcctaaaaagttcccccagcaaaccttgggcctatcttcaatgctgagtaagtattccactcctaacattttgggcagctgagagaagatgcatgatggaaatgcaccagttctgagkctcaacatgtgtccttcacttatgagaaaccaggtggtacattaagaggttcaaggtggaatcacaagagccctcccttcactgcttattgtacaaacacctgcgagtatattcatgctgttaacaaaacgatacatcaccaatctctcttgagactactggtttcattcaccctctcctataaggctgttggaatgcaagtatcttataggactctctacatttctctaggtctttgcatcattttggtgaaaa

SEQ ID NO: 452556 - DNA, 505 bp, Homo sapiens
taaagaggaatgggagcaacttaggggaaaatcagcagcatctgctaagggtcgatgtattagtcaatttgcacactgctgataaagactgggcaatttacaaaagaaagaggtttaatgggacttacagttccacatggccgaggagacctcacaatcatggcggaaggcaaggaggagcaagtcacatcttacatggatggyagcaggcaaaaagagagagcttgtgcaggggaactcctcttttaaaaccatcagatcttgtaagacttattcactatcatgagaacagcatgggaaagacttgctcccgtgattcaattaccttccactgagcaaggaggtaataaagggactggcatgtagcaatcattcagtaaatgttagttgctttccctggaaagtgccttgtattttatatgtgtttgcatgtataccacaccatactatattatacgattcacaattacactattatatttctaaatgtgttacattcattctg

SEQ ID NO: 452557 - DNA, 500 bp, Homo sapiens
cagtattcagatgaactgaactcagtagtgtattatccttgggaattttcatttctggcttcttcactcaactatgattgctttgaggacataacttctgtcacattcataggtgcaatctcaatgaccatctcartaccttgcataaagtagatagcaaggcaataaatgtgcagcagaatttatcagtcaggatcaataaaaacataaacagttatgttgcagtaacaaacaatcccaaaattttagtggctttccaaaaaaagaagacctatttctcacttattctatctttaccttgcaagttccatcatctttgttttgggaccctggctgaagagatggacaaagggaagatggtagaaggcacagtagcccttagggcttctgcttggaaataatatacatgcttctatccacatcacatctcattggccaaggtaagacacacgaccctttttgatgtcagggggcagggaaggtaacattcttccagagag

SEQ ID NO: 452558 - DNA, 500 bp, Homo sapiens
cagtattcagatgaactgaactcagtagtgtattatccttgggaattttcatttctggcttcttcactcaactatgattgctttgaggacataacttctgtcacattcataggtgcaatctcaatgaccatctcaataccttgcataaagtagayagcaaggcaataaatgtgcagcagaatttatcagtcaggatcaataaaaacataaacagttatgttgcagtaacaaacaatcccaaaattttagtggctttccaaaaaaagaagacctatttctcacttattctatctttaccttgcaagttccatcatctttgttttgggaccctggctgaagagatggacaaagggaagatggtagaaggcacagtagcccttagggcttctgcttggaaataatatacatgcttctatccacatcacatctcattggccaaggtaagacacacgaccctttttgatgtcagggggcagggaaggtaacattcttccagagag

SEQ ID NO: 452559 - DNA, 613 bp, Homo sapiens
acctgcatttctgttccaataaccttagatttccacaataccactctgacttgttctcacttctgttgtcatctctgggttcagagaagacaagtgactagcggaagatcacacagataatttctaatgttagagctggaatccaaattctagtctatctgatttcaaattctgtgacttttgctatgctctyctgacttctatcacatcatagaggagtctaataaaatatactatttcaatcactgacattttattgagtcttcactattttccaggtcctgtataaaatatacataattgctatacatattaattatcatattttattgtattttttagagatgggatttcaccatgtttcccaggctggtcttgaaatcttgagctcaagtgatccacctgcctcaggctcccaaattgctgggattacaggtgcaagtcactgtgcccagtatatgaaatactaattatatattatataattattaacattttagaggctaataattatgtctatcgtatataatatgtatcctacacacatgaataattatgtatatcatatattatatatatacacacacacacacatatataattatctcattta

SEQ ID NO: 452560 - DNA, 558 bp, Homo sapiens
tacgtgggctgaaagatcaatgggctttggcttagtgtggattttctgggcttcctgaactcttccctggtgtgatgtcaagtcytctgataagttttcgtctctccttaggtctttcaaatcccaaggtggtatcaagggctgctgcccagatcccaaactcctaccacggcttatgggtgcctgggacagtcccgaaggcctaaggtcttgctcaatcaatggccttgcattggccctgagattctgattacagttgttttgcaaataatgagaaatttgaaaaatattgctgtcccctaaattgagccagtcctaacactcacaaaatccataatggtatagatacccagatagaccttaactgtgatttaatagtgctcactgtaatttagccccagggaaatgtgctttcaattaaccaatgtaagcacaatgtctacttatcccataaatgttctcctaaatgtgctaattaagacctagatccagtgcttctcatattacactctctttcctttctcctaaatgcctctctacttcaggatcactttatgc

SEQ ID NO: 452561 - DNA, 475 bp, Homo sapiens
gtattccaaaaaagaggccaattccagcctatcagtgataagtggagctctgagtgcccctcccctatgctcccagttcaattctcaggttcacatatgcagactcagcacatcagcccccctaggagggctaatttcacaataagttccagcaacttccacctcatggattccatgaggaaactgactttggtcttttcccaatacccacactaaggagcaggcaggttttcctttataactaaatagagtgagactgatgatactccctgtccacactcacccttcttttttcagtttatttttcttgccttattgcacttatattaaaaaactgattattgtgacatgtaacacatatgggaaaatctatgtaaataaaggtctggctaataagcccaatgagttccarcatctgagaagacccaattatacctgtccccaataactattatctcctttaaaggtaaccatt

SEQ ID NO: 452562 - DNA, 308 bp, Homo sapiens
tacactaggcttcatcaatctgataggcaggtagcacaaataaatatgtgaaacaggtgaaaactgtgcttagcaggagagcacacactccacctgaagggggcagcacctgcagctgactgttaccaggccgcacagtggccccagtrtcaccaagctcgatttttcaagagaccccagaaatctggactttttaaaatgtgaaatctgccactatttaaatgtttgcacattttaagtcatacatattctccaataaaaattcaacaaaaaacttttccaaaaagtttcagtgaaaatagccatgg

SEQ ID NO: 452563 - DNA, 562 bp, Homo sapiens
gaaaaaaaaaaaaaaaaaagccagtcaccaatgttgcataacagatgaaaagcttggttatttgagtataattatcattagttagatattgtcccaaataaagcagagggcattggttactctactggtgcattatattctagaattgtattgctctagatgcatcagggtcattgctatataaaagggaaagacaaggatttttcagaatcaggttcctatgaggtgttaatgatctcctgaatattgtatttagctctttacataccactgtgatgcaaaagtgtgaytgaataatgatccatttaaatggataattatgggggcatctttgtatttctaagaagactcacgcaaatacaacgtgtataaataacttgtgttttagggcagtggcaggaggaggagtatgaatctcactctgtaaagaaactccttttcctaagtcttttagtaggacaaaaaggcatctcttaatgttgttgatttcaaatctctgttattggggttatctaatatgaatgtaaaattatataatctacacactgtatagaatatacac

SEQ ID NO: 452564 - DNA, 402 bp, Homo sapiens
ttgcatcttaacactcttttttccctacctctctttccctccaggtctatggcttttctgaatttaaaaagcatttcaaaggcctgtagacaaatgctttgtaaacatgtctgagcaatgggtaatgtgtccacatagaacaatttccggggaaccacatggttatatgtccattaataaatagctttctcaaggtctcagaatgagaaatatcttcagacttttagtttcttcttctgtttgccagaaaattgctttacgttatatcatcataaaatggtctattttgcagcaacagatgtgtataaaatctgkgcatggctttaaactttattagtattggctgagtaccgatggatactatcacttaatggcatatgtgtatatacctacttacataga

SEQ ID NO: 452565 - DNA, 601 bp, Homo sapiens
tgtgattcaatctatcacccaccctcaggtcagtaattacctgttaagcttggtgagggatgcatgaggcaggaggtcagcctgggcaacatagcgagatcctatctctaaaaaaataaaatatatataattacttcagcttcattgcaaatattcattgagcttttactatgtgccaggagctatgtctaccaaggtgaataagaccacacactcctattcctccagcttacatcccaccatcttttctgtgaccaactgctcattcctgctttcattttcctgtctatgaatttagagtccttagtccaacattgtgctaaccattcccttgtaaatgtcttcaactcccttgccctctctcccctattgcacacacacagcaaacctttgcttatgaatgaaatctgagacccacttcccctatgccagctcagcattgctggagaaagtcacacaactgtgccaactgatgtcatttataatatgtgacccaaactcatccttctcccagttatctgatttcagtaaatggcaccatggcccacccaaatatttaggccagaaattcccttttacstcatgccccatgttcaaacca

SEQ ID NO: 452566 - DNA, 587 bp, Homo sapiens
atttttaaatacttatagtcacttaggccattggagatcagagggtgaattcaatcatatcatcctaaaaaaataaaacagtaaccatgtgaagcaaatattatctatgccactgtgcaaataaaacaaatcatttgattaagaagatacagctcataattaatagcaactatatgttaaagctcattttctgaattctaaaataataattgttaaaccagactattgcccttcaaattgcctgcttttcttctttattttatttattatcactgacagggtgcgggctatgctacccgaartaagataacttggaggtcactccctgactttttctacctttctctgtgagggctgtcctctgtaagtaggtcaaaagaccgtcatgggacaggtgtcccgctccgtacacagggggaaggaatgtcacacagtcacacagagaagaatctaacacataaagcttgctgcattctctcctagtttattatcgttaggtcataccccttctgtatgttcatgtttctttacaaccatttacttctttcatcagacttcacataaaaatacacaattttctctgggtc

SEQ ID NO: 452567 - DNA, 413 bp, Homo sapiens
ggattccaacaaagatcaaaggtagggaaaaattggagattactcttccaggtcgtaaagatgaatacaaactttgtcaggtatttgctggaatttttaggaaacaaatttcaattaagtggagagtgtttggccacatcttattgcccttatgatgctggcctctctcctataccccataccacaagttttctattttacagmaatagagtaattaaagaattgccatttgaacacagggaagagacgggatctttatcagtagctgacttctttgttttatctaaaacattaattcagcatgccagtgattgttgggagtaaaaaatgtaaacattctggaagtggaaagtatcaagaaatctcaaatgtagttctccctgaagtgaaaccaaaacagtaatgtaaggtag

SEQ ID NO: 452568 - DNA, 413 bp, Homo sapiens
ggattccaacaaagatcaaaggtagggaaaaattggagattactcttccaggtcgtaaagatgaatacaaactttgtcaggtatttgctggaatttttaggaaacaaatttcaattaagtggagagtgtttggccacatcttattgcccttatgatgctggcctctctcctataccccataccacaagttttctattttacagaaatagagtaattaaagaattgccatttgaacacagggaagagacgggatctttatcagtagctgacttctttgttttatctaaaacattaattcagcatgcyagtgattgttgggagtaaaaaatgtaaacattctggaagtggaaagtatcaagaaatctcaaatgtagttctccctgaagtgaaaccaaaacagtaatgtaaggtag

SEQ ID NO: 452569 - DNA, 413 bp, Homo sapiens
ggattccaacaaagatcaaaggtagggaaaaattggagattactcttccaggtcgtaaagatgaatacaaactttgtcaggtatttgctggaatttttaggaaacaaatttcaattaagtggagagtgtttggccacatcttattgcccttatgatgctggcctctctcctataccccataccacaagttttctattttacagaaatagagtaattaaagaattgccatttgaacacagggaagagacgggatctttatcagtagctgacttctttgttttatctaaaacattaattcagcatgccagtgatkgttgggagtaaaaaatgtaaacattctggaagtggaaagtatcaagaaatctcaaatgtagttctccctgaagtgaaaccaaaacagtaatgtaaggtag

SEQ ID NO: 452570 - DNA, 615 bp, Homo sapiens
gaaatagaactacataaatatattttgtgggccgggyacagtggctcatgcctgtaatcccagcactttgggaggtcgaggtgggtggatcacctgaggtcaggagttcgggaccagcctggccaacatggtgaaactctgtctctactaaaaatacaaaaatatcacttgggcatggtggcaagtgcctgtaatccaagctacttgggaggctgaggcaggagaattgcttgaacctgggagatagaggtcgcagtgagccgagatcatgccattgcactccagcctggatgacagagcgagactctgtgtcaaaaaaaaaataataaataaataaatgaaaataaatttaaataaataaataaattttgtgactttgttccttgacaaagacacaaaaacaatacaatggagaaaatatagatcttttaacagatagtgctaaaacactttgatatccacatggaaaagaaacaaaacaaaagaaaaactaaaagaatctagacacagaacctacatccttcacaaaatttagcttaaagtagatcatagacctaaaggtaaaatacaaaactcaaactcctagaagataacatatagaagaaaatgcagatg

SEQ ID NO: 452571 - DNA, 615 bp, Homo sapiens
gaaatagaactacataaatatattttgtgggccgggtacagtggctcatgcctgtaatcccagcactttgggaggtcgaggtgggtggatcacctgaggtcaggagttcgggaccagcctggccaacatggtgaaactctgtctctactaaaaatacaaaaatatcacttgggcatggtggcaagtgcctgtaatccaagctacttgggaggctgaggcaggagaattgcttgaacctgggagatagaggtckcagtgagccgagatcatgccattgcactccagcctggatgacagagcgagactctgtgtcaaaaaaaaaataataaataaataaatgaaaataaatttaaataaataaataaattttgtgactttgttccttgacaaagacacaaaaacaatacaatggagaaaatatagatcttttaacagatagtgctaaaacactttgatatccacatggaaaagaaacaaaacaaaagaaaaactaaaagaatctagacacagaacctacatccttcacaaaatttagcttaaagtagatcatagacctaaaggtaaaatacaaaactcaaactcctagaagataacatatagaagaaaatgcagatg

SEQ ID NO: 452572 - DNA, 348 bp, Homo sapiens
gctatataggttcaagaatctcaaagaactccaactagaaaaagtccacattgaactacrcatagacacatcataatcaaactgtctaaagtcaaagacagagagaatcttgacagcagcaggagaaaagcaattcattatctacaagggggcttccataaatatcagcacatttctcagcagaagctatatggaccataagggagtgggataacatattcagcatgttgaaatactgtatgcagcaaaactgttttttgaaaataaaaaagaaataaagactctcctagatgaatcaaaattgcagaattacattacaagtagacctctttaatggaaatgctaaaa

SEQ ID NO: 452573 - DNA, 636 bp, Homo sapiens
  misc_feature (1)...(636): n = A,T,C or G
tgctagtttataggatggggttcattcccttgtttcaataaatattgggggcaaggcagttagttaattcgtagtacagcatanccaactctnccacaaagtttttatttcccacttaaaaagggccaccaacatagtaccttgccttgtaggaagcacactatcagccctgaatgcatattcttcttcaggactacaccctcctgcaaatacaggaaggccaatatggcttctattaaggtcaaaactggtcttccctcagcttactctagcaaaaaagttggtcccacaaacatagcagatgagaccctagatttcttgctcaccctatttcttcctgctctcttgtaccaccctcccatatttaaaatttcagaaaaatgtgctgttgtataaggaaatgcagaggggtggagaatgaaaaacaaacaatctatatgttaacatctggagcagactaaattaaaacatagaactcattactgcagcaattacttactaagtctgggaactkaaacctaaatctgggctgaaatttttcaagcatgccttcatgtaaaaataacttgggggaaaaatctgcatggactattgtgaatcaaattgaatttcatctccattattgaaaatgcatgg

SEQ ID NO: 452574 - DNA, 595 bp, Homo sapiens
acatttttaatggatgaaaataaagcagattakagacaccagatgaaaataaaagtgtacttaaaaacataggaaagtaaatttttcaaaatgaagacacgacaaagaggactgcaaaataattaagtagggccttgggaatctataggagcataacaggcagtcttatgtttgtgactggaatcccagtacaagagggataggaatacagaaaagctacacatacaatgtaaaacgttacaacaatatatttccttttgaaaaaaatggcaaaaaaactttccaaatttgatagaaactgtaatgtaacagatctcagaagctcaacaaactccaatccaactagctacaagcacacatacactcagagcccacttcataacactgcatacacaagtggctgaacactaactacagagagaaaatctcaaaagaaaaaaaagacataatatgtacagacaaattaaaaaaaacttgaacagatttttgcatcacaaaaaagtcactgtttaacggaatgccatgtttaaagtgctgaaaagtcaaaaatatatacaaaccctatgaaaatgtccttcgagaaaggtaaagcaaa

SEQ ID NO: 452575 - DNA, 595 bp, Homo sapiens
acatttttaatggatgaaaataaagcagattagagacmccagatgaaaataaaagtgtacttaaaaacataggaaagtaaatttttcaaaatgaagacacgacaaagaggactgcaaaataattaagtagggccttgggaatctataggagcataacaggcagtcttatgtttgtgactggaatcccagtacaagagggataggaatacagaaaagctacacatacaatgtaaaacgttacaacaatatatttccttttgaaaaaaatggcaaaaaaactttccaaatttgatagaaactgtaatgtaacagatctcagaagctcaacaaactccaatccaactagctacaagcacacatacactcagagcccacttcataacactgcatacacaagtggctgaacactaactacagagagaaaatctcaaaagaaaaaaaagacataatatgtacagacaaattaaaaaaaacttgaacagatttttgcatcacaaaaaagtcactgtttaacggaatgccatgtttaaagtgctgaaaagtcaaaaatatatacaaaccctatgaaaatgtccttcgagaaaggtaaagcaaa

SEQ ID NO: 452576 - DNA, 593 bp, Homo sapiens
cgagtttttaaccaatgtgttttgagtaaactaattgaaagtttaccgtatccatgggtagttttaaaacattgaagtccaggcaatggttcctatctaatactttttgaaaataattaattmttgaatattagaaatattattgctaagaaacttgaagttttgtcaagcaatcaaccagctcccctatcccctcccacctccatggtttaagcctattatagaaaaaaggataagcagagatatgaaagaacagctcacctacaacccccaagtagtgtgtgttgagactatcgtccatttctgaggacaattggtccaacatttatcatgatcaatacatttgttaacaagcagaagcccattcttacctctgacagatttatttgtagaagatgctgtgtcaccccaatgtcctggctgctggtcaattcaagttttcatcccataactagtagagcccaaggcaatcagtaaagaggactcttagaaaatcattgactttgggcacaggaggaaagcaaggagaggcctaaaggaaaattgagcctgaaaagtcaaacggattttagctgagcaagttttaaatttgg

SEQ ID NO: 452577 - DNA, 566 bp, Homo sapiens
ctacaacccccaagtagtgtgtgttgagactatcgtccatttctgaggacaattggtccaacatttatcatgatcaatacatttgttaacaagcagaagcccattcttacctctgacagatttatttgtagaagatgctgtgtcaccccaatgtcctggctgctggtcaattcaagttttcatcccataactagtagagcccaaggcaatcagtaaagaggactcttagaaaatcattgactttgggcacaggaggaaagcaaggagaggcctaaaggaaaattgagcctgaaaagtcaaacggattttagctgagcaagttttaaatttggagagagatatcaatttataggcaatctttgtggtgtcctcaaaaaatatgccacagaaattggccaagtttgggttaaaaaaaaaaagaaaaaaatccctgtgatagtcaggctcyggggtgatagtgattaacagaatacattatggtattcaacaaattggaccccagatcatatcatctcatctcctctgagtatgaataacttttcacataaaaggcaaccagaggaaac

SEQ ID NO: 452578 - DNA, 487 bp, Homo sapiens
ttggccaagtttgggttaaaaaaaaaaagaaaaaaatccctgtgatagtcaggctccggggtgatagtgattaacagaatacattatggtattcaacaaattggaccccagatcatatcatctcatctcctctgagtatgaataacttttcacataaaaggcaaccagaggaaaccataaacagggattcatctaaggtctcttcatctcagagaatagcaagatgtcctaccaggagtcccaatttggatgggaggaaccctgaagtaaaacatttaaggatattattctcagctgcctgtttaatcataggtgagaaagawcaggccttcttgccttgtcatatagtcttacagtgggatagcctcattcatcaaagttatagatttcagatatgaagacatcaaagacaatttgcaggcctcttggcagaagccattcatatattccatctagtctgccaacaggtaacagatgtgtccagtgt

SEQ ID NO: 452579 - DNA, 490 bp, Homo sapiens
caaacagacatggatttaattctagctctgacataaactatatgactttgctcaagtatattaacctcttggaacttcatcatttgcacaatgtgaaaaatacttcataaggctgctttgaatgtcaataagttaatgtaagtaatgcaagtcagcagtgaatatgcatacaaaaaatctaacttatattgtgtggtcaataatgtcagtgctcttccatctaaaaggccaaaaagcatgccccttccatcatttctttcactgattgatagaatgaaatatatccartatttaactaataacaaaacagctgtctctatttcaaacattcatactttcatttgaacatgggaggttctgaattttcatctttctgaatcccttattaactataaaatcagttgagtggagtttcaccttaaactctgattggataaacatctagacctcaatcatgttatatgtggccagtgtgcttgttgttgttata

SEQ ID NO: 452580 - DNA, 531 bp, Homo sapiens
taaatattggtatcttctccaaacttagaagaaggtagaaactatatgtcagctctttccacaagctcarttgagtggtatacaatgaaagaaagtataccacttgctttcagaccaaatactgacacccaaagtgatgtttattatctaagcaggcatataacaactttacaaccaattcttgtagacttgttgaagtcttgactttctgtcaaacacagagaatgtgtttgaaagactgacccaaggcaaatacaacaaatattttgatagcaagatcaaccattattcttgtaaggttcagtggcagaatcttttttaagtggaataaaacaagaccaaatgaaattctagttctatagcactagtgtgagggactcaagtgcctggttcatcaaattcttatttacccattaaacaaaagtgatgtaaggacacaattattctagtcaaatagccacgcacatatcttaaacactgtttcactcataaaaacattatttctaatctatattatgtagttagcaatcc

SEQ ID NO: 452581 - DNA, 531 bp, Homo sapiens
taaatattggtatcttctccaaacttagaagaaggtagaaactatatgtcagctctttccacaagctcaattgagtggtatacaatgaaagaaagtataccacttgctttcagaccaaatactgacacccaaagtgatgtttattatctaagcaggcatataacaactttacaaccaattcttgtagacttgttgaagtcttgactttctgtcaaacacagagaatgtgtttgaaagactgacccaaggcaaatacaacaaatattttgatagcaagatcaaccattattcttgtaaggttcagtggcagaatcttttttaagtggaakaaaacaagaccaaatgaaattctagttctatagcactagtgtgagggactcaagtgcctggttcatcaaattcttatttacccattaaacaaaagtgatgtaaggacacaattattctagtcaaatagccacgcacatatcttaaacactgtttcactcataaaaacattatttctaatctatattatgtagttagcaatcc

SEQ ID NO: 452582 - DNA, 592 bp, Homo sapiens
cttagagggctggtcctttaaggcaggctgacctcactagagaaggcagaatctttgtggtcagctgtgacttgcagctgaggtatatgctagggaagaaagagggcctaggttagtagacaacctccccactcaaaaaccaacttgcgcattctcgctgtgtttgctttacttcaaaggctgtttttattgtcacccaggcatagaaactagccttcagggtttactgcatgtcctgacatgaagcttctcactgtctaatttgcattctaaataggtgcacaattgattcacaaaacctctgtgctgcttaacaggacaaatgaatcatttactttccaaattgcagggagctttgaggtcagtcagcctgggaagccacagagcctctccctcagagacacagaggaatacaaacaagcaggctccagctttgggaaccatctccatttgagtggycagtgccatcatcctcttacaacactcaggggatgcagggtattagcatgctcaagccagcatatggtacacatcttattaacgtaatcgcaggactccagcaagctgttttccagatgatttggacccctgt

SEQ ID NO: 452583 - DNA, 562 bp, Homo sapiens
gggcgaggcccagccctgggcctgtggagccctcatcaagcaggtccctcagactcctgcctgccgccgccaatcaggcaacaccagccttccttttggatgatggaaacagttctatcttatttaagttggtgcttacgtttgttagaacttgccgaactgaggatcgcttgagcctgggaatttgaggctgcaatgaggtatgaacacgcaggtgaattgccattgcactccagcctggtaggtatagtgagaccctgtctcaacaaacaaaaaacgtaccgactgtatacascaaatgggtgcctttattttatgtaaaatttaccattaaagggttaatttgaaaaacatttgatgcaggagatgcagcctatcatttcaaaatcattggtttatgggtagatttgttacacagatgaaactgacaaaaatacagcaaacaagggtaaagcctgttgataactgttctgggtttataagacattttagaagattcagtcagaaaagattaatgcccatgtagtggcatggcaggcaatgggaagagaggatagctagg

SEQ ID NO: 452584 - DNA, 547 bp, Homo sapiens
tgattaagacaaaggaatgagaacagaaaaaaaaaaatgaagcacatagaatataaggctaaataatcactagcatgggctatgaccaagacactaatatttttctctctccaccttgattcctgctcaaaggaatgctcttgacaactgtgttcacaaagagaatgtttgtaaacttttgtcccaaaataacacccacatgcagttttcaggttgctcatgttctataagcctaaaygaatttcccatttgcttcagttttcttttttcttcaagagaagtttttatcttttcaacctgaagtgtttgctgttgtgccccatggaggttcactggaaatctctgacataaggcagattgattaataggagaaaaagcatacaaatttatttaatgtgtgtacccaggaacccttagaatgaagacccaacatcccaatgaggtacagaagcttgtaaccaccttgaggttacagaaagaatggggcttggattctggtagaagaaaatatgagatgggggaggagaggaattctattgaggagcaa

SEQ ID NO: 452585 - DNA, 547 bp, Homo sapiens
tgattaagacaaaggaatgagaacagaaaaaaaaaaatgaagcacatagaatataaggctaaataatcactagcatgggctatgaccaagacactaatatttttctctctccaccttgattcctgctcaaaggaatgctcttgacaactgtgttcacaaagagaatgtttgtaaacttttgtcccaaaataacacccacatgcagttttcaggttgctcatgttctataagcctaaacgaatttcccatttgcttcagttttcttttttcttcaagagaagtttttatyttttcaacctgaagtgtttgctgttgtgccccatggaggttcactggaaatctctgacataaggcagattgattaataggagaaaaagcatacaaatttatttaatgtgtgtacccaggaacccttagaatgaagacccaacatcccaatgaggtacagaagcttgtaaccaccttgaggttacagaaagaatggggcttggattctggtagaagaaaatatgagatgggggaggagaggaattctattgaggagcaa

SEQ ID NO: 452586 - DNA, 319 bp, Homo sapiens
gatcccatttgaattctccactggtatcaggactcctgcaacagaagacagattaacagcagaaaagcaaacataagtttaataacaggtacagctcctgaatatgtcacacgcatccacgtgaaaagaccaccaaacaggctttgtgtgagcaataaagcttttactcacctgggtgcaggcaggctgagtccaaaaaaggagtcagctaagggagataggggtgagacagttttataggatttgggyaggtagcggaaaattgcagtcaaagggggttgttctctggcagccaggggcgggggtcacaaggtgctcc

SEQ ID NO: 452587 - DNA, 591 bp, Homo sapiens
  misc_feature (1)...(591): n = A,T,C or G
ctgtctttctgtctttcttatcttcattagcttttctctgcaggctccttggagcaggccagggtagtctggagggttagatgcagcttggtccagagacacatgccttctgccaccaccaccactaccaccaccactggtccctcagctctggtgaaaagctggctgctcatgtgacaaacttttctagagctcacctattcttactgtgatggttaatactgagtgtcaacttgattgggttgaaagatgcacagtattgatcctgggtgtgtctgtgagggtgttgccaaaggagattaacatttgagtcagtgggctgggaaaggcagacccacccttaatctgggtgggcaccatctaaacagctgccagcatggctagaatataaagcaggcgaaaaaacatgaaaagactagactggcctagcctcccagcctacatctttctcccatgctgcatgcttcctgccatcaaacacgggactccaacttcttcagttttgggactcagactggctctccttgctcctyagcttgtagatggcctattgtggaaccttgtaatcctctgagttaatatttaannnnn

SEQ ID NO: 452588 - DNA, 546 bp, Homo sapiens
aatatgactagttaaatattgctggttgaatagaaagggtttcttttctaagttataaacaaaatacccatgtatttaactttagggtacttgctttgatggtaattgactatatcatgtgctatatcattgattaatagaaaaataacrtagtcattagactaagctttatctaatttctactgtattttttccaagcataattgctaaggatgaataaatcaaataaatataagtagaatcaaagactacaaaggtactccattttaacaacaattatgttgcataatatgtttacttaaagctttctcaaatctctttgacaagtacacccttcaggttttactaagttaaattaagtgataggtattcaaccaaattttagatcattttcaaataagataaaatactaaatttataacaaaaggtttatctattttggcttcttattataaagaaacaaaatatattttggtctgttaattagtatgttctgtttcacattttttaaaatttgtgggaaaagtatttttagaaattacaaag

SEQ ID NO: 452589 - DNA, 625 bp, Homo sapiens
aaagtttgttttagaatgaaaaaatatatacataaaactgaatgagtaaaaagttacaaaargataatgaaagataaatcttaaaatgtatttgtatgtgtgatcaaactgaataaaattaaattaattttatgtagcatttttaaaaagtcttaatatcaaaagtacactgatacaaaactacaatatgtcttctcttttcaacaagatttttatatattaagagatagtaagatatttttgtttaccttttgagcgaactgaaaagagagatagattctaatgttatcaagatattttcctgtgcttcatgttttctttattgggtctttgattatttaggaaaactaaatatttaagaagttaagagttttttttacaatcatgtagcttcctgtattagtttttaaagtcttttaatcatgactctggttaaattaataattattattttataatccataattttatttttgatcatgtgtttcaaaactattttgtgaaacttttcaaaatcaaaattaagtctttttaatttcaagcaaatttttggacattgcagaaagaaccctagaccaacagaaagctattaaactgattagtctcatttgctatgttaaaatta

SEQ ID NO: 452590 - DNA, 625 bp, Homo sapiens
aaagtttgttttagaatgaaaaaatatatacataaaactgaatgagtaaaaagttacaaaaggataatgaaagataaatcttaaaatgtatttgtatgtrtgatcaaactgaataaaattaaattaattttatgtagcatttttaaaaagtcttaatatcaaaagtacactgatacaaaactacaatatgtcttctcttttcaacaagatttttatatattaagagatagtaagatatttttgtttaccttttgagcgaactgaaaagagagatagattctaatgttatcaagatattttcctgtgcttcatgttttctttattgggtctttgattatttaggaaaactaaatatttaagaagttaagagttttttttacaatcatgtagcttcctgtattagtttttaaagtcttttaatcatgactctggttaaattaataattattattttataatccataattttatttttgatcatgtgtttcaaaactattttgtgaaacttttcaaaatcaaaattaagtctttttaatttcaagcaaatttttggacattgcagaaagaaccctagaccaacagaaagctattaaactgattagtctcatttgctatgttaaaatta

SEQ ID NO: 452591 - DNA, 625 bp, Homo sapiens
aaagtttgttttagaatgaaaaaatatatacataaaactgaatgagtaaaaagttacaaaaggataatgaaagataaatcttaaaatgtatttgtatgtgtgatcaaactgaataaaattaaattaattttatgtagcatttttaaaaagtcttaatatcaaaagtacactgatacaaaactacaatatgtcttctcttttcaacaagatttttatatattaagagatagtaagatatttttgtttaccttttgagcgaactgaaaagagagakagattctaatgttatcaagatattttcctgtgcttcatgttttctttattgggtctttgattatttaggaaaactaaatatttaagaagttaagagttttttttacaatcatgtagcttcctgtattagtttttaaagtcttttaatcatgactctggttaaattaataattattattttataatccataattttatttttgatcatgtgtttcaaaactattttgtgaaacttttcaaaatcaaaattaagtctttttaatttcaagcaaatttttggacattgcagaaagaaccctagaccaacagaaagctattaaactgattagtctcatttgctatgttaaaatta

SEQ ID NO: 452592 - DNA, 607 bp, Homo sapiens
tgccatgtacaatgtcacccacttccacccacttgtttatactaacctaattttttaaatcacaagttctactttcagttgattcttaggcaagcattcattctgatgatgctaagcattgctcataagtcatttcctactaaattggctaatgcttttttgttgtgttaacacatggactctcttaaatgctaaaggtggcattttctatttgcttaccttagtattagctttcttatccataaataggaataatagtttctttttgtttttatttttgttttcttgagacagagtctcacttggttgcccaggctggagtgcagtggcacgatctcagctcactgcaacttccacytcccaggttcaagtgattctcctgcctcagcctcccgagtagctgggattataggtgtgcaccaccacacccagctaatttttgtatttgttagtagagaaggggtttcaccatgtttgccaggctggtctcaaactcctgacctcagatgatccgcctgcctcggccttccaaagtgctgggattacagctgtcagttaccacacctggcccaggaacaatagtttctatcttacagtctttcatgtt

SEQ ID NO: 452593 - DNA, 607 bp, Homo sapiens
tgccatgtacaatgtcacccacttccacccacttgtttatactaacctaattttttaaatcacaagttctactttcagttgattcttaggcaagcattcattctgatgatgctaagcattgctcataagtcatttcctactaaattggctaatgcttttttgttgtgttaacacatggactctcttaaatgctaaaggtggcattttctatttgcttaccttagtattagctttcttatccataaataggaataatagtttctttttgtttttatttttgttttcttgagacagagtctcacttggttgcccaggctggagtgcagtggcacgatctcagctcactgcaacttccacttcccaggttcaagtgattctcctgcctcagcctccygagtagctgggattataggtgtgcaccaccacacccagctaatttttgtatttgttagtagagaaggggtttcaccatgtttgccaggctggtctcaaactcctgacctcagatgatccgcctgcctcggccttccaaagtgctgggattacagctgtcagttaccacacctggcccaggaacaatagtttctatcttacagtctttcatgtt

SEQ ID NO: 452594 - DNA, 607 bp, Homo sapiens
tgccatgtacaatgtcacccacttccacccacttgtttatactaacctaattttttaaatcacaagttctactttcagttgattcttaggcaagcattcattctgatgatgctaagcattgctcataagtcatttcctactaaattggctaatgcttttttgttgtgttaacacatggactctcttaaatgctaaaggtggcattttctatttgcttaccttagtattagctttcttatccataaataggaataatagtttctttttgtttttatttttgttttcttgagacagagtctcacttggttgcccaggctggagtgcagtggcacgatctcagctcactgcaacttccacttcccaggttcaagtgattctcctgcctcagcctcccgagtagctgggattataggtgtgcaccaccacacccrgctaatttttgtatttgttagtagagaaggggtttcaccatgtttgccaggctggtctcaaactcctgacctcagatgatccgcctgcctcggccttccaaagtgctgggattacagctgtcagttaccacacctggcccaggaacaatagtttctatcttacagtctttcatgtt

SEQ ID NO: 452595 - DNA, 607 bp, Homo sapiens
tgccatgtacaatgtcacccacttccacccacttgtttatactaacctaattttttaaatcacaagttctactttcagttgattcttaggcaagcattcattctgatgatgctaagcattgctcataagtcatttcctactaaattggctaatgcttttttgttgtgttaacacatggactctcttaaatgctaaaggtggcattttctatttgcttaccttagtattagctttcttatccataaataggaataatagtttctttttgtttttatttttgttttcttgagacagagtctcacttggttgcccaggctggagtgcagtggcacgatctcagctcactgcaacttccacttcccaggttcaagtgattctcctgcctcagcctcccgagtagctgggattataggtgtgcaccaccacacccagctaatttttgtatttgttagtagagaaggggtttcaccatgtttgccaggctggtctcaaaytcctgacctcagatgatccgcctgcctcggccttccaaagtgctgggattacagctgtcagttaccacacctggcccaggaacaatagtttctatcttacagtctttcatgtt

SEQ ID NO: 452596 - DNA, 498 bp, Homo sapiens
gtggtggttctatgactctatgcatttgtcctaatggaagccagaaggcagtgaaaggaaatattgaatgtgctgaaagaaaaaataacaagaaaactcagccaagaatattatagccaacaaaattgtcttttcaaactaaaggcagaatgacaacatctccaggtaaacaaaaacagattatttgttgcaagtagaaccatcttaaaaaaacaaacaaacaaacaaacaaaaaaccactaaaggcaattcttcaggctgaaagcaagggatactagaaagtaatttgaatctactgaaaaaaacaagagtaccagtaaagtaatcatgtaggggaattgtatatctattctcttgcataaactaatttaaaaagtagyaaaaataatatgtatataattgtataattgggccaaaaacatatagaaaaattatatgtttaacaataatagcataaggaggcaactgcaaacaaaactgtattggagtaaggaaatg

SEQ ID NO: 452597 - DNA, 498 bp, Homo sapiens
gtggtggttctatgactctatgcatttgtcctaatggaagccagaaggcagtgaaaggaaatattgaatgtgctgaaagaaaaaataacaagaaaactcagccaagaatattatagccaacaaaattgtcttttcaaactaaaggcagaatgacaacatctccaggtaaacaaaaacagattatttgttgcaagtagaaccatcttaaaaaaacaaacaaacaaacaaacaaaaaaccactaaaggcaattcttcaggctgaaagcaagggatactagaaagtaatttgaatctactgaaaaaaacaagagtaccagtaaagtaatcatgtaggggaattgtatatctattctcttgcataaactaatttaaaaagtagcaaaaataatatgtatataattgtataattgggccaaaaacatatagaaaaatyatatgtttaacaataatagcataaggaggcaactgcaaacaaaactgtattggagtaaggaaatg

SEQ ID NO: 452598 - DNA, 498 bp, Homo sapiens
gtggtggttctatgactctatgcatttgtcctaatggaagccagaaggcagtgaaaggaaatattgaatgtgctgaaagaaaaaataacaagaaaactcagccaagaatattatagccaacaaaattgtcttttcaaactaaaggcagaatgacaacatctccaggtaaacaaaaacagattatttgttgcaagtagaaccatcttaaaaaaacaaacaaacaaacaaacaaaaaaccactaaaggcaattcttcaggctgaaagcaagggatactagaaagtaatttgaatctactgaaaaaaacaagagtaccagtaaagtaatcatgtaggggaattgtatatctattctcttgcataaactaatttaaaaagtagcaaaaataatatgtatataattgtataattgggccaaaaacatatagaaaaattatatgtttaacaataatagcataaggaggcaactgcaaacaaaactrtattggagtaaggaaatg

SEQ ID NO: 452599 - DNA, 618 bp, Homo sapiens
atgaagagagatggaaacgtgagacataaaatgagaaaaatgggaaatataagttcaacaatatcaataataatagtatatataaatgagttaagccaataaaactgaataaattaacaatgaaagcagaaatagagatgtcaacaataaatagttgaagactttgataccacacattcaataatgaatagagcaattacaggagattaacaaggatatggaagaatttaacaatactataaacaaacaaaacctaaaacatctataaaacactacattaccaacagtagaacatatattctccataacagacaatggagaccatgggtataaaacaatcctcagtaaatttaaaagaattaaaatcaaataaattatgttctccaaccacaaacaaattagtaatcaataacaaagttagaaaaattgacaaatatttgacaattacactatactctcttaaatatttaataactctaaaaagaaataacaaatttattgagayaatttgaaacaaaagacaacataccaaaatttatgagatgcaactaaagaagtgcttagatataaattaaaggccatgatatctattttataagctgtacaaaattaacaaat

SEQ ID NO: 452600 - DNA, 679 bp, Homo sapiens
aattcaaactcaacataaacttcctgtttgtagtgctcaaagtcacatactgaataagcatttttaaattcaaatctaattttcttctctaatgttggggtgacatcttaccagtcttactcctacacaggaaattgtgtaggagtcacacatttctgaatgtaatacaaacaacaggtacctgaaggtgctgcagagtgaacagaattagacagacctttgtggggtgcacacactgagaggagaggaggtttacaaattgatttcatgttgtcattggcttttaggtttgagccaagagcattcactgtggggtgggagacgaagagggtaccattggaaaarccactatcttttggacctgcctacccatggcctctaaagaaagtagaggaatcccataagagaaagggacaatgaggggattacctaattctctgaccaaacacacacgggagactcaaagctagttagctatatatattcacaggcgtttaccttttcaaaaatgttataaactacacgttttaaagtatatttaaaagcaatgaatacttgctgaaaaaaatctaaaattacagaaatagatacataaaataaagataattttcctataatttgatttattccaattgtctgagaaattaattaaaattaagaattcaaggtatggaagcca

SEQ ID NO: 452601 - DNA, 587 bp, Homo sapiens
tcattcctgtccacacccacaaacacactccaacacacaccaacacacacatctggctaagatatttgacttagaaaagaagtttgtcttgttttctaggctaaagcctaccttagaaagcatttgaagagtccagccctgactagttcctacattctatgactcatgatgcaagaggtgggcaaggaagtgctgggtagaggagggcatggtccctgctgagggctccaccccagggccggtgcccacggacctaggtgaggacaggcttttctgttttcgcgcttaagtgttgcatttcccaagaccatcctggcctgtcacggcccatcctgtgcctataaaaaccccgagaccctagtgggcaygcacacaagtggctgaacgtcgagaggaacacaccagcgtaagagcacaccgacagacactggcaaaccggtgggccatcaaccagtggaatgacatggagtttgacaggggcagttgaaggagagcctgcatgctgagcagcccgactcctggggaaaaccaccttcccactccatctcccttctggctcccccatctgctgagagctacttttactc

SEQ ID NO: 452602 - DNA, 628 bp, Homo sapiens
cacctgtaatcccagctacttgggaagctgaggcacgagaatcacttgacccygggaagcggaggttgcagtgagcagagattgcaccactgcactccagcctgggtgacaggtgagactctgtctcaaaataaataaataaataaaaataaaaataaaaaatatattagctggatatggtggtgtgtgcctatagttactcaggaagctgagggaggaggattgcttgagcccaggaatttgaggttacagtgagctatgatcacatcactgtactctagcctagactacatagtaagagcctgtctctttaaaaataacaaaaaatacatatgggtatgttcttgagtctctagtgcctacttgcattacttgataatttcttagatttacatagagtccttgccttggggtttccatcaatttaatctcccatctgttgcaaaactcatttattcattttggcaccttaatgactattgttttcatgaactgtgtgggacctgatataaccatctcttcttgtgcactaggctttatagccttagacttagtacctttcctaagcacaagcaccttgatattgttctcttgatgcctattcagccactatttttgtggaaggatt

SEQ ID NO: 452603 - DNA, 579 bp, Homo sapiens
tctcccagtttatgtaataaactgcctgaagatgaatgggagagagagaaaatggtaacagagcttaggagataaagaatgatatgcaaagtgttcggggtaatgaataaatgttaaagagtattaatgaatgagctttacaagatccactggtagcctagttggaacaggataaaccttctagattcaaggtcaacatttttgcacttcccatcctcatccacttcttcactgcctgaatcattatttcttaattgcttttacctgttgtaaaaatgttactatgggataatgactgagagcaacataccaagagaaactgaggatatagagttttctggcaaagacattttgattttgtgcattcagcatgcattccatatctctcaaaatcaccatagggatttattgttccttgtagaaccaccttgaggaaggaagggtttgacaagcctgaaaaacatcctctctgctgtattcttaaagatgttagaccctctgagaggygaggctggctgggcttctgggtcaggtggggacttggagaacttttctgtctagctaaaggattctaaacac

SEQ ID NO: 452604 - DNA, 534 bp, Homo sapiens
aataataacttaatcgtgtattttaaaataacttaaacagtacaatkggattgtttgtagtttaaaggataaatgcttaagggatggataccccattatggataatgtgcttatttcacattgcatgccttattaaaatatctcatgtatcccataaatatacctacccatgtattatgtacccacaaaattttttaaaataatttgttaaaattttagaaaaagaaatgttaaatttttcaggcagaaggaaaattatacaagccagaaacctgtatctacattaaaaaaaaaaaaagaatagtgtcaggaaaggaataaataaaagtaataatgtttctttaatttttcatttcttattcatgtaaaatatatctataatagtaacaatgtattgtatcgtattaaaagtatataaagtaacataggtaatggaaattaatgaaagcaatgccacaaaatatgagaaggaggagttaagaatactttgttacaaagtacttgcacaacaggtaaagcagtatgttgttattt

SEQ ID NO: 452605 - DNA, 534 bp, Homo sapiens
aataataacttaatcgtgtattttaaaataacttaaacagtacaatgggattgtttgtagtttaaaggataaatgcttaagggatggataccccattatggataatgtgcttatttcacattrcatgccttattaaaatatctcatgtatcccataaatatacctacccatgtattatgtacccacaaaattttttaaaataatttgttaaaattttagaaaaagaaatgttaaatttttcaggcagaaggaaaattatacaagccagaaacctgtatctacattaaaaaaaaaaaaagaatagtgtcaggaaaggaataaataaaagtaataatgtttctttaatttttcatttcttattcatgtaaaatatatctataatagtaacaatgtattgtatcgtattaaaagtatataaagtaacataggtaatggaaattaatgaaagcaatgccacaaaatatgagaaggaggagttaagaatactttgttacaaagtacttgcacaacaggtaaagcagtatgttgttattt

SEQ ID NO: 452606 - DNA, 534 bp, Homo sapiens
aataataacttaatcgtgtattttaaaataacttaaacagtacaatgggattgtttgtagtttaaaggataaatgcttaagggatggataccccattatggataatgtgcttatttcacattgcatgccttattaaaatatctyatgtatcccataaatatacctacccatgtattatgtacccacaaaattttttaaaataatttgttaaaattttagaaaaagaaatgttaaatttttcaggcagaaggaaaattatacaagccagaaacctgtatctacattaaaaaaaaaaaaagaatagtgtcaggaaaggaataaataaaagtaataatgtttctttaatttttcatttcttattcatgtaaaatatatctataatagtaacaatgtattgtatcgtattaaaagtatataaagtaacataggtaatggaaattaatgaaagcaatgccacaaaatatgagaaggaggagttaagaatactttgttacaaagtacttgcacaacaggtaaagcagtatgttgttattt

SEQ ID NO: 452607 - DNA, 601 bp, Homo sapiens
gacgttatatacgtatataacttttacgttatatacgtatataacttatacatatatgttatatataattcagatgaaatcactactgctaatccaaataccttaccacttgctgagaagtaacagaacagaatatcatggattttgagtaaagcagagctaagctggatgcttggcttttctatatttttawtttttctgggtatataataggtgtatttatttatgaggtacatgaaatgttttgatacaggcatacaatgcctaataatcacatcatggaaaacaggtatctatcccctcaagcatttatcctttgtgttacaaacaacccaattatactcttttaattactttaaaatatacaattattgttgactacagtcaccctgttgtggtatcaaatagtaggtcttatgcattcttctcattttttgtacccattaaccaacccacatcctccttgccccccagtacccttcccagcctctggtaaccatccttctactctccatgttcatgagttcaattgctttgaattttagatcccacaaataagtgagaaaatatgtttgtctctgttctggcttatttcacttaa

SEQ ID NO: 452608 - DNA, 578 bp, Homo sapiens
cctcttatttaaactcctcacctcttcactcctccatgggtcttttccctcaccatatggctcacctcctgcaggarccagcaggtcattaattactcagtaagggtctgccatgctaacctacctctcagaaccttataataaaatattaatgccaaaaactactgaaaaattaaactctgcatgatcacccttagagttatgcagtaataactgacagtaaactgttgttacccaaaccaactgttaaagtaaactatgatgcctctctgagaagtggctgaggcagaagcacagatccttctcactcattaatttacgttatttgggaagcatccacttgtcacccagatttggctggtgaataaaaaaagtggcatgaacttatttaatgaatttttttctccctgtgtatcatgaggacagagtttgagtaaactcagttttaagactgaacgaatcatctaatcttcccatctcttcacttgccctttgattttacagatagtttcagagtcatacaatgaattgcccaacatcttgtgttgaatagtgatggccatttttcaaattcattc

SEQ ID NO: 452609 - DNA, 656 bp, Homo sapiens
caaacatcaggatatataaatcaagactcctacagttgactcagggatccagactcctttcaaattgtcagaattgcatcttcaaaatatagcctaaaagtcaccaaaraagagacatagagatttcagaaatcattcatatacttagcaatcttgatatgcataatttctgtccacatttcatattgtttatgttttgtcatttcatcctgtctaaacggaggagggctggggaatacagcctctgatttgtagagtgcatcctggccacagctctttctatagaggggagcattttttgttgttgttggttggcttaccttctctgctgtattatcatttaaaatcccctttagtatagatctcctagtgaaaaataaatctatatttctgtctttacctttgatggatagtttttctgttgatagatgtatggcctggaattttttttctcaatttattaactaatttttctacttttttggtcactatattagtctcctaggattgccattacaaaatgtcatagactgggtagcttgaacaacagaattaattttctcacagttctggatgatagatatacaagataaaggttgtccaacccatcagggctggtttctagtaaagcctttcttcctggcttctcaatggcc

SEQ ID NO: 452610 - DNA, 656 bp, Homo sapiens
caaacatcaggatatataaatcaagactcctacagttgactcagggatccagactcctttcaaattgtcagaattgcatcttcaaaatatagcctaaaagtcaccaaagaagagacatagagatttcagaaatcattcatatacttagcaatcttgatatgcataatttctgtccacatttcatattgtttatgttttgtcatttcatcctgtctaaacggargagggctggggaatacagcctctgatttgtagagtgcatcctggccacagctctttctatagaggggagcattttttgttgttgttggttggcttaccttctctgctgtattatcatttaaaatcccctttagtatagatctcctagtgaaaaataaatctatatttctgtctttacctttgatggatagtttttctgttgatagatgtatggcctggaattttttttctcaatttattaactaatttttctacttttttggtcactatattagtctcctaggattgccattacaaaatgtcatagactgggtagcttgaacaacagaattaattttctcacagttctggatgatagatatacaagataaaggttgtccaacccatcagggctggtttctagtaaagcctttcttcctggcttctcaatggcc

SEQ ID NO: 452611 - DNA, 609 bp, Homo sapiens
tagcttttgtcatggaatatttaagaatatggacactattgctcaaataatccttgattttcaatgacatgtgtgtttttatagggtagagcttgaatcttattcatagttaagagtgcctggatggggacagactagaagaaaagaaactggatcccttggaaaaagattacgataaaaaaagaaaaaaaamgatctgaaaaaaaggtgcggactgaacacctgggactgctggcagccaggagtcattgttgcaagattagatcctatattagtttgctatggctcctctaacaaagtatcacagaccaggtggtgtgagaccacagaaatttaatctttcacacctctggagactgtaagtctgaaactgaggtgtcagcaaggttggttcctttggagagttctgagagagaatctattccagggctgtcttctagtttctgatgacagctggcaatccttcgggtccttggcttgtagatccatcactccaatttctatctccatcatcacatggcatcctccttgtgtcttcatgtggccatcttccttctgtgtatctcttctcttctaataacaagaccagtcatattgattaagaactgc

SEQ ID NO: 452612 - DNA, 609 bp, Homo sapiens
tagcttttgtcatggaatatttaagaatatggacactattgctcaaataatccttgattttcaatgacatgtgtgtttttatagggtagagcttgaatcttattcatagttaagagtgcctggatggggacagactagaagaaaagaaactggatcccttggaaaaagattacgataaaaaaagaaaaaaaacgatctgaaaaaaaggtgcggactgaacacctgggactgctggcagccaggagtcattgttgcaagattagatcctatattagtttgctatggctcctctaacaaagtatcacagaccaggtggtgtgagaccacagaaatttaatctttcacacctctggagactgtaagtctgaaactgaggtgtcagcaaggttggttcctttggagagttctgagagagaatctattccagggctgtcttctagtttctgatgacagctggcaatccttcgggtccttggcttgtagatccatcactccartttctatctccatcatcacatggcatcctccttgtgtcttcatgtggccatcttccttctgtgtatctcttctcttctaataacaagaccagtcatattgattaagaactgc

SEQ ID NO: 452613 - DNA, 591 bp, Homo sapiens
ttagtcatcttttcttaatccactctatctctgatggctgtcttttgatcttatcttcttatctttacatttttgactattctttccctaaaggcatcccagggtaaagaacaaacattagcacgatcaatatttggtaaatagataattttatatatgtaaaatattttgttgttgttgtactcatcaatcattgttgaaagattaaaaatacacctggacgttatcygtctgacacatgaatgaattgtccttgcctatatggttcacttaagtgatggccaaattccctttatatatctagagaagattgatgaactcaccaattaatgaacccctttcttctgtatctaagcgtattttaaatgttcataatacacctatctatttgaagaaagtttctcttttacctcttgtgcttagttcttgggctttctaaatacattttaaacatataaaaagctgaaactcttagtttggagcatctaaatctcactctgtctctactactttgctacattttaatgatgtggtctgtgtttcccagcattcagtatgccaccatcagctctcactgctctggtttatttg

SEQ ID NO: 452614 - DNA, 591 bp, Homo sapiens
ttagtcatcttttcttaatccactctatctctgatggctgtcttttgatcttatcttcttatctttacatttttgactattctttccctaaaggcatcccagggtaaagaacaaacattagcacgatcaatatttggtaaatagataattttatatatgtaaaatattttgttgttgttgtactcatcaatcattgttgaaagattaaaaatacacctggacgttatccgtctgacacatgaatgrattgtccttgcctatatggttcacttaagtgatggccaaattccctttatatatctagagaagattgatgaactcaccaattaatgaacccctttcttctgtatctaagcgtattttaaatgttcataatacacctatctatttgaagaaagtttctcttttacctcttgtgcttagttcttgggctttctaaatacattttaaacatataaaaagctgaaactcttagtttggagcatctaaatctcactctgtctctactactttgctacattttaatgatgtggtctgtgtttcccagcattcagtatgccaccatcagctctcactgctctggtttatttg

SEQ ID NO: 452615 - DNA, 418 bp, Homo sapiens
ccttgcgcttcccaggtgaggcaatgcctcgccctgcttcggcttgcgcaaggtgcgcgcacccactggcctgcacccactgtctggcactccctagtgagatgaacccggtacctcagatggaaatgcagaaatcacccgtcttctgcgtcgctcacgctgggagctgtagaccggagctgttcctatycggccatcttctactgccaaaaatttacggttaatcttttttccagccttctcttaagggacctatggctttttatcacggtgagcactgggaaaaggaaataatcagactaattattcataagaggctaatggacactggcttggaactcatataattccctgaggcccaaaatgtcactgtggtccaccagtcagagtaggggtttatgagatcaggtgatcagtc

SEQ ID NO: 452616 - DNA, 418 bp, Homo sapiens
ccttgcgcttcccaggtgaggcaatgcctcgccctgcttcggcttgcgcaaggtgcgcgcacccactggcctgcacccactgtctggcactccctagtgagatgaacccggtacctcagatggaaatgcagaaatcacccgtcttctgcgtcgctcacgctgggagctgtagaccggagctgttcctattcggccatcttctactgccaaaaatttayggttaatcttttttccagccttctcttaagggacctatggctttttatcacggtgagcactgggaaaaggaaataatcagactaattattcataagaggctaatggacactggcttggaactcatataattccctgaggcccaaaatgtcactgtggtccaccagtcagagtaggggtttatgagatcaggtgatcagtc

SEQ ID NO: 452617 - DNA, 623 bp, Homo sapiens
ttttgcagccatttctacagatatatattgcccagcttctttcttctgccttgtgtgtattctaatttcaggcagaaagggatgacaaggagtagttcatgaaaataaatctatttccatgcccttggccaaagaaaggatcagaaaagatataaaatcccatacactggcagaacagtttcaaatcagactgtgayccagcatctccctaacaatgtgagccaatctataaataataaggaaataaaaatctgaattgttattcatgttctccctgaggatgtgtgtgttgtatatgttagtgcacctgtgttccagggacgcactttacttacaaatgaagcgctaataaaattccacatacctacaactggccaaatcataatagaagtccttttaatcagctgggtagaatgcagcattgtaagcaagaaaaaactagtaccctagttagagctatggaaatatttctccatgcactttgtcattctttggaggagtttgtgcccttgagtagcacctcattaattcagatgtcactagttgcaaagatgcagcagtgaagttgtaggaagatgggtacatacaacttaggaggatgcctggtattttaataagtcatc

SEQ ID NO: 452618 - DNA, 553 bp, Homo sapiens
gattacaaaccatatcttctgtgcaatgaacacagtgaagggaactgcattaactgtcctaatttcacaaagaataaaagtatccagagaaggcatgcagtaaaggatgaacacatgttctactgtgtatgtgattcccctctcaggacatgagggcagtcccagttagtttcttttgcttgttgtttagygctgtgttccaacaccacatctgtcacaacctgagcgatcttgggcatattccacagaaagccccattttcacattctgcaattacctctgagggttgcggtgaggattaaataaaataatgcatgcaagacacttacttagaaggatgcctggtattttaataggtcatcagtaattttggctaacttgaaaatcatcattatcatcactaggaatcataaaaatgtgaagaaagagaaatctatagtctacgcttggggcaaactaattgatatggtttggctgtatccctattcaaatctcatcttgaattcccacgtgttgtgggagggacctggtgggaagtaattgaaccacaggg

SEQ ID NO: 452619 - DNA, 553 bp, Homo sapiens
gattacaaaccatatcttctgtgcaatgaacacagtgaagggaactgcattaactgtcctaatttcacaaagaataaaagtatccagagaaggcatgcagtaaaggatgaacacatgttctactgtgtatgtgattcccctctcaggacatgagggcagtcccagttagtttcttttgcttgttgtttagcgctgtgttccaacaccacatctgtcacaacctgagcgatcttgggcatattccacagaaagccccattttcacattctgcaattacctctgagggttgcggtgaggattaaataaaataatgcatgcaagacacttacttagaaggatgcctggtattttaataggtcatcagtaaktttggctaacttgaaaatcatcattatcatcactaggaatcataaaaatgtgaagaaagagaaatctatagtctacgcttggggcaaactaattgatatggtttggctgtatccctattcaaatctcatcttgaattcccacgtgttgtgggagggacctggtgggaagtaattgaaccacaggg

SEQ ID NO: 452620 - DNA, 429 bp, Homo sapiens
ttccctggcttatcaagaaaaactaaatgtgacaagtaagcaaaatgtacaatggaaaggcaggtataattctaatgtacgagaaattttagaatactaatattaaaaaaggatgccaataaatctgaaaattaatatgaagtaaaycatttctgaaatgaaattaattaccaaatcaagaaaaaaatagaaaaccttagacaacctataaatattaataacatttgtatgaagggagactccagagctcctcttcagcatatatatgcagcactgttattcaaagagcctgggtaccagaaaacttagactgcgtgggtggggcctgtttcccaaggaactgacattctcagagacaagctggatggtatgcctgtcctgatatgaaaggcaaaacattagttttatatctaatgtgaaaggtaaaac

SEQ ID NO: 452621 - DNA, 407 bp, Homo sapiens
tcctccactgggctttcttcttcctgatggaacagatgaaggaggttagtgggatgatttacagatgccctggctgctgttgaccttggtgccacagctggtaagtaccctcttcttcatccattatccattctaaatccctctcatcctgagttgttaccttgacgggtcatggtagcctatctggtagtgtgatccagatctttgtatctgaaccacatgaaaagttgattttcatacccttcttagtgtagggatgttgcacctgtctgttcacagttaatacgcagtgccaggaggttgttccatagatcgcttgggttccccatgtatccttcctgtctccrttgtgtaaaagcagctctaccctcctgctggtcgaggacaattacatatcagtatggtaa

SEQ ID NO: 452622 - DNA, 568 bp, Homo sapiens
cctatggagatactgagtaatcattytgtgtttctcccctgtatacatattaataaatttgtatgccttttttcttactaattggcattttgtgagttgatttttcagtgaactcgcaaagggtgatggggaaatacttcctttggcccctccactatttaagatttcaatgttttgaaatttactgaaggtagtatttcccagcacatggtattgttatggtgaaagttttgagtggatttaaaaagaatgtgtattctgcagtgttttgggatgtctgtgactctgtcatagctggaagcagacagagggaaagtcctttctaaatcagcttaggaaaattgtcatgagtactttttcatgtcaataaatattaattaaaatattcaagagtttattgcaacttatttaaccacttcctttttgttatcatttacatggcctcttcctctcctcttccttctttctctcctcttagtcttttttctttcctttcttctactcatcctcttgatagtttaaaaagacattttgtgcatatttataatttttttagggtaaaattcca

SEQ ID NO: 452623 - DNA, 568 bp, Homo sapiens
cctatggagatactgagtaatcattctgtgtttctcccctgtrtacatattaataaatttgtatgccttttttcttactaattggcattttgtgagttgatttttcagtgaactcgcaaagggtgatggggaaatacttcctttggcccctccactatttaagatttcaatgttttgaaatttactgaaggtagtatttcccagcacatggtattgttatggtgaaagttttgagtggatttaaaaagaatgtgtattctgcagtgttttgggatgtctgtgactctgtcatagctggaagcagacagagggaaagtcctttctaaatcagcttaggaaaattgtcatgagtactttttcatgtcaataaatattaattaaaatattcaagagtttattgcaacttatttaaccacttcctttttgttatcatttacatggcctcttcctctcctcttccttctttctctcctcttagtcttttttctttcctttcttctactcatcctcttgatagtttaaaaagacattttgtgcatatttataatttttttagggtaaaattcca

SEQ ID NO: 452624 - DNA, 590 bp, Homo sapiens
ctgaatctgcaaatgtctaaagccactttgtgtgaaaagaaattgaaatggtaatttaggaataattattttaattgatgtttgggtatcagagaagcaatgagctcactggtgagatgggaaggcgtgtttctgatstgggatgttcaacttcatttatttcaacggatttttcattcaagtctcttttacggatgggagataaccttctcaggtaatcatgagaagttctctttacctagaaatccctctcgtttgatctctcctggtgagcagagagagatgaaagcagttgagagaaatctcaaaattatcagccaaagaataaagaagagagctcaagcaggtggctagaaagagtgccactgtgcctgttctggcctgaccacatgcacaggcaaagctcatgggaaattttcaccactcagtagttaatagagacacttctctttctaatgaaatgaatggcactatgtatacgcctggcaattaattcatgccctaatgatgccaaacaaccattaaaatgatgttgcagggtatctgattacctggaaagatgatcagaatatattgtaagatgggaaaat

SEQ ID NO: 452625 - DNA, 590 bp, Homo sapiens
ctgaatctgcaaatgtctaaagccactttgtgtgaaaagaaattgaaatggtaatttaggaataattattttaattgatgtttgggtatcagagaagcaatgagctcactggtgagatgggaaggcgtgtttctgatgtgggatgttcaacttcatttatttcaacggatttttcattcaagtctcttttacggatgggagataaccttctcaggtaatcatgagaagttctctttacctagaaatccctctcgtttgatctctcctggtgagcagagagagatgaaagcagttgagagaaatctcaaaattatcagccaaagaataaagaagagagctcaagcaggtggctagaaagagtgccactgtgcctgttctggcctgaccacatgcacaggcaaagctcatgggaaattttcaccactcagtagttaatagagacacttctctttctaatgaaatgaatggcactatgtataygcctggcaattaattcatgccctaatgatgccaaacaaccattaaaatgatgttgcagggtatctgattacctggaaagatgatcagaatatattgtaagatgggaaaat

SEQ ID NO: 452626 - DNA, 590 bp, Homo sapiens
ctgaatctgcaaatgtctaaagccactttgtgtgaaaagaaattgaaatggtaatttaggaataattattttaattgatgtttgggtatcagagaagcaatgagctcactggtgagatgggaaggcgtgtttctgatgtgggatgttcaacttcatttatttcaacggatttttcattcaagtctcttttacggatgggagataaccttctcaggtaatcatgagaagttctctttacctagaaatccctctcgtttgatctctcctggtgagcagagagagatgaaagcagttgagagaaatctcaaaattatcagccaaagaataaagaagagagctcaagcaggtggctagaaagagtgccactgtgcctgttctggcctgaccacatgcacaggcaaagctcatgggaaattttcaccactcagtagttaatagagacacttctctttctaatgaaatgaatggcactatgtatacgcctggmaattaattcatgccctaatgatgccaaacaaccattaaaatgatgttgcagggtatctgattacctggaaagatgatcagaatatattgtaagatgggaaaat

SEQ ID NO: 452627 - DNA, 549 bp, Homo sapiens
aagaaggctgcattaaatatccatgttcaggttactgcatggacacaagttttactttctttgaataaataccaaggtgcatgattgtgggattgtatagtgtgaatgtctttttaagaaactgtaaaactgtcttccaaagcaaaccctaaagtgaactataaacttcaagtgataacaatatgtcaatgtaggttggtaaattaacaaatatactgctctggcagaggctgttgacaatgagggaaactgtgcagatgcagggacaggggttatatgggaattcactccctgtactttctgcttattttgctgcaaacctaaaaactgccctaaaawataaaacctattaagaataatagttttaaaaatctgagggagaaaaggaggctcttaaaaaagtagaaacctataaatacctaaatctcctgggagtcagggacaagcataatttatcttcctgacccttcaacctgccagtaactagtgattgcttgctgaagtatgactatgggatttatttagtttcctttgcatatttttaaaaaa

SEQ ID NO: 452628 - DNA, 597 bp, Homo sapiens
ctcgggtagttctttatagcagtgtgagaatggactaatacagtagctatcactttctaatttattatataatttatttatataattagttcattagttaattgtctctctactgaataatgtatgtttcatcaggatggagtctttattttgtccatcactgtaatacaagtaccttgaacagcatctggcacgtggtggtggtccaatacattcttgaaatgaattaaattgtgagcacctgcatgtgttatttggagtttgggggatgtagggtacctgactatctgaaggagacaagctgcctgaagagkctgggaggacagggggagtagagtggccagcagggggataatcaggaaaagattgtgggccaagtgtgtacagaagatggctctggttatcacataaagaggcccaccagaaggacagcctgtgggatgagtatgcagtcaaagaagggcccaaggaagagtggccagtgaccaggagtagaggcatcccggaaccaagagacagaacacaaagtggttccagcaccagcaaggagaactctctaagccagcacaggacatcttgaaacctttcctttccctt

SEQ ID NO: 452629 - DNA, 574 bp, Homo sapiens
gagtttgggggatgtagggtacctgactatctgaaggagacaagctgcctgaagaggctgggaggacagggggagtagagtggccagcagggggataatcaggaaaagattgtgggccaagtgtgtacagaagatggctctggttatcacataaagaggcccaccagaaggacagcctgtgggatgagtatgcagtcaaagaagggcccaaggaagagtggccagtgaccaggagtagaggcatcccggaaccaagagacagaacacaaagtggttccagcaccagcaaggagaactctctaagccagcacaggacatcttgaaacctttcctttccctttatctcctctgctctactctaaccctagaggaaagggagccagattagtagccagaaatgagaaatggaaaagtgaagcaaagaarcacagagaacactgagcttaccaccacctacccactctaggtttccaagcccattccaacctaagcccagggcagggaattttaactccattgagacagtaaaggttagatattagaaaacatggaatttgtcaaaaagcctccacca

SEQ ID NO: 452630 - DNA, 597 bp, Homo sapiens
tctgacccaccaagttataaagtttggtgtgcatagcagcactccattatcagatggaaatggtatatacatgactgggcttgagcaagccctgaaggcacaaataaattaaatgaagtggcccaaatgcatgtgattccccacttctgctacactgccttctatttctgagcctgcacctctgtcctcgtggggagtttcctaggatcacttggtggaggaagagaagactcaggactggtatacagatggttctgctcaatatgcaggtaccttccaaaagtgaacagctatagcaccacagcccctctcctgggacatccctgaggatagtggtgaagggaaattcttccactgggcacacctttgagcaatgtacccagttgtttactttgcttggaaggaaaagggaccagatgtgtgattatgtactgattcattgctgtggccaatgatttgcctggatggtcagggacatgaaaggaacrtgattgaaaagttggtgacaaggcagtttggggaagaggtatgtggatagacttctatgaatgggaaaataacgtgaagatatttctgtttcatgggtatgctaatcaa

SEQ ID NO: 452631 - DNA, 604 bp, Homo sapiens
ttgtttactttgcttggaaggaaaagggaccagatgtgtgattatgtactgattcattgctgtggccaatgatttgcctggatggtcagggacatgaaaggaacgtgattgaaaagttggtgacaaggcagtttggggaagaggtatgtggatagacttctatgaatgggaaaataacgtgaagatatttctgtttcatgggtatgctaatcaaagaatgacctcagctgaggaagatttcaataatcaattggatagaatgacccattctttggataccagtcagcctctttcccagccacccctgccatcgcccaatggcttcatgrataaagttggcatggtagcatagatggaggttatacatgggtttaaaccttgatgacttcaactcatcagagtcaacctgactgaagccaatgctgagttgtccagcagcagagccccatgccaagttactgatatagcactattccttagggtgctcagctagctatctggtggcaagtctattacattggacttcttcaattacagaaggggcagcattttgttcttactcaaatagacatggattctggatatttaatagatttgctttctt

SEQ ID NO: 452632 - DNA, 532 bp, Homo sapiens
ttgttattaaaatgttgctccttaccctgcaacacctcaattatcttcaggatggagaccacacttgacctgacccagggcctggcacaaacaaggctttcccagggtcacctgctagctaattcaatcagccacatgaattactccacatatctttttagaattacatttctcagaccatctaaggaataaataatagccagaacaaataaaatagatggtcctggggaggagrgcctatgccagcacagacagtcatagccaggccaccagaccttaaatgccctaagtctcccttaatccctgaacaatataatctacctgccatcgatgaaaaactcaaagccaaagaattcaaccaaaggcacttcttctggctgccacttcagtggttcatttacttagagctgaaaaatcaaaggagacaaaggatgtatctgttttattcaaactcacattcattttccatcaaatttccatttttccccttaaatgggtgcattttaattttgggctcattatttattatcat

SEQ ID NO: 452633 - DNA, 524 bp, Homo sapiens
cacatttcaaaggaagaaaatggcagaactgagatttcccaccaggtctgcttgattctaagggctgagcttttaaaataattgtcattgtgtctctgagctggctaaaggtaaaagacacaaaataaatggcatgaaaacataaactttcattactttatcttagatgaggggaaaaaagagagagagagagagaaaagaaaaataaataaagcaccattaaataaagctcccaaagacatttttatgtcataaaatttcttagccttctataaacccagcttggaccacctgattatatttataaaatactctctkggagctaacaattaattgggaaagttaaataaatgaacataaattaccaccacaatgagcactatcttttattgtggcacaaaaagcatctctttcagtacttaatggagaaaacttccaagaaggagagtgaaatgctcttgggttaaaaatgactttcaataaatgattgacgtagatcaaagacaatgcattagagaaagctg

SEQ ID NO: 452634 - DNA, 639 bp, Homo sapiens
cctcagaatggtagctccactgacagcttgcaccatgcacctggaaaagccacactcaatgccagcccatgaaagcagcaaagatgggaactgtaccctgcaaagccacaggggcagagctgcctaggccatgggagcccatctcttgcatctgtataacctggatgtgatacatggaatgaaaggtgattatttcagagctttaagattttactgccctgctggattttgaatgttcatggggcctgtagccccttccttttggccaatttgtcccatttgaaatgggtgtatttrcccaatgcctgtacctccattctatcttgcttttgattttacaggctcatgggcaaaagagacttgccttgcctcagttgagactttggattttggggttaatgttggaatgaattaagactttgggggactgttgggaaggcatgattagatttgaaatgtgaaagggacatgagatttgggagaggtctggggcagaataatatggttaggctttgtgtccccacctaaatctcatcttgaattgtaatccccataatccccatgtgtcaagccagagactagatagaggtaattaaatcatggaggcagttttgcctgtggtgttcctatgatagtgag

SEQ ID NO: 452635 - DNA, 639 bp, Homo sapiens
cctcagaatggtagctccactgacagcttgcaccatgcacctggaaaagccacactcaatgccagcccatgaaagcagcaaagatgggaactgtaccctgcaaagccacaggggcagagctgcctaggccatgggagcccatctcttgcatctgtataacctggatgtgatacatggaatgaaaggtgattatttcagagctttaagattttactgccctgctggattttgaatgttcatggggcctgtagccccttccttttggccaatttgtcccatttgaaatgggtgtatttacccaatgcctgtacctccattctatcttgcttttgattttacaggctcatgggcaaaagagacttgccttgcctcagttgagactttggattttggrgttaatgttggaatgaattaagactttgggggactgttgggaaggcatgattagatttgaaatgtgaaagggacatgagatttgggagaggtctggggcagaataatatggttaggctttgtgtccccacctaaatctcatcttgaattgtaatccccataatccccatgtgtcaagccagagactagatagaggtaattaaatcatggaggcagttttgcctgtggtgttcctatgatagtgag

SEQ ID NO: 452636 - DNA, 639 bp, Homo sapiens
cctcagaatggtagctccactgacagcttgcaccatgcacctggaaaagccacactcaatgccagcccatgaaagcagcaaagatgggaactgtaccctgcaaagccacaggggcagagctgcctaggccatgggagcccatctcttgcatctgtataacctggatgtgatacatggaatgaaaggtgattatttcagagctttaagattttactgccctgctggattttgaatgttcatggggcctgtagccccttccttttggccaatttgtcccatttgaaatgggtgtatttacccaatgcctgtacctccattctatcttgcttttgattttacaggctcatgggcaaaagagacttgccttgcctcagttgagactttggattttggggttaatgttggaatgaattaagactttgggggactgttgggaaggcatgattagatwtgaaatgtgaaagggacatgagatttgggagaggtctggggcagaataatatggttaggctttgtgtccccacctaaatctcatcttgaattgtaatccccataatccccatgtgtcaagccagagactagatagaggtaattaaatcatggaggcagttttgcctgtggtgttcctatgatagtgag

SEQ ID NO: 452637 - DNA, 499 bp, Homo sapiens
ccattaaaaatcccttgacaatctttgacttaatgaatgcagattattccatttagggatcatatgctttcttaatcagtctcccattttggggcatttctttttttcactattataaatagtaaaagctacttatgaataactttgaaaataaatctttacctgtatacttttgtttttaatatacgcctagagtttcaggctttgggtcaaggggcaaaaggggatgaaaacctttttttttttttttctcaagacagggtctccctctgttgcccaggctggagtgcagtggcatgaacacggctcactgcagcttcgacctcctgggctcaagtgatcctcccacctcagccgcctgataacttggactgcaggcgtgtgccaccatacccggctattttctttttctactttgtagaaaagtargggagcaattttaaaaggttagccaaattgttttcctaattatattaacttacaaacccattagcgtgta

SEQ ID NO: 452638 - DNA, 393 bp, Homo sapiens
ctcaacttcaggggctccacactctcaggctgccctcctctcttgtggctgctgcttctcagtttccttcacttacacacctgctccatctcctactgtatcctctaaacagtcacactgaagcggctatgttgtctggggtatatatcctggggttcaytgtcatgcaccaggaaaatttaggacacacacatgaggagtttaggaacagaggtttaataggcaaaggagaagagaaggagaaacagctttctctgtagagaaaggggcctccaagcagataggactggctggtggtgaatgtgccggattttatagtccagtttgaggaggcagtgtctaatttacatagggccagagattggtttgatcaggtatgacatttacatagtg

SEQ ID NO: 452639 - DNA, 566 bp, Homo sapiens
ttgtcataaatagctcttattattttgagatgcgtcccatcaatacctaatttattgagagtttttagcatgaagggctgtcgaattttgtcaaaggccttttctgcatctattgagataatcatgtggtttttgtcttttgttctgtttatatgctggattacatttgctgatttgcatatgttgaaccagccttgcatcccaggccttatgaacatcttaataacattyttccctctagcttattataagcatacagtatataatacatatgacataccaaataatatgttaatccactgtttatgtaatcaactatttatgtcaacagtagactattagtagttgattttgaggggagtcagcacacctaaccttctcattgttcagagtccagctatatacatgcatttttgtgtatgtatacatatgtatgggtatatatatacatatatctatgtttacatatatataaatatatatacatacacatctctgtacaaaataagttgtttaagcaggtaaaagaaaagactatgaagatgaccatcccctccccccatgtc

SEQ ID NO: 452640 - DNA, 566 bp, Homo sapiens
ttgtcataaatagctcttattattttgagatgcgtcccatcaatacctaatttattgagagtttttagcatgaagggctgtcgaattttgtcaaaggccttttctgcatctattgagataatcatgtggtttttgtcttttgttctgtttatatgctggattacatttgctgatttgcatatgttgaaccagccttgcatcccaggccttatgaacatcttaataacattcttccctctagcttattataagcatacagtatataatacatatgacatacmaaataatatgttaatccactgtttatgtaatcaactatttatgtcaacagtagactattagtagttgattttgaggggagtcagcacacctaaccttctcattgttcagagtccagctatatacatgcatttttgtgtatgtatacatatgtatgggtatatatatacatatatctatgtttacatatatataaatatatatacatacacatctctgtacaaaataagttgtttaagcaggtaaaagaaaagactatgaagatgaccatcccctccccccatgtc

SEQ ID NO: 452641 - DNA, 566 bp, Homo sapiens
ttgtcataaatagctcttattattttgagatgcgtcccatcaatacctaatttattgagagtttttagcatgaagggctgtcgaattttgtcaaaggccttttctgcatctattgagataatcatgtggtttttgtcttttgttctgtttatatgctggattacatttgctgatttgcatatgttgaaccagccttgcatcccaggccttatgaacatcttaataacattcttccctctagcttattataagcatacagtatataatacatatgacataccaaataatatgttaatccactgtttatgtaatcaactatttatgtcaacagtagactattagtagttgattttgaggggagtcagcacacctaaccttctcattgttcagagtccagctatatacatgcatttttgtgtatgtatacatatgtatgggtrtatatatacatatatctatgtttacatatatataaatatatatacatacacatctctgtacaaaataagttgtttaagcaggtaaaagaaaagactatgaagatgaccatcccctccccccatgtc

SEQ ID NO: 452642 - DNA, 602 bp, Homo sapiens
acttatttatctttattttttacatggaaatacttaatgtggcatctctcattttaaacctacaattagtatggagaaaactatgctgaaactttgcaagctttttcttgttgaacaatcaactcttatttctaaaaaagtttttttgggtttaatcaatgggaacatggaaaattgcttttgagggctccttggtattgtcctagggaaagttgagccagctgacgcccagcatggggcccaaggttctgacgtgattactttcttcagtaatcagaatgactgcagcctcttcacctagatttcataatgaagcaacaagagccaaggctgagtaaggttattcaaggcagaaatttctcacggagtgatgggagcatgaggcacatgttttaaaataawtgactgtttgggattcttctacaatcttcagatttcttaccaccagtgcatttcaccttcattaggaacaccttactttcagttaagggacagtggaagaattaacgatgtattaatcaggactctcttaattgtaagtggcggaaaacacaatctaagctggtttatgcaaaaaggaaaagatgagggctcatttaggt

SEQ ID NO: 452643 - DNA, 558 bp, Homo sapiens
ctttctttttagtcttcttatatattcagcgggaattcagcagtgaaaacatgaccaacaataggcagagggcctgtaacagtctttaaaactcatgcagatggttttcaaaccttaattgtctaaaaatggcatgcattgttgactgaaatactagcttgggctgcaaactaggtgtaataactttcttacctatctgctgaatctattgtttcctcgctcatcaggaatttaaagagtttacatctgaaagacttggtttggggaattagagggttccctgattttgctgagaaatgtattaataatgtctactagttatgtatgagttataacaatgaggtagtcccatgagatataaaatgcaaaaagttttaaaaatatgaarccagtgatattttattggttgggaatctcttggttgaaagtgatagcaagccatttaatgtggcctaaagcaaaagatacatttattgaaaagttcaggaattgtaaagttcatcaggaatgctggatccaggagtccagattacatagtcaggggttagtccatctcct

SEQ ID NO: 452644 - DNA, 590 bp, Homo sapiens
ggaatctcttggttgaaagtgatagcaagccatttaatgtggcctaaagcaaaagatacatttattgaaaagttcaggaattgtaaagttcatcaggaatgctggatccaggagtccagattacatagtcaggggttagtccatctcctctctatcttcactttttctttgttctctgttgtctcattggtggacatgtgatgaccccccagcagcccaggcttgtacatccttatggtaatcaaatgctataaatcgccctgagtcaccttagggttcattacagttgggttcattacactcaccctacagtaatcaaatgctgtaagctttctcagctgccctagagttcactctgattcgattaacctaggtaacatcatcaatctttgaaccagccactgtgatcaagcagatggaatatactyattctccaagcatggatcatatgactaccctttaaaatgaaatgggtatgaggttagctgatcagcacaacccaaaccacatggacagaaaattcggaatggattattccccaaaggaaaaccaggttgccagatagaaaaatgggcattggacaaaaatag

SEQ ID NO: 452645 - DNA, 536 bp, Homo sapiens
gtctgacttgtaaccagtaggtggcactagactttcccctcccggctatggctgtaactggttatggagttgttctgttactaagcggcggctgaaagggacccatggaatgcagttgcatggcttcctatcagtgaaatcattctggatagagcagggttcttcccccagcttgcactcagccttgtcctaggcrtagagcagggtcatatggattaaataccggttcttaggtgcacaaagaaaaatgcaaccagtccaagcgtggcaatctccttaggccacccttccagctgctggctctttggcactgtgatttgtctaaagctgatggtgggggaggtgaacatacaggtacattgcaaatcattaggaggaaaagtacttcatactcagaatctggactggagtggtaggctgtgccaggaaatgcttttctctgcacagttagggcaactaaatgccttgattagggacaatgtctagccactcaatcaacatttcctaaatctcttctagtaattcaaatcattctg

SEQ ID NO: 452646 - DNA, 536 bp, Homo sapiens
gtctgacttgtaaccagtaggtggcactagactttcccctcccggctatggctgtaactggttatggagttgttctgttactaagcggcggctgaaagggacccatggaatgcagttgcatggcttcctatcagtgaaatcattctggatagagcagggttcttcccccagcttgcactcagccttgtcctaggcgtagagcagggtcatatggattaaataccggttcttaggtgcacaaagaaaaatgcaaccagtccaagcgtggcaatctccttaggccacccttccagctgctggctctttggcactgtgatttgtctaaagctgatggtgggggaggtgaacatacaggtacattgcaaakcattaggaggaaaagtacttcatactcagaatctggactggagtggtaggctgtgccaggaaatgcttttctctgcacagttagggcaactaaatgccttgattagggacaatgtctagccactcaatcaacatttcctaaatctcttctagtaattcaaatcattctg

SEQ ID NO: 452647 - DNA, 557 bp, Homo sapiens
aattcatggcaggaggtatagcatgtaggagatgaaagggaaaaatcagtcaactgaaagatctgctctggcagacactgagagtgtggcacggtggaagctaatagtaaccaggatccagcacattagtgtttacactttcatgttcatgatcccagttttcaaaaaccgactgtgtcccactaaaaggaactaggaatccatggaagaatgactaattccagatctgagacaggaaatgcataagatgagcmttggccatctttttatgcagatagcaaagatgtagtcaaagatgaatggaattacatcaaaaggacatcgaaacagtttgaagggtcactcattgaccaaagatgggacaatttgaacatcagaacaaattaactgaggaacacctctgtgaatttacaaaaatatacatgtttataataatagtttttttaaaaagatagcccttaaccccccaaattaaaaaagactcattggtcacattggaagtaacctcactctgaaaattaaagggaaataattaaacatttattttttctttcttg

SEQ ID NO: 452648 - DNA, 656 bp, Homo sapiens
gccactgagatttggactggtttgcttagaagcaaaaactaactgatataagtacatccctgaattgttggctttacctaaatatatatatatatttatatatacaatataaaaagatacataatatatatawatatatattttatatatatatatatatatatatatcagttacttagcattttagaactctgcatgctttctacatgaggttacttccaaaggcaaaaggtgctttaaaaaattgtaaaaggagaaacttaatagaaataccagcgtctgttggaagaaaatctctcatagttccatgttgcctcattctgcaagcaagccaactcttgatccccatcacccctgatggatggggctggagttgaagttgctatcatgccatagactgttctatgtacaattcttcctcttgcatcattccgctttgtatggtagtggtcctcaaccagatcagtttagcaccccaaagcatattgataatatccagaaacatttttgattgtcacagctgggtcggagagagcatattattggtatctactgggtagaagtcaaggatgctgctaaaccctacaatgcacaggacagtacccaacaacaaagaaaaaatctggcccaaaatgtcaatattgccaaggttgaga

SEQ ID NO: 452649 - DNA, 656 bp, Homo sapiens
gccactgagatttggactggtttgcttagaagcaaaaactaactgatataagtacatccctgaattgttggctttacctaaatatatatatatatttatatatacaatataaaaagatacataatatatataaatatatattttatatatatatatatatatatatatcagttacttagcattttagaactctgcatgctttctacatgaggttacttccaaaggcaaaaggtgctttaaaaaattgtaaaaggagaaacttaatagaaataccagcgtctgttggaagaaaatctctcatagttccatgttgcctcattctgcaagcaagccaactcttgatccccatcacccctgatggatggggctggagttgaagttgctatcatgccatagactgttctatgtacaattcttcctcttgcatcattccgctttgtatggtagtggtcctcaaccagatcagtttagcaccccaaagcatattgataatatccagaaacatttttgattgtcacarctgggtcggagagagcatattattggtatctactgggtagaagtcaaggatgctgctaaaccctacaatgcacaggacagtacccaacaacaaagaaaaaatctggcccaaaatgtcaatattgccaaggttgaga

SEQ ID NO: 452650 - DNA, 563 bp, Homo sapiens
atccccattgtgtacgtttgattcatttatccttagcaaatcaattgtttcaagtagagcctttatgtccaagaaggctatagaaagctttactgcccttttcctttcaaacaggaagttgcatttggccaaaagtaaacaaatgtgaacccgggaaggtttgtttagtktctaatgctgacttcaggacctgagaatggagtctgtgcttggcaaaaatgccttctctgggatctgtctgggccaaaatattctctgcttatgacctggcctttgtgctctggtaaacatcctcctcttaccagcccccagaaattcactgccaaaggccacaggcagttttgcttgcttatcagaaatattctaaaggtgatggcaacttggaaacatactttcagcaggacttagctttctggagagtggccactgtgaaaatggcctgtagcttggaaatctcagggggtgtgaatgtaatttgacattctttgtgcacaggcatgggctagcccctctgggtgaagaagctttcaggaaagtgactgttactactcagctaacaatgt

SEQ ID NO: 452651 - DNA, 556 bp, Homo sapiens
tttacagtggaggaaactgagactgagaggtgttaagaactttgcccaagtcatacaacttcttggtggtggaagcaactaattcatggaagaaacagatctgatgccaaagcccgtgttctctctactctaccacatactctccttagaaccgaatgaagactccccaggcagtttttgctagtattctggatttgtttaaaaatcctcrtaagatgttaacaactttaagtcctgtggtggtatgggggacctgaacacctgggtgcattttcttttatttactctaacagggacacagacctctggcttctttcatagaaacccccctttttgaaatgtctctgttttgttcattcaggagaacagatcagcatctctcatgcaaggcctggctctgtgcccatctcacttttgcaatgaatttagcaacatctgctttgcccattaaagtgatttttctcttcctggccctgagcctgtatgcttgctgcaattgattactagcaatttccttcccaaaccagagagttcagtgaactctaaattgaattgt

SEQ ID NO: 452652 - DNA, 573 bp, Homo sapiens
tgatgctcatattgattttgtgacttcagattggtatatgcactgatttatttatccaacaaatatttatcaagcatctacttgyatgtccttcatgaaaagccctgatagagcttatattccaatggaggaaagaaagtaaacaaaacagttaaatatgcagcatgtgagaagatgaaattactatggcggaaattaaagtgaagggaggatggggaatgtttggctggcaggtattgcaattttcatagggttgttagggaaggcctcaggaagaaggtaatagccgaatgaagatctaaaggagttgagggagcaagctatgtggatatgggggaagagggctctaagcagagaaaacagcaagtgcaaatgtcctgaggctggaagctgcctggtgtgcctcaggaacagcaaggtggccagtatggctggagcaccatcaggaagggggagagaggaaggacctatagtcagaggaaatggggtcatattgtgtcatgagaatcctgagaacagaggaagtccatgaggttgttctgtgagtgagacagggagcctctggaaggtttt

SEQ ID NO: 452653 - DNA, 566 bp, Homo sapiens
gtaaagaacttttacaattcaacaataaaaaaatacagttaaaaataggcaaaggatttgaataaacatgtatccaaacaaaatataaaacaggccaataagcacatgaaaatatgctcaacatcattagccatcagaaaaatacaaatgaaaaccacaatgagatactacttcacattcactagaatggcaattgtcatcatgatcatcatcatcatcagataatatcatgtgttggcaaggatgtagagaaactgaaatcctcttacattgcaggtagagaggtaaaaatggtacagctactttagaaaaacaatttggcagtttttcaaaaagttaaatatagagttacctatgacccagaaattttgtttttaggtatataaccaagataattgaaaacacatgtttacacaaataattrtatgcaaatatttatagcagcatcattcataataaccagaaatagaaacaacctaaatgtccactaattgatgaatgaataaataaaatgtggcatatcaacacatatggaatattatttagccattaagaggaatgaagta

SEQ ID NO: 452654 - DNA, 601 bp, Homo sapiens
aagcagctaccatgaaccatttgccattctaagcctttacctcatgtcttcgtaatagtcccacgaattgcatgctgctactattcccattttacagatgtgaaaactgagagagattaaacaacttttgcagggccacagatctagcaagtagaagggctgtagtttgaatctgactccagggtcaagttcttagctaattaccacaagactaaaatgtcagccaacaagtgtatatcataagctcaaggcaagagctgccagtagtycacacctgggggcaaaaatatggagataacatctgtcttaggaagaaagccgagagagacgtgtactccgagtcaaatggcagggcgtggctggtgtcaagaagagacactcctaagccatatacattgatatgtagctccaatcctccaaaatgagggattgctgctatgcccaggtccacttacccactgttgagcagttaaagactaaggccttgagtcaaacagatctaggtttaaattccaattccattcattgcaaatcactggtcttctccaaaactcaatatcctcatctgtaagctagagatacttaaccagttttgaggatt

SEQ ID NO: 452655 - DNA, 559 bp, Homo sapiens
taccaagttccccttctataaattgattcttcttttaccaaygtgctcaattcctgctaatccaaaaacctcccctccactgcttctcttctttgccagttttttgaaaggagagtcagacatattcacagacattcttactacactcccaaacccaagacgatatgactgcaactctacaaaagaaattagtcagttacatatgtgcacatgtaccctaaaacttaaagtataatttaaaaaaaaagaaaaaaaaaaagaaattggtcacccatagcttcctcataaccatagtgttagcttctgccaatttttccatctaaccagtgcctggtctttaaaccagtttctttcaaaggaaagaacccaaatattaactcaaggtgaaataatatttacataactgtcctccttacctccctcttccatggcagaaagatcacttattttgttggaatccacctcttcttacctaattagaacattctttcattctagcaaataaagactaacagtttgtgaaggtatgtactgaatctgagaggaaagaggggaaggg

SEQ ID NO: 452656 - DNA, 669 bp, Homo sapiens
aatggaaataaagcacgaaagaattgtatgatccaaaagcaattttgaaaactcaattaaaatacctcttgaaagcttcaaaaggaatttagcacttacatggtttgataactgatggccttacaaatacagcgttagataccaactctctaaaaaaatgttgaatgaagcttactttagaactatagagcttccttagtctgcatcctgaactaatggtccagctaaataggtgtaaacataaaacttttaattcaaaatttcaacattagacaaaggctcttaacaaagaaatgaaatgaataaccattacacaatgtctttacaatacataaaccttaagtgcattcagagtttttacataaaactataatcgtttaatccagaaaatcgcagatgtgttcagtttgtcttctagtccttcgggacctgaatataaaattaaaagactggtatatgttgtataaaattcagtaccagagttttattaggcagcttccacttccatctaaattttaaaggtttacrcctatattattgatcttatctgtgaacatattagttcagttaggagcctttaaacataacacaatccatagattttattgagattcactactcctcatgaaaaagataagaatatgagacggagggtataacaaagagcat

SEQ ID NO: 452657 - DNA, 610 bp, Homo sapiens
caataataatcaaaaaaatataaattaaaacaagatgccattttccccttatgagaactgaaatgatttaaaacgtgggtaataccatatcttgacatgaaatgtggagggaaaagatattcatacgagtagtattactcagagtccagacaggaaacaaagatcacattaaaatagggtaatttgaagagcgtttaacaaaaggattattaatatgtgtgtgggcagggtggagagaacctataaaggaccgtgcagtccccagggctacaagcagaaggacaaagctgagcagacaggctcaactaccaggaactgtgacactgggtcaagggaggcagccaccactcatcaaccctgcagagaaagccaggagaaacaacacctcagcttaactctcctctttccttcccatctcctgccagtatctctcatkaatccagcactaccataaagcagaagccaagggacctttactcccaggccagcctcccagagcacaaaacaggctggagctggtaaggatggaaaggagtatggggtgcacctggagaggcaacagaagatatacagtgtgacagtgttggggcaagcataaatttaaattagt

SEQ ID NO: 452658 - DNA, 556 bp, Homo sapiens
atatatacataacattttcttattttttctgttctctgaagtcccttcctctttccttggtgtcattctttccaaatatccacctttccatcttttatcctcaacagaaatacagccaatcatccagcctatcatccctattgcctttccttttctgtacaagtccctttcaaaagttctccacaggtaatttctgctggtataatccatgatctggtaagatgacaagactagatatggtaattgaatttagctggaggtagatgaaaagagaaagggactaggcagcaatggcagggaggatctaggagcactgtgccaaaaatgacaatgggcacagctactcaagcagagggtggtgtgcaccacccttagatgaagagtccaattttttgggggggaggcatctaggaacgtctgtcagaagaccagttactagcatagggaacagttacaaatttgtcaaatcacttattttatgcatgctgaaggaccatcaaaagggaasgaaagcagtaagcagacttttagaaaaagactagatagaagaacaaaa

SEQ ID NO: 452659 - DNA, 558 bp, Homo sapiens
tatgtgtctgttattgtgccagtaccatgctgtttttgttactacagcattgtattatatttcaaagcctggtaatgtgatgtctttagcttcrttttttttgcttaggattgttttggctctttgggattttttttgtgtgtgtggttctgcacacattttaggttttatttttctatgtctgtgaagaatgtcattggtattttgatagggattgcattgaatctgcagattgctttgattggtatggtctttttaacaatatttttaattcttctgatacgtgattataggatgtcttccatttgtttataccctcttcaatttctttcacccatgttttgtagttttccttgtagacgtctttcacctccttggttaaatttattcctaagaattttatttcatttgtagctactgtaaataggattaatttcttggtttctttttcagatttttcactcttggcatatagaaatgttactaatttttgtatgttgattttgtatctggcaactttactgaatttgtttattagttcaaaatttgcatggtaga

SEQ ID NO: 452660 - DNA, 533 bp, Homo sapiens
gtatttttattcgttgattttttgtgtgtatttttagtctcaatttcctttatttgygctctaatctttattatttctttccatctactaattttgggtttagtttatttttgcttttctagttccttcagatgcatctttacggtgttttaaatatatctagtttttatgtaggcatttattactataaacttgcctcttaatactgcttttctaaacttgtacaaagttaataatttttttaatactgcttttgctgtgtctcaatgttttggtatgttatatttctatttttatttgtttcaagaaattttgtagattttattcttaatttctttcttcactcattggttattcaagagtatgttgattaattgtcatgtatttgtatattttcaaaagttcttcctattactgatgtctagtattattctgtcatggttcaaataagatacttgacgtgatttcaattcttaaaaaatttttgagacttgctttatgtcctaacatatggtcagtcctggagaatgtcc

SEQ ID NO: 452661 - DNA, 576 bp, Homo sapiens
cccatcagcctcatcaatggttctctagcaagaacaaaaaagagtcaaaaacttgagaatgtcatgccttgtcagccagcatgggccctaatttaaaattttaaaattatataatgggttttaggaaatccagaatataagtcgtatagatgaaagaatggagtcaagatttccaaaaacttgaaaatgagcagtatcatgctgttcccttggagattatgatatgtaatgcatactgactagataagtaaagagacaagagaagtcacactaaagagacacaatgaatcccagggtagttggttgatgaatcttgattgataagatgcatccaaatatggtccagtggtgggagcacttgacagataaattttgaattctaaattactttttattttgatctgtgcccatttttatgtgatcattttgatttattctgtaattcatcatacttgaggcagaagtacactggccaggtccctgctaatattatttccaacggcgagttttattttccagcggccttctcatttgagcrggggagagggaacaatgtacacccctggggtgctaaaa

SEQ ID NO: 452662 - DNA, 592 bp, Homo sapiens
tatgacaaacccacagccaacataatactgagtggggaawagttgaaagcattttctctgagaactggaacatgacaaggatgcccactctcaccagtcctcttcaacatagtactggaagtcctagtcagagaaatcagacaagagaaacaaataagaacatccaaatgagtaaaaaggaagtcaaactgtctctgtttgctgatgatatgattgtctacctagaaaaccctaacaattcctccagaaagcacctagaattgataaaagaattcagcaaaatttccaggtacaaaattaatgtacacaaattagcagctcttctgtacaccagtaacaaccaagctgagaatcaaatcaataactcaaccccttttacaatagctgcaaaaaaataagatacttaggaatatacataaccaaggaggtgaaagacctctacaaggaaacctacaaaacactgttgaaagaaataatagatgatacaaacaaatggaaacacatcccacgttcatggataggtagaattaatattgtgaaaatggccacactgccaaaagccatctacaaattcaatgcaattcctttcaaa

SEQ ID NO: 452663 - DNA, 585 bp, Homo sapiens
aaacccacaatcaagtctacataacaaccagttatcaatacaatgatgacaagatcaactctgcacatatcaatattaaccttgaacataaactggctaaacatctcacttaaaaggcacagagtggcaagttggataaagaagcaagacccaactctgtgttgtattcaagagacccatctaacatacaaggacacccacaggctcaaagtaaagggatggagaaagatctgtcaagaaaatggaaaacaaaaaaagagcaggggttgctaatcttatttcagacaaracagactttaaaccaacaatgatcaaaaaggaaaaagaagggtatcgcataatgataaatggttcaattcaacaggaagacttatctatcttaaatatatatgcacccagtgctggagtattcagactcataaaacaagttcttaaaaacaaatgaagagacatataaccacataatggttatatatgagtttaacacaccactgacaatattggacagatcaagggaaaatactaacaaagatattcaggacttaaacttgacacttgaccaaatggacagaacactccacccaa

SEQ ID NO: 452664 - DNA, 606 bp, Homo sapiens
ttgtatgattctggtctatatgaggtacttagagtacttgaattcatagagacagaaagtaaaatggtggttgccgcaggctgaaagaagagcagaatagggagctattattttatgggtccataaccagatttttgtaagatgacaaaagttctggatacggacagtagtaatgattgtccaacaatgtaaaaatacctaatgccactaaactttaacctaaaagtggttaaaacaatcacttttatgttatgtatattttactacattttaaaataataaatgggaaaaatagcayatttccactgtagcaataatcagcagtgaacaaattaagataaaatttgcagttctaccagaaattataaagcatctaagagttactttgataaagaatttttaagtcttctctagagaaaaatttaaaaccctattagagaacggaaaataagacctgattaaatgggggaggcactccatcaacctggataggaaatcataatgttagaaaaatgcccctggtggaagcttggccggatggctagtcaccccaccctgagcagctcttctttctcaacctcaccgtggcacttctttgcaaagctg

SEQ ID NO: 452665 - DNA, 606 bp, Homo sapiens
ttgtatgattctggtctatatgaggtacttagagtacttgaattcatagagacagaaagtaaaatggtggttgccgcaggctgaaagaagagcagaatagggagctattattttatgggtccataaccagatttttgtaagatgacaaaagttctggatacggacagtagtaatgattgtccaacaatgtaaaaatacctaatgccactaaactttaacctaaaagtggttaaaacaatcacttttatgttatgtatattttactacattttaaaataataaatgggaaaaatagcacatttccactgtagcaataatcagcagtgaacaaattaagataaaatttgcagttctaccagaaattataaagcatctaagagttactttgataaagaatttttaagtcttctctagagaaaaatttaaaaccctattagagarcggaaaataagacctgattaaatgggggaggcactccatcaacctggataggaaatcataatgttagaaaaatgcccctggtggaagcttggccggatggctagtcaccccaccctgagcagctcttctttctcaacctcaccgtggcacttctttgcaaagctg

SEQ ID NO: 452666 - DNA, 568 bp, Homo sapiens
tagctatctgtctttcctccaataactcttgataacctcccacattggttcatttgtccctgacattttatatacatttagaaacagctaacaaagatacacaccaaaaaaataatgaatttgaattagtgttttattaaagatataaatccattttgaaataattgacccatttaaaatattagtcattacagttatgagcatttttagttttccattttatttccctaaatagtccggatggatgattttcaattaaactgatttattcaaataattagttttgatgtcagtgatttttttgctgcatttttaaaatttcgccaatttctgattttattacattatttcctttcttctacttattttgagtttaatttgcttttttgctaattttttaaggtggaagcttaggtmatttatttcagaaagttcttcttttctaatataagtgtctaatgctatgaatttccttttaagcgctgttttagctgcattccacaaattttgatatgttgtgttttcattacattcagttcacaatgttttataaattcccttttgactt

SEQ ID NO: 452667 - DNA, 516 bp, Homo sapiens
atttgcattcacctggaagagttagcaggacttcatcaccttgctacaagattatgtcaattctttggcaaagtgccactgtttaggttgcaggcatttcatttcaaccatgtctcaatcatgtacaataacgtatttatccaccatgttaataacagcatatagctaggacctgcagtcagaagcaacargttctatagatgttttggtaagatgcatattgctagaacataagaaattgtcttacaaaaatgaaaaaggcttgtcaactcaatgcaattccagtgggtccactgtctgagtatgttgcaatatccctacacaatgaaggaaattttgctcttctttgcacttccttcttctaagaaagaaacagaatattgggtagtctctttgaagttcagaagcaacatacaacaaatttgggttcctttgagcaaattacctcaaagacttccatctttaatttaatctattagttatgtactgctgcataaccaattagccccaaactta

SEQ ID NO: 452668 - DNA, 606 bp, Homo sapiens
gtttgtttgtttgcttttcttactagaaagtgaggtattaggtccagcccacaaccaaggggaggggattacttaagggaaagagtgaatactggaagtgagagattattagaagccattttagaggcttcctatcactttggatatcagagcaaaataaagatttctggatagtccaacctatrgagcagatttttgcctctcaacccttaggacctagttaatctaatgaagctcaaagtaccttataatcagtttagtcaggattttttaaaaggagcctgctttgcagattgctgtgcatcaggaatcagcaaacattttttgtaaagagtcagagtaaatattttaagctttgcaggccacatacagtctgtcacatattatttatttttatttttgttttctttagtttggttttatgggtttttttacagccctttaaatataaaaatcattcctagctcattggccatacaaaacaggccaccagccatatttggcccatggctatagttttccagttcatactcaacacaataagatggccccattggaagtgccatggcgggattacagattcattcctgggtagctctaaaggat

SEQ ID NO: 452669 - DNA, 612 bp, Homo sapiens
ggttaatctaccttgcagcattgtcacaagaaataaatttcaaaattggcaattaaaaaaggaatgaaaacaactctaggtatttaccagtgaaaccatcacagcctcaygttgttggcagaaaatactcaattacagatttaaccacagtaataaaaatacaataatacagattttaaatttcatcttgggttgattttaataaattatctttttaaatgaagttttccatttaactacattttttaaatttagtgccataaagttgttcaaaatactctcttcaagtctgtatggaggcccccagttttactcatgatatttataagtattaattttatctagttccaagaatttattgaatttggggtttctttaactccacttgtccctctcctgtaaaattgttgacatgtatttttatatgtattttagtcatcacctaatattattttaaaatttttgtatactcaatatttattcatttatatccatatatgacactttctgttgctcttcacctctctgcatttgtggggcggggtaatctagggttatttttttaagttttcctagtgactgaagtattctgccattaacattttatttaaa

SEQ ID NO: 452670 - DNA, 586 bp, Homo sapiens
tccactaattatggctttatttttttgtttttatagatattctttttataataaattaattttaaatatattctaatttccattatggtttttctggactcatatatttcataaattccaaatacatggggtttttctagctggctttgcttatttttttatagaataatacaactacagccaaagaacataatttatatgatttcatcttttaaaaattcttgaaattgctctgtcatcagacatatggtcagttggcttggcatataactcatatgtaatttaaaagctattttccttcagttttggggtgcagtattttataaaggccaattcaattgagttattggttagatttaacaaatctcctatatgcttataaattttttaatctatatgtgctgtctaaactgccacagttgcattaactctctcactgtgattttggatttatcaattttctgttttatttattttaatttacttctatacactataaggctatattatcgggtacattaattagacatatttgtcgccccatckctattctctttacccaccatttttgtctgttttctccctg

SEQ ID NO: 452671 - DNA, 560 bp, Homo sapiens
ggctattccctggaggagaataaatcttgtgaggaaacaaaacaaagaatccattagtaatacccagaaatttagaatgtggaaatataaaagataaatttggtagcagtgaccattaaaaagcaattattttaaatttatagtactttcctgtaatatatatgtttctcatttgaaatagtaagtaatatattctctatattaattaataatggttgctrtgagttgatgaaaattgtttcaaagaatatgtgatcatttattaaattgttttaagttaggcagttatttgctatgagaaggaaaagacttttaatgaatcctaattaaggtggaacattcataaaataaacataattaaaatgttctggaatttcaaaattgtaaaattgttttctaaacgacaggaatagagtcaggcctgcatttgaatcttagctttatctttcataacttctatgaattcaagcaaattgcttaacttttgggagcatcagtttttccacatgtaaaaaaagaggctacatgtctctaagagtttatctaagaattaacccaga

SEQ ID NO: 452672 - DNA, 481 bp, Homo sapiens
cagtttttccacatgtaaaaaaagaggctacatgtctctaagagtttatctaagaattaacccagataatatgtgtgaagaaattaacacagtggttggtacagttaaaaattcatagcacatgctctgtaaagttttttgtctttatttcggctgtgcacaaaattgattaccctaacacmacaaaatttccaggcctatgagcagagccaaccaaatcaaaagagtaaaaatttttagaaagaggcattgagaaatgacaatcttacctttttagttttttgaaattaggctaaaacatccactctataatcaggaagtataatattagctctaagtttttaatagacggccatatcagactgaaaattatcccactgttgctggtggttcactcagagattttatcataaatttgtttttcatgaaaaataaaattcttttttcagaagattttttcaacatctattgagatgatcat

SEQ ID NO: 452673 - DNA, 525 bp, Homo sapiens
cagtctcaaacttgaaatttcaaatctctagccatggaggacttccagatatctttgtctcctggtccaagccatctgcttgatttgcagcctcttgtatcaaagcaaaaactgtcaaacttttctaaggaaagatgcttaaagactgctatctcatctttctgtagttcccttctcttaggaatcttgaatcctcaaatcctggttgcctcagggactcactaatcatcaaacagattcttttttacaacttatttgtttcattttgcattgtttttctgtgagtcttttccaaattcaagttattccattatctcaaagtggaagcagtaaacatgtattaattactggtagtgtaagacgcctttcgttgtttcttggcagaattgttttgactagtcttgcatttagtctatttttgtgaattctaaaatcagtctatcaagtttcttraaaaaaaaactcccacatgtttattagttgatttattttgattattggtaagtttaagattcatctttataa

SEQ ID NO: 452674 - DNA, 661 bp, Homo sapiens
aattcagcttcttcccatgtattgtgataatttatacacttggatttctactcttcttacttaatgtytattatttaatatactttgttgtacaaatatgtttatacccatctcttacattgcaaaattgttccatttcaatttattcatttcccacttttccaatcacagtaatttgcatattctactgtgttcgaatatatttgcattcctatcaatcccatttaatgttaaatttcctttttatatatatgtagaaataacattaatgattatccatattttatttttctacttatttactggcatcaataaatatgcaaattttaatttgcttttatcttgccactctgcaaacatttcactcatctttcccattatatgaactacttggcatcttttgaaataataatataggttttatttcttgtatgttattacatcatcccattcaacaaaagtcttctgtctaataatctttatttaacacattctaaaatttcatatcacactatcaaaagaacaagaaataaccatatgtttagtaatacgggggatacaacattttgtcaacaacagttttactggaatgaagggaaataaagaattaggtgcaggaagtagacagagctattatacataactctgtcatcaaattttg

SEQ ID NO: 452675 - DNA, 507 bp, Homo sapiens
ggacacacatccaaattgttaacagtctcctttagctaaactcctgtgtagccgcggaactggcagcctgctatgacttcttttccaactttgctaggtaataaataacaagttaccctcttgctgctttaatttgcatttcttcaataactaatgagaataaacttttttgttagtttgtttcaactctaggtagtatttcatttttgtacaaattttacatttcaaagcatattttgcttaaggacataaaatcttattttttattgggattagccttttaaaactgtgtttgttatgctaaaaatgccttctcccagcttctcgttttccttctatgtaggcattagccaagacatgttttaatgtttakgtatttcagtgtgtttttttcttttgtagttttggtctttggtatgagactttaccatcctcaaatgaaataaactatcatttttctggcatatcttttttaatttaaatctttaatatgtacatatgcacaca

SEQ ID NO: 452676 - DNA, 467 bp, Homo sapiens
gtagctttttgaggggggtggaaacaaggtggtcacatttattcaatcagctggtccctatgaggaaggagagggtacagataccacaaargggtacagtcacccagctgtcctgggatcagtttggggagtggtaagaaatgacataaatcaaaaccattgaaggttgctttgatcctgagacagtctgagtctgcttcaaacccatggagaatggaactttaatccccaacctgcagagagaaataagcagtagcatccctgcctcacgattccctaatccaatgttcttgaatctgaaatggcctccctctgtgattgcaagacatagaaaatcttaaatgccttccccaacaacatcctaattaagtctggactagtaagatgccaatattcatgaaaacactgtcaacatctgaactagcagctttgatgaggggtggggggcagagaatttgccgagtcac

SEQ ID NO: 452677 - DNA, 467 bp, Homo sapiens
gtagctttttgaggggggtggaaacaaggtggtcacatttattcaatcagctggtccctatgaggaaggagagggtacagataccacaaaagggtacagtcacccagctgtcctgggatcagtttggggrgtggtaagaaatgacataaatcaaaaccattgaaggttgctttgatcctgagacagtctgagtctgcttcaaacccatggagaatggaactttaatccccaacctgcagagagaaataagcagtagcatccctgcctcacgattccctaatccaatgttcttgaatctgaaatggcctccctctgtgattgcaagacatagaaaatcttaaatgccttccccaacaacatcctaattaagtctggactagtaagatgccaatattcatgaaaacactgtcaacatctgaactagcagctttgatgaggggtggggggcagagaatttgccgagtcac

SEQ ID NO: 452678 - DNA, 598 bp, Homo sapiens
ctaagtagttccagtcttggagacagctcagtgaggaccaaagcctgtgtgtcaggcttaaactccagctcaaggcatcctccatagaggaccctaaaatattctattaacttgattcacagtgcctcacaacaacacccctgtgaggtaggtcagtattattacccccatttgacagatggggaactgaggcattgaaagaagtgacttgcccaaggtcagccattatcaatcaattgaggaggtgggcacacagagtcagcatccactcaattcttgttccatttcccagagcattttacttctcagagtgcacttgggagcagacgaaagttggtaggtacacctcactctgcaaactagattaattcaatcaacccaagattattaactgagsgcctattatttatctagtataatgtgaggaatcttggaaaaatgaactgcttctgaaagccatattatggatgttttgaaaataaaattacatctttaacagtaaggacatgaattcttctgtaaagaaatcttcactttatattagaaggtgaaggactaagtcacactgatttctcaaagttttatattgagtaacctg

SEQ ID NO: 452679 - DNA, 572 bp, Homo sapiens
gggcctcctccctgtaaaatctacatttttatttcttctcatttaattgcataaatttgtcaaactccaactccaactatttattttatgagacatacatctagaagtctcttttccctcaagatagtgtatcctccataaatctgagaacgagaccactcaagacctatattgaagtaagatataattgtgccaagggacatagtacttgaagtcatccccatctatagtagatctaaaataaaattctttcattgttcttccagcacatggattcagaaattggtccgagataggaagaaatgcagaagtctcaggaaaaatagaaaaattttaaaaagcaaaaacaataacaaatccaatattattaacatttgaggggaaaaaaaggccaatctgggggaaaaatgagagaaaaatacagatgcacacatcttgttcccagtaacatttttgacrtgtatcctatgtataagtaaaatgaccccagctgcaaaagagcagtaccagctcaactggctgaagagaaggaaaagttagtgtcttatagaataaattccaagagagggcaa

SEQ ID NO: 452680 - DNA, 572 bp, Homo sapiens
gggcctcctccctgtaaaatctacatttttatttcttctcatttaattgcataaatttgtcaaactccaactccaactatttattttatgagacatacatctagaagtctcttttccctcaagatagtgtatcctccataaatctgagaacgagaccactcaagacctatattgaagtaagatataattgtgccaagggacatagtacttgaagtcatccccatctatagtagatctaaaataaaattctttcattgttcttccagcacatggattcagaaattggtccgagataggaagaaatgcagaagtctcaggaaaaatagaaaaattttaaaaagcaaaaacaataacaaatccaatattattaacatttgaggggaaaaaaaggccaatctgggggaaaaatgagagaaaaatacagatgcacacatcttgttcccagtaacatttttgacgtgtatcctatgtataagtaaaatgaccccagctgcaaaagagcagtaccagctcractggctgaagagaaggaaaagttagtgtcttatagaataaattccaagagagggcaa

SEQ ID NO: 452681 - DNA, 639 bp, Homo sapiens
tataattgtattgcatggaagtttcgaaatgtattaaagtgatgtttatttattgaattctattgataggtatttagattactccctgccatgacaactgtaatacacacagaatgaatgttggctagataaatgagagttggattayacagatagatgatagatagatagatagatgtaattataataatattggaatttaccttccagaacacctgtgcctgggactgaagtatataaaataagtgtacacttattttctttctcagtcaaaactagctatgccccatacattttgctgtgtgctgttgtcattttctctaattagcaaaaagcctgtaattgcgcttttgatttcctctttgacatatgatatttaagacattttaattgctgtgttattgcttttcaatgttaaacatttattttttcaatttatttttagttttattacaaaaaaattaagagacagaagaaaatggcctatacaatttgtgctttgaagattttactggcatttcctttgtggcccaacatatgttagttttgaaattatcagttgacacagaaaaaaattagcatttttcctagcgtgtaaatgtttaattaaatatatcaggttaaccttaatttgtatgg

SEQ ID NO: 452682 - DNA, 546 bp, Homo sapiens
aaagatcagtaggggccagcatattgaaagtacacataaaatagattttttttgagtaagtacatgatatgcaaatttggactctctgttccagaggatggaaatctaacagggccaataacataaaataactgtactcagaagagcaagttggtggtgtgggtggaaggaaagcctgtggagcaggagtttgtgtcctgtgctagtaatcaagggtgtaaattgggagtgggaatgggcagccatcagcacatctcaggggataaaatcaggtttgttcagaaacagtcagacattgtaatagcrgattagcttgccgttcagccagcaggtagcacattctcaataatacctgttgactcaaattcatcattctgatgtacatttgattgccattgtcatcagctgttctaaaacactggaagatggccctgagattaatcgctcatcagtagacagcagtctattgattttggtgtgatttagaacttatcagtacaacccaggagaggcaaaatgaaatttggagtcaaaaataagtgggct

SEQ ID NO: 452683 - DNA, 506 bp, Homo sapiens
agacaggtttcagggcaagaaagaaaaataaaagaaacacctttgtcccaaattagttttgccataagatttcctgtcctgagactgctataggaaaagttgttgctgctagcaccatgctaagcctgtaatcacccctttgcaaaacagagaatcctcagctgtacaaaggtactgagatccacaggcagcagttgggggagcgtttgctgaagtaactcaattctcatactgtcctatctgtgaactaagggtaggaacagggctgtctctgggaaaactccctggaggccacatgcagactcctggaatgatcagtaaggttttcaacgggtttaggatgctgaactctattgtgttttacttttcagtccttgargggaaaatgagtgtgaccataaaactataattctatggatttgtgttgcctgggttggcggcatatataactaattctagtttcagagccatggataaaatgttaatattcgggcactttcaagaga

SEQ ID NO: 452684 - DNA, 533 bp, Homo sapiens
ctgctcttaaccaattcaatgagaatccctgaattaatatttacaaaaggctttagaactaagaatgttttgaataggtaataaatacatatagcaatattcaaaaggtaaaaaatatatatatacttttatatatacacacatacatacacacacttttttaaaccactaattcttatttcaataccaaaagagtcaaactgtttctgctaaatactagcaaacaattatatataatctaatctaatattcaaaaccaattaccaagtattaaatacaatcaatggcttaaatttccatccccactacctgggtcctagttaccattatctcatgcttggatgactggtcttaggtctactctgccccactctaatccttgctccaattgcggccacggagatcttctcaaaactcraacctggtctcaagtgtcatctcctcccccttctctcccctccgaccactggcctttcttctgatacctatatttgaatgttctttcctaccacaggtcctttgcatatattagc

SEQ ID NO: 452685 - DNA, 636 bp, Homo sapiens
ggcatgacgatcaaattatgtacttcaatgcgtgtgaatgcatttataagcacagtctcaatacataaataaggaacaaaatatttaaaatgtataaacakatcatttctctttgctttctttaaaatactatatcagaatcacctgaggaacttgataacaatttttttaaaaactattataactacgtatattaagccttgttaaaaccacaagttttagaggtttaagccttactaggtcagctcttctgattttgagagtttaagtgaaaatttaaattataacacagtatgtggagtaaacctgcttcaaatattagtttctacattattgtttctataaaaatagtaatcttctgtattttaatatcaactcatcacatattaaatatttcagtcaaatcaaaatttcatttgaaatcttcaatctaaaaaatacacagttaagcgcttaaaaagtaattttaaccactaggaaatgttaatgattaactcacatttgtttctgtttcactccatgacaaagtctataggacaccctgcagagaggaaaactcacattaatatacccataattttactttcagaagcttctggtaatcaaagacttattatgaggtgtcttcatgttacc

SEQ ID NO: 452686 - DNA, 548 bp, Homo sapiens
atctatgttaaaaattgcaaatttccctcaggtaaaattccaagagtctatcaaaactggccagagaagttaacaaagtaccaggtagaatttccaaaaaacaaaaacatagtaattgaaaattaaaactcaggaactggactaaactaagtattaaaaacacatgaaaaagtaagtgaaagatagatctggaaacatttcctgagtgcagcattgaaagtcgaagggatgagaataatgaaaaggatgtaaaatacatagaagaaagactgggaatttcaacacgtgtctaatcagagttctagtaggaaaaaaaaatgcyggagaggcagtatttgaagaaataaccactaaaaatcgctataattgattaaaaggtaccgtgaccaagtgggatttatacaaactatgcaaggctgattcagtatttgaaaatcaattactgttatatccatcaaatcaacaggctaaaaaagaaaaattatatagtcctatcaatagatgcagaaaaaacatctgacaaaatccaatacctattcatgataaaa

SEQ ID NO: 452687 - DNA, 580 bp, Homo sapiens
  misc_feature (1)...(580): n = A,T,C or G
tctttttgtatatttctggctttctctgaatatagaatccttcatcttctagaatacgtggcatcatatcttttggcagtttgcgctggttaaccactttataacaataaaacttagatattactttaaagtccaaaatattaaatggatattgaccaaataagtagtacaaacaactataattacaccctactactgamgtctagcagaaagcctctctctcactgtctcttactttctcgctcgctctctctctctatatataaatacatatgcctatatatgtacattttttaaatgaagaatgagttctcttaatcagttcccttaattcagggaagtcatgaaaaacaaatatagaaaagttactataattttagatcagtattttttatttatccagcatacaataaagctattatcccataacataattcgttaatgacttgaatattttactgggaaagaatgttacctggagaactacttggtacaaaaatatttgccttctgtttttttatttggtcttgatcatcttcataggcagcagcttttactttgagtatatctgtcaaaatnn

SEQ ID NO: 452688 - DNA, 472 bp, Homo sapiens
cggctcactgcgaccttcacttcccaggttcaagcaattctcctgcctcagcctcctgagtagctgggactacaggtgtgtgccaccacgcctggctaatttttgtatttttagtagagatgggggttcaccatattagccaggctggtctcgaactcctgacctcaggtgatccacctgccttggcctcccaaattcctgggattacaggtgtgagccaccacacctggccatgatttaaaaaaaaaaaaataacaataacaaaaaacagmaagccctgggaaaggaggacaatgtgatttctagagttaccacattattagattcaaatgtccagttttcaacaacaaaaaaacacaaaggtgtacaaagaaacaggaaagtatggccaactcaaaggaaaagaataaatcaacagaaactatgccaaaaaaaaaaacctactagataaagacctactcaatggcagatc

SEQ ID NO: 452689 - DNA, 489 bp, Homo sapiens
tgaaatcacacagggaaagagacattgaatgacttattacaagtgtgatgaatatttaaaaggaaaagcatgaagagatataagaaaatttaattttgttgtgggggttttcaagcaaggctgtactgaggaagtgatataaactgagttttgaaatacatattttctttttttttgagacaaggtctccctctgttgcctggcctggagctcagtggcacaatcacggctcactgcagtctcaaccttctagtctcaagtggtcctcccacctcagtctcctgagtagctgggactacaagtgtgcaccatcatgcytggctagtttttgtaacttttgtagagacagggtttcaccatgttgcccaggctggtcttcaacttctggggtcaagtgatccaccccaccttggcctctaaaatgctgagattataggcatgcaccaccatgctcagccttgaaatgcatattttctatcttcatgcact

SEQ ID NO: 452690 - DNA, 643 bp, Homo sapiens
tgatgctaacaaggataaacccaaagaaatctatacccacacacataataaaactgctaaaaactaggctgggcacagtcgctcaaacctgtaataccagcactttgggagaccaaggtgagtggatcacttgaggccaggagtttgagaccagcctggacaacatggtgaaaccccatctctactaaaaatacaaaaattagctgggcgtggtgaggtgcacctgttatcccagctacttgggaggctgaggcagragaactgctggaacgtaggaggtggaggttgcagtgagccaagattaagccattgcactccatcctgggtgacagagcaagactctgtctcaaaaacaaacacacacacaaaaaacccttctaaaaaactagagaaaaaaattgaaaacaaccagagagaaacaaaacattacttataggggaagaatgaaaaattcaacgtatggtgggtctctcaccagaaaccaagaagaccagagagaaatagaacaaaattttttaaatgctgaggtgcctcagaaaagaatgaaatcatgtcctctgcagcaacatggttgtagctggagaccattatcctaagtgaattaatgcaggaacagaaaatcaaatatcacattctcacaagt

SEQ ID NO: 452691 - DNA, 534 bp, Homo sapiens
actcaggggtgcgagtctccatagtgcccagctctgtaagtgaatcaaaaattgggcccagcacttagctggacttgagaataaacagcaaaatctcaaggtaccagaaaagtttttgttggtactagaggactatagtacaatcttttactttgctctgcttccttttcatwgatgttgaactaaggaagccaaatagacccacacagataatatgttgtttgggtatgggtgaatgtatacagctaaagcaaattctgtctggggaaattcagcagagtgaattccagtttgataaacagcatcaataattgactgtacatcaatgtatggcatctggatgggaaatcccgtgacctggatcaaagacagaacagcacataaacccacattacaactgggtaatctggaattactgtatgcaaaaagatcacaaaagcctcaaagaaatagtactcataaaatactataatagttgtctgtgggtgccaaattatgttctaggtacagctaaatgcttcacatacatattta

SEQ ID NO: 452692 - DNA, 568 bp, Homo sapiens
atgttaaacaaccaaacgtaagaataacctgtgttctgaggaagaagaattctaaaagcttggaaaaacaaatttgggggaataattgaggaaaacttccctgaccttgctagagacctagacatccaaatacaagaagctcaaagaacacccaggaaattcatcacaaaaaagatcttcgcctaagcacattgtcatcaggttatccaaagttaagacaaaagaaagaatcttaagagctgtgagacagaagcaccaggtaacctataaaggaaaacctatcagattaacagtagatttctcagcagaaaccctacaagctagaagggatttgggccctatcttcagcctcctcaaacgaaacaattatcagccaagaattttgtatctagtgaaactaaacatcatatatgaaggaaagatagagtcttcttcagacaaacaaatgctgagagaattctccattaccaagccacccctacaagaactgctgaaaggagctctaaatcttgaaacaaatcctggaaacacatcaaaayagaacctctttaaagcataaatcatgcag

SEQ ID NO: 452693 - DNA, 571 bp, Homo sapiens
taaacatccctgaagagaaaacacatgcaacagtaaagtaacttcaggacatagaagaacaaattccttaggaattcaagataagcattttagaaaaatgagaagggaataaaactgacatgttctatgtgttcttggaaacacaaatgcgatgtaaataggtgacaggtaggctgctacatgaaaatgcctacaaaatgtggttagacaaataggagggcttattctccacccacataaagcctttgrgtattaggttagtgtggcaacaactaacacgagcggtgaatatcattctggatctctgaagtcctcagggttttgtttccgacagtgactcggtgtggacaaagctaactttggagtaagacagacctagttttcatcctgatccatcatttactcatgtgtcttcaggcaagactcagaatctttgtcagaatctgttttctcatccataaaacaacagcctttttgctgggttctggcaaaattaaatgagataatgtatgttgtattttgtcctgtgctcaataaacagtcactataactactaatggcctcatgttcg

SEQ ID NO: 452694 - DNA, 479 bp, Homo sapiens
aaaattaatctctaaaagaaatgatttttggattacagttcacaggctaaggaatctgaaaaattggcattgaccgactgacaaccaggtgaagctgagccaagattttctccatttctcctttttccttttgatgccattgagtttctgctgtgatctttggtaatagtactgaattctggaaacataattttgaaggtgttttggggaataggtattgctgcgatttctaaatattgtgggtagaaggccaatactacatacagtatcttttgtgttctatcaactccrtggacttttaaaagaagagattctgagagttgaattaattcaatgtctccagaaacccacagacgttactttaacagtccaaattaaagcagctcaaagaatccgtatctatccagactttgaaaaaccttagctcaagtgagcagaatacgagattgcagagtgtcatttgaagatgctaatttagc

SEQ ID NO: 452695 - DNA, 591 bp, Homo sapiens
aatggtttgttattattcactagaatgcatttaccctgctaatgcagtattgcagctttttattatatgttaatagtttaacagccaaagttaaatgctattaataaaatggtgcaactaatagatctcatttgtagtattctatggttttcttcaacaatttattagtaaagttgaaatatgtgatgtgagaaaaagaatacaaaacaaaagcaattattagactcgacacagaggatggaaaacttgaattgcatggtctcagctaaagcaaagcaaggtgtggcacagtgcctggtacattgctctacaacagcttaatgcatactgtttggtcaagaaacagttctattgatggctttattcccttaaattrgaattcttattctagctgtgtacctacaggtaaactaagcagagaattgatatttgtttgctagattaagaaaaaaaagtatatgaatactgtgttctattctctcttcattttctggtatagtagatgatttctctcctaaagataatttctactagctttctactttattttgtctatgtagaagtgaatgatatgatcataatatataatag

SEQ ID NO: 452696 - DNA, 544 bp, Homo sapiens
catactatatgatttcatttctataactttaaaaaatgccaactaacctgtagtgatagagaacagatcagcgattgcctggagggaaggcatatggggagactcaggaaggaaggattacagaagaacatgagaaaactttgaagtgatggatgtgttcactatcttgagtatatagtgatattctcattggtatatacatgtgtcaaaagtttattgcgtgtcaattatgcttcaacaaagctgccaagaacaaaacaaaaacaggctcctactgtaattatttgatctctgattcctttaatagactctaagtaatgtgatgagagtgaacaggacatccttattcagtgatgtatccccagtaartggtccaaagtggatattcagtaaatatttgtcaaatgaataagaagtggttaaaataaattaccgttgagctatataatattttgatcttgctttggttcacatattaaaatgctgatcatgtcagaatattattcattacccatattatttcccttgttgtaaagtcaactat

SEQ ID NO: 452697 - DNA, 541 bp, Homo sapiens
tggtcaatattttagggaaattgcattctattgtttacatttataactcagactttcggtcttgtttatggaacatttccacacaaggctcattgattcttagattgctgaatcacacagcagctgctcctattgaagcacagttacttaacttactactgattacctcatatttgcataatttctcagtcatagtctctggtatrctgttcttgctctcgagatcatctttaacagggtgatctttaacagggaaaagctctccccatgatgtgcccatccatgtggcaatatgttgatgacattttcccctgttttccatttctctgtcacttagaacaaccacattttttagagggaagatatatttttgtgtcctatttcaaatctgctctggcccatattatcctaatatttaagatgggataaatagaagcagaactgtcatagaatttgttttggtggtgaaatgggggtgggagagaaaactaaataagtaaacaagaaaagtgcctaatgataaaaataataaaaatgataa

SEQ ID NO: 452698 - DNA, 541 bp, Homo sapiens
tggtcaatattttagggaaattgcattctattgtttacatttataactcagactttcggtcttgtttatggaacatttccacacaaggctcattgattcttagattgctgaatcacacagcagctgctcctattgaagcacagttacttaacttactactgattacctcatatttgcataatttctcagtcatagtctctggtatactgttcttgctctcgagatcatctttaacagggtgatctttaacagggaaaagctctccccatgatgtgcccatccatgtggcaatatgttgatgacattttcccctgttttccatttctctgtcacttagaacaaccacattttttagagggaagatatatwtttgtgtcctatttcaaatctgctctggcccatattatcctaatatttaagatgggataaatagaagcagaactgtcatagaatttgttttggtggtgaaatgggggtgggagagaaaactaaataagtaaacaagaaaagtgcctaatgataaaaataataaaaatgataa

SEQ ID NO: 452699 - DNA, 673 bp, Homo sapiens
ctacatggaagaagattcaaatgatcacaactgtttacattagtatttactaactgccagatatgtgagtaaatgttttaaattcattgcctcagttgaccctgataaccaccttctgaggaaagcactatcacgtgcctcatgtttccagtaaagaaattgagactcagggataaaatttttgtttaaggtcacacagttcctaagtggatggagcagaacgtgaacttgaccgcactaatggcagagctatataacttgaagtaaaaatgctctcaatttcctacttaataggataaatgcttaagaaattcaaatacaaattgaatagcctttcaaatgatagcttttaccatttttttacttataagcagcayagaaaggagctacataggatataaaggtgctttcaggtctagattttaggaaatatttttgctttgtcagtttctcaaacttaacttattccaatgatatattacactgtttattatctacaaagaggataaataggtacaaaaatgtttttgacccctcaacaaaagcaaatataacctcttttcccaaccagaaaccttggtctggactttgaatactgatttggaaacaagtttttaaaagaattagctcaaagcagcaggtttgtagctcatatgacacaagatgatcaatg

SEQ ID NO: 452700 - DNA, 619 bp, Homo sapiens
gacatatatatgtcatatatatgtactttagggattctttttcatagaaaaaattgttctaaggtattctcatgctcatccttatcatataaaagtatattctgcctcacatgtctaataatatttggcagtcttagcactgctaaaagatttttctgggccacagaaagaccttttacaagtggaattaggccataacactcacttttcgagggttgtgaatacaagttataagctactattcacagcttgtcattgactcatgctgctgccctcacaggaaagagccagtagtgaaagggcttcaagatacccatgcccacgagactgaagctctgccaaaagccasaaatttcactcatggacaagtcgaaggacctttgattatgacgatatccctccatgagctggtcctttcctactttccctctcccatccaccattatatccttgctgtctctcaagggctctctacctctgagggtctcaaaccatattgtaatcacctggagagctttaaaaatcagctgttgagattctgatttaattggtgcaacctggccatggagtttttttccaactccccaggtgactctaatgtgcatccaggttttagaat

SEQ ID NO: 452701 - DNA, 556 bp, Homo sapiens
ggggagtgttgcttcatctcagcctgttttcatttggaggagggtagcaatcctgtagtttcaaattgcatgcatttagcaataggcaaagaaactttcctctaattagattgatctgtgaggtagatcaggcagagttttctaaaaacacatgtcataattgatagtccttaggcaatgtgctttctaggcaaatgtctactgcttttggagctatgtgcccatttctttctccacaccttgctaattactccttactgraaagtatcctaatttagcttgtatgaatgatctaagtagtggttttcaaactgtagactagaccatcatcatcacctagaaactttagaaacgtaaattcccaggctctctaccaggcctactgcaccagaaactctgtggatgggtcttagaatctgtttggtaatcatcactgaatgtcttcatatacactaaagtttcacaaacactgctctacaggggagtatttgagatgataatgttgacattgacagtgacaatgaggagtagaaagaatggatagaggaaaaagcga

SEQ ID NO: 452702 - DNA, 590 bp, Homo sapiens
tccacccctggatttcaggctttcctaattcaaaccacactgaagcttggaaaactcaaaattatccacgtaggtctcagcagttagggaatggaggctggtgactgggggccaaagagcagaattgcagaacgtagctaagaaacgtactcagaaaataagccacacttatgcagtaaaacttggctggttccagaacccacttaggaaacactgccctagataatctcccactccttctttgttctcctgtagcacatacttcatcagcacatttgatacattcacaaatgcttattgattcctactgtaggtagccctggctgtttggcagttaagctgtttatggcagcctccttcaagaggctgtgagctctttgaggccacgggctatgtctaattcatttctgtatctttaggaagtgattgaactatttagcrcactaactaaatatttgtggcatgaaggaaaaaataaatatattttgttcagttatatgcctacttctaaatactataagtaggcaaaaggggtgagatatgaaaaaaattatcagccatcattatgatatttgtgaagttgattttct

SEQ ID NO: 452703 - DNA, 604 bp, Homo sapiens
agaaatgccagtgggcaggaaacaaagagacagaattctgttgaccaaagaggagtcttcattctggcatattcactcaaaaaaagctcacatgaaagaaaagattgaaactgttgaagtggacatgccaggagtaggatacccagatggctataccaagtaggtgtgagcaatcaccactgcctgattgctctgccaaagcagaagtgtaaaacaaaaacatttaaagctaaagttaggcaaatggcagaaagaagacaagtagattcaaacctgaaaggaaaatccctcaagaagacctaacaamtaaaactgaagcaagtaaaaattctaatacaaaataaacaaatacaacaaatataaaatagaaatcaaaacaaccttttttgccagtttattgtctatattcagatggaagcaatcatagaagatcttattgatggattctattggaaaaggaaaagaaatatgtgttgaggtatggagatgaggacatagtttaacccatacaacaaacaaaaaggaaaaattaacagataaaaattgtttattttctaaaaaaaaaaaaaaaaaaagtattgttgtaacaccacagcaggtccac

SEQ ID NO: 452704 - DNA, 604 bp, Homo sapiens
agaaatgccagtgggcaggaaacaaagagacagaattctgttgaccaaagaggagtcttcattctggcatattcactcaaaaaaagctcacatgaaagaaaagattgaaactgttgaagtggacatgccaggagtaggatacccagatggctataccaagtaggtgtgagcaatcaccactgcctgattgctctgccaaagcagaagtgtaaaacaaaaacatttaaagctaaagttaggcaaatggcagaaagaagacaagtagattcaaacctgaaaggaaaatccctcaagaagacctaacaaataaaactgaagcaagtaaaaattytaatacaaaataaacaaatacaacaaatataaaatagaaatcaaaacaaccttttttgccagtttattgtctatattcagatggaagcaatcatagaagatcttattgatggattctattggaaaaggaaaagaaatatgtgttgaggtatggagatgaggacatagtttaacccatacaacaaacaaaaaggaaaaattaacagataaaaattgtttattttctaaaaaaaaaaaaaaaaaaagtattgttgtaacaccacagcaggtccac

SEQ ID NO: 452705 - DNA, 604 bp, Homo sapiens
agaaatgccagtgggcaggaaacaaagagacagaattctgttgaccaaagaggagtcttcattctggcatattcactcaaaaaaagctcacatgaaagaaaagattgaaactgttgaagtggacatgccaggagtaggatacccagatggctataccaagtaggtgtgagcaatcaccactgcctgattgctctgccaaagcagaagtgtaaaacaaaaacatttaaagctaaagttaggcaaatggcagaaagaagacaagtagattcaaacctgaaaggaaaatccctcaagaagacctaacaaataaaactgaagcaagtaaaaattctaatacaaaataaacaaatacaacaaatataaaatagaaatcaaaacaaccttttttgccagtttattgtctatattcagatggaagcaatcatagaagatcttattgatggattctattggaaaaggaaaagaaatatgtgttgaggtatggagatgaggacatagtttaacccatacaacaaacaaaaaggaaaaattawcagataaaaattgtttattttctaaaaaaaaaaaaaaaaaaagtattgttgtaacaccacagcaggtccac

SEQ ID NO: 452706 - DNA, 590 bp, Homo sapiens
agtgctttatagttctcgatgcagaggctcctacacttcagagccatatccagaccaaaacctagtctagctgaattgataggaactacacaaccaaatatcagatccatgttagtgaaagcgttcaaaagcatatgaatcagataaatcttctgtattacctagctttcatcttgtcttttatttcttggcactcctttgaagcagagaatatttaggaaccttttcaaaaagatcagatgctttaacgaataagaattttatctatgctgtctcagcaatttttaagaaaagaaaaacaatgaggttttagcaatgaaagatgtttatttagcagaaaggctatttgacaaaccatgtagtcaatgaacctaattctgaagcactgagtttgtgtactggagcctcaagtatctggcagagtggtttcctttttaaaattcatgacatcattctcggtgcttcaagtttggctcaacatgagaaatctccttctgtggatgaattaattggattattggctctatgkgaaaaagaatccctccaaatctctttaggaagaaattagtatcttgaactaggttttccat

SEQ ID NO: 452707 - DNA, 559 bp, Homo sapiens
acttggaaccatgaattaaccaaaataattctccatagcacccagtattccagtttttacattctaaagagtgagacattagtggacctcatccactactacaatttaccagcatccctacatgtattattcactcaattattcaccgtgacttcataaagcaagtacttaaacaatgtattttctcaggtcctgaggcttactgatatattcatccaaatgttgatcrtgttaaatatatgcttgtataatatacactgccctgggtgctggggatacaactatgaataagacgtactcaggccctatgcaatcgaacttaaattctgtttattctgcccaatctctttctcctctacttccaagactccagtttcatgtatgttaaactacttattactgctcacatgtccctaagacactgttcatttttttttctcttttttctctctgttcttcacattgatgctttctgttaatatatctaaaagcatattctttttcttgccatcttcaatatgataaatcatttttcattgtagctattggatatttaagc

SEQ ID NO: 452708 - DNA, 505 bp, Homo sapiens
agaaaacacttccaaactcattttacaaggttagcattattctgataccaattccagacaaggacactccaggaaaaaaattacagaccaatatgtctgatgaatattgatgcacaaaaccacaacaaaatactagccaactaaattcaacagtacattaaaaggattatattatacatcatgatcaagtataatttttccctgagatgcaacaatggctcaaaatatgtaaactgataaatgtgataacaccaaaaaaaatgaagaataaaaatttttaaattatctcaatgtatagagaaaaggcatttgacaaaattcaacatccttttatgataaaaactctcaacaaattaggtagagayggaatgtgcctcaacttaatgtccacaactaatatcatactcaatggtaaaagtttaaagcttttactctaagaccaggaataagacaaagatgttcacttaccatttcaattcagtatggtactggaggtcctggcctg

SEQ ID NO: 452709 - DNA, 598 bp, Homo sapiens
agattattacatatgtaattgatgaggatttgattagccaatgcatgtaatgtgcctaacatgaagtaaacagacagtacctagtgcctatacctgaacacacttggaaatatgtggtatttattatttgagcaaagacctccagcaggcttcaactctttggacaaaaagctaatgtcaaatactgaactcaggttccggtgaactaaactttataaaagcastatttatgggtttgtgcaggtatctttctaaagttatccggtctcaacatcttaaatagcaggaaaaaccacagtggctcctcgctccaagaatccttcctcactgatggctattcttacctttctccttccctaccaaagagatgggcacacctagggtaacaatggaactcatctgagtttggctgctagagggcagcaggggggtgatccctggggaaggacaagacaggaagtgaatctcccctggttactgcctcaactgttgcacgacaagcagatggtgggcaaaggtttggatctggcattcagagtcatgttaatgtgtaatggaatagacaatggtacaaaagtcaggagttaacctgtgttca

SEQ ID NO: 452710 - DNA, 598 bp, Homo sapiens
agattattacatatgtaattgatgaggatttgattagccaatgcatgtaatgtgcctaacatgaagtaaacagacagtacctagtgcctatacctgaacacacttggaaatatgtggtatttattatttgagcaaagacctccagcaggcttcaactctttggacaaaaagctaatgtcaaatactgaactcaggttccggtgaactaaactttataaaagcactatttatgggtttgtgcaggtatctttctaaagttatccggtctcaacatcttaaatagcaggaaaaaccacagtggctcctcgctccaagaatccttcctcaytgatggctattcttacctttctccttccctaccaaagagatgggcacacctagggtaacaatggaactcatctgagtttggctgctagagggcagcaggggggtgatccctggggaaggacaagacaggaagtgaatctcccctggttactgcctcaactgttgcacgacaagcagatggtgggcaaaggtttggatctggcattcagagtcatgttaatgtgtaatggaatagacaatggtacaaaagtcaggagttaacctgtgttca

SEQ ID NO: 452711 - DNA, 598 bp, Homo sapiens
agattattacatatgtaattgatgaggatttgattagccaatgcatgtaatgtgcctaacatgaagtaaacagacagtacctagtgcctatacctgaacacacttggaaatatgtggtatttattatttgagcaaagacctccagcaggcttcaactctttggacaaaaagctaatgtcaaatactgaactcaggttccggtgaactaaactttataaaagcactatttatgggtttgtgcaggtatctttctaaagttatccggtctcaacatcttaaatagcaggaaaaaccacagtggctcctcgctccaagaatccttcctcactgatggctattcttacctttctccttccctaccaaagagatgggcacacctagggtaacaatggaactcatctgagyttggctgctagagggcagcaggggggtgatccctggggaaggacaagacaggaagtgaatctcccctggttactgcctcaactgttgcacgacaagcagatggtgggcaaaggtttggatctggcattcagagtcatgttaatgtgtaatggaatagacaatggtacaaaagtcaggagttaacctgtgttca

SEQ ID NO: 452712 - DNA, 632 bp, Homo sapiens
ttaactctaacatgaaaaatttataactaatggcaacattgggaaaaagcaagattggcagcatatgaaagtaagaacattgcacaaatgggcatatttagtcagaattcttaggagatgaactgctaaacatcggtttcagaatcctacataatgatttgtgagtgtgtgtatgcccaaagaacattgaatttgtaggcgaaattttaagtacacagaaaagtgtaaagcatttataaagtgaatacactgtgtaactagcatccaaatcaagtaacaggaggttactagcaacccagaagcccctttctagttcctgacaaccctccaacctctactaagaataactaatgacccaatgttttacactgtagattcwttttgttcatttttgaattttgtataaatggaatcatttagtatatgatcttttgctctcatttattttgcccaaatttatgtttgtgagacccattgtgtggtagttgtagttcattctttctcattcctatatagtattccattaagggaatatactaatttagttttttcattttggcagacatttccagtttgggtctgctatgaaaagtactactatgaatattcccatatgtgtcttttggtgccca

SEQ ID NO: 452713 - DNA, 547 bp, Homo sapiens
ccttcttgaagtgtctgtaaggagtttaacaaaaaaaggctaaaaccgtaaaccagagattaaaaattcaaatggctgcaggggctagggcaggtattggaaatgagtctcaaacatggtgggggatgtgtcaagctagacagttgagtgacaggtcttgggctgttccggccagttatcattctagggcacgcaggccaatgattcccatttttcaggaatagcagaaatctggttttctgtgtgtatgtgtgtgagggggaatctcagttttcatattggcaacatatttaaattttttaaataacatgcaagtcaarcaaaactttatgctgagtgcattcaaaacagcagtttatactctgttacaatcactttctggccttgtagtcccccccaaaatttagcaaaccttaagatcagagttttatgatcatattattatgatacatcaattatgtattccatgattgactaagtaatataggttttagtaaagcttttcagtggttcgcttttgaaaattatatattggggcacatttgga

SEQ ID NO: 452714 - DNA, 590 bp, Homo sapiens
ggttaggcatggtaaatgaattaaagctattcattaaagattttaaatgatacatatttgtacatatctgtagggtatatgtgatatattgtcacatgcatagaattgtaatgatcaaatcagtgaatttaggatatccaacaccttgagtatttatcatttctgtgtgttcggaacatttcaagacccctcttctggctaccatgaaatacacaatacattgttgttaactataattaccctactctgctattgaacaagagaacttttcccttctatctaactgtatgtttatactcattaaccagcctctcttcatcctgccccctctctcacccttcccagcccctactaamtatcattctactctctacttccgtgagatcaaaatttttagctcccagatatgagtgaaaatatacaatatttgtctttctgagcatggcttatttcacttaacataatgacctccagttccatccacgttgctgcaaatgacatgatttcattcttgtttatggccaaatagttgtccattgtgtgtatataccacattttttgaaggccattaaactttttaagtttttttt

SEQ ID NO: 452715 - DNA, 513 bp, Homo sapiens
gtaataaaattgtcattctttaaacctattttgtaatgcaggacttgctttactcattcagacaatcctttccctctgttcctccaaatcagtgaggttttactgtattagcaaaatgrcttgagatttacatctcttcattgtgtcccatctcgttaacatgaaaattgactgttgaatataccatcatttcacagagaaagtgcgatccagagatggtgatgactttgagaaggtcacacagctaatgctgtcataaatctctgctgactttcagagtcacctcttgtgataatattgcagatggcaatttagcactaccacctatccaatgagcaatgtgaatctgattgcaagcgatatgtttccataagaatcaggttcattcgcaactaccttggttactaggcaaaaggcatatttaagctgttccagccctcagtactgattactaaaaatgacaataatcacaacgcctgacatttataagtgcttttactttttcaaaaacac

SEQ ID NO: 452716 - DNA, 576 bp, Homo sapiens
aagggccagtgggacagcttctttaggttggcataagttgccaagctcctgaccagtctgctcctctactccattttcttctttctttttatgaagttgcttatgtccctacttctttccaggttctgtggctcttattttcccatgctgactaatatctatggctattcatctaaattctttcaggtargagtgcttgtggggagtttccctgaagcctctgtacagacactaacataacagtcctgaatacccaagacccagcaggtaaaggaaggaaagagaaaaggaagtaagggtcgggtaaaggaaagtaggagagagcttctctccaaagggcaggagtttccaggctcctgatatatatttgtcatctgctccatatttttctaagaagttccttttacccacagcctttacctaggtcatactaattgaagatctccactgataaccagcacttggacctggccacctgcagtcctctaggataggaatcagggggctctctgaaagatccataaagacataaatacaacagtcctggtcactcaagactcacccagtaaatgggca

SEQ ID NO: 452717 - DNA, 575 bp, Homo sapiens
cagcacttggacctggccacctgcagtcctctaggataggaatcagggggctctctgaaagatccataaagacataaatacaacagtcctggtcactcaagactcacccagtaaatgggcagtggaaaaggaagggcattatctggatcagaggagaagaagatcaaaattgtaaacctttcaaggcttttggccatgatttctctctttgcagtttaattttgctcttacttttagttttcagggtgtgttattgttcatagtcttcagccagataccattacttgagcttccctatagagatcttcatttggggctccctaaacctttggcaaagcatcaatgcgacagtgccaattcgacctcagattccagcccctgaaacaattatctcccactggtccctgttgattagaggaaaggtttttcctttttctcaatccctgacaggaacacasagagcgggtggcttgacctcagccagtcagctgtgatcactctcaagacaccacttcatgtcagacaggccccagctacttctactcaggcttctctctacaccacaggcccaactt

SEQ ID NO: 452718 - DNA, 593 bp, Homo sapiens
aatgtgaacactagagaaaactaactaccttagtcaatagtggccatggtttaatgtgatataaagccatggtcttattgttcattgtttttctttcttggccacaaaaatattctcacatcccccttgaactatttttgaattcttttctccctccaaataattttaaattgccctcttttttagaaactgttcctgatgaaatcacctgtcttctttattttctgcatactgggctcagtatgaatggcatttcctttattcccagagtgtccaggacagacttctttacccagtgggttggaaaatcaatgttactgactgatacaagaaatagtctgttaaatgtgaaacccaaaactataaaaaccctgatagacaacctaggcaataccatcctggacataggaacaggcaaagattttgtgacaaacacaccagaagcaatcacaacaaaagcaaaaattgacaaatgrgatctaattaaacttaaagagtttctgcacagcaaaagaaactgtcaacaaacagacaacctacagaatggaagaaaatatttctaaagtattcatctggcaaaggtattaacccag

SEQ ID NO: 452719 - DNA, 478 bp, Homo sapiens
gggtgatgaaataatctatacaacaaacccctttgacacaaatttacctatataacaaaccttcacaaacctaaaatgaaaataaataaaaaaaaaagaacaagaatatgagttgagtgtaacaagcatacccctaacagagagataactaacagactatttttgcttattggatttaggtattagataattcattcaatacctgacttatttctcttagcataatgccctcaaggtgaattcatattgccaagaatgacaggatatgtaagttttatttgtaacataccttaattaaaaaaaaaaacaaaataaaatatttctcataaaaataatagtctgtaacccagaccagaytcaaaggaagtaaagttgagagtcaaataaatcaggctataaacacataagaattttgataaaactgggaattaagactcagttctggaattcagatttctctaggcatagaagttaacca

SEQ ID NO: 452720 - DNA, 650 bp, Homo sapiens
taaaagtggttaaaatggcaagttttgttaaatatattttatcacaacttaaaaaaactaataatgtgatataacaaaaccattataccctttaaatggatgaattgtgtgatatatgaattatatctcaatagatgtgtktaaaacagttataacaacggcaatcttcccttcagacagctaacgttctccaacgctttggaaaatttcttaaccagtcctagtataccttttcagcccttgtgactatagatttcataagtgattactgaaaagggatgtaggcccaaaatctgagagtcatccttggctctttccttttgctcataaatgttatccaatccatcagcaaattctgtgactctacctccaaaatgaatcataaatctgattccttcacacagtctccatcactataattctaatgtaggctactattcttcagccacagtggttttcttccttcctttaaacattccaggattgtttctgccccaggactttgtacttcgcatgacttctgtttggaatacttttccatcagattttcacatagctgcctcttcttatcatttaagtctctaataaaatgttacctccttaatgagtctttccctaaaccctccatccaacccaagctcccagtttaa

SEQ ID NO: 452721 - DNA, 650 bp, Homo sapiens
taaaagtggttaaaatggcaagttttgttaaatatattttatcacaacttaaaaaaactaataatgtgatataacaaaaccattataccctttaaatggatgaattgtgtgatatatgaattatatctcaatagatgtgtttaaaacagttataacaacggcaatcttcccttcagacagctaacgttctccaacgctttggaaaatttcttaaccagtcctagtataccttttcagcccttgtgactatagatttcataagtgattactgaaaagggatgtaggcccaaaatctgagagtcatccttggctctttccttttgctcataaatgttatccaatccatcagcaaattctgtgactctacctccaaaatgaatcataaatctgattccttcacrcagtctccatcactataattctaatgtaggctactattcttcagccacagtggttttcttccttcctttaaacattccaggattgtttctgccccaggactttgtacttcgcatgacttctgtttggaatacttttccatcagattttcacatagctgcctcttcttatcatttaagtctctaataaaatgttacctccttaatgagtctttccctaaaccctccatccaacccaagctcccagtttaa

SEQ ID NO: 452722 - DNA, 577 bp, Homo sapiens
aaacattcaatacatttactctctgaccaaagtgtgaatgatgttgaagactagaatgaatctgactgcaggacatcatctagtaggcttttggggaaaaaattcttatcaagtttttgtgtgtctaagttgccttttcctttcaaaagtggagtgcaaccaagcattccagttaattgtccttgttagttgagttttcgtaagtcgaattttacttgatccttacggtcaagtttttaggcttctgcatgaaggaggactgtaaataattaacctacacaggcttgccaggtgaactcaagtaaagtctaattgaagagatgggcctcattcctttaactggaaggctattagatgatttgactgtgtcagataagaaaagaaagtgagatccttagatgagttcttctaggaaacagagtttcagagttctyacaaagatctgggggtcctgtgtgatgttaattaccctgatgctgtctgtgagagttggcagcctcagaaagaatggagacttaacccccttaggctttctgggctgtgaaacgctctcataaacaagtaggttaccttggag

SEQ ID NO: 452723 - DNA, 616 bp, Homo sapiens
tgggggtcctgtgtgatgttaattaccctgatgctgtctgtgagagttggcagcctcagaaagaatggagacttaacccccttaggctttctgggctgtgaaacgctctcataaacaagtaggttaccttggaggactaatggagatagtttaataaaatccatatggttggttactttgggcagatggccggcaggccaccttggaagcacctaaagtttctagatggtcttcaagggcagctctaaattgtgcatattgaagttgttgaatctgcaggccacaaaggaatagctaaagatgratcaactaggagatgagcacaatagtaatattttatatttaagggtagaagtgggatcaagaggatggggaaaatattgaatgagctttctttctcttcccaaagccagaaaaacaaacaaacaaacaaacaaaaacaaaaaacaaacccacatctcttccatcaagaaagcagagagattatcttattttatttttgtgaagtacccctcacatctctacagaactgtgtctggagagtctttaggtttattttattttatttaagttccaggatacatgtgcaggatgtgcaggtttataacataggtaa

SEQ ID NO: 452724 - DNA, 536 bp, Homo sapiens
gtttctaaataagcttctgggactgccatagtagtgagggtcaaggccagattagttccagagggtcttcattggaccaacattggacccctcctcccagttggggattatgatctggtcagtaaacaggtggtataggtgagatatggatatcttgaatcaatgagaattcttgaaagggtcccaggactaatacattctctttcagggagtgaaaactgtttgtagttaattgctgtaatgtcaagaaatgtactcttcctggtttactgtgaagyaattggacaaatctcatgataatacatgtagaaatgtatttcttattgattatttaaaaaggaggtttagaaccaccatctgtttactctgggcctttgaggaaaaatcagcaattatatctgtcatccaataacttgattattggttggagagagtgactaactactccacctactacccaagtggcttctggatcattgctacaactagttactgtggttacagtagcaggcagtagtaatattatagaatgtgtc

SEQ ID NO: 452725 - DNA, 565 bp, Homo sapiens
taatgaacaatttactgtttcctcaataagattttgcctatgaggagctgagggaatacgtctacccaagaaattaaaacaattatcagctgtcctgaaaatgaaattatcaccatgtacacaaatacttgatacaattgtaatacatctcaatagacaactaacatttaaaatagaatatgtaatttcttatagtccattactcatcagtcttagagtcaattgcctaacttctgtgaacctctgagacataaaagcactgcttttgtaaaagctagaaagcagaatatatattatttagttcaatcccctcattattcaagtgaggggactgaagctggtagaagttaaatggcttgcccaaggacaaacaatcactttgtggcagggttgggattcaaacctgggagtccaaactcagtgcccttgacatgcagcttgttatgtcttactcaagtcttggttctaaacgacaatgragtagatcaccaaccaagcagcccagtatttaagatgctctcctttgataacattcccactctttcccaactctcccttaaaagca

SEQ ID NO: 452726 - DNA, 535 bp, Homo sapiens
ctacttggtaattgaaacacctactacatggtaagcaccactaaatactaacaagacrtggccagatggataaagcaggactttttgttgtctgattcccaggaacattcatcaaaagaacagattcccaaagaaggccattcctagtttgaagtacttctgaaatcacaaaagacaacaggaagaatcatctgcttcccttaggcactgcctttttttttcctcagcctggcatttctgtattttttttttctggattgtttctttctaaggagatttttcaaaaaatgtggaatttgtctatgttttggagggtgctctcccaatcaagaatggcattaaatctgtgctcagttgtacctcactgatgtagacctgactccaaaaggagaattccccatgatgaaccttaaaaaatacctattacagatggaaaaaggcaagggaatagcaaaaagcaggtggaagaaggcaggtggaagaaggctcaaggacagcttgaggcagaatctgtagctcccttcccttctattgg

SEQ ID NO: 452727 - DNA, 599 bp, Homo sapiens
atgagtcacaaaacctgtgttgccaagttgtgggattttgtgactttgtccaatcctgctgccactgctgtacctgtgtcctttatcaggctttggattcctgattacctgaggggcagttctgrtgtctgatcttggctggtccccatatgcatttgtaaaaaatgaatggtaaggtaggattaaggatgtttaagagccctgctagcaaaaaatgctgtttttaagtgccctcaaaacatatggtatttggaagccataaaaacttgtggtctgtaagccatttgatctgggactgttaccatgtagtggtgttacagacatccagctcaaaatcaaaactgctaaaagcaggtggacagtttcaagtccatgatgttctgaagggcttacataatggggcacattgtgtcctactgaggtttgtttcaaaaatagccttcttagagatacaaggtgccccaacatcaacctgatttgaatttccttagaaaaaaacctatttataaatcatctgaaaagaggctgattggcttccttattctttagcaaatttaattcattttgattctttcttgaaactttatgactgacactga

SEQ ID NO: 452728 - DNA, 562 bp, Homo sapiens
atggtgaagtgcctttcatttctcaagatttattatgtaggaattgcaggtagttgaggcaaagccctggggaagcattgtgatccctgtgaggtcagcgtccgyggcatttacatttttatatctccagggcctagtatagtacttaagacaaagggagtatttgatatgtatgcttagatgaaaggcaaacttcagcctagtctccattcagttagtcatactttcacacctagagatgtatttgtttttaacccaggtttgtacttcattcagtaaaaacaaaccagcttctagaaaagtgttttaaaactaaatgagaataccatctcacattttaagtgctttgagttttgcagaaaacttcttcgtgtagtgaactgtgccttgaaacgggcttatgacatgggtaggtgattattattatacccctttcataaatgaagaaacaacaacctgaggctcagagaagttgtgacttgcacagttttacaggttagtggtagacctaattttagaatcctaatgtactctctcctccacacaatgctgcttcccccac

SEQ ID NO: 452729 - DNA, 626 bp, Homo sapiens
atcatggcaagatactttgagagtttcctgagcttccctgttggaagtttttactgtttgaacttgaggtcttttctactggtggaaaaatacttttcagaaaacrgaagtcttgctggacagaaagcccacctaccttctgttcacacttaccagaatggtagtcactactatggtccgattctctgaggatgcactgtcattgctgatttgctgatctgagaaaggcacaaacctttcatactcattccagtagccagcctagaaagagaagacatttgacctggatgcctatttttccctcagaaaagtactgcatgaaattgaagtgctgttgtggaacaaaactttcttgagctctataaggattgacatcctgtctccccgggtcttgtaattcccaccaggacccccaacactgacacataggtgtgctattccttcatcctggaggttcccatctcccactcatccttactgatattttgtaaaataataatacttattttcttacatccaaatgctgtcctctttcaagagtccttttctttaaatgtctgttttggttacttacttttcgagagccactgactttcatttcatacacatcgatggtataatttgtc

SEQ ID NO: 452730 - DNA, 626 bp, Homo sapiens
atcatggcaagatactttgagagtttcctgagcttccctgttggaagtttttactgtttgaacttgaggtcttttctactggtggaaaaatacttttcagaaaacggaagtcttgctggacagaaagcccacctaccttctgttcacacttaccagaatggtagtcactactatggtccgattctctgaggatgcactgtcattgctgatttgctgatctgagaaaggcacaaacctttcatactcrttccagtagccagcctagaaagagaagacatttgacctggatgcctatttttccctcagaaaagtactgcatgaaattgaagtgctgttgtggaacaaaactttcttgagctctataaggattgacatcctgtctccccgggtcttgtaattcccaccaggacccccaacactgacacataggtgtgctattccttcatcctggaggttcccatctcccactcatccttactgatattttgtaaaataataatacttattttcttacatccaaatgctgtcctctttcaagagtccttttctttaaatgtctgttttggttacttacttttcgagagccactgactttcatttcatacacatcgatggtataatttgtc

SEQ ID NO: 452731 - DNA, 539 bp, Homo sapiens
acattacctttagtggtgcattcttggcttcagggaattccctttcatccagcctcacccagcgctgtatgaactgctgaaccatagggttttcattgttgacaatctggaaacctgtaatgttggctcccccatgcatgactctttccagtaaaatatcagtaaaaccctggaaagacattgaraggatcatgattgtgggaagttgtatgttcttactcaccatatctgttagagtgctaaggataatgtgaaagctccttccctaggatcatttattagcaatcaagacagccttgaatatgaaattaattgttagggcactatgtccctgaaactgcaggcataatggagaaaatatgcattcttccattttagttcatgtgtctttatgtaatgtggctgccacatggacaaacataggtgccaactttaagcaaatattttgatttgtttcatttacctgtatttttagtctttcttcattgcgtacaaatacaatgctttatgtaattggaaaatgttgaaaaagtttgacc

SEQ ID NO: 452732 - DNA, 579 bp, Homo sapiens
gaacctctatctctcactcacatttgtgggttgaccaggctttgattgacagtggctggacttggctccaagctatgaatttggtttgctctatgtgtctctcatccttcttggaccaggagctacctgatagatgtccttctcacaaagatgacagaagtgcaagagagcaaacctaactgtgcaggcatacttcagggggtggctcacatcacattcaccaaaatgctcattggccaaagaaagccacatcacgaagaccaaccttatagatgatgggggagcaagtggatatttgctaaccatgttctaatcaccacaaaatgaagggaaaatatcatgtgcccaccatctctatttcttttatttccctggctttgtgtgtgtgtgtgtgtgtgtgtgtgtgtgggtgtgtgtagttatgctggagtgggttggttatggtgagcatgttggtttttggttttgccgagtggtttgagtgtaattcagtctgatagtttgagatgttaaagatgagaagatctgggggtaataaaagsaactgtgattagataatacaaaaataaatgtaagcca

SEQ ID NO: 452733 - DNA, 435 bp, Homo sapiens
tttcagagatttttttcagttctagaaggtacatttaattcttttgttaagattctaactctgtgttaaaacttttcatcatttgatctattttgactattttcccctgtattttcataaatgtattgatgtgtattattttaaggtacccatcttaataccagaatcacctgtagatctgattctactgtttatttttacacctgggttctagtcatttgatcctgttttaaagcatgccttatgcttttaaaataaaaaatcagatattgtagataaaaacgtgtaggggctctgagtgatattatccttctgcaaagagcattagagtttcttctggcaggtgagagaattgttttagatttcatttggaatgatcttttttggytttattcctactattagggtggagcccttgtttctagaaagtggctc

SEQ ID NO: 452734 - DNA, 571 bp, Homo sapiens
ccctctgaagtttgagaaccatgatgtagcatttgcacagtatgtagctaaggcaaagatagacaagcactcaacacaccacattatttgttcttgaagacttcccttggcttacttagtcatccttacaggcccctgttaagtcttggctctcccatgaagcctttctaatttttctaactcataaagaacttttctgttttggaattccaactgcacttatagcctgaaccacaatttaacatttagactgagcatgtaataagtgctcaatctaagtaatttgttactactctatgtagtcattatacatgsaatgaaaagcagaggaaccaaacctcaacatccgtctcctgatggtcaaagctttagaaaaaagatgcagtgcatagtgcttgcaaagcctgcatctttggaaaacaataagaaatatttatgtacttacaccatcatacgaaccaaggacaaaatcagtaatagagaatatatcacatgcgtgtgaaagaacttcatgcgtatttgttaaagcttccaaaataagctttgctgactgcttctcagtgtttcagga

SEQ ID NO: 452735 - DNA, 549 bp, Homo sapiens
ttctcagagaatggaaccccagggccrggagaagtttgaatctaagaagctctggctatcagatatgggggagctcctaggaatcatctaacacctctcaaacttccccatcaaaactggcctagtagcagataacagtgacatatttccctaggagggaatggggttgatacataaactatactactctaacttcattttatttcaataatccatgagaacattgtattctatctcataatatatttttaaagaaataatgaaccttttccattaaaatgtgtggctatggcaaccacacatctacaatctttgaggaaaaatcacagtctacctctatccttagcacactcttgcctaggcccatatacccactggtactgagacagcttggaaagcaggaaatttaatccagtgtatcctttaacagatgaggatactgaaggcccaacagagatggcaatagaaatgaagctccttacctttaggagaactccattcctacttcttgggaggataaattagtctgtggtaagattagaagtgttg

SEQ ID NO: 452736 - DNA, 549 bp, Homo sapiens
ttctcagagaatggaaccccagggccgggagaagtttgaatctaagaagctctggctatcagatatgggggagctcctaggaatcatctarcacctctcaaacttccccatcaaaactggcctagtagcagataacagtgacatatttccctaggagggaatggggttgatacataaactatactactctaacttcattttatttcaataatccatgagaacattgtattctatctcataatatatttttaaagaaataatgaaccttttccattaaaatgtgtggctatggcaaccacacatctacaatctttgaggaaaaatcacagtctacctctatccttagcacactcttgcctaggcccatatacccactggtactgagacagcttggaaagcaggaaatttaatccagtgtatcctttaacagatgaggatactgaaggcccaacagagatggcaatagaaatgaagctccttacctttaggagaactccattcctacttcttgggaggataaattagtctgtggtaagattagaagtgttg

SEQ ID NO: 452737 - DNA, 584 bp, Homo sapiens
ctgatgggatgcaatagaaaagaaaaccccatttttctggggagaaatttgaactggctgcagaaatttgcataagtattgaggagccaaatgttaatcactaggacaatggggaaaatacctccagggcatatcagagacccacccatcacaggcctggaggcctgggagggaaaatgattttgtggatcaggaccatggcccccctgctctatgtagccccaggacatgggaccctgtgtcccagctgcttcgactccagcagtgcctaaaaggagccaacgaacagctctggccttccttcagaaggygtaagctccaagctttggtggcttacacatggtgatgggcctgtaggtacacagaattcaagaactgaggctggggtgcctctgcctaaatttcagaggatgtatggaaatgcctctatttacagaagagggagaggattccagatacctgttaatgtggacagtagaactcccctcactaaaggacagaaataaagaaagattacatgatgccatgtttgtacaaggtgctcaataagtatttgcttccacatgtcagctgaaacccaatat

SEQ ID NO: 452738 - DNA, 568 bp, Homo sapiens
ataaggtgcgcttggatttcacaagcctaatgagcctcattcttgccttaatcctccccatgtttgtccaatcaataggagagatcttttgctttggtttctgcctacacctggggtcttggactctagactattcagatacggtcttgacatcctgcctaaaccttgccatttccttcttttcagtggtttccctcagtccatgataaacatatcacttggaaacacaatactgcctccaagcctcaccatcttctaggacagaggttgccaaacattttctgcaaagggctagatagagtatatttttggctttgcaaaccctgcagtatctgtcacaactcctcaattctgtcattgtaacatgtgaacagacatgtgcttctgtacagcrttatttatcaacaagtaaagctgtgacaggtcacgggctatgtttggcccaaaggccaaagtttgttaacctctgttctagaagagcctgggatcttgcctttcttgccaaaaagtttccacttagttatagatgctggcctattagctcaaggagccacgtattgtttactta

SEQ ID NO: 452739 - DNA, 580 bp, Homo sapiens
tcaagtctgtgatcgcgtcagtccttacacaactctaagccataggtatattacaactctattttagagaagagaaaattgaggctcagaaaagttaagtaaactgcttaaggccacataattggtgactggcagaactggaacccaactctatctctgcaattcatacggctttctaagcacccagcacaccagaagcaaactccccaatgcgtccttgacagcccagagactcaattatgtgggctggagtaaaccttctcaattccggcctttggaagaagataggaaagctggttctgagagaccctggtccctgctggcctatttgaaaaggatcttatttctgagtgtctcccagggctctgggaagctacttttggagaagaaaccagatgagttttccagagtttttaacaaygcaaacaatgcagaatacaaaagtggctgttgactttagccttccaaacaatacaaagaacaggaagctcaaacagataatcgggctcctttcctatatcatcagaaactatgcggaaggaagcctggggatgatctgatgaggcttgtttcagaggcg

SEQ ID NO: 452740 - DNA, 626 bp, Homo sapiens
aacattctgcccacaccctctgcaggggcctgggagcagttgtggggagaggctctgctgggtatgcacaccatggcatcctgggaaagagcatggcggtgttgtccctaccctgggctgacagcacggtggtatatttggaaggcaactggatggggccttctcacccactcctatccaggttacaggtgtgtcctggtgtggaggttgcaatcccttggtaggggcactgtagatagactgaggagagacaggctgtgggaaggagaaactaacttatctgccatggctaggcctcattttcactttgcacttaggtcccaccattatgtagccagctctggtcctggaccaaatggcctctagtgactccctctttccaatctaagcaggtcttgcacaactgtcatgaatgaagccaattctgatttcctatcagttcaattttttaaaaattgcattctgttcctcagaatccattccaaccataaaaacatgaaaaattgattttgatctcagtataacatcacctcataaatatattttatataaycacgatctttagaacttgctctctgtataaaatgggtttcacacctcagctcttaaaggcacttgtttattat

SEQ ID NO: 452741 - DNA, 626 bp, Homo sapiens
aacattctgcccacaccctctgcaggggcctgggagcagttgtggggagaggctctgctgggtatgcacaccatggcatcctgggaaagagcatggcggtgttgtccctaccctgggctgacagcacggtggtatatttggaaggcaactggatggggccttctcacccactcctatccaggttacaggtgtgtcctggtgtggaggttgcaatcccttggtaggggcactgtagatagactgaggagagacaggctgtgggaaggagaaactaacttatctgccatggctaggcctcattttcactttgcacttaggtcccaccattatgtagccagctctggtcctggaccaaatggcctctagtgactccctctttccaatctaagcaggtcttgcacaactgtcatgaatgaagccaattctgatttcctatcagttcaattttttaaaaattgcattctgttcctcagaatccattccaaccataaaaacatgaaaaattgattttgatctcagtataacatcacctcataaatatattttatataatcacratctttagaacttgctctctgtataaaatgggtttcacacctcagctcttaaaggcacttgtttattat

SEQ ID NO: 452742 - DNA, 544 bp, Homo sapiens
  misc_feature (1)...(544): n = A,T,C or G
tagagaaatggcattgacaaaaacagacaatagtgcagtcaattccatcttaccttcacctgggcagggaaaatataacctaaggaggagccaggacttttctaggaatcaagtaactggcatggttctcccaggctcagtgagaagcagcaagagatttaaatgtgggtagctgaaaaggagctaggtaattcatgtccttgaataggcagcatgtgaaggttttcaaaattttatgttaagtgtaaacaaatttattcctcaataaggtccacgccaagcagcccctttagratatggtggggtaagagttactcatttgaggatgccgttacaaatgagataggtgatattcagcaaaatcaatcagattatcgtctttggttgttttcattgggtcttcctacccgcagacactctcttttctcggattaattcttttaatctttccccatctgcaaaatcattcttggtgactcagaattagcttgggatgctcccccatatcctgcctctttgannnnnnnnnnnnnnnnnnnnnnnn

SEQ ID NO: 452743 - DNA, 583 bp, Homo sapiens
taaactacctgggtgagactgtgtgtttcaatttctcagtactcccgtggaactgggttaataaatatttgctgagtagaatttactgcatgcaggctgagctgtcttaatgacccagctggcacttcttaaaagaaagattaattttggccagcgataagcaaatcggccatgtaattatctgtacatacatagacaaagaaagagaatgcttggagttgagccgtgctagaatataccttacacgcagcccctcccctccatagccaccacaaagcactgaccctgtttggatgagatattggagccctagctccagggtccctgatgttgccctggtatcaaggctcttctctctgctctgaggctgccaggcagggaatatragccaccttactgttgagatttccccacactgattggcagaagcaggaggtggtgaggaccaagcagctggtccagtggttgcctctcatattcatgctccctatcccaggctggaatctcatggagacccaagacctcaccgcagagctggttcaagcttccacagcgctaaggtggcagtgacactgcggactgt

SEQ ID NO: 452744 - DNA, 523 bp, Homo sapiens
gggtaatattttgtggctgttatcataattataaaaaaaatttactacagtttattcctgcagctgagatgaaaagcttcaaggaagttccttttaaaatggggagaattttgatcctagaacaactcttaacaattcttttctacatggttctttgtgatgataatggatttttgggctttttgtctttccagacatcctttaaattgggtgtgtgtgtgtgtccgtgcatggaatcactcccyttggcactttttcacatctacatttaatctggttgttctgtttgtttcttcttcaaattgtcaggttgcagtaactagcacattgaaatttatgtgcatttaaaaattaatacaaacatactataaacattaaaagttccaggtaaatataaatttaaggtacacaattacatttttccttcttgtcaaacattctaatgggctataaaattggtaagtaataccaaaggcaccccacatgacatgaagcagcaactaggatcaggcaaagtctgtca

SEQ ID NO: 452745 - DNA, 588 bp, Homo sapiens
agaactaattgctccttcctccgagttctcagagtattcattaatctctcaacaaacaagactctctgaggaggcaatatttaagccatgggaaagacttgagttttactccaagtgtatactgggaagccactgaagggctttaagcagaacacggcctacattttaaagataactgtagctactatgtagagaaaaaattcaagaaagtggcagcaaaatcaagaacagaagcacaaataccagacgagaaaaaaaggagggagaggaaagcactggggatgtatgttgcaagtacagaagaaaggatctgtagatagayaggatgcaaaagaggaggcaatcaaaaggaggaaaaaaattatggatgcacctagcattttaatgatactcccagttagtatgtgatatgctgtaaagtattaaaatgtaccaccactgaaagtcatggcccaactcacttattcagaaacatgtcttcatcatctttgaaaatggaaaatatgtcatcccttcttgaatcccctatgtgcagcacagagcctagtctgtagtgagttatcaacatgtgcacaataacctctacta

SEQ ID NO: 452746 - DNA, 606 bp, Homo sapiens
gaggtgggaggatcacttgagccaggagttcgaggccacagtgagtcatgatcatgtcactgcactccagcctgcatgacagagtgagactctgtctcaaaaaaaaaaaaaaaaacccaaaaaacaaaaagaatcagctgtctgtgaccaaatgtattcattataattgtacttgtaagtctgcaatctaaatattatataaattgatatgtgagtatacagaaatactataaaaattaagttaaatgttttgaaaagtctttatcaaggtaggtcactaaaaagatcatacaagtctaacagaattctgtattcagaatgctttgcatatgtctaagttctctctccacttcaaagaaaccaaagctgaaacgtcattatctgctggggcatgctttaggaagaaaaacaatatagagttctcatcaccagactaacactaaagaaaaagctttacagcaaaagactagagaattaacacatataacagagactagagtatttaaagagtgagaggcaccayaggagcaagcacacagaggaacatccatatgaagaggcagcaagagggcggccatctgcaagccaaggagacaggcctcagag

SEQ ID NO: 452747 - DNA, 434 bp, Homo sapiens
ctatctcccgctgtagatcacagggctgaccataaaaggcacttaaaacattctgacttcattttgattacagtctgtgagcctcaaaaggccttgagcaggaagaggtgtgttctgacatgcggttcacatggctccctccggccacagtgggctgtatgcagggygagagaggaggaagcgggaggctgctgcggaggttcagtgacaggtggagggaggttgacaggacttggcagcaaggctggaaacaagtggagctccgggaggaccatgcgggaggcagatccacggggcccactcacttatgggcaggggagcccaggagagagtaaaaactgcctggggattagaacagaggaggagtgtcaagagtttggtttgggtcatctcggatttgaaatgctgcagggctgtcctggagtcttgtcccc

SEQ ID NO: 452748 - DNA, 434 bp, Homo sapiens
ctatctcccgctgtagatcacagggctgaccataaaaggcacttaaaacattctgacttcattttgattacagtctgtgagcctcaaaaggccttgagcaggaagaggtgtgttctgacatgcggttcacatggctccctccggccacagtgggctgtatgcagggcgagagaggaggaagcgggaggctgctgcggaggytcagtgacaggtggagggaggttgacaggacttggcagcaaggctggaaacaagtggagctccgggaggaccatgcgggaggcagatccacggggcccactcacttatgggcaggggagcccaggagagagtaaaaactgcctggggattagaacagaggaggagtgtcaagagtttggtttgggtcatctcggatttgaaatgctgcagggctgtcctggagtcttgtcccc

SEQ ID NO: 452749 - DNA, 515 bp, Homo sapiens
acccttggctgtcaaattcagagggaaggcaacaaaaagctttgcctggtgagcttgtattgatctttgagaataaggatctatgtagatagacctaaattagttagggtagacccagagacagatctctgtacttggtttcagccaagcattgcatttggatcagggtggcaaaagggccttaaccagagaacaaactgccatagcaacaggttaaaagaccatggagagttgatggagctagaggcctagtaatttacactacagaggcatgaacctgctcagcccagttggctctaagccwagactgcaacctggcagcccaccagccagaaggggccatcacacagacaggcttcttggtttgatcttcctggtgttcccttgtgggaaaaatatggagctagacggacatagtccaacttgattgcttgcctgccccatgaaggcatgagtttgaaactcttggttttaagtggacattactcctaggcaatagcttggggttatcaacc

SEQ ID NO: 452750 - DNA, 515 bp, Homo sapiens
acccttggctgtcaaattcagagggaaggcaacaaaaagctttgcctggtgagcttgtattgatctttgagaataaggatctatgtagatagacctaaattagttagggtagacccagagacagatctctgtacttggtttcagccaagcattgcatttggatcagggtggcaaaagggccttaaccagagaacaaactgccatagcaacaggttaaaagaccatggagagttgatggagctagaggcctagtaatttacactacagaggcatgaacctgctcagcccagttggctctaagccaagactgcaaccyggcagcccaccagccagaaggggccatcacacagacaggcttcttggtttgatcttcctggtgttcccttgtgggaaaaatatggagctagacggacatagtccaacttgattgcttgcctgccccatgaaggcatgagtttgaaactcttggttttaagtggacattactcctaggcaatagcttggggttatcaacc

SEQ ID NO: 452751 - DNA, 448 bp, Homo sapiens
gtaatttcttcagcttgatatttgactttacaaattttctctgtagttctgactagttactttagcttttgtttctcaaatttctaactgatatttttatcaaaatctgtctgattgtatttggtagtctctttttctctgccaacttttctatacgatgtttctttttcattgttataaaaacatgaaattaattatcctcaatacatttttagggtagagtgtattgttaactataarcacaatgttgtccagcagacctctagaactttttaatcttgccaccttttaccttcatgttttattttactttatgttttgtttaaggctaatcgagtgaagcagtgggagtggaaaaagaacaaagacatttgtaactggttgtaattgattagttgtaaacaccactgcactcaattggaccagccgccgcctttcagtttttaaa

SEQ ID NO: 452752 - DNA, 578 bp, Homo sapiens
gctatattgaaattgtgcatgttcctgacctctcccagaaggcaaagacttggcacacctttcagctccacatctgttctatctcttttcttaacttcttcctggcttgccttacacacctgtaaattacaaacaacactattatctgtttacctctcacagttgtttgtaattgggtataaggtgtttaaaataaagccctgaatagggtacaatgtgcaagcattctggttctgtatttgtttatatattggtcattatctttattcaagtcttcatccaacaaatatttattgctttttmaactatattccagacatggggcaaatgacaaaacaatacacagttctttccctcatggactgaagtctttagtgggagacaatcagataatcattataatacagatcatgaaagggtgctataggaacatcaacgagggacacctaagccagagttgtgccatcatggaagcttctaaaggagtcacttagtggaggaagcagaaaggaacccttctctgctgttagccttcattcccaaaaagcacccattagaggaagtgtggattcacaaaa

SEQ ID NO: 452753 - DNA, 585 bp, Homo sapiens
tgagtcaccagggtatgccaaagcatcacagggccttttattgtgatgttagactgaatgtgatcgacgtgatagactgaatcatatctcccaaaattggtatgttgaagtcttaagccccagtgtgactatatctggagatggggccttcaggagataataaagcttaaatgaggtcataagaatgggcctctaatccaataagactatggtcttacaggaagaggcagagmgagctctctttctctctttctgccatgtgaagacacaatgagaaggtatagtcttcaagtcaggagggagtctgcactagaatccaaccatgctggcaccctgatcttggaccgccagtctccagacctgtgaacaaatgaatttctgttgtttaagccagccagtctatagtatgttgttatagaatcctgaaaagactattacacatataaaacctggtaaaaagaaattgctgagagggcaatttcttctaactgaaaataccttgcctctttctattctgtctttggaaatattattccctgtttcttctatggtgttatgactactcatggaaatactaacaattct

SEQ ID NO: 452754 - DNA, 585 bp, Homo sapiens
tgagtcaccagggtatgccaaagcatcacagggccttttattgtgatgttagactgaatgtgatcgacgtgatagactgaatcatatctcccaaaattggtatgttgaagtcttaagccccagtgtgactatatctggagatggggccttcaggagataataaagcttaaatgaggtcataagaatgggcctctaatccaataagactatggtcttacaggaagaggcagagagagctctctttctctctttctgccatgtgaagacacaatgagaaggtatagtcttcaagtcaggagrgagtctgcactagaatccaaccatgctggcaccctgatcttggaccgccagtctccagacctgtgaacaaatgaatttctgttgtttaagccagccagtctatagtatgttgttatagaatcctgaaaagactattacacatataaaacctggtaaaaagaaattgctgagagggcaatttcttctaactgaaaataccttgcctctttctattctgtctttggaaatattattccctgtttcttctatggtgttatgactactcatggaaatactaacaattct

SEQ ID NO: 452755 - DNA, 483 bp, Homo sapiens
aaatacgctgttgatggtggtgagatctatctttttctgtgtttaaggacaaagagtcttctgacaagccagtggaaagaaagagtctcaatccagacagagcaagtcaggtctgcagtgtctgtcttgtttgctgtaaagctaagaaggaggatattttagaagaaaatataaaaaggaaagaaaggcttgctaagggcctcctgctgtttgactgtacctcaccctggctagggagtgggagagttttattaagctattcccttcaagcctgcatagcttaggagtgacttttcaactcagaaacttgggattagaatatattttgaaagcagatctgggtttctagtggcgtctggtctccayccttctcgtgtttattcttaaatcctggttgccctcccttctcttgttatctgctgataaggattcaggttaatgccttattatggaactattttaaaatttacggtaatttcagag

SEQ ID NO: 452756 - DNA, 505 bp, Homo sapiens
tctaatgcatacttacactagtgatgggccctcatatgtggccaaaagacacaattctcatggtacagcaaacgaaaccagattatagaaatccacagctaaaaggcactttagcatctgaggaaaatcaggtccaggggctataaattatttgcatgtgtttcagagaggttgctccaaatctcctctccaagtgtcttctccactgtcctcttgtccctaggggattctttgttaccttatagacagcagaaggctggaagaaccaatgccccaaaacattgcgtagagctggtctaggcaagaggagaataactgtatgagacagggctggctcatgccccatttctccctgcctcttgcttccactcagaattccagaactagttgaggaaggattataaaagctrgcagtctcttgccaccctcactcccacccttctcagattcttggtttaatcctctaacccaacccagctgctatgtgtcctcaaactcattcctc

SEQ ID NO: 452757 - DNA, 629 bp, Homo sapiens
aataaatatggttcctatagctgagccacccctaactccactcccaagagataacaaaggtcaagttcccagaaagctttcttctggaaaacctaccactgtcctggcatctagagcatagtctcttatgcagaacactagcttgagcccatttcatgacacatattttttttccaggctccaaaaatgtggtcttcctttattatgccaattaggcaagaacagatggtcttcctctactcaacagttaaccattcaacatttatggagaaaaatcctagaagggtttatttcaaatatgaaaagtgccagcccaaaggaaaattatttgaataattctccgaggtgggaggggcagttctagagrgagactttctgcaactttaaccaaaatgtcatggaatgtgtacattataatggcagaatgtcttgatcccagaaaagtacacataaacagagagaggtaattggaatcatcattttgacacctgaaaggatgacaagaaacctttaacctacagataatcagtggagtgcactgtcattgtgaatggctcagccagtctgtgggatatcacattagcaagctggctggcttattagagacatctaattctttcatatactta

SEQ ID NO: 452758 - DNA, 593 bp, Homo sapiens
gttgctcactggggagctttcacctcttcacagactgtctgatatcagaggaagggaacttccccatagtgttcccacgtcagaacacttgaataccatgaacataaaactctccctcctgacgggccctgagtggacccaattcttgctcttacagcgagggaccctgtggcatggagcagtaaactgtgttgtgccacaggaccctgtgtggggaagcctggtgccacatcctggaaactgttttctttctgcattgagatgtatgggatcctgttaaggcagaatcaaagcttacgcyagcttctctagggagggctccctccctggcttcatgactccttccaaattctcttccttcttatgtattacaacaaatataatttatccttcagttttaaaggtggatctggtgctacctaaatgtcaagtaatgtcattaatgtcaattaatgatgatgtagagtccttacaccagcacaagaaagccaatgaacaagtaagagttaagaaaactccccacagcacattaattaagaaagccaggctatgtaaaatgttattttgaaagaagccattttctgcagtgacat

SEQ ID NO: 452759 - DNA, 571 bp, Homo sapiens
taaaatttcacctattacattgtatatttaaaaacatgactaccagaaaaatttaaattacctgtatggcttacattaaaatttccatcagacagcaatcttctaaggtatggcttttgtaaaaaatgaaaagaaatatttcaagcagcaaacagggttggtcagaagctacatttttgtattatcttagttaagacattaggagatctggattaccctttattaaggctaacaaatgtagggctaaatgtattaaatttagtaatacaatataaaacaattttggtgtgcacaacatctgtggctagctacaagctcagctctgtggcacagttcatgtaactcagccatgagcacagctctcttttggaatgggtcatccatccattgctttacctagtacttctcacaaatcaataamaactactctagttaatcagaactaaaaatattgttgtcaaactactctttctctgaaaaagttactttaaccatacattccaacctgaagcaaacagaagtcctcagtgaaaaaaacagacaaacaaacaggactattccaatgaaatgc

SEQ ID NO: 452760 - DNA, 487 bp, Homo sapiens
gcaactaactagctgtgaggcctggagtatggtattacccaagccttctgatgtggatattttcatttgcacattaattacatggagtggaccagatgttcctctctgaggtctctctggctcttgtaaaatggaatgaatcttgcatgcacaaagcctcaaaattccataccaattcgaatatatttcagaccattgctataaaattgctgcaaagtattatggtagagaaggcaatgatcattaagatatggtagtctgctggagttcttgtctctcctttgggggaagaaataytcacatgctttagagattacagaaataatttatttcttctctgaggtgaaatttcctatattcatttcttattgctgctgtaacaaatttatacagaattagtggcttaaaacaatgcaaatgtattatctcatagttctggaagtgagaaggccaaaattggtctcactggactaaaattaagatgtct

SEQ ID NO: 452761 - DNA, 617 bp, Homo sapiens
actgctattgatttttaattgtccttaaaagatgttttattgatataacaaactcaattctaagtatgcatctgtgattttcccactacgattatttgtacatgacttaaaagttataacaaagagcaagtttggagaaaatataaacatttaagtacaaatgaaataccttctaataaaaatttagctatttatttaatcattgccaacactataaactaaattttctataagaattagagatcttctgtcttttgkgtttgattatggtttcatttttatatcagcactttgcaagcttccctcagctcttaaactttctgcccataatttaccagaaagaagacatcacctgctttctgagcactttgtaaacagatctcagaacctcctttctaattctgccttcctacatataccatttcttccccttcccctctctcttcctccctccattttattgtcatagagaaaacaattttagttcatggaatttttaaaaatttttctcagagaaatctgagcttgaaggagaaaaaaatatatattatgagagacccccgtgcttgtaactaatgtgtggctctctagcaagtctcttagaaatcaggcaattc

SEQ ID NO: 452762 - DNA, 624 bp, Homo sapiens
gtaaaaatctgtaatcattacattaatcagttacagagtttacaatttatggacatttagggaaatatgttatatccaaagaaagtaattgtaaaaaagtatggtgtcaagaaagtcatttttttttgttttgcttttgattttcttttcttttgtctttttttttttttgagacagggtctcaccatgtcacccaggttcaagaacagtagcatgatcatggctcactgcagcctcaacctcccaggctcaagtgaccctccagcctcagtctcccaagtacccaggatcacaggtgcatgctaccacgcccagctaattttctagttttttgtagagatggggtcttgctatrctgtggctggtctcaaactcctgacctcaagaaatcctcccatcttggcctcccaaagtgctgggattacaggtgtgagcaaccatgcctggccgaagaaagtcattctttcatattctttaacatcctaacctttctcatctttgcctcttgatattgggtatatcttgcttttgtggtctgtagcccacactattcactgctttcaaagaagaggaaaagaggtaggttagtcacttaaagtttagccactctagaagaaacaatca

SEQ ID NO: 452763 - DNA, 311 bp, Homo sapiens
taggacatcttcacctcagtatttctcaggattgaagaaaggtggcatttggctttaattttcatgaagtcctcctggccagaattgcctgggattcttccatgacttttccaagtcttcactgaaaactatggctggaaaggataaattgtagattccaggtgctatttgtcctctaatgaatgctgatcctggagccaaaagaaatrcaaccccctgcttgctttttagggtatttttggagtagttgcaaacagtgatatttatctggagatatggccaatattttttaagtagtcaataaacaaaat

SEQ ID NO: 452764 - DNA, 609 bp, Homo sapiens
  misc_feature (1)...(609): n = A,T,C or G
ntgaagtctgaaaaagttgaacagagatttcagctgccatttgtcacatgagagacagagttggaatttgaatgtcacaaatttagaaggacttgataaacaccttgtttttatccagtgaaatctaaaagagttatgccttaggtgtaaagtstgtctcaagactaaggatttgctctaagactcaaatataaccaaaacagacttgtccaaaaaaatcataaactgatgccttcacaagaacaagaagatcagtcattcatttaacttcctgctagattcaaaatcagcattcttctatctctgtagtatatcatccacactatgctacatacaataaaaaaaattaccagacatgcaaagaaacaggaaaatatgaccatgatgaagaggataagcaataaatagaaaccttgagatgacccaggtattagaattagctgacaaggattttaaagaagctattataactcatattatatattcatagagttatggggaaaatatccatattgagaaatattagcctggagaaatatcagcagtgaaatggaaactataaaaaagaaccaaatggaattcttgaagtgaaaagaagagtatctgaaa

SEQ ID NO: 452765 - DNA, 622 bp, Homo sapiens
taaaaatacatggcaataataccacaaaggatgagaaaaagaggagtcagtaaatggaattatagtgttacaacattcttttatataagtagtacaatacttactctgagaagactgataagcaagggtgaaaattatattactacagcagtccctttaaaaataatgacaaaaagtatagccraaaagccatattaggattaaaataagaaatactgaattaacctcaaaaaagcaaggagaaagagaggaacaaaaaataaatgggaaaaaaatcaaatagcaaaatgatagactgaaccatgattatatcaataattatactaagtgtaaatgtcctaaacagtgtaattaaaaggcaaagattgtcagactggatgctatagaagactcaattatattctgcatacaagagacacactttaaatataaagacacagattgaaaataaaaggatgagaataatatgtcatgcaagcagttatcataaaaagctggtgaggctatattaatttcaggcaaagtaggcttcaaaaaaaggaggattaccagagaaaaggagattattcatagcaatacaaggatcaattcatcaggaagacataataatcgtaaatgtatt

SEQ ID NO: 452766 - DNA, 620 bp, Homo sapiens
atgcttatgtgagaaaagaaacacttacaagcaatgatctccatttctatctgaagaagctattaaaagaacaaactaagcacaaactaagtaaaaygaaggaaataaagatataagcagaaatcaataaagcagaagttagacaagtggtagagaaaatttacaaaaccagaatgtttctatgagtagattaacaaatgtgaaaaaccctagacagagaaacagagaaagaatgagaagtaaagtacaaaattgcaagtatcaagaatgaaagagggattcttactacagattgcacagacattaaaaatactcaagggattactatgaacagctttataccaacaaatttgacaaagtagataaattctttgaaaaatacaacttacaaaagtgatataagatttaaaattcttaaaatcctgcaatatctggttcattttggaaaatctggcagtttcttatataactaagtatatgcctgtcctatgacaaagcagttccacttctagttatttacccaaaggaaatgaaaacatatgccaccaaaaaaaacttttacaagatgtttatagcagttttattcttaataggcaaaaatttgtaaaagcccaggtgtt

SEQ ID NO: 452767 - DNA, 616 bp, Homo sapiens
tgatgacattttctttctttcacaacttttgtttaccctggagttattkattaactatctctatttttatttgcttagcttcctattaatctattctaaattcatccctaaactgtaccagagtagtaaatctcctgtttctatatgcagacacctcaggtaaccatcagtttcatcttctccttggagatatctgctcctggagccatccctccttctgttcccatctggacgggttgattgccgtgtttcctgaacagctgttgtcctgggagtgcccttcaccattatcctggggattctttttgactcttatttgttggatttgtgccctttttgaggtttactccctcattttggtgaagcatttcttccaagaacttcctgagaaaagataaatgagaggtcaacacgttgagaccctgtagtagagtttgatttatattttggatgcacatagatttccctcagattttgatccttttgttccatttcatcttagttttcctttaactattgagaaatccagtaccttttaaaatttccaatccttttcttggtcctgctttttttctgtcttgatacttttaagatcttctccctgttcctagtgatc

SEQ ID NO: 452768 - DNA, 584 bp, Homo sapiens
tgtttaccctggagttatttattaactatctctatttttatttgcttagcttcctattaatctattctaaattcatccctaaactgtaccagagtagtaaatctcctgtttctatatgcagacacctcaggtaaccatcagtttcatcttctccttggagatatctgctcctggagccatccctccttctgttcccatctggacgggttgattgcygtgtttcctgaacagctgttgtcctgggagtgcccttcaccattatcctggggattctttttgactcttatttgttggatttgtgccctttttgaggtttactccctcattttggtgaagcatttcttccaagaacttcctgagaaaagataaatgagaggtcaacacgttgagaccctgtagtagagtttgatttatattttggatgcacatagatttccctcagattttgatccttttgttccatttcatcttagttttcctttaactattgagaaatccagtaccttttaaaatttccaatccttttcttggtcctgctttttttctgtcttgatacttttaagatcttctccctgttcctagtg

SEQ ID NO: 452769 - DNA, 502 bp, Homo sapiens
tccaaatgttgatgcatttcattataaaatatttttttaaatcacattcactggtatcaccacttatctagtcagaagtcttgaagttttgaaaagctgacaagttcacggtggcagatacaaatttttgaaaattttaattttcacttaacagctcaaattttataatcagccacaggttttatcagatgtttttctcgayaagctcactttgttcatttttgagaaagtatctttcaaaagcctaactctaaataatttgtctttaattgtttcaagtgaaaaagttattccattaaaaaaaaaatgaccaattcagggacaggcatggtggctcacacctgtaaccccagcactttggaaggctgaggtgggtggatcacttgagcccaggtgtttgagaccagcctggccaacatctcttagtagagaaaccctgtctctactaaaaatacaaaaaatagctgggcgtggtggcatgcacctgtagtcccagttattc

SEQ ID NO: 452770 - DNA, 557 bp, Homo sapiens
catattgactcaatattacagattcatgaaatctacagaataacatatgtcacaaataaatatatatcattgagaaaatagcacgatttaggaaatatttctccaaattgtgttccatggagtattgttccatggaatgaatgataacttatgttacacatacacacacacacatacatacacacacacacacacacacacacactttaatgattaaacaggactggctacataattttcaggtccccatgaaaaatgaaactatgagtcccctcgttaaaacattattatgaatttcaagatggtgactgcagagaatgaaaccaagaatgggtctcttcttttttttycttttcttttcttttttttttttttttttgagatggagtcttgctgttgcccaggctggagtgtagtggcatgatctcagctcactgcaaccttcgcctcctgggttcaagcgattctcctgcctcagcctcccaagtagctgggattataggcggctgccaccacgtctggctaatttttgtatttttaatagagtcggggtttca

SEQ ID NO: 452771 - DNA, 621 bp, Homo sapiens
ggtatatactgaagtatgagcttcattaacttcacggtaaatccatgtgtgacttctttattgctgtattctcagcactcagcacagtgccttaaatgtattagaccaggggtatacggtcttttggcttccctgggccacattggaagaagaagaattgtcttgggccacacataaaatatgctaacaataatgacagttgatgaactaaaaaaaaaaaataaaaataaaaataaatcacacacaaaaatatctcttgtttaagaaactttacaaatttgtgttgtgtcacattcaaagctgtcctgggccacatgcagcccktgggccatggtttggacaagtttttttagatcctcaaaaatatagctgtgagcaggaaggcagggatgggtggattcatactcttttttaccaaatatatgctacaaaccctttaatggcttcctaccgctcttaagataaaaaattactgtataacccagcctttgccttcctctccaactgcatcttgatctcttctttaccttctatactccaactacattaaccttctcttactgccttaggacctgtccataggtagtttcctttgcccagactcctcttcccatcccaact

SEQ ID NO: 452772 - DNA, 533 bp, Homo sapiens
ccttgggccatggtttggacaagtttttttagatcctcaaaaatatagctgtgagcaggaaggcagggatgggtggattcatactcttttttaccaaatatatgctacaaaccctttaatggcttcctaccgctcttaagataaaaaattactgtataacccagcctttgccttcctctccaactgcatcttgatctcttctttaccttctatactccaactacattaaccttctcttactgccttaggacctgtccataggtagtttcctttgcccagactcctcttcccatcccaactcyaccatttacagctcagttcaaatgctactttgtcaagaaagacttgaagcctagtttaagtctcccagtaatctcattcacgatattccctacttcctcaaaaacactcctcacaattgtaattacagagttttgtaaaaagttgtttaatacctatttgctactggaatgaaaactctatgaaagtaggggtgacagtgtgtttgtttatttattgtttccccagtttac

SEQ ID NO: 452773 - DNA, 616 bp, Homo sapiens
acttgaaccaaagacatgtgaccagaacttcacatttttcttcctatacatcaaaaattccagaaattctagtattctgtgtctctaaattaaatcccctaggtaagaaggaggatgtctccttcataggcagaatctcagtcattaacttgaacatactcaccttaataagaagcttcaattcatagtctccaaaacattgtgaagttgaggaagaattgctgatcttagaaaccccaaaatcactgccttctccatctatgcacaaaagtggccctgcccacaaaggtcagatagaaccagatcaattaaagggatgttactcaagagtagaatgtaaaatttaaggacagagattctggaatcaatcagattgggacccattttatcccatgggttccaaattactatttctccataactaatcttatttgttactatcagcacttaaagcaatattttccagtatgacagttccctgaactttttattttgaattaacaaatggttatgttcatyatatctttaaattgcactctttctttcaatatgtttttgctttagtgaaccaatcaatatcttgaaaatgttaagatagccaaatttgcaataaaac

SEQ ID NO: 452774 - DNA, 642 bp, Homo sapiens
tacattattatacaaagaggaaagagacgactaatatgtattaaacatttgccatatatgtcaaatcatytcaaccccttgaggtaatttctactattctcactttaaaaaaggggaaactgaagtctagagagtctaagtaccttgttataggttaccctgcaagtaagtagtggagcaagagtttgaatttgttttacccaaaaggccttggcctttccactatacccttataaatgtaaataaaatcattttatgtaaattttcacagatcaaatttatcaaatttgatactgagttttttaatgtttttaataaaattgaaaaaaaaatttaaaatattttattttccagttgtgactaatatattgaaatataatagatttttgtgtattgactttatagcctataatttagctaaactcacttattagtcctgccagtatttttgtagattatacagagccaatctctataacttgtctatttctctgttccatgtcaagtaaaaatgactacataaatttttatcaaatttggaaaatataatgtgattaggctaataatagtctatcaggagatgactttcaggaccgtttaaagaggcagacaatcatcatcacaagcagctgaaagtgaagc

SEQ ID NO: 452775 - DNA, 642 bp, Homo sapiens
tacattattatacaaagaggaaagagacgactaatatgtattaaacatttgccatatatgtcaaatcatttcaaccccttgaggtaatttctactattctcactttaaaaaaggggaaactgaagtctagagagtctaagtaccttgttataggttaccctgcaagtaagtagtggagcaagagtttgaatttgttttacccaaaaggccttggcctttccactatacccttataaatgtwaataaaatcattttatgtaaattttcacagatcaaatttatcaaatttgatactgagttttttaatgtttttaataaaattgaaaaaaaaatttaaaatattttattttccagttgtgactaatatattgaaatataatagatttttgtgtattgactttatagcctataatttagctaaactcacttattagtcctgccagtatttttgtagattatacagagccaatctctataacttgtctatttctctgttccatgtcaagtaaaaatgactacataaatttttatcaaatttggaaaatataatgtgattaggctaataatagtctatcaggagatgactttcaggaccgtttaaagaggcagacaatcatcatcacaagcagctgaaagtgaagc

SEQ ID NO: 452776 - DNA, 581 bp, Homo sapiens
catgattgcagacccacatgactgcccaacgaaaggaaaaggcaacattgattaaaataccagagacagagaaaacaatcaattaagaaacacattaagggcagatacatcaaactgcaatttattgcatgcttgttatttgggcaacttcaagtattacaatgctccagggtaagaagcagcagagttttattaatttaactatggcagacaattctcttcagcagtagggagatcagccaataaaacagccattatttgttgtttcttagtgctatctttgtcccttactcttcattatccaatataatttgttattacgttatacattgtggccgattaatttaaaaacactcaagagatttccattctyggttaggaagagtcaggctgtatcagaccaatcttcctgctgagaataactagaaaaaaaacaattttaaaaatcagtttggccaggcagttgcccgagcctgtccagcactttgggaggccaaggcaggaggactgcttgaggccaggaattctagaccagcccaggcaacaaagggagacacccatctccacaaaagtaaaacaat

SEQ ID NO: 452777 - DNA, 455 bp, Homo sapiens
ctgcacgttgtgcacatgtattctaaaacttaaagtataataataataataataataataataataataataaaagaaatataataggaaaatttggggaataaggcagccacagtgaaccttgacaatctcacacatactccctgtaatytagaaggctaaatatgcttaggagggactacaggatagaagtgtggatagtaggaggattcctagctatccacacatttccagataagtgtgaaacctaggacacttataaaggaaacatcagaagccatgactgagagtaaaatcccagttagacttgtaaaagacctaaatttttaatgtgtttcccaaccaacacagagatgcactggcaaaaggtggaaggcttactggctcacgggaattaagcaaaacctctgatcaatcttcagctcaccattaagctatgttgactcaagtgcaac

SEQ ID NO: 452778 - DNA, 553 bp, Homo sapiens
ctaggacacttataaaggaaacatcagaagccatgactgagagtaaaatcccagttagacttgtaaaagacctaaatttttaatgtgtttcccaaccaacacagagatgcactggcaaaaggtggaaggcttactggctcacgggaattaagcaaaacctctgatcaatcttcagctcaccattaagctatgttgactcaagtgcaacccccaggagacttgtcttaacaattaaaaaatgattaagaaataaaaaaacttaagagatatcagtagctacaygactcaagggagacagactctatagagttagtccaagacctatggtatggaagtacagaattcagagttggtccagtatattatctaaaatatgtagttttcaacaaaaaagctattatacatgaaaaaaatagaaaagtttgactcataccagcaaaaaacatagaaactgcctctatattaggggccctaaatattagacttggcagtcaaagacttataaatatgttcaagaactaaagacagtctgggcacagtggctcatgcctgt

SEQ ID NO: 452779 - DNA, 582 bp, Homo sapiens
tctcttctgacttgcagggagatttgaaaggaaacaatctaaaattgaggaacagttaggggcatggactctggagatggattgcctgcatttgaattctggttctattatttacttactgcatgactttgaatgagttgtattacctgtctgtgtttcaattttctcagctgtaaaatcagaatcatatctgccttagaggattttrtgatatttaaattatataatatttataaagcagttgaagtagtgtctggcatatagtaagcacttagaggtgtaaaccaaaatattacctagaccactctccttgtccaaggcacataagcttgtgtttgaatgaataacatcagagttggttgtttttccttcagacgtaggacttgtggtgataggtaatagcccagatgcatgctaagcagcaggaaaggccagtttagaatttaaaatgcacatggataactcacacaaacataattatcattcagagtagttcatttatccattctcagcacaggggtaattcctgtcaagccacatgaacaaatatacacagtgaggaacaactttgatacaaaaact

SEQ ID NO: 452780 - DNA, 582 bp, Homo sapiens
tctcttctgacttgcagggagatttgaaaggaaacaatctaaaattgaggaacagttaggggcatggactctggagatggattgcctgcatttgaattctggttctattatttacttactgcatgactttgaatgagttgtattacctgtctgtgtttcaattttctcagctgtaaaatcagaatcatatctgccttagaggattttatgatatttaaattatataatatttataaagcagttgaagtagtgtctggcatatagtaagcacttagaggtgtaaaccaaaatattacctagaccactctccttgtccaaggcacatragcttgtgtttgaatgaataacatcagagttggttgtttttccttcagacgtaggacttgtggtgataggtaatagcccagatgcatgctaagcagcaggaaaggccagtttagaatttaaaatgcacatggataactcacacaaacataattatcattcagagtagttcatttatccattctcagcacaggggtaattcctgtcaagccacatgaacaaatatacacagtgaggaacaactttgatacaaaaact

SEQ ID NO: 452781 - DNA, 593 bp, Homo sapiens
aaaaaaaaaccattagattaatcaaacagtgaggttagaaattagatttaggttgtgatgagaccttaaagaatgagtagatgaacaaggaatagattctgatacattcagcttacttattgaagttctgtggcaataaaaagaagaaaagaaacaaaatagtaatgagagaagaaccagattgktttttttaaatgcaagatccaaggtaagctacttctttaataaagttaatctcagttttctattaggaaaatgtagataagggtcaatgaattcacactaagatatgaatgacagattatttctcttagtttccctagtacttgacactttaaaaaccaaacagacaagcaatccaacaaacaaaaaattggacattcattaacttattaaattactcaacaaatatttattaagcagttactacgtgacaggcactattatacaccatatatatctgtaaatatacacatatgcatgcatatatatctatatatacagatatacatgcgtgtatatctgtacatatacatgcatatatatatctgttctgtatatatacatatatgcatgcatatatacatatatac

SEQ ID NO: 452782 - DNA, 508 bp, Homo sapiens
atgtatccacaagaaaataagtatgccaaagagatacctgcactctcatgctcactgcagtactattcacaatagtcaagttatgaaatcaacctgtctccatcaacagatgaacggagccaggtgtggtggcttaggtatgtaatccctgcactttgggtggctggggcaggagagtcacttgagaccagaagtttgaggccaccctggtcaacacagcaagaccttgtctctacaaaaaaattaaaaaattagccaggtgtggtagcgtgggcttgtagtttcagctacttgggaggctgaagcaggaggagygcttgagcccaggaatttaaggctgcagtgagctataattgcattactgcactccagcctaggcaaaagaacaagaccccatctcatgaaaaaaaaaaaaaaaagaatggataaactggcatatatatttgcggaatactattgagccataaaaaaagaatgggatcttgtcatttgaggcaacatgaatgag

SEQ ID NO: 452783 - DNA, 493 bp, Homo sapiens
ccttgagtaaagcagattactctccataatgtgagtaaacctcatccaatcagttgaaagcttcaatttgaaaagattggcctccccaggaaaagacaaaagtctgccagcagactgcctttgaactcaaacttcaactcttctctgggtgtcctgcctaccagcctaccctgcagatttagagcttccaatctttacaatcatataagccaattccttaaaataaatctctctctgtctctcagacatagtctattggttctgtttctctgtagaaccgtaactaayagacactgcttctttttgaataatgctttgtagttttcaaagaatgttcatgtatattgtcttattatatgcccacaaccttgaaaggtaagcagaatgaaaatttcaaggatggtgaagttgggaaagaataaagaatttttccaaagtcacaaggctaagtaagtggtagagcctggctagaactcataatcgtctgattcct

SEQ ID NO: 452784 - DNA, 637 bp, Homo sapiens
gccatgcattttcaataatggagatgaaattcaatttgattcacaatagtccatgcagatttttcccccaagttatttttacatgaaggcatgcttgaaaaatttcagcccagatttaggtttaagttcccagacttagtaagtaattgctgcagtaatgagttctatgtcttaatttagtctgctccagatgttaacatctagattgtttgtttttcattctccacccctctgcatttccttatacaacagcacatttttctgaaattttaaatatgggagggtggtacaagagagcaggaagaaatagggtgagcaagaaatctagggtctcatctgctatgccaatcagaccaacttttttgctagagtaagctgagggaagaccagttttcaccttcatagaagccatattggccttcctgtatttgcaggagggtgtagtcctgaagaagaatatgcattcagggctgayagtgtgcttcctccaaggcaaggtactatgttggtggccctctttaagtgggaaataaaaactctgtggcagagttggctatgctgtactacgaatcaactaactcccttccccccaatatttattgaaacaagggaatgaaccccatcctataaactagca

SEQ ID NO: 452785 - DNA, 629 bp, Homo sapiens
ataatttgagtgggcagaatatgcaaatccagagttaagcagtgggatgtggatgggaagtataaagctgattaagcaaaacattttcaaaggttgggagagatagagaaccttttactggaaagaagagagacaggagctgtcatagggatcttccagtttacagatgccaatgtcattaaagtagcttagtttccawcccagctcttccccctcctccccttaatgctgagcatctacttgagtctcaccttccttgattccgtattcagaattaacttcccacctttttatcctgtttttgttacgtatttccctcaaagtcacagctaccttactttccctccattatttgacagagacgattaacattttcttcatgttttgtaagctactatgcaaacaaagcttatagacatggctccagccctcacttttcaaattgatggccccctctaagctcctcttccatagaaatgatggagcaacaactgttacctgggaattaaattggcacaaattttattagactagtgtttgagaccaagtgtatgcaagtttcacatagaaaacatagttaatttgttttaaggactcagttcaatactgttcttttcttaattggcaaa

SEQ ID NO: 452786 - DNA, 542 bp, Homo sapiens
ttgggtactgagtataatcaaagctgagacatggtccttgctttcaaggaatttataggctgagacataagtaacttggacaccaccagcagactatcaacatgggatggaataatgagtcaaaaacatatgcactattcatattgatcacatacaaaagccacacttttatattactagtatattatttttcttttggatacaaagatggaatgttattgctaagtttgaagagtctatctaaaaggtccaaagtatatctagaaagagaaatccctttgcccaaaccactgaaatagtaatagggcacgcacttggtgacatatctcaaagttcccagaaatagtccaagtggcctygcatggctagaaagttctccgcttttaattttgttgtgttccaaagacttacttgtgagtcagctgatggaaacttgggatgtgtttagacattgaaagaaagccacaagtgagggtcatatctttaaatgggccaaaaaaaggttgtacaaagtccattctgaataaggaattataatacta

SEQ ID NO: 452787 - DNA, 564 bp, Homo sapiens
attgaggccctgggaaaaaatgagaaactgagggagttaacaagtaactaatggctaaatgggagagccagaggacttctctggtcattaataaaagggctgttatatcctgtggtggaaaaacagacatggctaagcagaaaactgaagatctgatggagttatagggattcagagatgtttgaatactcaatcaattaagctggtctgttatgctatcagggctatattggaaaaacccagtaccctgaaatatgagataggcccatttagatggatttcagctcyaaatattggagctgaagacctccctgaaccctcagagtttagtgaccacccttccctaataagaggtagcacctgccctgtgtttgaaaacctggcagaagcctatccctgcaaggcaacagttgatccctttgggagccactcccacctcctctcctggataccaggctgataactagaattaaagcccaggatagcccaactaagaaaacaaatgagactatgtagccaggagttatgaaaattagctaagatgtatcaataggagccagagat

SEQ ID NO: 452788 - DNA, 564 bp, Homo sapiens
attgaggccctgggaaaaaatgagaaactgagggagttaacaagtaactaatggctaaatgggagagccagaggacttctctggtcattaataaaagggctgttatatcctgtggtggaaaaacagacatggctaagcagaaaactgaagatctgatggagttatagggattcagagatgtttgaatactcaatcaattaagctggtctgttatgctatcagggctatattggaaaaacccagtaccctgaaatatgagataggcccatttagatggatttcagctctaaatattggagctgaagacctccctgaaccctcagagtttagtgaccacccttccctaataagaggtagcacctgccctgwgtttgaaaacctggcagaagcctatccctgcaaggcaacagttgatccctttgggagccactcccacctcctctcctggataccaggctgataactagaattaaagcccaggatagcccaactaagaaaacaaatgagactatgtagccaggagttatgaaaattagctaagatgtatcaataggagccagagat

SEQ ID NO: 452789 - DNA, 564 bp, Homo sapiens
attgaggccctgggaaaaaatgagaaactgagggagttaacaagtaactaatggctaaatgggagagccagaggacttctctggtcattaataaaagggctgttatatcctgtggtggaaaaacagacatggctaagcagaaaactgaagatctgatggagttatagggattcagagatgtttgaatactcaatcaattaagctggtctgttatgctatcagggctatattggaaaaacccagtaccctgaaatatgagataggcccatttagatggatttcagctctaaatattggagctgaagacctccctgaaccctcagagtttagtgaccacccttccctaataagaggtagcacctgccctgtgttkgaaaacctggcagaagcctatccctgcaaggcaacagttgatccctttgggagccactcccacctcctctcctggataccaggctgataactagaattaaagcccaggatagcccaactaagaaaacaaatgagactatgtagccaggagttatgaaaattagctaagatgtatcaataggagccagagat

SEQ ID NO: 452790 - DNA, 578 bp, Homo sapiens
taattcagtagggacatatgcaagaatctattcctttacagtttaactacttttgtacacaacattatatccttatattctcctataattttttaaatgagactagctctaggatcctgtgggttcctttctctaattaatacaccatcaatagagaatcaaaggttcagttatcagattgtctttctttctctaagccagtccagaagggtggataggacttactattgcatagtcttcaaatataactacccaattaaactggtctagatacttttaggatatatagcagtgatctcccttatmatttgtaattccctgctgtaaactccaatctgcatatggaaattttaagttgggtcatccttataagtctccaaaaacacttctggaaagggacattttggcaatatgtatcaaaagctttaaaaacgtatatatgctttgactaaaaatctccacttctaaaatttttttctgaggaaataatcagaatgggatgcacaagtgcataagaatgttcatctcagctttatttcatggcaaacagagaggatgactaaaaagaagagtgaata

SEQ ID NO: 452791 - DNA, 578 bp, Homo sapiens
taattcagtagggacatatgcaagaatctattcctttacagtttaactacttttgtacacaacattatatccttatattctcctataattttttaaatgagactagctctaggatcctgtgggttcctttctctaattaatacaccatcaatagagaatcaaaggttcagttatcagattgtctttctttctctaagccagtccagaagggtggataggacttactattgcatagtcttcaaatataactacccaattaaactggtctagatacttttaggatatatagcagtgatctcccttatcatttgtaattccctgctgtaaactscaatctgcatatggaaattttaagttgggtcatccttataagtctccaaaaacacttctggaaagggacattttggcaatatgtatcaaaagctttaaaaacgtatatatgctttgactaaaaatctccacttctaaaatttttttctgaggaaataatcagaatgggatgcacaagtgcataagaatgttcatctcagctttatttcatggcaaacagagaggatgactaaaaagaagagtgaata

SEQ ID NO: 452792 - DNA, 596 bp, Homo sapiens
atcattttatattttttaaaacaaaaaaaaattactctataccagtgtcctcttgtagaaagtgaagctttacaaaatcttggccagcaaagctgggttaaaaagttgcaaaacactacaaatactggtagattaaaggtcttaataggcctattagcagatattctagagaattgctaccacttttcctatttagttttgactgaatctgacaatcatttttwaaaatcacgcaaggcaaggaaagatactgatcaggaatttttcttttatgtgtcagaaaaaaaaaatagagatttatctctcttaatgtgtatgtactaaatatacagtgaaatataactagaaacacataaacatccccagcaacttgaactaacaataacaaaaatgtcagcactctaaattaccagctctgtattcctttctaatcctcctggttatacagatataattttacatagttgtgatcattgtatatgcatcattttgagtgctgcattttttactcattgcttcacatgaccctttccttatttctacatagttctcatattgtcattcttaatagcaataaaatataccattgcattagt

SEQ ID NO: 452793 - DNA, 511 bp, Homo sapiens
ttttgggttttctatgcataaaattatatcatcagcaaagagaaataggttgatttcttcttctcttatttggatgccttttatttctttgtcttgcctgattgctctagctgggacttccaataccatgttgaatagaaatgctaagagtgggcatcctygtcttgttccagttctcaaggggaatggttgtagcttttccgcattcaatatgatgttggccgtggatttgtcatagatggcttttattattttgatgtatgtgcctttgatgcctagcccctgttgagggtttttgcaattaaacaatgttgaaatttattgaaggcttgttctgcatctattgagataatcatatggtttttgtttttgattctgtttatgtggttaatcacaattattgatttgcatatgttgaaccaaccttgcatatcaggaataatgcctacttgattgtggtgaattaactttttgatgtgctgctaaatttggtttgctaatatttattaaa

SEQ ID NO: 452794 - DNA, 434 bp, Homo sapiens
accaattcccttactgtttggttgtctgagaaggattgtatcctcctttgcttatgaagctgagtttggtgggatatgaaattgttggttggaatttcttttctttgaggatgctgaaaaaaggctgcaatctcttctggcttgtaagttttctgctgaaaggtctgctgctagcctgatggggttccctttgtaaatgacctgacctttctctctagctgcatttaagattttttctttttcatttaccrtggtgaatctgatgactgtgtgccttgaggatggttgtcttacatggtctctcacaggggctccctgtatttcttgaatttgcatgtccacatccctagagagattggggaaattttcatggactctttcttcaaatatgttttccaagttgcttactctcttatcttctctctctggaatgt

SEQ ID NO: 452795 - DNA, 558 bp, Homo sapiens
tctgcatcctctttaaggccaatatctcttagattacccttttgaggttatttcgtagatcctgtaggcatgcttcattctgytttattcttttctttcttttgtatcctctgactgtatgttttcaaatagcatgtcttcaagtttactaattctttcttgatcaattttgctattaagagactgatacagttttcagcatatcaattgcctttttcaactatagaatttctgcttctttttcattatttcgagctctttgttaaatttatctgataaaattctgaattctttctctgtgttaccttgaatttctttcgagtttgcttaaaacagctgttttgaatactctgtctggaaggtcatatatctgtttctccaggattgatctctggtgcctcatttagttcatttggtgaagtaagattttcctggatggtgttgatgctcgtagatgttcttcaatgtctgggcattaaagaattgggtatttattatagtcttcacagtctgggcttatttgcgcctgtccttcttgagaatgctttccaggtattc

SEQ ID NO: 452796 - DNA, 558 bp, Homo sapiens
tctgcatcctctttaaggccaatatctcttagattacccttttgaggttatttcgtagatcctgtaggcatgcttcattctgttttattcttttctttcttttgtatcctctgactgtatgttttcaaatagcatgtcttcaagtttactaattctttcttgatcaattttgctattaagagactgatacagttttcagcatatcaattgcctttttcaactatagaatttctgcttctttttcattatttcgagctctttgttaaatttatctgataaaattctgaattctttctctgtgttaccttgaatttctttcgagtttgcttaaaacagctgttttgaatactctgtctggaaggtcatatatctgtttctccaggattgatctctggtgcctcatttagttcatttggtgaagtaagattttcctggatggtgttgatgctcgtagatgttcttcartgtctgggcattaaagaattgggtatttattatagtcttcacagtctgggcttatttgcgcctgtccttcttgagaatgctttccaggtattc

SEQ ID NO: 452797 - DNA, 427 bp, Homo sapiens
gcatggtggttcgcacctgtaatcccagctactcaggaggctgcggcatgagaatctcttgaacctgggaggcagaggttgcagtggagagctcagatctcaccactgcattctagcctcggtgacagagtgagactctgtctcaaaaaaaaaaaaaaaaattaatgcaatgtataatgctgggctctcaataacttttctataaaggacattttgggggccattagygaagtttaagaaaggtttataaattagataaaatatattcatattattttccgatttcaataactgtactatggttataacaatgaaaatttcctcattttggtaactgtactttcataactgtccttgatcccaggaaaaatacactaaaatatttaggagttagaaaaaactttacagtttttgagatccctcatgt

SEQ ID NO: 452798 - DNA, 548 bp, Homo sapiens
gtgtttgcacaaaagtaaccatgtctgyaatttccgcagtagtttctggttttctctctgcccttcctctctggggaacccagctgtcaggcctggggtctatccgtcggaattaggtagaagaatctccaccaagattctgaatgtttccaacacatttcagcagcagttccctcaccacactagtattctctcgattctcttttcccaaaccctcaattcataagttgtaccagtatgtgtgaagctcatgttaagcactttttccactcttggggggcccataagaattgtaacataaacaagaaccatcttttctctcccttgtgccacacccaccaaagcaaatggcctgggtcacgtcctgcacaccccaggaaattcatgtctgggagatgctgggggggagaggcgccagggaggcagagaacattattatgtctgattcatttacactgcaatctgtcagccaccatgctgtcaaggctgggctgaagccaagaaattgaatttagagggtgatttttcttagaacaggaagttccatt

SEQ ID NO: 452799 - DNA, 618 bp, Homo sapiens
ctgcaaactctgcctcccaggttcaagcgattctcctgcttcagcctcccaagtagctgggattacaggtgcccgccaccacgcccagctaatttttgtatttttaatggagaccaggtggccaggctggtcttgaactcctgatctcaggtgatccgcccacctcggcctcccaaagtgctgggattataggtgtgagccaccgtgcccagccaacgctattttcatttctctcttaggacactgagctgctggatttgcgagaaaccatagactttctgaagaaaaagaactctgaggcccaggcagtcattcagggagcccttaatgcctcagaaaccacacccaaaggtaggacatccagccacagattgagagggaacagggagcaggaaagtaagagtattacagatttttatctgggcccatagtattccaagtcctatatcaagtctctagaaggtgagggcctttagataccctttagtgtgatgtctggactggtcagtgaggagtaccaggggcatgaccccagcttcctagggcatgaaggcaagyagaggagacctgtaagccccaggggtcctctccttaacctttacctcacggccaaagagc

SEQ ID NO: 452800 - DNA, 577 bp, Homo sapiens
tttccaaaatccaacttacaatttttagtacttattttcctttttttttttttttttgagtcggagtctcactctgttgcccaggctggagtgcagtggcgtgatctcagcttaccacagcctccgcctcccaggttcaagcaattctcctgcctcagcctcctaagtagctgggactacaggcgcatgccaccatgcctggctaatttttgtatttttagtagagatggggtttcaccatgttagcaaagtgttttyaagactcatccatgttgtgtcatgtatccacacttcattcctttttgtggctgaataatattccattgtgtggatataccacagtttgtttagctgttcatcagttgataggtaggcattgagttgttttcactttttgcctattatgaataatgctgccataaacattcatgtacaagtttgtgtgtggacatatgttttttgttctctggggtatatacctagaagtggaattgctgggtcatatggtaactctatgtttgactttttgaggaattggcaagctgttttccagagcagctacaccattttacattcc

SEQ ID NO: 452801 - DNA, 335 bp, Homo sapiens
tcgctgtgtggcctgctttgcctccctgaggctccmtgactcctcccctccactgaaggtcccagcacaaggaaaggggacagagctgggcctgtgcctaggaagccgactctgtgtcctcctcagcacttctgggcagctgcatttcagtcttgggaaggagaaagggagagaaagagtccctgagccctgaaacctgagcccagcctggctgaaataagtgcagctttcaggaaggagtcaaactttctcaggctaaagcttcctcttaaaagcagagggagtggctgctgggaggcccggtctccagagtccccagggcacttccaggagga

SEQ ID NO: 452802 - DNA, 509 bp, Homo sapiens
tatatgtaggacttgaaaggttagaggagattataaaactctagaggattttgctttcagattgctttatgttgttaaaatttttgctccaccttaaagaaactgacattagacttgataatgcactgtaggtatgggtgtgaagactcaagttggaaaagcagaagtgtatcaggaaaaattctattggtccctagtactttgaatgacactgaggttcactggcaactttctgtgtaattttttataacaaagacctacygctgcaaggattttacatgtaatgagtgcctaaggaaggtatgaaaaacccttccctggaagtctcccaaagcagaaaaacacccatttgcgtggatgacttggtgcatcagtgataggggagaaatgactgaggtaaactgttcatggtatgagagttgaccaagtcagggtggggaggggaggaagaggggcaggtggacttggtgactctgcctccctttcaaacagagcagccctgtgtttac

SEQ ID NO: 452803 - DNA, 568 bp, Homo sapiens
ccttattttccaggaaagcactcattattagaaagatatttcttctgttgagctttgattctgtcttctgagaatttctacccatgagtctgaatttgctctctggatgcttacagatgaagctagcctgcatttcccaggatcccctttcttatatttggggtcagacacctatctatgctccattcrtctttctgcttttgcttcttccttccatttttcttccatttctcttctttggaacaagacctgataggagatgtctgacctgttcaccctgactcacgggcccagtggagtccagctctccacctggacctcactgtctgcatctcagagtggctcccctgccggggacccacggcacctggcggggctttctcctggcccatcacttaatactcacaataattctatgatcctggcacttacaagtgaggaaactgaggcactgaaatacaggtaatctggccagggaaagtggttcacacctgtaatcccagcactttgggaggccgaggcaggtggatcacttgagctcaggagtttgagaccagcttgggcatca

SEQ ID NO: 452804 - DNA, 568 bp, Homo sapiens
ccttattttccaggaaagcactcattattagaaagatatttcttctgttgagctttgattctgtcttctgagaatttctacccatgagtctgaatttgctctctggatgcttacagatgaagctagcctgcatttcccaggatcccctttcttatatttggggtcagacacctatctatgctccattcgtctttctgcttttgcttcttccttccatttttcttccatttctcttctttggaacaagacctgataggagatgtctgacctgttcaccctgactcacgggcccagtggagtccagctctccacctggacctcactgtctgcatctcagagtggctcccctgccggggacccacggcacctggcggggctttctcctggcccatcacttaatactcacaataattctatgatcctggcacttacaagtgaggaaactgaggcactgaaatacaggtaatctggccaggsaaagtggttcacacctgtaatcccagcactttgggaggccgaggcaggtggatcacttgagctcaggagtttgagaccagcttgggcatca

SEQ ID NO: 452805 - DNA, 605 bp, Homo sapiens
ttacaccactgaactctagcctgtgcaacagagtgagatcctgtctcaaaaaaaaagaaaaagaaaaaaagaaggagtgttttgagagccaggggttcacatctgacccaggaatctaactccacaccttcctcttgtctttccttcccatctttcctctttataactggtggtatttgtgtcccacctatgccccctgcagtcactgttcctgtatgtgctgtctgagcatgactgtgggcgcctgtgactcgaactcaggrattcctctcagcctatgtgcagcaggcttgaaacgcagacccaatgccctctaggagctgccctcagccaataatgaatgggagctgacatataaatacccatgcttccttgcccttctggtggggcaacactgaggtgtattccacgtcatctcctagaaatccgtaagccccagttgcccacagcagtaacctgcacatgaacatagcctgtagtggcttccttctctcccctaactcactttcccactcctgtcagcactttctgggcacctgccaaataaaccacttgcacccaaatccttgtctcaaggtcagcttctgggggtgcccggcccaaga

SEQ ID NO: 452806 - DNA, 513 bp, Homo sapiens
ttgtatcttcttaacagaaaggtattttataaaggcaaggtaatttttggatcaatctaattatacaaaccaatttcctctccctgtaaacaacctccattcttaaaattaacatatctttgttcatttttagacgcgttctgcatctattctcmccctccttttctaaaaatgtctataactggtaatgaggcccagaaaaagatttctcttttctagaacctcttagacttttatcatttctcattgagcctccgtttatgcagttcaccctatcctgggatcgggtcctgcttctaaacagaacatactgttcttctgttaagtgaaccaaatctaaggtgctgtggccatgtagaggggccaaatttgtgctgaatggattcatttctctgccaattgcttggaatatcaggtctgtggtattagggagatactgctgttaaacatctttatctgtaaacatctgtatccaaaaacgctacttcatgcactaagtgaacttactacgac

SEQ ID NO: 452807 - DNA, 454 bp, Homo sapiens
acattttcttaggctaggaatgataaggatcattatcataatttagtccacctatttatgtggactaattatgtttatattctctgtaaagttttaattgtgaaaaaggatttgtgaggttggtcttaagctgtagccaatgtggtatgctttgcatgtctgtgtggtcagtagcaaactttgctgcacacctccatcttgttttatgtcctgagggcatatgtcctgagggtgtggcctgtaaccacatggcaaggytttgtttagcaatcctgcctagggaatgagtcctttctggtttgatatctgcacattttcctagccctgtctcttaaagggctccacccagcgactgggttttcttctgcctgtctgtgtagctatatatgtgttatgtatatgatgtctgtaaaaagagctctaattaatttggcctaaaggaagacaagcactt

SEQ ID NO: 452808 - DNA, 530 bp, Homo sapiens
taagcagtttagaattttacractgtgtttgcgctttatgcaacaacagaaaagggggccaataaagacccgtgatggatgggctaatccccactggaaatgtaccatgtaatgctgcagagacaatacattatggatagcattgtgatgattggttgttaatctccctttccatcctcccccaagatcctgtggaagcccttcttcctgccccctccctgcagcccagggccaaagactgcatggcagccacgttgtggggacacgagtctggggtacagatgggaaagttggggcatagcaatctgctgtgtgcatggaatacagagctaaaggggcttgcagagaggcagcttgtcagcaggggacagaactgggggccatatgccgctcttcttctcccttctgtcaccaagtctgccgcctcatccttctgtcaggggacactttaatgatgaacatgttttaaacagttttgtttacctagcaacagcttttctaagagggggtcttaattagtcaccttaaac

SEQ ID NO: 452809 - DNA, 508 bp, Homo sapiens
gtccatttcatctctggcagctctgggatgtgctgcttttagccaagctcttcccagggatgataggtattgatccactagagaactggttgtgtgcagtcagtcacaccccagagagactggcatcaacttgaggcacttatctttctatttcttatggcttttctagttttaattctactctggccaaactgagctgttgtacagagaatgygggtaggaggaagtctggagggcattgttttcatgaagttagagaagagcttaaaaaaaaatctttaagaagcttgtgtgctgccagaggggaactgtgttcaactaccttttactgcttttcacaacctctcttccctcatcacagatctggtgccttgaaagccagcaatgatcaaacataaagaaccttcagactatccaaaggcagaaagggctggaaatctttcagcagggctcactcttagagtctttccccctgcccccttggcagagttgagttgggaatacatta

SEQ ID NO: 452810 - DNA, 640 bp, Homo sapiens
taaaaaatttaatgggaacttcacagagtggatacctatgctgtcagaaatgtttgttatagagatttgcaggagaaaaaacaaagcttcatctgttctagaatctatgtgtttctttaacgtcttagcatgagcaactccattttggtttggcttggtttgttggggcctagtgcatgagcttagcccaaaacaatagactcccataattttgtttaaaaaaatttccccttttttgtcatgctctcacttaggtgagagtgtaatcaaaacttagggccttagcaccactctcagttaccaacattttgagtttccggtctcagcacgtcatttataggtgtcctcatggttgcacatttctttcagctcctgttattccagttgaagagagaccatatgacattctagagatggctgcatgcamgcatttaaaacctttgagagaatacagtgcaccaggaagactattattatgactattgggaggataataccaagagtttgggatatgctccttacccaaggtccccataaactgaacctcctaaaatcaaattgatcaaagaatgagctagataaagtttactcacttaactaagtaatttctttgtctatcccttaccactgaatttctata

SEQ ID NO: 452811 - DNA, 597 bp, Homo sapiens
tgcttttccatttttaccagagccatcagtgaaaagcatttaagggttaggtatgggggagtgaactacctttgtaggcataactacaggagtatgagataagaactggagtagttcatcagcaggaagagcatgttctatatggcccgcataatcagagagtacgatctgaaggtctagagatagggacagaactgcttcgaattgttttttacttaagggtattcttatgacatcagggtcataatcttgcaattgattgaaaattatctgctatggactcaattaatccwttcataaatgggctagtggctctggtttctctaatgctttttcttttttctttataagtgttgaaagtaatggattcatgtacctgattgccttgttgatcttgcatcaccaggcagtccaagagctccccttctaatgcctcttgcttaagacaggatcccataactgtagtgtatcccttgtcttttttccaatttattggggaagggggttcagggaaaatctctgtctcctctgtggcacctttacccggtaatggtggggctgagggagaaggaggaggtggtaaggtatatgatggtt

SEQ ID NO: 452812 - DNA, 611 bp, Homo sapiens
ctaaccagtcctgcagagttagaactactcctttgagaatggcattaattcctcttaacaacctaatcaccttacttttccatgcttttacttcctcctcaataccgccacactggggacgaagcctcagcatgagttctggtcagaagaaaccacagcattctgctcctcactccccaaactcatgtycttcttacaatgcaaaatcatcccatccccaaaatcgccaaaatcgtaactcgtcctgcaccaacttaaaagtccaaagcccagagtctcatctaggaaactatgaaatcaaaacaagttatctattttccagatacaatggtgggacaggcatagggtatacattcctattccaaaagggagaaacaggcaagaagaagggagtaacaggcccaaagcaagttcaaaacccagcaggttagacattaaattttaaagttggagaataatttccctaaactccatgcacactagggttggaggtggagccctgaaggcatcaggcagccctgcccctatggctttgttggtgcagcccatgtggctgctttcatgggttggaatctggtgcctgtaactttcccgggcaggcattaccccct

SEQ ID NO: 452813 - DNA, 462 bp, Homo sapiens
tagtaccagattcccttctagccatattaatctctttagcaaacagtttctgggtattgctgtgatgtattctatattttattattactttattatgtatcttaacttctctaccagaatgtaaactaagctccacaagaaaagaaacagtgttttcatcctttacagtaccaagtacatcttcacttagcagatcacaataagtcatgctgaattaaactgctgtttctttagtgtcaacatctatgtatgtgagatgagcagactgtagtgcaccaatttttcattttaatggtgtttaagaacctktaaaggttgtagcctgattgattcagatgcagaaacacaccagttgtaaaaaggactaaaataaagggacgattatccttatttttcaacacagggacaaagtcttagttttgttttaagctttttatctaagtttaattcatatgatgcctc

SEQ ID NO: 452814 - DNA, 635 bp, Homo sapiens
agtataaatacagcaccttcaatggaaacatccaagtacacacattggaaacgcatcaaggaaataagctgacccatggagaatggagaaaagcaaggcaggatggctgcccacccaggagtgacatggagccaggagcacctcctcggcccagggaagtggtgagtgagtgagcaacccctgagacccacacttctcccatgaatctttgcaactctcaggtcaggagatcctctcatggatccaccccatcagggccttcagtctgacacgctgagctacatggagtcgtggcagagcagccactcagacacacacacacacagccccagcagccttagatacccaggcttcctagcaaaagcagctgcaactctggcaaagcaggaggttagacccctatacatgtccctaggaaatgggctgaatcctgggggccgagcagtgacagtctgcaggccttgtttccatggcatcttgcagggtaagacccactggcttgggaaacaagccagccactggtggcagcattacacctccctgagatggagctcccaaggggagagasaggccaccatctctgttatttcacagccttagccattgttgcctttgggctctagggagtccgagtt

SEQ ID NO: 452815 - DNA, 512 bp, Homo sapiens
ccagaatctctgtccccagatacaatttgatgacacatatgaatcaatcctaacacattaaattcctaatgtccaaatgttgagagcaacctctgctgctgccgtaccaaatacttatcgggcagggctggaatgtaagaaatggagccccacatacgataagcaattcatgccacagtgcaaggagctctactgtgagagctgaagccccaggctctcatgtgggctctttcaaagcagcatctccaatttgttcctcagcttattttctctcgtgcctaatragagattaagatgaaatgatctcaaagggcctttctagttctatgcatggagaaaatgttttgagggtggaagagaaaaagttagaaaataaagaaggaaatcataagatgctagagatggaaagaaacactgagatcagagagtacaaccttgccatttaagtacgaagaaagtgaaagtcaatgggaaaagaggacaccctaaattatggaaccagtaattgaacc

SEQ ID NO: 452816 - DNA, 577 bp, Homo sapiens
taggtctgataaacaccataaagattttgtatgtgtttcataatctgaggcctaatcaaatgttacaaaactttattagtagggtatccagccatttcagttttagcattgaaatccccgtgttattggaatgccataggacaataggataccctactcaggttaattcttcatgtttttctttaaggattgacgactagggaactcaaatcaagccttgttttcagttttagccactttccttatctgcgccttctgttgttaacaccccttgaatcttacactgcacttgttcttttaccctggttctgtggaggcaggttagcatagtggtcaayatcacctgtggaatcagattaccgggtttaacatttgcttgcaccactgactagctgtataaccaactgtgaatacatactctaacttccttatgttttatttttctatctgtaagatccggaccataaaagtaatgcctatctcaaaaggctgtggaggatagaaggatgaaacagtattacatgttaatgcttatacatacatagtctatgctcaataaatgttagctgttatcatt

SEQ ID NO: 452817 - DNA, 577 bp, Homo sapiens
taggtctgataaacaccataaagattttgtatgtgtttcataatctgaggcctaatcaaatgttacaaaactttattagtagggtatccagccatttcagttttagcattgaaatccccgtgttattggaatgccataggacaataggataccctactcaggttaattcttcatgtttttctttaaggattgacgactagggaactcaaatcaagccttgttttcagttttagccactttccttatctgcgccttctgttgttaacaccccttgaatcttacactgcacttgttcttttaccctggttctgtggaggcaggttagcatagtggtcaatatcacctgtggaatcagattaccgggtttaacatttgcttgcaccactgactagctgtataaccaactgtgaatacatactctaacttccttatgttttatttttctatctgtaagatcyggaccataaaagtaatgcctatctcaaaaggctgtggaggatagaaggatgaaacagtattacatgttaatgcttatacatacatagtctatgctcaataaatgttagctgttatcatt

SEQ ID NO: 452818 - DNA, 520 bp, Homo sapiens
ttctgtttacgataaccatcaatttcctgttgccttcacattctctcctttgtattttcttctcaaatggatttggttttgtcactatatacctagattcttagcaataaattacaaaccaacctttcctcaagaatccccccacctcccatcctgtagggagcaaccccacttttcctaaaattcrgctttccctgtggccctctgttcctcttactgggtagagggagaaagatgttttccatgccctccaggttcaagccccatagtctgactccctgaggttcagaccctaatcccgctggcctttcaaatcttcttctgctcaccttcatagtgactctgcttctgccatgcttgtttactcacaagtccctgaacatgctaagtgctttcacaccactcttaatagttctctagatggccttcttcctgagtttccaagtcttgtgcttattttaattccaagtgaggtcccagcttccggccactctcatgcgtcttttttctgagctcctaa

SEQ ID NO: 452819 - DNA, 607 bp, Homo sapiens
cttactatttcagctcaaagctgagaagaaacacttttcccatttttactgtcccctctactcagctgttccttggactttgatatttaaatgtttctctgaaggaggtgggaggtggagaaagaggttgaagtgattcagaaattgcctagtgttccccataatgtcagaaaatttattgcctagtatgaagtcaagatgaggaaccaattatgtaccatgtgatgattggctactttaaagtgggtagattcatagaacagggaactatttacaacaagaggtttacatctgtgctactttcagtctaatycaaaataatgacaatgatgtctgtctgataagctgagatgacctcccaaaggattttgatgcagtagctgggtctgtagcttagctgagttacagaaaaggagaaatggggctgtgtctgtatgttagtattagaatgaaagctagaaaacaaacactagaataggtagatattacatttattcatatatttagagatgtagtggctgatttattaaattttcattcaaatgttggtgcattaagtataaatgcaaacagtcctattctagtgagcatttaactattggtatag

SEQ ID NO: 452820 - DNA, 581 bp, Homo sapiens
gcattcatatggttggctatgcctttctttaataagacatctctctaaaaatgagcatttaaattgataacaatttttcctctggtagctagcactgaaatgtgcatttttgtttgtgtatgtcgttttgtttctattgatttatttcttagggaaaaatactatacttaatttgctaagtcaaaggatatgaaattctttatggtttttgctacatgttggcatgttgcttttcaagggcactgtagctgtgtgtttcactagcagtgaatgaatgtataggtactagttttatcatggtcttggcagcattggatgttggagcatttatattttgtgctgttttagtaggtacttaatcatgttatttaaaatggcaagatattttaaatattatttagcataatctcatttttacagatgacacagagatgtagagaagttaagtgattttttcagtttcatagtggcagagttggttctaaatccagatcttttcgcttatgtyttttttctctacaataatctctttattttagcaactttcatccatgaactattagcagttaaaattattgttg

SEQ ID NO: 452821 - DNA, 505 bp, Homo sapiens
gtttttttttaaggtcatggcccactcagacctagagaacagaatctttcaggataaagcctggaaactgatttacttttttttttttcttttgagacagagtctccctctgttgtcccaaactagagcacagtagagtgcagtggcgtgatcttgggtcagcgcaactctgccccccgattcaagctattcttccacctcagcctccygagtagctgcgatcacaggtgtacaccaccacatttggctaatttttgtatttttagtagagacgagttttcaccatattgaccaggctggtcttgaactcctgaccttgggtgatcagcccgcctccaccttccaaagtgctgggattataggcgtgagccactgcacccagccatgatttactttttaacttgtacataatttggaagatcaaacgggtttgggaactactggcctaaagtgactatctcaggctttataatcgttaaagggtttgtacaatcccggttctggg

SEQ ID NO: 452822 - DNA, 505 bp, Homo sapiens
gtttttttttaaggtcatggcccactcagacctagagaacagaatctttcaggataaagcctggaaactgatttacttttttttttttcttttgagacagagtctccctctgttgtcccaaactagagcacagtagagtgcagtggcgtgatcttgggtcagcgcaactctgccccccgattcaagctattcttccacctcagcctcccgagtagctgcgatcacaggygtacaccaccacatttggctaatttttgtatttttagtagagacgagttttcaccatattgaccaggctggtcttgaactcctgaccttgggtgatcagcccgcctccaccttccaaagtgctgggattataggcgtgagccactgcacccagccatgatttactttttaacttgtacataatttggaagatcaaacgggtttgggaactactggcctaaagtgactatctcaggctttataatcgttaaagggtttgtacaatcccggttctggg

SEQ ID NO: 452823 - DNA, 585 bp, Homo sapiens
ctttataatcgttaaagggtttgtacaatcccggttctggggcagtgatttttccaagggccctgaggggctagaaatgtggtgttgtggggtaaaactttatccctccctccttccccccacaacaagagcagacctaatttcagtttttttgtttgtttgttttgtaaattcaaacttcttcataaacttttctttgaacaaagttttcccttgaccccacttgccccagcatgcaacgagaaatgatctgtttctgggccaagacacattaggtgccatggcttcctaatgtcattatctgggccatcttggcagagccgagggaaaaatcccatcaaggccactgaatgtctgaggtcacatgaacaagatatggaaagtcaatggtggccaagtagaatgaccctggaaggggaccctggaaccaaggtgcatggccctagtcatgaggacatcttccctctcaggacttctrgaagcccaatgacaatagagttctcataggacaccgttactactgcctatttggtgtctcctcagtgaagtcattgtgttgtggcgcatctcaactccccagagtcc

SEQ ID NO: 452824 - DNA, 585 bp, Homo sapiens
ctttataatcgttaaagggtttgtacaatcccggttctggggcagtgatttttccaagggccctgaggggctagaaatgtggtgttgtggggtaaaactttatccctccctccttccccccacaacaagagcagacctaatttcagtttttttgtttgtttgttttgtaaattcaaacttcttcataaacttttctttgaacaaagttttcccttgaccccacttgccccagcatgcaacgagaaatgatctgtttctgggccaagacacattaggtgccatggcttcctaatgtcattatctgggccatcttggcagagccgagggaaaaatcccatcaaggccactgaatgtctgaggtcacatgaacaagatatggaaagtcaatggtggccaagtagaatgaccctggaaggggaccctggaaccaaggtgcatggccctagtcatgaggacatcttccctctcaggacttctagaagcccaatgacaatagagttctcataggacaccgttactactgcctatttggtgtctcctcagtgaagtcattgtgttgtggcrcatctcaactccccagagtcc

SEQ ID NO: 452825 - DNA, 621 bp, Homo sapiens
cagctgtgtgatgtcccaaatcatgccatcactcccagcttgggaagggatccccaagcccaagtcagtgaaaacagagacattgcctrattttaagggcccagtacctgatggatactaacagaggacccatcagcagtggccagtgtggaccacagtccagagggctcccaccaaatggcctggatctcccccaggccctgggctgggagccaaggtcgagtgaacccccattacaagtgcgatctaattctttcccactccaagagacaagactcagatttagatttacttctactctaaaaacaaacaaacaaatatattgatgtgaaatttcttgcatctgcatatcatagaataacattcacacctgctacacatgtttaaatgtttaaaaactcgagttgctggtgcagagttattgctcacgccttgggctttcatcaagagatgcagctgtggaactgttgggggtaggagggggctggttttattcagaatccttagctccaagatgtgcttactgatgctatggcagaaccaaggctaaacaacatggaggctccttggagatcacttggaatggaccaacaaccacatcctacagctctccccagaggc

SEQ ID NO: 452826 - DNA, 596 bp, Homo sapiens
tgcctctagccatcctgcatagaccaatttttaacctctaagattctctccataaatatacctccacagataatggaagaaagaagcttgcaggatgtgccacctagaaagggtgcccagctatatcctgagaaaatcatcaaacgtttctcacaatagggctccttggaaaaagactcaattartggttcattatcagattactagagaatcatttaatattagccagcaagccagaaatttaatcttaacttctcccttgccctcagcccattagttctaaacctttcaattctgtcttctccgcttgtcttgggtctttctttcctgttcacctcacgtgatgatgcttcaaagtaagatcctcaacatcttgttcctggacaattataacattcctggtctcacttccttcccattcccttcatcttagtccacattgctgctagagttctttccaaaagataaatatagccaaataattgtcctgcttaaaacctttccatggttcaccaaaaccacaggataccatccaaactctctcacccggcacatgaggcccttatgaccttctcatcttaccacacatgtcctgc

SEQ ID NO: 452827 - DNA, 543 bp, Homo sapiens
ttattacttgcagccaaaagtgttttaactaatatgcccctcttgctttgctgctccaagatttcaagcacaacaaaacaaaaaactgcataacttgacagattagagaatgttgctgatacaaactgaagttttcccttaatactgaaagcaataatagccttgaatgtaagttatggtgagcatggttctagaaaggttattctttgatatctaasatggatagatatgaaatctagaattgggttgttttgtttaagaagacttggatttattttcatcttttttctctcccactacagaagtgactgatataaatttatctatcttccttccttcttacattcttcaaatatttgttaaatcatatcgaataaatgtttaatgaaataagccccagaagatgacattcagccgaatatccttctcaaaaaaattttattgggataaaatttatgtatgataagctgtatctattcaaattgtacaactttataaaatgttgcagatatatacatactataatgaagacacaaggccata

SEQ ID NO: 452828 - DNA, 565 bp, Homo sapiens
cctgtgataacaggtctgactatatatttgtttgattcttttaaatcccaacaagttagcttttttttctagcacattaccaagggaaagtgagcctgaaggctgtgccytgtgaatttgattttcctgggcacctgggagccatagcaagttcttcttctgtcctgtcatctctgttgtttttcctcctgctatagaatgagctttactgactgtgagtgctatgccccagacatttttggtttccttatatattttaaaaatctataatatgggagaatagaggggagagggcatagggattggcagtcttaaaatatgtcagctttatggaactaggttttcttttatacaggaaaatgacaagccatgtttgcttttggaggctctctttcacaaagaactactgctgaatgctggggtttttctcttggttttagcaggagtaaataggagatagtaatcaattagccttgctgaccagatctctgattttaaaaaaaagggtgtggagaaaggatatttggtgttaaccacgacctgatgattgtgatcgaccctgttt

SEQ ID NO: 452829 - DNA, 458 bp, Homo sapiens
ggttttagcaggagtaaataggagatagtaatcaattagccttgctgaccagatctctgattttaaaaaaaagggtgtggagaaaggatatttggtgttaaccacgacctgatgattgtgatcgaccctgttttccatattccctgttcatggggaatgaagagtatgaggcaagagttgtcttctgaaagttggcaggctgtattagtctgttctcatgctgttactaaagatatacctgagactgggtaatttataaaggagagaggtttaattgactcatagttcagcaaggctgggtaggccttaggaaacttataatcatggcggaaggggaagcctacacgtctttcttcacatggcggcagcaagcagaagtgctgagcaaaaggaggtaaagccccttataaaaccatcaaatctygtgagaacttactatcatgagaccagcatgagga

SEQ ID NO: 452830 - DNA, 502 bp, Homo sapiens
ccttcaccatctcattcttccaagaatctggaagaaaggcatcaggcatctttttaacagttcagccacagatttgcttcacttctcctattgttgtttttttctcattcttttttgggagtgcagaagaagaaggttttttgttgtcaggcaggtgggtcagcctcatacatacttcrtaccatgggagagcttgtggattgcttgcatacctaaaattgattctctgccaccagtggtgcccaattttgtctttgtgactcactctcagctctgtaacatctttctcaaaggctgagtatggttagaaagggaacaaaattctaatctgtcaaatactagcccctgtggtaactaatggcatgtctggctgggtagaggtaaggtagagttttgaaatcatctttgtatttttgattactgaatctgtagccagctttttaacacaagcaatttggggtaaacttactcgtgggactaggctcttcttttgctgttttga

SEQ ID NO: 452831 - DNA, 578 bp, Homo sapiens
agcacccttcaggggctctcaggattaagtggtgaggtgtgcttctaggggaaaataggatcattgagggaagagaaaaaacaagtgactcagacactagggtttaaaaagaaaaattggccaggtgcagtgacttgtgcatgtaatcccaacactttgggaggttgaggttggaggatcacttgagctcaggagtttgagaccagacagggcaacatagtgaggccccatctctacaaaattaaaaaattagccaggcrtggtatgtgcttgtagtcccagctacttgggaggttgaggcaggaggattgctgagtctgggaggtcgatgttgcaatgagccgtgagcacacccctgcactcagcctgggtgacagagggaaaccctgtctctcacacacacagatttatgtcttaatgtgttataaggcatgagtcagctcctgctgttcctgcaccacagaggcaacttcctccacaacacatatcaggaggcaagtataggttgcatgtggctttttccctctgaagaaccatgcagtggagagagacagcagccctgggcatatgcaccaaga

SEQ ID NO: 452832 - DNA, 546 bp, Homo sapiens
gttgcttatgatctggatacgtagaaaccatttaagaaaggaaccccatattccgctgcatttggtcaaaaggcatggaagagtggatagacgtctgttaaatgaagacatatgggcattttgaaggtcacttayatggagtatcattttcagtgtatgagtaatgttggcagtgtgtttccacccaggaaaaataaaagtaatcttggatggtgactataaattaaatgtggactgttccatgagggctgctccaacaccaagtgagtgtcaaactttgaagtttctgggtttagcagaatgcatatgcattctgcaaagagctgcaaaggtgagctacaaatctgcattaattcaggagaggatatgggaagactgtttgcttaaatataaaaaatcagctaggttaaagtgtaaatacagttactataactaataatgtccaagtataaaatttgtagcaagaaaagaaataaacaggcaatgagaagtacctggtatagaagggcatactagaagaagtggttaagacctagcttaaataat

SEQ ID NO: 452833 - DNA, 630 bp, Homo sapiens
tttgcttaaatataaaaaatcagctaggttaaagtgtaaatacagttactataactaataatgtccaagtataaaatttgtagmaagaaaagaaataaacaggcaatgagaagtacctggtatagaagggcatactagaagaagtggttaagacctagcttaaataatagtcttcctaggatgaaatttcctaagacagcatctgaaggtgccagtgatatttaatgattaatttagatattttcaggcccaatgtcttggtgtggtgggtttacaggatggatcacattaaataaaaaatggtgctaaaatttcatgtaaatcaacattgaagactaagtgaaaccaatgctatatttgtaaaggaaagaaaaagaagagcagagtcaacatattgatttttcattctttcctaaacttggtaatgaacttcttttatacattatgtacaaaatgattgcatatagaactacgtgcctctgatggctgcctggtttaataaactgtgattattgtttttctctctacatttcaagctaccatatgtactgaatttctgggatatatcaatctcaaagctaaacctaataggatatactgactttccatgccacacaaggcttcatgagc

SEQ ID NO: 452834 - DNA, 586 bp, Homo sapiens
agagcctagggaagagtccttccttgcctcttgaagtttctggtggttgtcagcaatccttggcattctgtgacttgtggcagcctgggtcctttctctgctactctctttaaatggccttcttccctgtgaccctgtgtgtcttcccctctcttataagggcacaagtcatactagatttagagcccacactaattctgcatgacytcatcttaatataattaattatatctgcaaagacgctatttctaaagtaagtcatattctgaggttctgtatggacatgaattttgtaggggacagaattcaatccagtacaagtgttgtaagggaaaatctagaacagaaaatgaacaaaaatctttgaacagtgggatcaagcaaagaatgtgggcgcttataaaaggagcggctttgttccaaataatgtgttcaggagtgtaattatgatatcagttagaccctaaatttgttgacattatgtacagaaatatctataagactcaaaggcatgtgtttactgttttctcatttatctcatttattttctcatggagcataccatgttgttattcaaaagagaaag

SEQ ID NO: 452835 - DNA, 618 bp, Homo sapiens
acataaatgacttttgattctggtggaagttataagacaacagtataaaaaataactatactaaaatatgctaatggatacacaatataaaaaataatatgtgatatcaatatcacaaggttgagaggaaggagtgaagtgcagagtttttgtatgtgattaaacttaatttgtttcagctttaactagactgttataactataagatgttttatgtaagccctatggtaaccacacagaaaatacctataaaaaggcagaaaataaaatgaaaaaggaatgaaaaatttatcacaaaaatatcaacaaaacgcaaaatattgcaagagagaaaaaaaggacaaaagagctatcagacacatacaaaataataacatgtggtagtatggctttctttatcattaattacttcacatgtaaatggatcaaattccccaatcagaaaacataaggtagtttaatgaataaaaatcaaacaaacaagatgcaactatatgctgtctacaaaagactcactttatatttaaagacacaaataggctgaaagtaaaaggatttttaaaagatttttaraaaggacatttcctgcaaatagtaaccaaaagagagcacagctgg

SEQ ID NO: 452836 - DNA, 582 bp, Homo sapiens
tgagaccacagacatcattacagactattacaatcaactatagtccaacaaatgcataaattcctggacacataaaacttaccaagawtgaatcatgaagaaacagaaaacctcaataaaccaataatgaataatgagattaaagctttaataaaaagttgctcatcagagaaaagccctggtggctttactgttgaattctcccaaacacttaaagaactaataccaattctactcacagtcttcaaaaacattaaagagaaggaacactttcaaactcaatttatgaggccagcattactcagataaagacatcacaagaaaataaaactacaggccaatactctgataaatgtatatgcaaaaatcctcaacaaaacaccagcaaacagaattaaacagcacattaaaggcatcatatgccatgaccaactgggatttattccaaggatgcaaggatgattcaacttacacagatcaataaatgtgacacatcatagcaacagaatgaaggacaaaaaccatgaaatcatctcaatagactcagaaaaagcactgataaaattccacattcctttatga

SEQ ID NO: 452837 - DNA, 546 bp, Homo sapiens
atcacattttctgctatcaggtctaccgcatagcctcctcactggtgttccacagccatccattctgtgtagtttaaatcaagcacaaagactctctctgctacagacactattcaacyttaagccccaggttcccgctggaggtatccacaaactgagactcagaccacacaacacacatttacgctgccgatgtcagcacagcatgtattcagaacctggagaatttcgcagattgggattttagatgttggggtgactttctgagttggtgaaagatttacccaacagctgtagttagccaaggaccagaaactgttttcggccagatgcatagggtgaagcaagtaactacccagcctgccatctactctctctctccaactttttattgtaaaaattttcatagatgcaaaaaaattgaaagattagtacaatgaacacttagatattgtcctccaaaattccacagttcttaacatgtttccatatgtatcttatctgtaccttatatgtatcattgcttttaaatcgtttggaaataag

SEQ ID NO: 452838 - DNA, 579 bp, Homo sapiens
ttacctaactctgcagcacttaagacagttggattgtatacttatttgcatggttatttgctttatccctcttttaacaacttgattgcaagcaacatgagggcaagaacagagtctgtcatttgttcatcaggaacagtgcctggcatttagtaggatcctcaataaatatcmgttgaacaaattaaatgaacccaatgaataatgttactaattattttcacttatgtttaggacaatttaaagatagaatgaaagtgtatataaagatgtataaactagcaatcaaagtcttgagcacttattgttgagtccttctgtaattagccaaaaaggagaagcaaagccctaggtatacacaggtgcattgctgaaccactactgcagttcttccagttttttgtttttcagatgtttaattttcttttagtgatccagatcaataaactatcttgaaaaaaggaaatgcaaaaaggcctcttccaggtcatcagccatagctaaatataattatcctttcttttgtggaataagaattctctcacctaacaaacacattgtaccatagcaaaagctata

SEQ ID NO: 452839 - DNA, 581 bp, Homo sapiens
caataaatatccgttgaacaaattaaatgaacccaatgaataatgttactaattattttcacttatgtttaggacaatttaaagatagaatgaaagtgtatataaagatgtataaactagcaatcaaagtcttgagcacttattgttgagtccttctgtaattagccaaaaaggagaagcaaagccctaggtatacacaggtgcattgctgaaccactactgcagttcttccagttttttgtttttcagatgtttaattttcttttagtgatccagatcaataaactatcttgaaaaaaggaaatgcaaaaaggcctcttccaggtcatcagccatagctaaatataattatcctttcttttgtggaataagaattctctcacctaacaaacacattgtaccatagcaaaagctatatcaaatggtcaattagcactttgatgacttctcattcctaaaactagctaaagagtattatttattagctagagctataygtagctatttgtagctatatgtagctggcttgatttttaaatttcagcagtaaaagcaaattttcaaccaaagacaactggatc

SEQ ID NO: 452840 - DNA, 651 bp, Homo sapiens
tcaagctctggtcaaggctggctctggaaccaggctgctctggccagaagggtgaaaggcatcactgcctccatatgtgaggaacaggaaagaagggcagaggtgacacacatcttcccaaatctgaacttgaaagatgtatggaagtccccacaagcttctcctacaagaaggtcagtgaggcataagaagcaaagaggcagaccaccaaacaggaacaaacaggaacctgtagatacagcatacagcagaacgaaccccaagacgggtagctaatgacagaggaggatgtggcaaggagtggctggcaaactacagcctgtttcatgctcctatttgtgcagctgagccaacagaaagctaacagctacacctttcatttgcatctcgtggatggctgctttttcattgcaacagtagagctgggtaactgcagccatggctctatggtccaaaacatwtactaccttgccccttacaaaaaacatctgctgacccctgccttagagaaatatcagtctttccagatgcagatttatacatgaaagtgcatgcaaacagtgaaaatttagaaccataaggtttgaaaggacagataataaaaatgtcataaagtcaatcttgatgacttgacagctaacccatcctgat

SEQ ID NO: 452841 - DNA, 557 bp, Homo sapiens
tcctgtacagctcccattgttacctgattaaacatgcatgcagcactgatcacactcttcccatctgatgtggatctgtggctgccacaatggacacttcatctgatgggctagcctggcatcctataaatgtgccagctggctttagaagattacaccacctytatcaaaatagtttttgaggctgggcacagtggctcaagtaaaagcgggcggatcacaaggtcaggagattgagaccatcctggctaacacggtgaaaccccgtctttactaaaaatacacaaaattagccaggcgtggtggtgggcgactgtagtcccagctactcaggaagctgagacaggaaaatggtgtgaacccaggaggtggagcttgcagtgaaccgagattgtgccactgcactccagtctgggggacagggcgagactctgtctcaaaaaaaaaaaaaaaaaaaaaaaatagcttctgaaatctactccataaattttcaagaaaaactaacaaaacttgaaagaaaagactggatttattaatctgattttttgaaataccaa

SEQ ID NO: 452842 - DNA, 557 bp, Homo sapiens
tcctgtacagctcccattgttacctgattaaacatgcatgcagcactgatcacactcttcccatctgatgtggatctgtggctgccacaatggacacttcatctgatgggctagcctggcatcctataaatgtgccagctggctttagaagattacaccacctctatcaaaatagtttttgaggctgggcacagtggctcaagtaaaagcgggcggatcacaaggtcaggagattgagaccatcctggctaacacggtgaaaccccrtctttactaaaaatacacaaaattagccaggcgtggtggtgggcgactgtagtcccagctactcaggaagctgagacaggaaaatggtgtgaacccaggaggtggagcttgcagtgaaccgagattgtgccactgcactccagtctgggggacagggcgagactctgtctcaaaaaaaaaaaaaaaaaaaaaaaatagcttctgaaatctactccataaattttcaagaaaaactaacaaaacttgaaagaaaagactggatttattaatctgattttttgaaataccaa

SEQ ID NO: 452843 - DNA, 615 bp, Homo sapiens
taaagagatgcactatataataattcatgtgctttccctcatttaagaattttaactatattttctactatgaagctacaaaatgactgtttggacagcagtggagaatatatatgcattatatatgaattggtgtccaattttcaagttgtctttgaaaagctgaagggctgattttccaaagaagaagaaatcaataatactcaaacttcttcacatggagatggaaattctaaaaatttaatggagagtgagttttaatcccaaaaagttcattcttattgtgtgagaaataagagtgaccacccagatatccagatattacatcatgccacttcttatggacctatattaagaascttgtgtttgtactacttcttccttgaggcgtatcttgtaatctgagagcaggactcttcagcatttataacaatacagaaatagctattatagtttctttattatttttgaccacagtagtatatcaaacctgttactggaaaatgaggttttagaagcattctatcctgatacattcctattccttctctcattctctcacacatatgtacacacacccaaaatccttgcttcccctagaacctcattatcaac

SEQ ID NO: 452844 - DNA, 600 bp, Homo sapiens
gaaaagacttttgctggaatcttccaactcaaatacaagccagcacaccaaaattccaaaacacacagaaatacattctaatcccaagaaatacagtgaacaagatcgaccaatttaaacatgaatttttctccacatgaaattatttttatggaagtttgtttaggattttcaaataggtagtaagggggaaagttccttgtcttcctccctcaaaagtaaaacttctgcaaacaacaactggcagaaatgtaaaaagaacatgagatawaagcattataaatttaaaacatgagaaaggaaatttaaagctgctgaaatgagcagacagcacagaacaactgagaggctccatcatctatctaataaaaattgcagaaaaggggactgcacataaagacaaggcaaccctatttggagatataaaagttgagaattttaataaagttagaattcttgacatcaagaatttatttgtcctacataggattcaggacaaataaagctgaatcaatacctagatacaacataatagactataaacaaagttaagtaagtagcaaaagctactagggagacaaaacagattactaacaaagg

SEQ ID NO: 452845 - DNA, 544 bp, Homo sapiens
gttaagtaagtagcaaaagctactagggagacaaaacagattactaacaaaggaccaaccgacagactgacagcagattcttattagcaacaacgtgtcattcattcaaaaatatttttgtttattgtgtcctaggcggaagacaataggataacatctttgaastgccgagaagaaaacaatttgtaatctagactgttatgtccagctaaagtattattcaaaactaaaattaaaagaaagccacccacccttagaccattgttgaatcaattacttgaggatacacctcagtatgtagaaaaatgagttcaggatactaggaggccataaaagagagtgaaatcatgtctcctgcagcaacacagatggagctggaggtcattatcctaagtgaaataaccccgaaaatcaaatacggcatgtttttacttttacgtgggacctaaacaatgggtacacatgaacataaagatgaaattaatagacatgggaaatccaaaaagaggggagggttaaaggagggtaaagattgaaaaattgc

SEQ ID NO: 452846 - DNA, 609 bp, Homo sapiens
aagacagaatagatacgaagatgaagacacaggcaccaagcgaactaggatctgaaattaggacaagcaaagaraaagtctttggtttttgtttacctccaccggcaaatcacagttttaacagttcattcactgccagaaaaatgtttacatcaaattctgaacaatctccaagccttttcagatttaaaattccgattctacacttgtggtaattcctctcataattttcccctaagttctatcatcagcgaagtcaataaaaaagaagagtcacacccatagaagggtccaacccctaccacaaggcagagacttaaattgctcacaaattgccatgcttcagcaaaaataaaaagtcccaactaaataactacatgctaagaaataaagcactaggacatcatttccatgaattgtaggtcaataaacaattacaggtgacttctacaaatatgtattatttatcttcaaaactacatttaaaaagcaagtttcattatgagataaaggctgcacttgtataagagggtggatggatgggtgggtagatggatcaacggaaggaggatggatggatggatgagggaatgggtggatgggtgggtg

SEQ ID NO: 452847 - DNA, 609 bp, Homo sapiens
aagacagaatagatacgaagatgaagacacaggcaccaagcgaactaggatctgaaattaggacaagcaaagaaaaagtctttggtttttgtttacctccaccggcaaatcacagttttaacagttcattcactgccagaaaaatgtttacatcaaattctgaacaatctccaagccttttcagatttaaaattccgattctacacttgtggtaattcctctcataattttcccctaagttctatcmtcagcgaagtcaataaaaaagaagagtcacacccatagaagggtccaacccctaccacaaggcagagacttaaattgctcacaaattgccatgcttcagcaaaaataaaaagtcccaactaaataactacatgctaagaaataaagcactaggacatcatttccatgaattgtaggtcaataaacaattacaggtgacttctacaaatatgtattatttatcttcaaaactacatttaaaaagcaagtttcattatgagataaaggctgcacttgtataagagggtggatggatgggtgggtagatggatcaacggaaggaggatggatggatggatgagggaatgggtggatgggtgggtg

SEQ ID NO: 452848 - DNA, 609 bp, Homo sapiens
aagacagaatagatacgaagatgaagacacaggcaccaagcgaactaggatctgaaattaggacaagcaaagaaaaagtctttggtttttgtttacctccaccggcaaatcacagttttaacagttcattcactgccagaaaaatgtttacatcaaattctgaacaatctccaagccttttcagatttaaaattccgattctacacttgtggtaattcctctcataattttcccctaagttctatcatcagygaagtcaataaaaaagaagagtcacacccatagaagggtccaacccctaccacaaggcagagacttaaattgctcacaaattgccatgcttcagcaaaaataaaaagtcccaactaaataactacatgctaagaaataaagcactaggacatcatttccatgaattgtaggtcaataaacaattacaggtgacttctacaaatatgtattatttatcttcaaaactacatttaaaaagcaagtttcattatgagataaaggctgcacttgtataagagggtggatggatgggtgggtagatggatcaacggaaggaggatggatggatggatgagggaatgggtggatgggtgggtg

SEQ ID NO: 452849 - DNA, 563 bp, Homo sapiens
acatacggtgctacttatatttttctcatctatatttttttcctagcatttcatttaatctgtatcagaagtcataagtaatttgcaacagatgaatgatttaaccrtagttatattttcatcactttaaccacatatgtacctccattgatagctttactcagatactaacataaaacatacaagctttctacaacttaaaataagattttttaaatatagaaatagctttcaagataacagcttcatattagagttcagccatttttaattacatagaagttattttgaaaagacagaccatttctaaccaaagtcaatgcacagcctctctcagaaaaaaaataagacatcagaaagatcctcatggaaagggagaaataattcatatacatttgctaacatgatttctctatagtcagcttaaatacaataatgaaatgaatgaaactgacagaaaacaaagtcctactctaacaactgtgtaaggaaaataagccagggaattactgcaggtatttattaatgaaagaatgaaaacagagttataaaatatattttac

SEQ ID NO: 452850 - DNA, 504 bp, Homo sapiens
ctcttatgagagttacaggatcatcaaaagaaacattctaaaaaatggaaactaaacaagaataatataagtccttctagaaatctaatacaaaggaaagttcaaaacataacacacgaagttgtttcctaggaaattaacggtaggcatgttgttaaattatcctaatactttagtattcagaaatccatttttggatttttgatttggctaaacacaaggcatctaaatcatataactctgctacagtctgcaatgctacaaatttcttttcagcgtttttcacaatttagttttccccaagactcctccaaatatcttttagtcactgaagtcttgaaatcaatggaaatactgttaaccaaatcttagtgccatattcaagttcgtaagtcctcaaaaaactatyaccaaatatttgacgatcatttctcatgtcagttatatgatacatttttctttacaatggcaattaataattcactcaccaaagctagaagaaaa

SEQ ID NO: 452851 - DNA, 582 bp, Homo sapiens
gaagtattaaagtttgctttccttcttttaaattctagatctaaataaatttaattttggtcagatttggggctaaaatttgatatagtcattcagttttttttccccaagggataattacataatctttcttgacgtggacttagaatgtacagtttcacaggcttgaaagactagtagtcagacgaagtcgtattctgatgaacaaaccttcttaagcatgttctgcaatgtccagatagaattaataccaatccaaattcatttttctcagaaagtttattatctttaaaaatcttatcattagcaaccttgggatctcaaaattatagtcttagaacattctacaagtcttttatttgtgcagttccttaattactactatttctacaaaataactgctaatatttattgagtgcctcctgtgtcacttcatactaagtcctcctcrtaatttatttccttctgtcttcctatcactttcatctggcaggtatgctcattttcctgttctcgggcaataatttgccccaggtggcttacctggtgagtagcagaatgaggatttcatgtcctgttgcc

SEQ ID NO: 452852 - DNA, 294 bp, Homo sapiens
taacttgtctccttatggtatattctctgcacaacacccaaagtaagccattaaagattaaagtcagagcctgttgttcctctgctcaaacctggcttccaatctcactcaaagtcacaatctttacagtggcctttgaggctctacacaaacaggcccttagttgcacctttgacattgtctgttatctgtctcctcctcagttaattcaccctagccaaaatagcaggatgtgrtctttgaatgtgccagacgtatgcacctgcctcagggcttttgcacttactttcctct

SEQ ID NO: 452853 - DNA, 642 bp, Homo sapiens
taatttttacacttgatttacgtaagggtggagagtattgctaaaatattttagtgatctacttatcttgagtagttttaacttctattaaaatgagatgtgcgagttcatttctgccattcacagtgctactcaagaggctactgttttcgtcagtgaaaacccatttctgacattaaatattctaattttcaaaaagttgtttgttgatggaaattcagataaccagaagacttttagtactcatgtgagggaaggtgggctttatgatgagaatgctacctttctgttgtcacatttttgaatagaatgctcatagcacctacagtgtagcttattctaagtaaaccatgcataattactggatgtgctrtagtatttttagaaaattgcagacataataactgcattaatgtttgtggtattaagaacaaggttatatatgctctagaaatccttatttacagcttctgtgacaaaatgtcactgaaattcttgagtaagtcttatataactatgaattccagagaggtggaagttgttatctttaactaccaggagtgaacatactaccagtaataatagttactgttattattattattattggacatcatggcagtgatggtgacattgttgaaa

SEQ ID NO: 452854 - DNA, 571 bp, Homo sapiens
aggctagctaccatgttagcttgcacatagggtaaaatctcagacctttcataattcttgacatctacttatgtattgaaatagytttagccacttcctgccgaatggattgaagagttaatggtacaaattgggagtttatcagttgtaccaggggattttaatttatggaggtgactgagtgacaacatggagaggccaatgccatcgaaagattatttttattacttacatttcccaagaggagggggggcacttacattaaatgtaagtaattttattacttacatttcccacgatggggcgcatggggaagcactgggtttggtcaggatgcagaaggaggaagggaaagcctgggccatatcctttagtggggtttctgtgggaaagggaagggcagaggaaacagtttaggactggctagtttgagtaatttcagtgggctgtgggttgtaggggtgatacctggttgtctggtacctggcctgggagatttagggaaggggagtattgacttactgatgagaagttgataaaggggatagttgagggtgtggtctctggattg

SEQ ID NO: 452855 - DNA, 511 bp, Homo sapiens
agataccattctgcttaatcaggcaataatttacaacaattttattcaacccagtcataaaattcatttcataaagtatgcattcatataagactctaggcattgatatactacagttttttgaaataaatatcacttattcagtcagattcacatcttagagtattcacattagaaatgccaacaaagccgacaagtctaaattgttgttcacagtaattctgtatcgttttctatgtttacaaagagtttggcatgcaataatctgtaatataatctccatttttkgaaaaaaatatttttctatctgcttatccatgttttccttaagcaatagtgcatttaatctcatttacattatattttatattttctacacagttcagtgaagaagtagtcttaccatccataagaatatatattaataaattatttattacataaactttcatttgtgaaattttaatctcgaatttatagttgctgaatccaccttttgttttcagtgtat

SEQ ID NO: 452856 - DNA, 638 bp, Homo sapiens
gataagtaaaagtatcgtaaatactatgacaataataaacacatgttcttactatgctatgagtgatatgacttaacctatgtgtattcagttgagagatgggtctcgktttattttgtcctacttgctcccgcatatagtgcatgtagtgattttcttggtacatgaaaacattgcatatctaggtaaaatgttaatggccaaggccaaggtgggtggatcacctgaggtcaggagttcaagaccagcctggccaatatggtgaaaccccatctctccaaaaatacaaaaattagccaggcatgatggatggtgggtgcctgtaatcccagttactcgggagggtgaggtggaagaatcacttgaacctgggaggcggaggttgcagtgagccgagattgtgccattgcactccagcctgggcgacagagcgagactccatctcaaaaaaaaaaaaaaaaaaaaaaaaaaaaaaaaaaatgtaatggccattatgtttttctttttgtagagtaagtgtatcttatgtatagtccacttatagtttgagtaactcttgttttgttgtatgcagtatgatattcctataattgattcctgtgcatattatattaaaatgattgcatatggattttccc

SEQ ID NO: 452857 - DNA, 553 bp, Homo sapiens
tggagaagaaatagaaagagttcagagctcagtgtatttaaacctggaattaggtcattcttttttatctagaaaatcccagcccatgtggccttaaaaatataattttatttttaagaaaaaaatagtttttttgaagactgcttaaaatatatttgtcatttaataataactgtctctctaaatggaaaagtagccagagttcctggaaatcagcagttagttgctgtggattagctgctgcttaaagtttcctaatctrtaatgtaaatgggtaaaatcaggcaaatcaatttctaagaacttcataactttgtgatatcaaaaacaagcaaacaaatacaataatttttcttaaaatgtgagatggaaagaccttcaagaagacctagagtcatttgttggttcaagtttgcccacacgttttgataatgacaggtctcctctcctgacctgtggtacaatggtcaatctccacactctggtcaatatctatcaataacataaaaatgtgactgttcttggatcctgtatttattccccaatattaggc

SEQ ID NO: 452858 - DNA, 553 bp, Homo sapiens
tggagaagaaatagaaagagttcagagctcagtgtatttaaacctggaattaggtcattcttttttatctagaaaatcccagcccatgtggccttaaaaatataattttatttttaagaaaaaaatagtttttttgaagactgcttaaaatatatttgtcatttaataataactgtctctctaaatggaaaagtagccagagttcctggaaatcagcagttagttgctgtggattagctgctgcttaaagtttcctaatctataatgtaaatgggtaaaatcaggcaaatcaatttctaagaacttcataactttgtgatatcaaaaacaagcaaacaaatacaataatttttcttaaaatgtgagatggaaagaccttcaagaagacctagagtcatttgttggttcaagtttgcccasacgttttgataatgacaggtctcctctcctgacctgtggtacaatggtcaatctccacactctggtcaatatctatcaataacataaaaatgtgactgttcttggatcctgtatttattccccaatattaggc

SEQ ID NO: 452859 - DNA, 569 bp, Homo sapiens
ccaaataatacaggtatctttagttcaacagcggcacctttataagcttgtatttaaaaaatacttttgctttagttataattaatttccaaggctccacagacttgatggcaaactcaattgtctagcaaacctcacccatacagacatatttgagaattacagagagaaaaaaaaaagcctatgacaaatctaggcttcatagaggtatctctgagatgttgtctcagaatgttttgtcttactgaatgcacagttttaaattctaagtgaaggaatatatcgaaaatgtttaacaaagtacctgccactgtattatgtgaatttaaatgactgctcttattacaartaggcatagtgatagtattgacaagtgacagtctaatgacaaaaagacaaaaatagcgaagcataaatgtaagaatgcaaaatgcttagtcacatgagatattttggcatgaacactggaagcccagtatgctttagtaatccctgaggacattgatatgccttagtactgtgtgatgattctcactagtgttggtcaccctgattttctcagtaaaagt

SEQ ID NO: 452860 - DNA, 511 bp, Homo sapiens
tggttaatgggtacaaatataaattagatagaagaaataagagctggtgttcaacacgtcagtagggtgagtatagttaatattaatctattgtacatttcaaaatctctaaaagagaataattggaatgttcctagcataaagaaaatacaaatatttaagatgatggatatcccaaataccctgatttgattatatgaatgtatcaaaytatcacacgtaccctcaaaatgtgtccttctgttacgtaccaactttaaaaagaaaataacatcatataacaactatagcccttagatgcaaaaagacctgagtgcaaatatcattccctttcttactaacatctaagtttcatatagtcttttagcttcatcgtttaaccccgaaatctggtaccatcctcttctattttcttgatgactaaattagatggcattatgtgtactgtttgacacatagttaacactcaatgaaagatagttatcttcagcctttgtacaaataactctag

SEQ ID NO: 452861 - DNA, 536 bp, Homo sapiens
aaaagacctgagtgcaaatatcattccctttcttactaacatctaagtttcatatagtcttttagcttcatcgtttaaccccgaaatctggtaccatcctcttctattttcttgatgactaaattagatggcattatgtgtactgtttgacacatagttaacactcaatgaaagatagttatcttcagcctttgtacaaataactctagagaaatattagttgacctattgaaatgtggcacaatccagggctcacccctctcaggatcattagcattagattgagggtatttccctgcrtacctctctctaataccagaaactcaatattttagtagtcacagggaaaagatgatagcaacagtgccatgggtgaactgtactctttttctgttctttgagcataaccataatgaatcaagaggaaaaggggaaggaactgaggagttgcccaccagctgtttctactgactgtgggaggaatttcctttgctcttttgttctaaaagatatctagatcatttcagcaaaaaccc

SEQ ID NO: 452862 - DNA, 583 bp, Homo sapiens
gaccagtaagaattagggaagcacatggcttatagaattgttcattatctgatgtttccatgaattgtgacactctaggagtggagtctcagcccctccagcacccactctaccaacttgggcccttcagtgcctcggttttatcatggggctaataacaatgcctgctttctacaattgttatgaggattaaattagctataactaaaacacttccagcagcatcaagtgctatttttattatttccattactaattttgtgtttatgcattttgtggaaaaggaaacatgaacattgtgtggttcaaatagccaaaaaaaaawtaaaatgtgattacactaaattagaatttatgtgattttattgcacctgaaggttaacatgattctgggattctaataacaaaaaagctttaaaaccatcttgatttgtttatacagaaaaacaggaattggcctgatagagaatgaaaactatgaaatagctggctgtcttgctttattgatatttttcacaggctttatttaactcccaaagacctagcctaaacaatagtatttttagaggacatagtcacataa

SEQ ID NO: 452863 - DNA, 583 bp, Homo sapiens
gaccagtaagaattagggaagcacatggcttatagaattgttcattatctgatgtttccatgaattgtgacactctaggagtggagtctcagcccctccagcacccactctaccaacttgggcccttcagtgcctcggttttatcatggggctaataacaatgcctgctttctacaattgttatgaggattaaattagctataactaaaacacttccagcagcatcaagtgctatttttattatttccattactaattttgtgtttatgcattttgtggaaaaggaaacatgaacattgtgtggttcaaatagccaaaaaaaaattaaaatgtgattacactaaattagaatttatgtgattttattrcacctgaaggttaacatgattctgggattctaataacaaaaaagctttaaaaccatcttgatttgtttatacagaaaaacaggaattggcctgatagagaatgaaaactatgaaatagctggctgtcttgctttattgatatttttcacaggctttatttaactcccaaagacctagcctaaacaatagtatttttagaggacatagtcacataa

SEQ ID NO: 452864 - DNA, 586 bp, Homo sapiens
ggactgactcccctgttcacttatttttctcagttcagtgagtgttgccaataagagagagattagacaaaaaagacaaagcacatcatctcttttctaatgtggatgttactcagtgatgaggggagagcagataagatccccagttaccaaagcgattaataacgtcattctgtccattcacactcattcagccagtgtttattgaagagctttgtttgtctctgtcactgtgatcctacaggaaagacaatacctcctcttaaccaaggttgacaagtagctactcctagtttaataatttttgtaaaactttcagagctgttttttttttcgtattacaaatttactacattggatctactacactgtagaytcttcagacagaaaatacatatggtcatgctaaataaaacaaaaataatctctagtttcagcacccacagtcttctagtcatagagagcaattccagttgttggcttgaatagtaaagcttttttctaacacaaaacatttgagactagtaacttcctatgcatttagttatcagttaatgtaagtctgtgtgtaataaatacgactttc

SEQ ID NO: 452865 - DNA, 586 bp, Homo sapiens
ggactgactcccctgttcacttatttttctcagttcagtgagtgttgccaataagagagagattagacaaaaaagacaaagcacatcatctcttttctaatgtggatgttactcagtgatgaggggagagcagataagatccccagttaccaaagcgattaataacgtcattctgtccattcacactcattcagccagtgtttattgaagagctttgtttgtctctgtcactgtgatcctacaggaaagacaatacctcctcttaaccaaggttgacaagtagctactcctagtttaataatttttgtaaaactttcagagctgttttttttttcgtattacaaatttactacattggatctactacactgtagactcttcagacagaaaatacatatggtcatgctaaataaaacaaaaataatctctagtttcagcacccacagtcttctagtcatagagagcaattccagttgttggcttgaatagtaaagcttttttctaacacaaaacatttgagactastaacttcctatgcatttagttatcagttaatgtaagtctgtgtgtaataaatacgactttc

SEQ ID NO: 452866 - DNA, 594 bp, Homo sapiens
ccttcgtgttcacgtgtagccctgcctcatcacccaccttaaagtggattgcttgtatccagtttctrgtctccttggctcttcgcatgaggagagagagaaatgggaaaccctaattccctgttcacttgattcaacatctacgatttcattctattttaaaactctaccctggcagtaccctgcttactcattcgtagctgccttcagacatgctattctctgcttgaacatagtcgctcttagttcctcaacttttattttctcacttaagagcctgcttcactgagaatcatttcctagtgtcatgattctgaggtgccttttccatccactccttcaggctcctgtgctcaccatgccatggcctcaacacactgtgctagaatattgttttaccccctgactccctaactggactttgagttggtaggtagcattttatctgtcttccaaggatcttagccatctcctggcacatggaagtggtcataaaatatctattggatatatgaatgaataaatggactgacatcttgtggcaacatcctttcccccagtaaaaaccagaatggaatatacttcttatagtcc

SEQ ID NO: 452867 - DNA, 594 bp, Homo sapiens
ccttcgtgttcacgtgtagccctgcctcatcacccaccttaaagtggattgcttgtatccagtttctagtctccttggctcttcgcatgaggagagagagaaatgggaaaycctaattccctgttcacttgattcaacatctacgatttcattctattttaaaactctaccctggcagtaccctgcttactcattcgtagctgccttcagacatgctattctctgcttgaacatagtcgctcttagttcctcaacttttattttctcacttaagagcctgcttcactgagaatcatttcctagtgtcatgattctgaggtgccttttccatccactccttcaggctcctgtgctcaccatgccatggcctcaacacactgtgctagaatattgttttaccccctgactccctaactggactttgagttggtaggtagcattttatctgtcttccaaggatcttagccatctcctggcacatggaagtggtcataaaatatctattggatatatgaatgaataaatggactgacatcttgtggcaacatcctttcccccagtaaaaaccagaatggaatatacttcttatagtcc

SEQ ID NO: 452868 - DNA, 597 bp, Homo sapiens
aattccctgttcacttgattcaacatctacgatttcattctattttaaaactctaccctggcagtaccctgcttactcattcgtagctgccttcagacatgctattctctgcttgaacayagtcgctcttagttcctcaacttttattttctcacttaagagcctgcttcactgagaatcatttcctagtgtcatgattctgaggtgccttttccatccactccttcaggctcctgtgctcaccatgccatggcctcaacacactgtgctagaatattgttttaccccctgactccctaactggactttgagttggtaggtagcattttatctgtcttccaaggatcttagccatctcctggcacatggaagtggtcataaaatatctattggatatatgaatgaataaatggactgacatcttgtggcaacatcctttcccccagtaaaaaccagaatggaatatacttcttatagtccagtggttctgactgaataacatatttattttggtagcagaaaatgccattgtttgggaaaactcaaggccatctactaacttctttattcttgcattgtcgtgatgatgtgactgat

SEQ ID NO: 452869 - DNA, 554 bp, Homo sapiens
tgctaaattctattatctatctatctacctacctacctacctacctatcttctatctatctatttagtaacattgtatcagattactttatatatatattgtataggctgtcaaacttcattcatatttttatttactaattgaccaggcagttatttaccacctaccatgggccaggttctatcytaggtattttaaggaaagtaaaatctattagatatagttcttgcccaaaagaagtttacgaaataatcagagataagacacatacaggactcatgacacgagatgagctctcataaggaaatgactactcattggccagagaaacagctagagaatgacatctgggcttcttggaagagatggcatcaaactgcaccttgagaggcatacaatgccaacggcacatcatatgcaatggtgtaaacgggggcacacccactgagtcactggcagtgcaggatctgtgaaggcaggagtgataggtaaggtcaaaaggaaagctttggtcagcatttgaaagcctttgaatgagtatatattttgtgaat

SEQ ID NO: 452870 - DNA, 570 bp, Homo sapiens
catggtgaacagaccgtccttcctccatcttttgttggggaatacctggctgaaggtctcagtgaaaagctaggaagatactcctcctctgagggagacatctggcttcttggctgattccatgcacacttttgttaatgggctcagattccccagaattcttttatgtggttacattgtagatggactgtctgcatagtcttgtcctcttgaatgatttatgtagaggttaaaaatacatatatatttggtctggttcttagaatctacgcataagattaaatgaatctcagcaagttcagttttggaaaaaaaaattaaatttattattacaaaggcaatctagtagaggatgtagattctcgagccagaatgcttaatttgaaacatggatttaccacttgctagctatacagtgttggacaagttatttaatctctttgtgycttcttggtttccctaaccacatacaggatgataataacaatatctacctcatatgtttccatgaggtttaaatggtttacactgtcaaagcttttaggacagtgcctggcgcgactaagtact

SEQ ID NO: 452871 - DNA, 370 bp, Homo sapiens
taagattaaatgaatctcagcaagttcagttttggaaaaaaaaattaaatttattattacaaaggcaatctagtagaggatgtagattctcgagccagaatgcttaatttgaaacatggatttaccacttgctagctatacagtgttggacaagttatttaatctctttgtgccttcttggtttccctaaccacatacaggatgataataacaatatctacctcatatgtttccatgaggtttaaatggtttacactgtcaaagcttttaggacagtgcctggcgcgactaagtactcagtgagtgttagtcatgatgtcatgattattcatggtaktcaccagacaagaatatgttctcatttgtgtat

SEQ ID NO: 452872 - DNA, 575 bp, Homo sapiens
ttgaaacacttcaaatacgtcagcctatgcatattaaaattttaatgcagcaaatttactaatatttacaaaaccagtttagatagagataatatatagatatatagtcagattctgaccatgtcctaagtgttcttagtatctattgatgaatagatttcattaatttaatgagatgatagtatactaaaacttgtctaagtaaatggttggcgtccttgaaacttcctrttgaatacaacatgagtaaaatgttcgtgtaaagtaaatatttttcaaatagggatgtgttattggtgtttcttaaatatagattacttgctgctgctttttaaattggatataaactttaaagtgaacagcattgtaggaagttgaagaggaagaaaatatattattttgagaaggtattatttaaatctatataaatccaacttaataaaggacattggataattactattaaggtcacaaatttataaaaatttacaaactaacatgaagtttaacagctttattcaagagtaaagttcatgaattgactgaaagagctcctcctaaccaaaaaaaaaaaa

SEQ ID NO: 452873 - DNA, 575 bp, Homo sapiens
ttgaaacacttcaaatacgtcagcctatgcatattaaaattttaatgcagcaaatttactaatatttacaaaaccagtttagatagagataatatatagatatatagtcagattctgaccatgtcctaagtgttcttagtatctattgatgaatagatttcattaatttaatgagatgatagtatactaaaacttgtctaagtaaatggttggcgtccttgaaacttcctgttgaatacaacatgagtaaaatgttcgtgtaaagtaaatatttttcaaatagggatgtgttattggtgtttcttaaatatagattacttgctgctgctttttaaattggatataaactttaaagtgaacagcattgtaggaagttgaagaggaagaaaatatattattttgagaaggtattatttaaatctatataaatccaacttaatwaaggacattggataattactattaaggtcacaaatttataaaaatttacaaactaacatgaagtttaacagctttattcaagagtaaagttcatgaattgactgaaagagctcctcctaaccaaaaaaaaaaaa

SEQ ID NO: 452874 - DNA, 515 bp, Homo sapiens
tgaaactccatgagaaaagcacatcaaagggaaacaccagcatggtttttaaatatctgtaatcagtaaagtattgcatgttctttttagaaaatcagaaaatactcaatttattaaactaaaaacacagtcactctacccagagttaaccacactttggcacatttaattttccatatatgtgtgtgtgtgtatctgtatatctgtctatctayatatatatatatttggtctttttttaatttttgtttcataaaatgtatgactcagtctatcttgctttttaaaaactctacattatcttatgaatatttcaccatagaattgaaagttatttgcataatatatcagagcacataataatttatgtatgtaatcattttcttatttggggatatttctgttcctttcagaatttatcctcttataaataattcattgaatatatttgtgcataaatcttctcatattcctgattttcttagagtgaacttctagaaatgcaatttcaggtc

SEQ ID NO: 452875 - DNA, 544 bp, Homo sapiens
atcttctcgggtttacagggctaactaataactaaataacactgagactcttccatagacaggcattctgtagtcttttcctttctctgccaagacattctgtatctttatgaggttactcaacccattcagtttgagagcaaggaagttagcacctgccacgagggatcagaatgtgaaatgtgatgagagggccctgtgataagtccctgaccttagcaaacaaaaataaaaccttgaaaaaaaaagacraacatgcagtaatatacaaatcagagtatatttgtctgtccctgaataggagccattaaagttccactccatagcaagcaatggttgaagttgtgtacgattcatgtaacagcagtgtcaggagatgtcagggaactccctcactgccccagcttttgatactataacatgatagtctccatgaaaaaaaaaaaaaaagtcaaccagccgtcttagtgataggaacttgggcccatttctcatctggtgtaatacttcacaaagctgatccaaacacaatgcagcgccctga

SEQ ID NO: 452876 - DNA, 565 bp, Homo sapiens
ttcttaaaatattctttttttagctttctaagacagtatctttctggctttcctgccatcttttgattctctttttttctgatatcatgtatatgttcctcttttatgcttatcccttaagcaatgttgcttcccagtgttctatcacttgtatctttttacttaccacacttttctggggtgacctcttccatacccatagcttgaatacccagtatatgctggtgaatattaaatctctgtttccagcatagatctcttctgtgaagcttactgctgactgctggatatctctacttgcatatcccttgtgcaccttaaactcaacatgtccagaattgaactcacatgcatctgcaaagattctcctctttcttttcttcttatcttggtgcatcgtgccttcttcatcacagaaatctggatgtccatcctgattcttttttcatgctctctcctcgtatttaatcaatcacaattycctagaaaaatgtgtcttcttaaaatttctagaatctattgactttcattgatctctactgttactactccagttcatacccat

SEQ ID NO: 452877 - DNA, 609 bp, Homo sapiens
tactgtacagcaaagaatgttaaaatgttttaattcagtatatgaagagcaaaatataaaaacaggttttcttccactctcactagcaagcaaagtggtctgtatttttgaaatatattttttgtttaatcataacaaaatataatacaaatgttattaaaagccctattttatggatgaagacagtgatatttagagatattaattagcttttccaagatcatacatttatccagtagtaaaagcaagttttcacaagctgatctattttattccagtctttatttggaatcactaaacttacattccctttagcaaaactatcgtttacatttctagkgtttcaagagttcaatgctaaacttgggagatctattcttaaattctctcaaagtgcaacacattttcctcaggatgatcataaagtcatcagatgtgtgttaagcaatatatatagtcatatactcttgatcaaaaaagatttccaggttacacagaagagagatttatggctgagaaaaaggcagattgcttctaagaaaggcttcaaatatattctcttctgacaggctacaggagagccagctagatgaaccattacagtgtgta

SEQ ID NO: 452878 - DNA, 575 bp, Homo sapiens
gactgttgtacttaagaggaaaatttgtacagagacatacacacacacaaaagaatgccatgtaacgttaggcacggagaacatcatgtgacaatgaaggcagagattggagtgatgcatctatgagccaaggatggccagcaacccccagaagctggggagagacaaaggatgcttccctaggatctccagagcaagcataaatctgccagcaccttgatttaggacttctttcctccagaactgtgagaatagatttcagttctaagccacccagtttgtggtactttgttataggagtcctaggaaactaatgcaacatgctatgttgtaaataaacagtagttctaattggtataaataataattttaagtatattttattattaggtcaggtgrgtaggaaattgcctggtagactaattatcaatgttgtattttctgaaaagttaaaatattcccattcagtaaataatacttgtctaaaagtttctatctgtattgtcctaaaacaaagcaaaaattaaaatggagtcagttatgtacctgaaaaatgtgaaaaaggaaagaaaaat

SEQ ID NO: 452879 - DNA, 499 bp, Homo sapiens
cctgtcctccttcctcctttaggctgcaagatcctagagacatggccatgtacttacgcttttttgtacctttctcactggcatrattctaggaacactggataatggctcagcagatggttggatacatgaaaaaagtagctgaagtggtggtgaaaagactccttctactattcttctttgagcccttctggtacatcttaaatgaaattacttttgttaccataaactaagagaaaaagagtaagtacaagcatcttatcatgagataaatatggactaggtttccattatgtatgataagtgttaaaagtaatcttaaaatttcatttccccccgcaccaaagagcttaccttagagtttggaagacaggtcgataacacatgaggaattaaacaataaagctggaaacaataatacaagatagtagtaaaggagatgttatgtgatagtgtatcattaattgccaatagagcacagacaagaagagctattcat

SEQ ID NO: 452880 - DNA, 564 bp, Homo sapiens
gcagtaatgtgcatagagtgcctggcacaatcactggcacatagtaggtgcttaaaaattattttctttctcttttctttctttttttgagacagagtcttgctctgttgcccagrctggagtgcagtggtgcaatctcagctcactgcagcctctacctccggggttcaagcaattctcatgtcacagccactcgagtagctgggattacaggcatgcaccaccacaccaggctaacttttatattttgggtagagacgggctttctccatgttggccacactagtcttgaactcctggcctcaagtgatctgcctgccttggcctctcaaagtgctggaattataggcctgagccaccatgttcagctcctttcttttttttcagcaccttctccaacctcatctttgaattcctccttgtttctccccagcattttcttcttaagtgactctcccatgaaaccaccttgcttgtttgttctcttgctttccgccacctggttctgtctccttcccaatttctcttcttgagggatccacgatcccactcttggctccctgc

SEQ ID NO: 452881 - DNA, 564 bp, Homo sapiens
gcagtaatgtgcatagagtgcctggcacaatcactggcacatagtaggtgcttaaaaattattttctttctcttttctttctttttttgagacagagtcttgctctgttgcccagactggagtgcagtggtgcaatctcagctcactgcagcctctacctccggggttcaagcaattctcatgtcacagccactcgagtagctgggattacaggcatgcaccaccacaccaggctaacttttatattttgggtagagacgggctttctccatgttggccacactrgtcttgaactcctggcctcaagtgatctgcctgccttggcctctcaaagtgctggaattataggcctgagccaccatgttcagctcctttcttttttttcagcaccttctccaacctcatctttgaattcctccttgtttctccccagcattttcttcttaagtgactctcccatgaaaccaccttgcttgtttgttctcttgctttccgccacctggttctgtctccttcccaatttctcttcttgagggatccacgatcccactcttggctccctgc

SEQ ID NO: 452882 - DNA, 656 bp, Homo sapiens
tttcagtttctcattttctgttcatgtgatggtgtgctggcacacggagtttgcccatttttctttggcatatcaacaccccactttcagtggtgtacagctgtgtagacaggtttaaggaaatggccaaggaggtagggagaaactcaaaagagaaaaattgaagcatagcccaatagaagctgccttctcgctaacctattttgccttcacggtgaccttttgccaaaaaaaaaaaaaaaaaaaaaaaaaaargggaagagacatgaggttggagaaaatggtgtggaaatggaatcaggacaggaattatgagaagccaaagaatagattctagacattttgcagggaaatggtagaaaattgaaagttgaatccattgaaggggaggagattggggaatgaaggaagatacattataaaggaagctggggaactatatgccgcgggattttctcacagaaagaaatcctgttttgctgggaccagatttcatccatgttgggtacattgcagcactgaattctgtgaaatgtctggcagcactcttctttttttcttttttccatacaagtgtttctgtagatatgtaggtttgctataaactgctttcaccatgcaaaagatttttcctacaaaactttcaaacgtaccac

SEQ ID NO: 452883 - DNA, 604 bp, Homo sapiens
tgtctctcatttttctctttctctactactgctatgttcagtagggtctgtatttatctctgtatgaagctgaatttcactttactttctctttatggtcttatcacatcgtttacaaacactttatctctgttacagaaaataaatgaaattccaggctttcgatgaaatgtcaygctgaaatggatggtccaaaaatctatatttggatgactgactcctgtttgaggtagacatggtaaatgttgcatgcatataaactgaaggatgatggatttaatgatcataccctaactggggaatgctattttggaataattaaatgttccatcatttgcaagtctaaatagtccattgttagttcctgtttttgtctgtcaacagatccttccattttctaaaggaaatttatcattaaaacaattgaagtgatggcaacataccaccggagtaggttagcaatagcacaaatcgtgggactctaattcatagctacagtttaggaaaacttaatttatgtatgagtctgcttcataacgacaaacatgacaagcattgtttaaaaagctcctggtagatatttatcttcgggtattggagagag

SEQ ID NO: 452884 - DNA, 604 bp, Homo sapiens
tgtctctcatttttctctttctctactactgctatgttcagtagggtctgtatttatctctgtatgaagctgaatttcactttactttctctttatggtcttatcacatcgtttacaaacactttatctctgttacagaaaataaatgaaattccaggctttcgatgaaatgtcacgctgaaatggatggtccaaaaatctatatttggatgactgactcctgtttgaggtagacatggtaaatgttgcatgcatataaactgaaggatgatggatttaatgatcataccctaactggggaatgctattttggaataattaaatgttccatcatttgcaagtctaaatagtccattgttagttcctgtttttgtctgtcaacagatccttccattttctaaaggaaatttatcattaaaacaattgaagtgatggcaacataccaccggagtaggttagcaatagcacaaatcgtgggactctaattcatagctacagtttaggaaaacttaatttatgtatgagtctgcttcataaygacaaacatgacaagcattgtttaaaaagctcctggtagatatttatcttcgggtattggagagag

SEQ ID NO: 452885 - DNA, 592 bp, Homo sapiens
aacttcagtggcatgcaataataatcatttagttttttttcatgagcctacaggtcagttgggtggtccttctgggtgtgattggctcaactatgtatctgatgttaacttcacatcagattgaattmttctgacctctcttgggtgttgactcactgtgggcttatctgtcatggcctcacaaggagagctgggctctccttcatgtggtctcttggcctccataggccagcctggctccttcacgtagtggctgcgcagagccccaagagaggaagtggaagcacatgaggcctctcaaggcctagagtcagaaccaacatgctcgcttctgccctattctatttgccaaagcaaatcacaaggccagctgagtatacacaagcacatgcatgcacacacatacacgcacacacacacagaaagagagatttattataagaaattgactcacatgaccatggaggctaagaagtcccgtcacctgctgtctgccagctggagactcagaagagctggtggtacaattccagttctactctgaaggcctgagaaccagaaaagctgagggtgtaaattccagtctaagtgc

SEQ ID NO: 452886 - DNA, 181 bp, Homo sapiens
atttttaaaggggaaagggatatgtccaaatctagatagagctaackgtagagaagagttctagaggtcaggttcagagggagctacagtccaaaaggagtgagcaggaacctgtgatcatgggcagtcaggagagaaacagctgcaggagagagttggggccactgctcccctcacccct

SEQ ID NO: 452887 - DNA, 595 bp, Homo sapiens
tcttgtggttttaagcactttaagttatagctactgaacagcaaacaccccattggccatgccagggaarctagtgctcttcaagaaagcaaactttgaaaaggtcttcttactctataccaccaccaactctccgctaacctccaagcctccttttcatactaaatgtgtatccctgtctctgaagccatggtgacacacaaatgatgagagttgctaagtggatatcttcacctttgttcttctttttccaacttcactgaaaactctgcttcaatatgaaagctttctacatgcatccaacatagaaatctgaaaaaaaaaagaaaaaagaaaaaacaaaaacctactctttctttgtgcatcacttaaagatctatgtaaatgcctcctagtgaggaatacctacttttgtttaagatttgaaatcattagttttaaattagaattaaagtttgacatcaagcagtaggcattgatggtagaaaattgatcagtctcaggaaactactaaatggtggattaaatacatacatggtacagagtatatcctgtgtactgtctagtacattaaatgtatgtttcttgggcattg

SEQ ID NO: 452888 - DNA, 466 bp, Homo sapiens
gatggccagctgacaggtattccaggccctgcagctatgattttctgcactgtgatttaacaaaataacgctaggtgcaatcagtcactctcttgtgaattgcttagcaaagattattaccccagacagagtacactgagaaaaaataataaaaccctaggactggaccccaaactgaagacttcagtgaggaattgcctctttgtgacattccaccctatatcgtaacactgatgattcactttggaacctaaaagttagttacttttatgttcaacctacactcagcaattctactgcaattygtgtctctccgtgttggctacctcttatgatctgcaatgccacatactactatcttcaggctgcaggctgagcctaggaactgagtctcagccatgctttccttccatcacccctcccatccccagctggcagttagtgttttgcaaatgatactgcaaat

SEQ ID NO: 452889 - DNA, 487 bp, Homo sapiens
acaattgattatttatttattgctttgattcccttcttcaagcattctctagactagtccatatttcagtgcgtgtcagctctcttaaatcatttcttttgacacaagctgrtttctgaatttggtatttattgcaacccacttcatgcattgctctgtggggtattttttactatagcattttaaaatatgtgtttattcttccacaagacttgttactaatttgcaatgtatacaatgtatatttatttgattattttcgtttaaaaaaataagtaggcaaagcatggtggctcacacctgtaatcccagcactttgggaggctgaggcaggtggattactggaggtcaggagttcgagaccagcctggccagcatggagaaaccccgtatctactaaaaatacaaaaattagccaggtgtggtggtgcatgctggtaatctcagctacttgggaggctgaggtgggatgattgcttgaaccagg

SEQ ID NO: 452890 - DNA, 487 bp, Homo sapiens
acaattgattatttatttattgctttgattcccttcttcaagcattctctagactagtccatatttcagtgcgtgtcagctctcttaaatcatttcttttgacacaagctggtttctgaatttggtatttattgcaacccacttcatgcattgctctgtggggtattttttactatagcattttaaaatatgtgtttattcttccacaagacttgttactaatttgcaatgtatayaatgtatatttatttgattattttcgtttaaaaaaataagtaggcaaagcatggtggctcacacctgtaatcccagcactttgggaggctgaggcaggtggattactggaggtcaggagttcgagaccagcctggccagcatggagaaaccccgtatctactaaaaatacaaaaattagccaggtgtggtggtgcatgctggtaatctcagctacttgggaggctgaggtgggatgattgcttgaaccagg

SEQ ID NO: 452891 - DNA, 487 bp, Homo sapiens
acaattgattatttatttattgctttgattcccttcttcaagcattctctagactagtccatatttcagtgcgtgtcagctctcttaaatcatttcttttgacacaagctggtttctgaatttggtatttattgcaacccacttcatgcattgctctgtggggtattttttactatagcattttaaaatatgtgtttattcttccacaagacttgttactaatttgcaatgtatacaatgtatatttatttgattattttygtttaaaaaaataagtaggcaaagcatggtggctcacacctgtaatcccagcactttgggaggctgaggcaggtggattactggaggtcaggagttcgagaccagcctggccagcatggagaaaccccgtatctactaaaaatacaaaaattagccaggtgtggtggtgcatgctggtaatctcagctacttgggaggctgaggtgggatgattgcttgaaccagg

SEQ ID NO: 452892 - DNA, 487 bp, Homo sapiens
acaattgattatttatttattgctttgattcccttcttcaagcattctctagactagtccatatttcagtgcgtgtcagctctcttaaatcatttcttttgacacaagctggtttctgaatttggtatttattgcaacccacttcatgcattgctctgtggggtattttttactatagcattttaaaatatgtgtttattcttccacaagacttgttactaatttgcaatgtatacaatgtatatttatttgattattttcgtttaaaaaaataagtaggcaaagcatggtggctcacacctgtaatcccagcactttgggaggctgaggcaggtggattactggaggtcaggagttcgagaccascctggccagcatggagaaaccccgtatctactaaaaatacaaaaattagccaggtgtggtggtgcatgctggtaatctcagctacttgggaggctgaggtgggatgattgcttgaaccagg

SEQ ID NO: 452893 - DNA, 547 bp, Homo sapiens
ggatggggtctcgctgtgttgctcaggctggtctcaaacctcccaaagtgctgggattacacgtatgagccactatgcctggcctatatatatatgtatgtgtgtgtgtgtgtgtgtgtgtgtaatatatatatatatatatatatatwttttttttactatcaaattgctcctcctgagcccagtccattttctgggtacagggctacagacagaccatctttgaaatgccagtggacagatgttatcacagggcatgtttccaccgatgggtccatgcctcgcacctggagcacagcagtgaggtggggaagttggagaatatgagtgctgatgtcttgtcctccttttcacagctgccgcgaatccctcagatgaatcctatcctcatccatgcatctgatttctacactcggggtgggatagagtttgagattggaaaataatgcaagagctttacaccatgacttatgagcgctggctgaggtatctgggaagatgtagctggaacagatgaagtctcacaggtgacactgctgtttctaaa

SEQ ID NO: 452894 - DNA, 547 bp, Homo sapiens
ggatggggtctcgctgtgttgctcaggctggtctcaaacctcccaaagtgctgggattacacgtatgagccactatgcctggcctatatatatatgtatgtgtgtgtgtgtgtgtgtgtgtgtaatatatatatatatatatatatatttwttttttactatcaaattgctcctcctgagcccagtccattttctgggtacagggctacagacagaccatctttgaaatgccagtggacagatgttatcacagggcatgtttccaccgatgggtccatgcctcgcacctggagcacagcagtgaggtggggaagttggagaatatgagtgctgatgtcttgtcctccttttcacagctgccgcgaatccctcagatgaatcctatcctcatccatgcatctgatttctacactcggggtgggatagagtttgagattggaaaataatgcaagagctttacaccatgacttatgagcgctggctgaggtatctgggaagatgtagctggaacagatgaagtctcacaggtgacactgctgtttctaaa

SEQ ID NO: 452895 - DNA, 596 bp, Homo sapiens
tacatgattctcttccttacaaatagagtctaccatttcatttcaccagatatcataattgtgggatgacagaaggaattttcatctcaacttaatggataggaaaatgaagcacagagaggtgagaagaatcactcttcattcccggatgaccagctctggcctagaccgccccatccaaccccacatccaccattcaagctgctagggccygatcatctaaccaatgtccataaccagtcactgcatccttgtcttttgccatcttgttccacttaacagaggaatgagtttttctggcaaggaaagtggaacagaaggaaaaaaaaccctgtatttgtcaagaaaataaaaaagttttcaagcaacatgtcacacatacactttttacacatgcacatttgctcatgcacacatctacatgtatacactcacatgcacacatgctcacacacatgcacattcatacacaaaccaatcattcatccctcagaagcagtatatgtgtatatatatactttttaattttaatttttgtgggtacttagtaggtatacatacttacagggtacatgagatgttttaaaacaggcatg

SEQ ID NO: 452896 - DNA, 595 bp, Homo sapiens
ccttgcaggaccttgctggacactcttgggaccagactattactagtttctctgtcctatggcagaggaacgggactgtggagtccgtgggggtgatcctaccaaatgttagacttggagagataacagaagccagaaatgtcctcggccatccatgtgtgtgcattggctattcccttcacagccagggttttgtcctcttctactgcagagttcaattgtagaaggtagaagttcccatgagatttggtgagtcgtgggagatggcattctcagaattgggatataattgactaattctgcaaaagtactgaatggactaagaaataaggtaacaaccatraaggtaatagtgataatactcatccttgattaatctgtctttatgaattagcactatacaccttacctcatttaatccttctaactgcggcttcaggtaggtgccattaagccattttacagagcaagaaatcgaggtacagggaatttatgcaacttactaatcaagaattacatgggttacaagtggtaagagtcacaggtcaagcctacatttgtgtgatttcaaagcttgcttttttttttttttttt

SEQ ID NO: 452897 - DNA, 293 bp, Homo sapiens
aaaacaccttggatcatatatgatatttgaggctgaggaaaaccaattcttctccctctgtaattcacaattccgtaattctgtaatttgaatgcagaaagcatgtttgacaaaagtttttaagtgggcgaaatgcaacaaattatatattcttggagaagttgcacaaaatgaatgcatrtattaaaagctttgtaattacatttccatggccaaagtacctgtttaactttcttttccagggtttttcaaatgtgcttggcaacggatccctctgacaccttgcaaaacta

SEQ ID NO: 452898 - DNA, 623 bp, Homo sapiens
ttgctttggcacatttatcaatatcaatgtccaaattataatttgtcagcaattccaargcacgttctttaagtgctttggggcataaacaatattccttaataaactaccttagggattattgccccctataagattcccaaaagtacattaatttataatctgaggcctgtaactgacaacagaccagtaaacgtttagctaagtgtgcctcccacattccctggtcctacaatagtgttttacggatttttttttccatttaattctcacagcattcctataaggtggtcatattggtggttttaaaacctggacacacattttttgatactccctttgagaggtggagactgtattctctccggtttcatctgggcaggtttgtgactgctttgatcaataaggtacagcatatcagccaagtacagcatatgtgacactaagtgaacaccagggtgtcttaaaaggccatgcatcttctgtgttggtcattgggccatttgctcctagaaccctgaatcgtcatgggagaggctggatgccctgaggctgtcatggtgtgagggagcctgggcatctctagatgctgcgggtgacagcgctagctgagccagccttcc

SEQ ID NO: 452899 - DNA, 623 bp, Homo sapiens
ttgctttggcacatttatcaatatcaatgtccaaattataatttgtcagcaattccaaagcacgttctttaagtgctttggggcataaacaatattccttaataaactaccttagggattattgccccctataagattcccaaaagtacattaatttataatctgaggcctgtaactgacaacagaccagtaaacgtttagctaagtgtgcctcccacattccctggtcctacaatagtgttttacggatttttttttccatttaattctcacagcattcctataaggtkgtcatattggtggttttaaaacctggacacacattttttgatactccctttgagaggtggagactgtattctctccggtttcatctgggcaggtttgtgactgctttgatcaataaggtacagcatatcagccaagtacagcatatgtgacactaagtgaacaccagggtgtcttaaaaggccatgcatcttctgtgttggtcattgggccatttgctcctagaaccctgaatcgtcatgggagaggctggatgccctgaggctgtcatggtgtgagggagcctgggcatctctagatgctgcgggtgacagcgctagctgagccagccttcc

SEQ ID NO: 452900 - DNA, 509 bp, Homo sapiens
atggaatgggtataaatagtaaaaggttctatcactrtaattcccttttgctataaatagttaaagcttctatcactataatttccataagaagatatatgtgtttacctgttaattttatcagggcaaattaaaacatggatagaatcatgtttctcagtgtgaagaaatatttttatttgatgaatattatatattttcaggtgcagtggcttctatgttttgggttgatgctgaattagggagtgatatttatcttgatggtaagttaaaaaacagttttcttttatctttcttgtttttttttttttttctgagacagagtctcactttgttgcccagactggagtgcatggagtgcagtggcatgatctcggctcactgcaacctttacctcctgggttcaagtgattctcttgcctcagcctcccgagtagctgggactacaggcgtgcaccatcgtacctggctaatttttggatttttagtagagacggggtttcgccatg

SEQ ID NO: 452901 - DNA, 509 bp, Homo sapiens
atggaatgggtataaatagtaaaaggttctatcactataaytcccttttgctataaatagttaaagcttctatcactataatttccataagaagatatatgtgtttacctgttaattttatcagggcaaattaaaacatggatagaatcatgtttctcagtgtgaagaaatatttttatttgatgaatattatatattttcaggtgcagtggcttctatgttttgggttgatgctgaattagggagtgatatttatcttgatggtaagttaaaaaacagttttcttttatctttcttgtttttttttttttttctgagacagagtctcactttgttgcccagactggagtgcatggagtgcagtggcatgatctcggctcactgcaacctttacctcctgggttcaagtgattctcttgcctcagcctcccgagtagctgggactacaggcgtgcaccatcgtacctggctaatttttggatttttagtagagacggggtttcgccatg

SEQ ID NO: 452902 - DNA, 509 bp, Homo sapiens
atggaatgggtataaatagtaaaaggttctatcactataattcccttttgctataaatagtkaaagcttctatcactataatttccataagaagatatatgtgtttacctgttaattttatcagggcaaattaaaacatggatagaatcatgtttctcagtgtgaagaaatatttttatttgatgaatattatatattttcaggtgcagtggcttctatgttttgggttgatgctgaattagggagtgatatttatcttgatggtaagttaaaaaacagttttcttttatctttcttgtttttttttttttttctgagacagagtctcactttgttgcccagactggagtgcatggagtgcagtggcatgatctcggctcactgcaacctttacctcctgggttcaagtgattctcttgcctcagcctcccgagtagctgggactacaggcgtgcaccatcgtacctggctaatttttggatttttagtagagacggggtttcgccatg

SEQ ID NO: 452903 - DNA, 509 bp, Homo sapiens
atggaatgggtataaatagtaaaaggttctatcactataattcccttttgctataaatagttaaagcttctatcactataatttccataagaagatatatgtgtttacctgttaattttatcagggcaaattaaaacatggatagaatcatgtttctcagtgtgaagaaatatttttatttgatgaatattatatattttcaggtgcagtggcttctatgttttgggttgatgctgaattagggagtgatatttaycttgatggtaagttaaaaaacagttttcttttatctttcttgtttttttttttttttctgagacagagtctcactttgttgcccagactggagtgcatggagtgcagtggcatgatctcggctcactgcaacctttacctcctgggttcaagtgattctcttgcctcagcctcccgagtagctgggactacaggcgtgcaccatcgtacctggctaatttttggatttttagtagagacggggtttcgccatg

SEQ ID NO: 452904 - DNA, 535 bp, Homo sapiens
taatcctccaggcaatatgaggatcatatttttgcttttattttctcttgaagataagaattaaacactcctgtcttactttatttacctgaacacttttgggcaatgatatgccttcatttaaaatatattagaaactttcttagttaagcgactatgttttctccctttctcagtcgaaattttcttactttttcaaaagtaataatcattaagaaatttaagaattattaagctgggccccatcattgagctctaatatatgtggcgggtaactggttgaattccttaggcataattaaactcattcttttgttatcagcatatattcagagattgcaaaatgaattggtagtttggaaacttaggcatatgttatgtaraacatttatgagttggatttggatttggtgagagatgttaggaatgataccttaagatgtctcattctttaggcaataatttaaatcttaagaaaagtcttgattttgattatgtgaaaataaactagaaataacctgtcttatgtacttat

SEQ ID NO: 452905 - DNA, 325 bp, Homo sapiens
atcgcttcttggtcttttggctaagatgaagtgtaaaagacatcctgctatgaatgtttttgttaacttctaaggtcctagaatgcatttaaatgaggtttaatttataaaatgcatttagtaagatctttaaaagtatgttgttacatacagtaaaatgatgtttctcaacttcccargtgaaataccactaaaggcagaaaagaatgaaatcatcccacccactgacccgttcccaatctgagcatatggatagggcccaaagcagtaagttcttggaagtttaaattcagtgtttaaaaattagtgtctgttttgtatccaa

SEQ ID NO: 452906 - DNA, 325 bp, Homo sapiens
atcgcttcttggtcttttggctaagatgaagtgtaaaagacatcctgctatgaatgtttttgttaacttctaaggtcctagaatgcatttaaatgaggtttaatttataaaatgcatttagtaagatctttaaaagtatgttgttacatacagtaaaatgatgtttctcaacttcccaagtgaaataccactaaaggcagaaragaatgaaatcatcccacccactgacccgttcccaatctgagcatatggatagggcccaaagcagtaagttcttggaagtttaaattcagtgtttaaaaattagtgtctgttttgtatccaa

SEQ ID NO: 452907 - DNA, 325 bp, Homo sapiens
atcgcttcttggtcttttggctaagatgaagtgtaaaagacatcctgctatgaatgtttttgttaacttctaaggtcctagaatgcatttaaatgaggtttaatttataaaatgcatttagtaagatctttaaaagtatgttgttacatacagtaaaatgatgtttctcaacttcccaagtgaaataccactaaaggcagaaaagaatgaaatcatcccacccactgacccgttcccaatctgagcatatggatagggcccaaagcagtaagttcttrgaagtttaaattcagtgtttaaaaattagtgtctgttttgtatccaa

SEQ ID NO: 452908 - DNA, 571 bp, Homo sapiens
aactccttttttagagtttaaaatctcaatttatgaatttatgaatataatttaagaatcaaagaatgatcccaaatacagtattacagtttcaygcagaaaaattccaatgactgttggaaatcatatttcttgcaaaatgcttatggaggtagcaaaaaagccccaaattattcattttgaatgtttattataggcatgtttgaatctacctcttccataaatttattacaaaatttgatatacctatgtgacagataactgctaagacattttgttttttttttattttgatagactgaaaatgccatgctaaaagtcaaactgtttatgtattttatgattataggaataattttatatgtatagttgggtatggagaagagttaaatagaatctattatcagcatgatggaggccaaaaaaacaaagcaacattctgaataatgcaaacacagtaaacgtttaacctcctgctaccttgataaaacctcttaaattattaaatcaatatacctacacaaaactgacacactgtcaggataatggaaactttagattttctaagtcg

SEQ ID NO: 452909 - DNA, 571 bp, Homo sapiens
aactccttttttagagtttaaaatctcaatttatgaatttatgaatataatttaagaatcaaagaatgatcccaaatacagtattacagtttcatgcagaaaaattccaatgactgttggaaatcatatttcttgcaaaatgcttatggaggtagcaaaaaagccccaaattattcattttgaatgtttattataggcatgtttgaatctacctcttccataaatttattacaaaatttgatatacctatgtgacagataactgctaagacattttgttttttttttattttgatagactgaaaatgccatgctaaaagtcaaactgtttatgtattttatgattataggaawaattttatatgtatagttgggtatggagaagagttaaatagaatctattatcagcatgatggaggccaaaaaaacaaagcaacattctgaataatgcaaacacagtaaacgtttaacctcctgctaccttgataaaacctcttaaattattaaatcaatatacctacacaaaactgacacactgtcaggataatggaaactttagattttctaagtcg

SEQ ID NO: 452910 - DNA, 571 bp, Homo sapiens
aactccttttttagagtttaaaatctcaatttatgaatttatgaatataatttaagaatcaaagaatgatcccaaatacagtattacagtttcatgcagaaaaattccaatgactgttggaaatcatatttcttgcaaaatgcttatggaggtagcaaaaaagccccaaattattcattttgaatgtttattataggcatgtttgaatctacctcttccataaatttattacaaaatttgatatacctatgtgacagataactgctaagacattttgttttttttttattttgatagactgaaaatgccatgctaaaagtcaaactgtttatgtattttatgattataggaataattttatatgtatagttgggtatggagaagagttaaatagaatctattatcagcatgatggaggccaaaaaaacaaagcaacattctgaataatgcaaacacagtaaacgtttaacctyctgctaccttgataaaacctcttaaattattaaatcaatatacctacacaaaactgacacactgtcaggataatggaaactttagattttctaagtcg

SEQ ID NO: 452911 - DNA, 470 bp, Homo sapiens
tgcatttaaaacattgcacattaccttgtgaaactaacattgtattagttacctttaggcatggaaatgcaaaaayaaatctgtaattcttctgtcatatcatttttatgcctcacaaactcatagccaaataaccgcaatttcatacgttaaaaaagctttcataaggtcaataatataatatcttgaaaaatatttcagtttaaaaagaattttcagtactataggatcattcagaggcagatgccttgccaaaaatatatcattgttaagtagatttactgcttaatgggaagagattcgttgctgcatgttagatggcatttttcatgtaacatcttttatgtatccccacaacaggaggtgttaattacaattcattcaacaaatatttcttgagcctgtgtgccaggcaccattccaaggtctgttagcagcctcattctctagaggcagagtatataacaata

SEQ ID NO: 452912 - DNA, 470 bp, Homo sapiens
tgcatttaaaacattgcacattaccttgtgaaactaacattgtattagttacctttaggcatggaaatgcaaaaataaatctgtaattcttctgtcatatcatttttatgcctcacaaactcatagccaaataaccscaatttcatacgttaaaaaagctttcataaggtcaataatataatatcttgaaaaatatttcagtttaaaaagaattttcagtactataggatcattcagaggcagatgccttgccaaaaatatatcattgttaagtagatttactgcttaatgggaagagattcgttgctgcatgttagatggcatttttcatgtaacatcttttatgtatccccacaacaggaggtgttaattacaattcattcaacaaatatttcttgagcctgtgtgccaggcaccattccaaggtctgttagcagcctcattctctagaggcagagtatataacaata

SEQ ID NO: 452913 - DNA, 470 bp, Homo sapiens
tgcatttaaaacattgcacattaccttgtgaaactaacattgtattagttacctttaggcatggaaatgcaaaaataaatctgtaattcttctgtcatatcatttttatgcctcacaaactcatagccaaataaccgcaatttcataygttaaaaaagctttcataaggtcaataatataatatcttgaaaaatatttcagtttaaaaagaattttcagtactataggatcattcagaggcagatgccttgccaaaaatatatcattgttaagtagatttactgcttaatgggaagagattcgttgctgcatgttagatggcatttttcatgtaacatcttttatgtatccccacaacaggaggtgttaattacaattcattcaacaaatatttcttgagcctgtgtgccaggcaccattccaaggtctgttagcagcctcattctctagaggcagagtatataacaata

SEQ ID NO: 452914 - DNA, 470 bp, Homo sapiens
tgcatttaaaacattgcacattaccttgtgaaactaacattgtattagttacctttaggcatggaaatgcaaaaataaatctgtaattcttctgtcatatcatttttatgcctcacaaactcatagccaaataaccgcaatttcatacgttaaaaaagctttcataaggtcaataatataatatcttgaaaaatatttcagtttaaaaagaattttcagtactataggatcattcagaggcagatgccttgccaaaaatatatcattgttaagtagatttactgcttaatgggaagagattygttgctgcatgttagatggcatttttcatgtaacatcttttatgtatccccacaacaggaggtgttaattacaattcattcaacaaatatttcttgagcctgtgtgccaggcaccattccaaggtctgttagcagcctcattctctagaggcagagtatataacaata

SEQ ID NO: 452915 - DNA, 374 bp, Homo sapiens
gtagaagtatcattgccatgattttatttcagttttgttttcctcaaaatagaatttgctgaacttttagaaggaaaaaatgtttcttctatagacctmatcaagcttgttaaataaaattattacctgcttgctctgaggttccaaactattcagatacccctaatgatcatctccccatgaattgtgaaactggtttggctctgatatatgattattgacatttgtgtagcattgtacacagactgattttatgtggcataaaagatttcacaaagactttaaaattatgtcattttacttgatgggtgtgtgttcaattaaaaaaaaaaagtccctgtgattgtatataaaatatagtatcctgtgatgat

SEQ ID NO: 452916 - DNA, 374 bp, Homo sapiens
gtagaagtatcattgccatgattttatttcagttttgttttcctcaaaatagaatttgctgaacttttagaaggaaaaaatgtttcttctatagacctcatcaagcttgttaaataaaattattacctgcttgctctgaggttccaaactattcagatacccctaatgatcatctccccatgaattrtgaaactggtttggctctgatatatgattattgacatttgtgtagcattgtacacagactgattttatgtggcataaaagatttcacaaagactttaaaattatgtcattttacttgatgggtgtgtgttcaattaaaaaaaaaaagtccctgtgattgtatataaaatatagtatcctgtgatgat

SEQ ID NO: 452917 - DNA, 374 bp, Homo sapiens
gtagaagtatcattgccatgattttatttcagttttgttttcctcaaaatagaatttgctgaacttttagaaggaaaaaatgtttcttctatagacctcatcaagcttgttaaataaaattattacctgcttgctctgaggttccaaactattcagatacccctaatgatcatctccccatgaattgtgaaactggtttggctctgatatatgrttattgacatttgtgtagcattgtacacagactgattttatgtggcataaaagatttcacaaagactttaaaattatgtcattttacttgatgggtgtgtgttcaattaaaaaaaaaaagtccctgtgattgtatataaaatatagtatcctgtgatgat

SEQ ID NO: 452918 - DNA, 551 bp, Homo sapiens
aagactttaaaattatgtcattttacttgatgggtgtgtgttcaattaaaaaaaaaaagtccctgtgattgtatataaaatatagtatcctgtgatgatgagggtgttagatttagtttcttcctttataaatgaaaatagccatctcccataattattatgaaagctaaatgagaaaaatgtatataattyataaagttaggttcaaggatttaattcatttgtaaagttggcttcaaatagagagtattactataatctagttgcctctaaacctcagtagccagctttttattgtgacagggaacctctattgaggtttgaggtaatgagggtaaaagtgtaatttcccagagaagaagcttgtgatgttgatgacgttagggatgtaaacaggattatgagggggaaaaaaaaaaaaacagacaacaaagcttgcctccagagagatgaaaactaccacttgggctctaagtcagtgtcaaaatattttttggagttagcctgactctggagaggtcagtaaaataaacagttgcactgagaggcca

SEQ ID NO: 452919 - DNA, 551 bp, Homo sapiens
aagactttaaaattatgtcattttacttgatgggtgtgtgttcaattaaaaaaaaaaagtccctgtgattgtatataaaatatagtatcctgtgatgatgagggtgttagatttagtttcttcctttataaatgaaaatagccatctcccataattattatgaaagctaaatgagaaaaatgtatataattcataaagttagrttcaaggatttaattcatttgtaaagttggcttcaaatagagagtattactataatctagttgcctctaaacctcagtagccagctttttattgtgacagggaacctctattgaggtttgaggtaatgagggtaaaagtgtaatttcccagagaagaagcttgtgatgttgatgacgttagggatgtaaacaggattatgagggggaaaaaaaaaaaaacagacaacaaagcttgcctccagagagatgaaaactaccacttgggctctaagtcagtgtcaaaatattttttggagttagcctgactctggagaggtcagtaaaataaacagttgcactgagaggcca

SEQ ID NO: 452920 - DNA, 593 bp, Homo sapiens
ccttggaatctgcttgggttctaatccttggtctgtttctcattgtcttcttagggagcttatttacccttttaaagcctcctctgtaaaaggcataatgcctatcataagtttgctttgagtattacatgagacaatgttggtaaactttgcacagtgctgacacatagtaagtgctctgttagctattattatgtaatttttttcttagcttacatagtaagttcaaggtatagtaaaaaagggaagaaagaaaaagatggctgattttgaaaaggagaaagtgatgaatgaagattgcttttacattttttgacactggtcttctaatcttgtttctcttcataaatcttgtgcaccattgtgattgctaagaagaacacaatctatttagcaaaygtttttggcataaaaggaatgataattattacttgacttttatatccttatagagacctaagctaaatctctgacactgacaatattgactattagccagcttgttaacagtactagaaatgaatttggaagaagcaatttgataaattacacacccttttggcttttaccctccctttatatcagacttgtga

SEQ ID NO: 452921 - DNA, 547 bp, Homo sapiens
actatttatgaatgattttttctaaagtgaagtgtctttttattaaccacaaagtagcccttaatctgacagttgtgcgaatttttgcatataygttttattaatgtatgagtggaatatatgtgatttattgtttgaaggaaaatcacaattattttttaaagcaagttttgtttttctgtttttaatttttttctggttccagatgtatttgggtatgcttatttcctgttttagaaacaatatactttgtatacttttttaaaaagttaatttttacttttaaactttgtcttcctcatttattatttatttcagatccataaatggactaggacaaatcttagaaacacaaagatcaaggtactttaaaaaagctattcctattaataacaaatcattttagttattaataataaacattaaataattgacaaatatgcttgattctaatataagaaagatctaagtgcatttaaaaagaattggatccaaaatgttgtttggaatgctcttaataagttagtttggcatatttggctagtac

SEQ ID NO: 452922 - DNA, 547 bp, Homo sapiens
actatttatgaatgattttttctaaagtgaagtgtctttttattaaccacaaagtagcccttaatctgacagttgtgcgaatttttgcatatatgttttattratgtatgagtggaatatatgtgatttattgtttgaaggaaaatcacaattattttttaaagcaagttttgtttttctgtttttaatttttttctggttccagatgtatttgggtatgcttatttcctgttttagaaacaatatactttgtatacttttttaaaaagttaatttttacttttaaactttgtcttcctcatttattatttatttcagatccataaatggactaggacaaatcttagaaacacaaagatcaaggtactttaaaaaagctattcctattaataacaaatcattttagttattaataataaacattaaataattgacaaatatgcttgattctaatataagaaagatctaagtgcatttaaaaagaattggatccaaaatgttgtttggaatgctcttaataagttagtttggcatatttggctagtac

SEQ ID NO: 452923 - DNA, 547 bp, Homo sapiens
actatttatgaatgattttttctaaagtgaagtgtctttttattaaccacaaagtagcccttaatctgacagttgtgcgaatttttgcatatatgttttattamtgtatgagtggaatatatgtgatttattgtttgaaggaaaatcacaattattttttaaagcaagttttgtttttctgtttttaatttttttctggttccagatgtatttgggtatgcttatttcctgttttagaaacaatatactttgtatacttttttaaaaagttaatttttacttttaaactttgtcttcctcatttattatttatttcagatccataaatggactaggacaaatcttagaaacacaaagatcaaggtactttaaaaaagctattcctattaataacaaatcattttagttattaataataaacattaaataattgacaaatatgcttgattctaatataagaaagatctaagtgcatttaaaaagaattggatccaaaatgttgtttggaatgctcttaataagttagtttggcatatttggctagtac

SEQ ID NO: 452924 - DNA, 433 bp, Homo sapiens
cttgattctaatataagaaagatctaagtgcatttaaaaagaattggatccaaaatgttgtttggaatgctcttaataagttagtttggcatatttggctagtacatttgcctgtcttcaaaactaagawtacaaagccatgataacactgtgtaagtgtttgcttaatgaggaagaaaagacttccaaacactcgagagggtaactcagtacagaaatctgaagtatattgaggaatcttaatttgaagtgtttaaatggctttttaatatttaaaaagccttcttagtgttttatagttgccaaaaaatacatggagtctttaccttgaagttcctgacaaattcttttattaaattttgactttcattttctctaggttctgttcctaaaacatctgtgaagtgtatttctgtagattaaattctgtttt

SEQ ID NO: 452925 - DNA, 409 bp, Homo sapiens
agagccaaaaccctcttcattttcactctcctgtccttggtcttargctacttaaagcagcctttagacatagggaaaaattgaaagcctctcttttaagaaaaacattaggtacttctggaatagagagttcaagaaattaggagaaaaatgaacttttgaagctttttctttcccttttttgtttacttcattctcttactcagttttaaaatgctggtaatggtcttttttttctttttttttttttcttggcgattttaatgctttggaaaagatctcatggttttatctccaaaggaggaaattaatttgatgccatggaaattagttttctagtcgtatgccttgaatgagtgaagaatttgtttttctatggtggtactaaatttggggaaagctatagaaa

SEQ ID NO: 452926 - DNA, 470 bp, Homo sapiens
cagattaagttttttaaaaatttctttaaaaaaaamcacacattcatatatatacatatgcacagaataaagagaaaaactagtcttttagcaacactattttgtatggttaaatatgtcagtaaatttctttaccattccaacaggtttaatacaaacttaaatatatataaccattctagtattgctcagagttccttaactttctcctgcttcctaatatgaaaataatgctggcacctaaagaaagttgcaaggataaattttcctttatcaatgttttcccttgaacttattaaaaaagaaatagtatccataaatataaatttgctatatagtcagttaccaattgagagaaaaagaaagtcagaatgttaaaaatgcattgttctgatatgaaaagcacaagaagatcaacatggcataacaaattacaaccataataactgtagcatacatttcaacactga

SEQ ID NO: 452927 - DNA, 412 bp, Homo sapiens
tcagctaaagaacagaaacttttccaagcagcttattactcaaaagatgaaacaaaagaaatgacaaatagaattaacaaataggtacattccagatacctctgcaatttttgtatttcttttataccccctcccttgatataacatgtaatataaaaatgaggagtcaaataaccaatgtacaaaatattaagttactctaggaccctgatcttcacgtgatttgatttcattcattcagaatggggctgcatgtagraagaaaattcccaccatccgaatagacattatttctcttagaattatttaatgataattactcatttaattgaatccaatgattcaaatcaggtgagaataaataacatatcacaattagcattaggtttggtttaaatataaaaaagcaaat

SEQ ID NO: 452928 - DNA, 583 bp, Homo sapiens
catcactacctttatggggagttgagatgggagacttggtcccctgagttcttcatctttccctgggcaactacatgttactacgttttctttccactggtctatgaagaagtaaacattagcttcatcaatatacataaatggtcagaactcaaagaactccaaatgaagaaaattcaccctggtagaaggttatttcagcatacattttgtaaggcatcttcagaatagcactagatgcctaaagcacaaatggaccttttccaagaatctggaaggaaccgattctaaatgtgaaaggccaaaaattctgtgtctgattgcccaagcccctctgttggtctttggtctagaacacatcagacaaataaagcaattcctgaaagcacactacctcactctgccagccacccccactactraggaacagctctgctctcactgcagatacacatctatacatttgaatacatatatttttatgcttgtattatctttgcagataaaattagcaaatacttctcagaaagctctctgtagctcattgtgctctggtcgttatgcccaaaattattgggtttgt

SEQ ID NO: 452929 - DNA, 456 bp, Homo sapiens
cttagcaatagaattgaacaagtagaagaaggaaattcagagcctgaagacaaggtctyctaattaaccgaatccaataaagacaaagaaaaaagaataagaaaatatgaagaaagccttcaagaaatctggaattatgttaaatgaccaaacctaagaataaccggcattcctgaggaagaagagaaatctaaacgtttgttaaacatatttgggggaataattgaggaaaacttccccagctttgctagagacctagatccaaatacaagaagcacaaagaacatctgggaaattcatcgcaaaaagatcatcatctaggcacattgtcgtcaggttatctaaagttaagatgaaagaaagagctgtgaaacaaaagcagcaggtaacctgtaaaggaaaacttaccagattaacagcacatttctcagcagaaaccctgcaagccagaaggga

SEQ ID NO: 452930 - DNA, 456 bp, Homo sapiens
cttagcaatagaattgaacaagtagaagaaggaaattcagagcctgaagacaaggtctcctaattaaccraatccaataaagacaaagaaaaaagaataagaaaatatgaagaaagccttcaagaaatctggaattatgttaaatgaccaaacctaagaataaccggcattcctgaggaagaagagaaatctaaacgtttgttaaacatatttgggggaataattgaggaaaacttccccagctttgctagagacctagatccaaatacaagaagcacaaagaacatctgggaaattcatcgcaaaaagatcatcatctaggcacattgtcgtcaggttatctaaagttaagatgaaagaaagagctgtgaaacaaaagcagcaggtaacctgtaaaggaaaacttaccagattaacagcacatttctcagcagaaaccctgcaagccagaaggga

SEQ ID NO: 452931 - DNA, 456 bp, Homo sapiens
cttagcaatagaattgaacaagtagaagaaggaaattcagagcctgaagacaaggtctcctaattaaccgaatccaataaagacaaagaaaaaagaataagaaaatatgaagaaagccttcaagaaatctggaattatgttaaatgaccaaacctaagaataaccggcattcctgaggaagaagagaaatctaaacgtttgttaaacatatttgggggaataattgaggaaaacttccccagctttgctagagacctagatccaaatacaagaagcacaaagaacatctgggaaattcatcgcaaaaagatcatcatctaggcacattgtcgtcaggttatctaaagttaagatgaaagaaagagctgtgaaacaaaagcascaggtaacctgtaaaggaaaacttaccagattaacagcacatttctcagcagaaaccctgcaagccagaaggga

SEQ ID NO: 452932 - DNA, 653 bp, Homo sapiens
gaggtcaggagttcgagaccaacctgaccaacatggtgaaaccccttgcctactaaaaatacaaaaaaaaaaaaaaaattagccaggcatggtggtgggcacctgtaatcccagttacttgggaggctgaggcaggagaatcgcttgaacctgggaggcagaggttgcagtgagccaagattgtgccactgcaccactccagcctgggcaacagggcgagactccgtctcaaaaaataaaaaattaaaaaaattaaaaaataagaaaagagtaatagcatgctaaactattaagagtaatagtttttactcttaataaactaagagtaagaattgtattactcttaatagtttggcatggcagatgtgatgcagtctaaccaactaggaatgaagaagaaatgccagttattacatattaaacttttgaaagaaaatgtattgaggctgtgagattgctgctgacagtatataaaacatcactgactttcctcttttcatttatctttgtggagtcacaggctgtggtcagaggtaggctaaggcttgggtggtgacttcactccacttcgcagagtttatygttggacaaaagacctgggcgtggcactttgggaaggatgtgaatgttctggtgaagaagtggtgtccccc

SEQ ID NO: 452933 - DNA, 618 bp, Homo sapiens
tatcaagcacttggagacaaaatctgaggttattctttcattcctagttgtcacactaattttttgccttcacttttgtctctgtagaatatttacacgtacacctatctatatctatttagatataatttatatactacaaaattcacccatgtgtacagttcagtgatttttaatgtattcacagtcatcactacaatcaatttcagaacattttcattactccaaacagaaaccccaaactcattagcagccactctccatttctctacaatatccccaaccttaggtgaccacaaatctactttctgtctgtatagattttgcaattctgggcatttcatataaagaatcatagaacatgtggtcttttggtttagcttatttcacttaggataatgtttccaaggttcatttatgttgtggtgtatataggtactcttttcctttttattgctgagtaattttccattgtgtggatatasaactttttgttaagtcattcatcagttgatggacgtttggattttttccattttttggcctttatgaataaggctgctgcgaacattcatgtgtaagtttttctggggaagtgtggttgtctttttttttttt

SEQ ID NO: 452934 - DNA, 618 bp, Homo sapiens
tatcaagcacttggagacaaaatctgaggttattctttcattcctagttgtcacactaattttttgccttcacttttgtctctgtagaatatttacacgtacacctatctatatctatttagatataatttatatactacaaaattcacccatgtgtacagttcagtgatttttaatgtattcacagtcatcactacaatcaatttcagaacattttcattactccaaacagaaaccccaaactcattagcagccactctccatttctctacaatatccccaaccttaggtgaccacaaatctactttctgtctgtatagattttgcaattctgggcatttcatataaagaatcatagaacatgtggtcttttggtttagcttatttcacttaggataatgtttccaaggttcatttatgttgtggtgtatataggtactcttttcctttttattgctgagtaattttccattgtgtggatatacaactttttgttaagtcattcatcagttgatggacgtttggattttttccattttttggcctttatgaataaggctgctgcgaacattcatgtgtaagtttttstggggaagtgtggttgtctttttttttttt

SEQ ID NO: 452935 - DNA, 521 bp, Homo sapiens
gaccttcgtttctcttacctttatttttacaaccaccatttcmatggcccacttgctgatacaaatgattgtttaattttaaaaagcatttaattgaagtcaagttatttagaacctaatcatttacacgtctttgttgttgctgctgttttgcaagagtgaagagcttggagtcaggtgaatctgcgatgaagtacagttgtcatttattagtcatgtaatttgtgacaagccacttaatctctctgaagacttcagtttcttcatttgtaaaattggcataataatgctgtccctagtagggaatatagaattatataatgggtcctttgtatatattggctagtattgctctcttacgatttggcactatggagacactgtgggagattaaaagaagatgatgaataaaaggtgacttcagctctgaagggctttatgatccatttgggagaacaggtaatgtagaatatactggcttcaaaagtggcaggtgtttagaagagaaaaggatacatgat

SEQ ID NO: 452936 - DNA, 521 bp, Homo sapiens
gaccttcgtttctcttacctttatttttacaaccaccatttcaatggcccacttgctgatacaaatgattgtttaattttaaaaagcatttaattgaagtcaagttatttagaacctaatcatttacacgtctttgttgttgctgctgttttgcaagagtgaagagcttggagtcaggtgaatctgsgatgaagtacagttgtcatttattagtcatgtaatttgtgacaagccacttaatctctctgaagacttcagtttcttcatttgtaaaattggcataataatgctgtccctagtagggaatatagaattatataatgggtcctttgtatatattggctagtattgctctcttacgatttggcactatggagacactgtgggagattaaaagaagatgatgaataaaaggtgacttcagctctgaagggctttatgatccatttgggagaacaggtaatgtagaatatactggcttcaaaagtggcaggtgtttagaagagaaaaggatacatgat

SEQ ID NO: 452937 - DNA, 587 bp, Homo sapiens
tgccttccttatccccactccatatcacacacacagttccccctattatgaacatctcactttagtgtggtacatttgttacagtagctgagccaatatggatatgttgttattaactaaagaccatagtttacattaatgtttactttttgtgttgtatattctatgggttttgacaaatgtgtaatgacatgtatatgcctttacagtatcatacagaattgtttcactgccctaaaaatcctctgtgttccacctgttcatcctccctccctggcaaccactttcctttttyactgtctccataattccaccttgttcttcaatgtctttttgtggcttgatagctcattttttttattgctgaataatctttcattgcatggctgtaccattgtttatttatccattaacttactgagaaagaaagttctattttaaacataaagaatagactgcaagcttgcccaacccctagcccgtgggcaacatggagcccaggatggctttgaatgtggcccaacacaaattcataaactttcttaaaacattatgaggtttttttttttgcgatttttttaaagctc

SEQ ID NO: 452938 - DNA, 593 bp, Homo sapiens
ctgttgatcttgagcgcgaacgcgcggcgctctgcgctcggcagagtggccatggcccgccggcggttcggtggcttctagggtcgcggggtgcggaaagcgggggcctggcgcgccgcagagtagccgcggaacatgcccagccaagcgcaaacctcgtctgtcggtcggcgctggaaacttccgcatttccaccttctaagccgaaatcaccccgggggagggtccgagctcggagcagcgacggccggctccgccacccggcctggcgcgcaggcagcggcgggcgaggagggcgtgggcccagcgcggaactggcctccsgatactggggcagacggcgcgctctgcccggggccgccgacctccggccgaagggagcgcgggcggacgacaggcgaccactgcgcgcaggccggaagctccatctgcccgaagctgcgaggctgccagggaatgtaggcaagtcgggggagccccacaaagctggcgaggtcgggaatcaccccagggattcgtaaggctaggtgttattaagggttgacaccattctcgaagaaggcagccaaaaaaaaagacaaaaaagttagtgg

SEQ ID NO: 452939 - DNA, 678 bp, Homo sapiens
ggtagctcaaaagttgaccatggcctccctacaccatccctgatttcaatctgaatacacaggaagagtctcaccttattctaatgacttgcattgaatatcagagcacagaagttggattttttccaatttttaaacaatgtgcagagrtaggctttttcagggtagcagtttattatttatttccatactttgtgttttatcccatccatctgctctttcaatttggcttagagttatagaatgttcgagctggagaaaccacattttctgagaaacattttatataaattctgataacagttgtatgaactcctatttcttcaagaatcatgataagttttatcacataggtcccaagaaaaatctaggtacagtaacaactggagatcaggaatatttttctaaatatttcttgcattgtacttttataatgagtcttttttcaattaaagtgaaaagcatcaaagcatgatagattttttacctgagaataaaatggtcttttcatttatatttgaataaaaattcaaatttaaaacttcaccataaaattcagtaatgttgacaacttgtcagcacctacttcatagattgatacccacactataatttagaatgtggaagttaaaatagtatctacaccctgaataataaataatatgcactaaagacttt

SEQ ID NO: 452940 - DNA, 482 bp, Homo sapiens
ataaaagtaaaaagtaaaaagtttcaattgattcacaactttaaaaaatatccacagaggcgtaagaggagatattgtattgcacccacaaaccagtcttatgctgttycagaaagggacattcaagaaacaaaaagggagctctgggaaatttgaacaataaataatagtagaataaaaaattcagagaaagtttggatgataaattggagccaatctcccagtaagcagagcaaaaatatagaaaatgagagttagaaaagaaaaagaaaaaaattaaaggactaaaataagaagtccaacatctaaataagaggcgatccacagagagcaacagagataagagaagaaaggaaataatcaataaaataattccagaaaatccaaggacatgagttctcagattgtaacagactactcgagtgaaaaaaaaaaaaaaaaaaagaatggagttagacccatcccaagtcacattatttgtg

SEQ ID NO: 452941 - DNA, 482 bp, Homo sapiens
ataaaagtaaaaagtaaaaagtttcaattgattcacaactttaaaaaatatccacagaggcgtaagaggagatattgtattgcacccacaaaccagtcttatgctgtttcagaaagggacattcaagaaacaaaaagggagctctgggaaatttgaacaataaataatagtagaataaaaaattcagagaaagtttggatgataaattggagccaatctcccagtaagcagagcaaaaatatagaaaatgagagttagaaaagaaaaagaaaaaaattaaaggactaaaataagaagtccaacatctaaataagaggcgatccacaragagcaacagagataagagaagaaaggaaataatcaataaaataattccagaaaatccaaggacatgagttctcagattgtaacagactactcgagtgaaaaaaaaaaaaaaaaaaagaatggagttagacccatcccaagtcacattatttgtg

SEQ ID NO: 452942 - DNA, 460 bp, Homo sapiens
cgatgttatttgatgcaaacgttggaaagacagaatcttcttgatccaagagcttctagaattcaaagtctgattctggttatttctctgctcatttaagatagtgaaatgaacatttacattctggcaacctcagaagtacaacgaacagaggacacccgccaggtagggcaaaggcctgtgcacccccttttgctgttacatgtttaycaggtgcgtgctctgtttctgttgtattacattacttttctcttcaatgtctactgaggaagaacaagtagctcctcaggcaagtcaactgttaactctgcagtttttatttaatctcccaggaatgtaacctttaactttaaagaatgtagtgaccataaaacttataaagcatgtttcttaaggaaattgtacctgtttatttaatctatcagatatgaatgttatagaaaattaaatttgtccactt

SEQ ID NO: 452943 - DNA, 567 bp, Homo sapiens
cacaaatgtcagttaaaaatttctaatgacaatggaagaaattatttagactctctcctaaactattacaccatacatcattgcaaaacattttttttcattttgcccaacctccrctcctgtcattccaccactcctatagtatctaaaatatagtttcttttagagagattggtgcaccactcaacttgtcagcttgagggctttgaatggtgttttctttttttttttttttaatttcatggcaagctgacttacaagtgactcaactgtaagctaagacttattaatagaatggtttaaccaccaaagataatgaattcaaacaatgttacttgcagcctttaatgtcacagcccctaaaaacattgaaatgtacatttttcacctgctagtcatcttcagtattctggagaggaaatattctttcctgtccttacagtggttgtatatcttaaaagacgactatatgacacttgaatattgatattcaaccttaaccaaagcagtcacaagaatacaagccattggcctctggccttttagatatgttcccaacaagttcat

SEQ ID NO: 452944 - DNA, 567 bp, Homo sapiens
cacaaatgtcagttaaaaatttctaatgacaatggaagaaattatttagactctctcctaaactattacaccatacatcattgcaaaacattttttttcattttgcccaacctccgctcctgtcattccaccactcctatagtatctaaaatatagtttcttttagagagattggtgcaccactcaacttgtcagcttgagggctttgaatggtgttttctttttttttttttttaatttcatggcaagctgacttacaagtgactcaactgtaagctaagacttattaatagmatggtttaaccaccaaagataatgaattcaaacaatgttacttgcagcctttaatgtcacagcccctaaaaacattgaaatgtacatttttcacctgctagtcatcttcagtattctggagaggaaatattctttcctgtccttacagtggttgtatatcttaaaagacgactatatgacacttgaatattgatattcaaccttaaccaaagcagtcacaagaatacaagccattggcctctggccttttagatatgttcccaacaagttcat

SEQ ID NO: 452945 - DNA, 567 bp, Homo sapiens
cacaaatgtcagttaaaaatttctaatgacaatggaagaaattatttagactctctcctaaactattacaccatacatcattgcaaaacattttttttcattttgcccaacctccgctcctgtcattccaccactcctatagtatctaaaatatagtttcttttagagagattggtgcaccactcaacttgtcagcttgagggctttgaatggtgttttctttttttttttttttaatttcatggcaagctgacttacaagtgactcaactgtaagctaagacttattaatagaatggtttaaccaccaaagataatgaattcaaacaatgttacttrcagcctttaatgtcacagcccctaaaaacattgaaatgtacatttttcacctgctagtcatcttcagtattctggagaggaaatattctttcctgtccttacagtggttgtatatcttaaaagacgactatatgacacttgaatattgatattcaaccttaaccaaagcagtcacaagaatacaagccattggcctctggccttttagatatgttcccaacaagttcat

SEQ ID NO: 452946 - DNA, 614 bp, Homo sapiens
gcctctggccttttagatatgttcccaacaagttcatgtgtacccaatgaaaaatgttaaataaactgataaactttaaacatttaaaaatattttatttatttacttgccacagctagataagaggaactgggttaattttgaaactctcagtttcctttcctctaaaccagtagctattgctggccactagtatgttgtttcctttgcaggaagttgcaaaaatgagaaagaaaaaaacgaaaaacaaaaccaagttggtattatttttagctttcttcttatttggatatagctacagttctttttcttatggtgattaacataactattcaagagagaagaaccaagcaaaggggagtagtagggaattagtagggaattgtgccaaaggacatatggcaaggttattgtcagaaagctgagctgctgaaatccagacagtttaagagcttatctgctctgctctgctcccacctaggmggactcctactacaatgcaaagactcaagtttcaccttaattaggtctttcccaggccaggtattagtgaccttgggaaaaaagtttaagcttctcagcttcagatcttcctctgaatattagcactgtgg

SEQ ID NO: 452947 - DNA, 389 bp, Homo sapiens
tatatttttaaaccttacagttaaatagaagggctagaacaaatatatgrctgtattagaagtttggaaaaagttaagaaatataaataaaatactgtttccgggaaataatattcctagttgttgctagagacaggtacagacttgggccacttcgtgaccttttatgtaaaaataagaaataactgcttttgttttttttaaaaactttgtagactgtaagtttattcccgttttttgctcggaagtaattttataaaggaatttatttttggcgtttccccacagttattcagaggctgctctgctgagaagatgaacaaatttcttgtccaaaacaatgtatttcaaacgtgccgctcgggcctttcccgtattgctcactggta

SEQ ID NO: 452948 - DNA, 389 bp, Homo sapiens
tatatttttaaaccttacagttaaatagaagggctagaacaaatatatggctgtattagaagtttggaaaaagttaagaaatataaataaaatactgtttccgggaaataatattcctagttgttgctagagacaggtacagacttgggccacttcgtgaccttttatgtaaaaataagaaataactgcttttkttttttttaaaaactttgtagactgtaagtttattcccgttttttgctcggaagtaattttataaaggaatttatttttggcgtttccccacagttattcagaggctgctctgctgagaagatgaacaaatttcttgtccaaaacaatgtatttcaaacgtgccgctcgggcctttcccgtattgctcactggta

SEQ ID NO: 452949 - DNA, 389 bp, Homo sapiens
tatatttttaaaccttacagttaaatagaagggctagaacaaatatatggctgtattagaagtttggaaaaagttaagaaatataaataaaatactgtttccgggaaataatattcctagttgttgctagagacaggtacagacttgggccacttcgtgaccttttatgtaaaaataagaaataactgcttttgktttttttaaaaactttgtagactgtaagtttattcccgttttttgctcggaagtaattttataaaggaatttatttttggcgtttccccacagttattcagaggctgctctgctgagaagatgaacaaatttcttgtccaaaacaatgtatttcaaacgtgccgctcgggcctttcccgtattgctcactggta

SEQ ID NO: 452950 - DNA, 389 bp, Homo sapiens
tatatttttaaaccttacagttaaatagaagggctagaacaaatatatggctgtattagaagtttggaaaaagttaagaaatataaataaaatactgtttccgggaaataatattcctagttgttgctagagacaggtacagacttgggccacttcgtgaccttttatgtaaaaataagaaataactgcttttgttttttttaaaaactttgtagactgtaagtttattcccgttttttgctcggaagtaattttataaaggaatttatttttggcgtttccccacagttattcagaggctgctctgctgagaagatgaacaaatttcttgtccaaaacaatgtatttcaaacgtgccsctcgggcctttcccgtattgctcactggta

SEQ ID NO: 452951 - DNA, 537 bp, Homo sapiens
accagacccagggcagaatttgcaaacccatggtaggcatacaggtggctgaagaagaatcgggacagcaagatctcactgagatgcaattccattcctccatttgatacagattaagatttctgaaaaagaccatcctcctaaaccctcatggactctgcagataatatgaggccagaaaatgartaattcccaactcttgctatctcgttactggccagtgtgtctggcttcgctgagtgtgtgccttctgaagcgtaccctataattattcagcaggtatagtccagttcgtcctacttactttagcaagattacctttcttttatttttcctgtgaaaatccttctcttccttctttcctcctttgtctttcctctttgttaactttttaaatctaaagtgccttgaaaaacttgtttacatagtagtaagaaggaaaatgttgacttgtgctatcctgggaaccttgaccttcctgcattatggataaatcatttccctgcaggtggaagtggaaaattgcagatagaacca

SEQ ID NO: 452952 - DNA, 601 bp, Homo sapiens
tatttttctaaatacaatggaaagttattggaaagttttaagcagaagatttatatgatctgacattaaatataaaaacgtcatctggtctctgtatgaaatgaactacataggtagacaagcaggayaacagggaatcaattaggagactcttgtagccaaagtaagagagaatgaggatttgattcaggatgtaatggggaggggataagaagtagcccgactccagtaatctaactgtcaaaagttggggatggattggatgtggaaggtgagggtaaaagaggaactaatctcctgggttttgccctgagcaattagatggagatggtgccttttgttaagtcacagaagagtgagaaaatctcaggtttggatagatgtttgggaaaacaataatttttgatcctattgattttgagatacctttcagacattgaagtggcaatgctgaacagatacctggaattcagagggacaccaagggctacagatttaaatttcggagttgtcaatgtagagatttggaagtcataaaagtcgagatttaaatttgggtgaatcaatgcattcagaaacataggactagattaattccttt

SEQ ID NO: 452953 - DNA, 557 bp, Homo sapiens
agcgtgtttctcatttttaatgaaatgaataatactttctttgaattccagygtcccctcttctcccctaccataagtccacaatcatgaacatctatgatctaatggttttacaatgccttggcactcaaaatagctgccctgggaggtaaaaaacaacctcttggtttctccaccaggattgtaaaggtgaatagcaaaaaccttttctttgaggtccctgagtagttagctagcaggaatgaagagagggctgaattccatatttacctacgatggggttgtgctttcatacgcactcaacatatattttaggattaaaaaaataggagccctcggatgcgaaattatttgcatatttgtcccatctctgttttggcattaaaaattggtgaggaaagaatggttactaagaataaatattataattacctttagtaaaaattctttgagatcctcagatgaaagatgtttataggatattataggataggctatgattcttccatgattagctatatcctattctaacagtacttagtaaagtgtgtgaataa

SEQ ID NO: 452954 - DNA, 557 bp, Homo sapiens
agcgtgtttctcatttttaatgaaatgaataatactttctttgaattccagcgtcccctcttctcccctaccataagtccacaatcatgracatctatgatctaatggttttacaatgccttggcactcaaaatagctgccctgggaggtaaaaaacaacctcttggtttctccaccaggattgtaaaggtgaatagcaaaaaccttttctttgaggtccctgagtagttagctagcaggaatgaagagagggctgaattccatatttacctacgatggggttgtgctttcatacgcactcaacatatattttaggattaaaaaaataggagccctcggatgcgaaattatttgcatatttgtcccatctctgttttggcattaaaaattggtgaggaaagaatggttactaagaataaatattataattacctttagtaaaaattctttgagatcctcagatgaaagatgtttataggatattataggataggctatgattcttccatgattagctatatcctattctaacagtacttagtaaagtgtgtgaataa

SEQ ID NO: 452955 - DNA, 557 bp, Homo sapiens
agcgtgtttctcatttttaatgaaatgaataatactttctttgaattccagcgtcccctcttctcccctaccataagtccacaatcatgaacatctatgatctaatggttttacaatgccttggcactcaaaatagctgccctgggaggtaaaaaacaacctcttggyttctccaccaggattgtaaaggtgaatagcaaaaaccttttctttgaggtccctgagtagttagctagcaggaatgaagagagggctgaattccatatttacctacgatggggttgtgctttcatacgcactcaacatatattttaggattaaaaaaataggagccctcggatgcgaaattatttgcatatttgtcccatctctgttttggcattaaaaattggtgaggaaagaatggttactaagaataaatattataattacctttagtaaaaattctttgagatcctcagatgaaagatgtttataggatattataggataggctatgattcttccatgattagctatatcctattctaacagtacttagtaaagtgtgtgaataa

SEQ ID NO: 452956 - DNA, 557 bp, Homo sapiens
agcgtgtttctcatttttaatgaaatgaataatactttctttgaattccagcgtcccctcttctcccctaccataagtccacaatcatgaacatctatgatctaatggttttacaatgccttggcactcaaaatagctgccctgggaggtaaaaaacaacctcttggtttctccaccaggaktgtaaaggtgaatagcaaaaaccttttctttgaggtccctgagtagttagctagcaggaatgaagagagggctgaattccatatttacctacgatggggttgtgctttcatacgcactcaacatatattttaggattaaaaaaataggagccctcggatgcgaaattatttgcatatttgtcccatctctgttttggcattaaaaattggtgaggaaagaatggttactaagaataaatattataattacctttagtaaaaattctttgagatcctcagatgaaagatgtttataggatattataggataggctatgattcttccatgattagctatatcctattctaacagtacttagtaaagtgtgtgaataa

SEQ ID NO: 452957 - DNA, 668 bp, Homo sapiens
aagatagtagaacactagaaagcagttcaattgtgaaatataaaatcttaggaaattgatatgctatttaagaagtaaattatagctccgtatttgagagtctctgttagtatactccatatgtcctgtgttcttttatcagtaaccttcatatttttcaaatttcatagggacttaaaaaatccattctggcttgaaagctttttatctcttttcttttactgttagggtagcatctggaagggggttgattgatctagcagaggtagccagtgagtcaggctctgctagagaaagggtcacttgagagtcacttgagttttcacctttctgttgatgacctgactttccaggtatgaactgctctgattgatacacttacacagcaatgtggaagagtgattatgaatacaggttctggcattgaactaactgtgtgaccttgggcaagtaatttaacctttctttgccttgtttgctcatctgtaaaactgaaattataccattggggttaaaagacataatatctgtaaagacaaaatggygtagtgcctgctacatagtaactctcaaaaaatgttagctatttgttatctgtacactcctgaatcccacttccttctttattctaatatcatcttgggtttcttcctgattttgaaaaccta

SEQ ID NO: 452958 - DNA, 563 bp, Homo sapiens
tccattctggcttgaaagctttttatctcttttcttttactgttagggtagcatctggaagggggttgattgatctagcagaggtagccagtgagtcaggctctgctagagaaagggtcacttgagagtcacttgagttttcacctttctgttgatgacctgactttccaggtatgaactgctctgattgatacacttacacagcaatgtggaagagtgattatgaatacaggttctggcattgaactaactgtgtgaccttgggcaagtaatttaacctttctttgccttgtttgctcatctgtaaaactgaaattataccattggggttaaaagacataatatctgtaaagacaaaatggcgtagtgcctgctacatagtaactctcaaaaaatgttagctatttgttatctgtacactcctgaatcccacttccttctttattctaatatcatcttgggtttcttcctgattttgaaaacctagatatgggttctgttggctaaatctcttttattttwtttttttttgcttcattaattctgatttgataaggttacat

SEQ ID NO: 452959 - DNA, 550 bp, Homo sapiens
tgtcttccagttgaagtaactccaaatcctattatttatcttggactatcttacattctttctctttccatataaaatatatcttcaagttcagacagttcttcctttattacaccttttgtatccgtcacttcccttctgatcccattgctaccactctattccaggttcacattattccacaggtatattctttccctcttcctactcctcctgcacacagatggtgtaataatctctccaaaatgctgcttttcacttgttactctttaccactcccactacctccatcgaaaatcattgcttactggagtacggaaacacttcacctgacatttaagrtcagcaataccccatcaattttatttctcatcactaccctactttcatttctttatcaaatatttactttatgtcagcttccataacaggcattgtagatataatgataacaaattagccacagtctctgtcttcaggaaacttacagtctagcgaagagacttttttttaaaaaaggcatcttgatatcatgtgtagtccttttcct

SEQ ID NO: 452960 - DNA, 622 bp, Homo sapiens
gtcaatcagttgtctttgcaaactaattacaaggtatacattatgtatttttaacaaatgaatttaaatccctctgagaattttgatctggaaggtttttaagcaggttataatattctgttttcaagttgttaggaagtatgaagacgtggtgacagacacatcatctttrgtagcaaaatcatttttacaatggaaatgattcttaataccaatttaaaaatattctttctgtaatccaagttttagttttaaatacactgtttctcatccatgattaaaacattaagttaaaccttaaaggccagattaagtacataagtcagttaatatatgccccttgtctttttgcaaaagaaaatgcacacttatattgaaatgtcacaagatttttctacttcttgttcatgagataaacacctaaccactgtgatacaaaagatctttgtggcccttctctatctcattaacaacaatggtaaatatttgactatattttaaaggctttgtggttgtcatggttgtcattattcctaaaggactttgacacttcagcttcaatttctttctttttttcttttgagcctgagtcttgctctgttacccaggctggagtgcagtg

SEQ ID NO: 452961 - DNA, 438 bp, Homo sapiens
taattatgtcactcagagtgatttaattcaactttattaaaaacagattttgattgggtaaaaacacgcrtgtagtaaatagccttggcccttggtggtggttgataattactgggattccaaggggtgatggagaaaataatgtaaaaaccttgaaagctaagagaataaaacacaatttctcatgttttacaacattctttcttcctacttttgtgagaatgcagaactgtagtccagggcaatgcagccaccactgctgttttctccttctaatccagagtacagctgtgtactgggtccaccagacagaaagatcttggccaaggcaaggccacacttcaagctggagccaggacatggcccctggcaatggccaagttgttgagtcaaagcacaggtggttgggatccaagggtggtgtcatcccatggatgg

SEQ ID NO: 452962 - DNA, 507 bp, Homo sapiens
tagtaatttgaacttattgagcatttactatgaaacaaacatttatctaagagctttttaatgcattatctcatagaatcctcagaaaaagattatgaagagttaccattattatttccattttacagatgaagaaacggaggcaaaaatacattaagttgcccaagatgcagccagaagtagactcagatcgtccatgtttcatcactgkgtcatacctgcccaattaagataaattagtattgctacttaaaataaaaatcccagttgtctgaaaattttacttgtatgaatcctgatgatgcagtataaaatgagacacttatgcatatattaaaatagctttaattataactagtctccaattatgttacctagtaaagtctttactgagaccttcttcagtgatagataagaatgttttacaattaaagctttattttctgtaggtggaggtttacatatagcatgaagataccttcaaggttgacaatttgctgtcaagat

SEQ ID NO: 452963 - DNA, 513 bp, Homo sapiens
ttgcacgttttagcttcctcttgctcttctgccttcactatgtgaatgtttcgaggttagcctgctgggggatgggacatgtggagcagagcagagtcaaatcaattttcccagctaaggcctcagacatgttagagaacgtatcacctagctgacctggcagaagacagtcttatcaatgccagttcaaatcagcagatctaccagtcaacacacagatacttgastaaaaataaatatttactattgtatgccacataggctttgaggttgtttgttacacagcatttttgttgcaatagatatctaatacattgaagtattgtttaatagagatttgaggttaacagaatgccagacaatagagttcacaatgccccaaattagtcttgaaatctgtcattacaaaattctcctgtgccgttacatggtaacacattatgaaacttctggggaaaaaatattaatttagaatgttctttaaatgacattttaccatattgagcagacaaa

SEQ ID NO: 452964 - DNA, 477 bp, Homo sapiens
  misc_feature (1)...(477): n = A,T,C or G
ggtgctacagagcaggcagcagcccagggcctaacatcctggagctcaaggactgcatcaaagactctcaaaaggatctttagtcttctggctagtcagttatctcatcgagtaaggaacttgccatttcctgtcttttctctgctccattctttttcctccctcgttcataaatgtatttcttgtactcttaaaacagcgtggcctgtccatagcatgannnnnnnnnnnnnnnnnnnnnnnnnnnnnnnnnnnnnnnnnnnnnnnnnnnnnnnnnnnnnnnnnnnnnnnnnnnnnnnnnnnnnnnnnnnnnnnnnnnncaccagctaacacgaaagcacacaccacgatgatgttttagtagtgataaaaatcaaacattttctggagccattatactctaaaatgttaatgmagtttactttttaaaatgtgatcgatagatgggggaaagtgcccataaattactaaaggcaa

SEQ ID NO: 452965 - DNA, 327 bp, Homo sapiens
ttgattctgcatgaatgtgacaagtttggccaattccctgaaagtgacgaagatgaggaagtctttctagtcttcagttttggaagaaacatctttatggtctggctgtatgacaactaaatctttttgtgttttctgagaatattaaacacatagtttctattctcttaaaagtcagactaatatttgtgtgcaattatcacatatagayattgcacaaatatcacatatagatattgtatcattcttggagcctcatgtgtgtgatgttcagatactctgattaatcaatacaagtgcaatgcatgctgtactataatgggatgg

SEQ ID NO: 452966 - DNA, 614 bp, Homo sapiens
ctttttgtcagtagacatgaccacaaaagcagatatttttaaggcttctgaagtactgttcttttttttttttwaaaaaaaagaaaacccacaggctcatattttgtattatttggagctacaatttggcaggatttgagatatgtaagtttcttttccccaagatttaagaagaaaggacttagagaaagtactctcagctggaatagggagggatacagggaagatcaggtacctttttaatgtgtctcttttcccactaaagccctgatgttagaggacattgactagtgacaaacagcgcaattttctttgtatgtgaactagagcatttcagctaaaagcttaaaggagcttacaggtaagatgtctcggcaagagtttctcccctgaaagaatacaacttaataaatgtgcagtggctccatttggacctctgcctgtctggaaatacaaaatcagtctgtctgctgccttaaactcgtgtctcatgcacacatgagctgtccccctctgaggtttactggagtgtatttcattagaaactcttcgtggcatcgtgaacctgattgtaatgaatgggctgaactctgaaagcactgggcactgacctc

SEQ ID NO: 452967 - DNA, 554 bp, Homo sapiens
attcatttaccattgtgtgtacaaaacaattcaaatcctaagaggggggtgtatattagaatgcagaaacaaaaactgcattgttgatttcaaacagtgttttcctgggagagcacacatttgtgtagccatcccacagtggacaaaataattccaaaaattagttgaatgaaaacaagggcacaaagatgagtggttaattatttgggccagtgaaaaatgtcctttctggaaaatctttcaaaacctatrgcacttgaatttgcatgaaagttgtattctatgaatatttctttattgaaaataaagcacttcaggctcagttcaataataacagcttacaggagagtaattgaagttatccaattctcttcccattgaaaatgacctacagtatatacacacagagatgcaggaaaaaaaaatctgttgtgcaattttattgagactgaagtaaaaaggaattggggttaggcactgtgtgagcatttaacgcacaccaaatgatgatatggtcggaaaaaatatccctttttctttacgtcttttttcaa

SEQ ID NO: 452968 - DNA, 628 bp, Homo sapiens
tgatgtttagggcaatgttaatgaatgaatcatatcaactactttgtttcttagattcactgtctgaaaatatagtataaaagcaattcctcccccmaaaaaaacttcaagtcttttgaaaactgatacacttggtgattctgcatgcatgtggcctcagttttttcatctggtaagtagagatataacttcattgctttcccatggttattatgaagacaaattaataactcttaaaaatacttggcaaatataaagtgacccatgtatgttcaacattagtatttgtggaataaaatgcctaacctgaggcctaacaactaggtattttttatcctttccacactagggaataggacaactttcagaagggtgtatggaatatattactggttcccatttcactttggtatgaaaatgaaataaatccattcttgacttaaattaattcaaaacaacttccaaaatctctaccaaaattgccctgtgttcttagactaatttacaatcattataatacattaataatatttaatatttccccccccaccttccccataattttattattactttaaccagtattttatgcaacttcctctactaagaaaagatacaagaagtaagg

SEQ ID NO: 452969 - DNA, 627 bp, Homo sapiens
acaggggactggagtctttggggtccctcatttgaattattcctaccaacctactaaatcagagtctcttcagtggaatcaaagaaatttttttttaacaacactctaagagatttgaatgaataataaagattaagaactgatttagaaggataataagcagtgaatgttaggtgtcaagtgagtgatgcagaaaataactgttataggagttccaaatgagggaccaatgaagactgaagatgccagtgattgcagggatagccatagagaaactggagcttgagctgagtcttgaaggaagcaagacattcagaagggagcagtgcaggcttttcaggaaggagagactcatgagcagagatttggaaattagaaaacagataactggcctttcagaatacaatgaaaatgagtgtggttggagtggaggtgtgtaattgtggtttgtgaagaaatgtgaggttgtgggtatataatggaggaccttggttgtcaggtcaagaaatktaaagaaaagccattttaaagaaaaagatgtttaaaaagcaatgcaattttattccctttgccccgtttactcaccaaatttctctgtaattgaagatcatagtttgattctctttc

SEQ ID NO: 452970 - DNA, 603 bp, Homo sapiens
aataaaataaagctcacattaaagtaaaaagagaagatgaaaaggagtgggaagagaagaaggaggaaaggaggtaaaggaggaaggaaagcaaataatttaaaccattagcgaagtctccagaaggatgctagagagtgaacagcactgcctgcagctgaagatttcacccatacctgctgaggctcttccttagcttggtgtatcctcctcctctcccttcctgttctctcttcctctcctgccccttacctccactatccttttcctctctctttcccactcctcacacaagttctcttcctaaattagcccatggatgaattttctggcttcctgatacctctcctcacactcttccttcctgtcttccaaacaaattctgttctctgtgttgctctatgtcctttctgatccwtgtcagtctggtctttcttagttccttcccattctgtcttccattggcctgtacagccaaacaagtgcctaaggactgagcagcagaaacaacatctgcctaataaggtgaaggagagaagaacggctgtaaatatttatggtaaacaataagaggaagatatacaaagatccactggattatga

SEQ ID NO: 452971 - DNA, 455 bp, Homo sapiens
gaataaatatctgctgatattatacatatcatgtaacagttaaaactcattttcacagaacttctatttcacattctatttacatggagctacatttttctgtcagtgggcatgtcctcagtaacactaatatgagctacacatatggataaactgaaaatacacaggtgcatataygcagacacatacacaaaacacaacacacaatagtatacccagtagtttggcctttcatgagcaagacctctttttgccttaaaaaacaaaactggtgattttttttttatgagaacatctttagcttcataaatcgatgattacaaaaacatcccggtttcatctgcctgcatcctggtcaaggctcctgtcttcttttgtctcctttaaatgtgtttatccatttgagaattcagcaaatttcaaggaattgttgcactctttcttcttgtttaccc

SEQ ID NO: 452972 - DNA, 580 bp, Homo sapiens
tttctcttgaaattttgatccaatgttcttgatatcatatcgtttgttatctagcaaaaaggaataatttaaccccttaacactagaataatctgaataatcacaagaataattagtctctctcaataagaaactggttttgaatagataaaaatgtcaaacagagtgaaaaagtttgaaatatgagattctgatgaagagggtctgttggaaaaacgaatcctccttccctagttcttcagcctagttgggtgacagcctgccctgccttgaagtcctctccacacaaattccgtgacttctatttagcaagttgttgaaacataatacaaatttaaaataaagttcagaaaggaataascaagagaaaattttcagctctgtctccctctactccacaagtgccacaggagtacttctcccaatgtaatctactattaaaaaagaaaatcagaaggctccctagtcctttttggcacataaagaaacacactttgtactaaatgctacttttgagggtttttttttcaatcaaggtttagagataaattataaattatttgtgtcttagactcttctg

SEQ ID NO: 452973 - DNA, 549 bp, Homo sapiens
gtctctttcgtttcttgcttgtagtttatgggaagctgaattccctgcagagggtatgtagagagcacgaaggtagggactcagtgggcatatcaaggaatctgtcaaggtaagaaggggtagcctgaaccaactgccagtcaactgttgagtccttgaaaaaccactaggaaaacaaaaacaaaaacaaatgcaaacaaataaaacttgatcacccatagctaagttcttagatttaatgtggtaagagaaaatatcaatttgacagagtcttattactatctcaaaargaaaaaattcatgggaaaatattttatttggacttaggaggagacatattatgatataatagttttgaattggtgaataaagtgaacaccctgacgtaagaatcttgaagcaaatcctgacgaactgttcgtaataaactatttgaggtggttcgcagtgttattattcagaagcaattatttcctggagacagtaactaagtttcttttgcttattctcactattgtgtaaaatcgggacagtcaaattatgttggtt

SEQ ID NO: 452974 - DNA, 500 bp, Homo sapiens
gaatgtttctgtgtctctgtcttgcttatctgggagggagagtttttgtgtctgttcccatacatcttcctgcagctgcaggcactgcctttcaagcgctactgaggtaaggatcctagcaacattaggtggatttgcatcagttgtttgacaagtgtaggaaagaagaaacacaacttttttctcacctgttgaaaagttcrtggctgacaactgtattagttcgttcttgcattactatgaggaactacctgagactgagtaatttatggagaaaagtggtttaatcaacttacagtttggtaggctatacaggaagcatggctggggaggtctcaggaaacttacaatcatggcggaaggcaaaggggaagcaggcacttcttaaatggtggagcaggagagagagcgagggataggtgctgcacacaaccaggtcttgtaagaactctatcacaagacagcactaggagtatggtgctaagccattagaaaccacc

SEQ ID NO: 452975 - DNA, 533 bp, Homo sapiens
ctaaattaagtattgattaatattatttctactgacatattctatattgaagatgcataataatctccggcagcaattgttagacatgtatagtctcgggtcccacatttaaaacttgtaatctagtaactcggatcagacaagggaatttcattttgtaataccatcctataatatggttttgatccagttgatttttgcaccacattctgagaacactgttcagagtaataagattgcaaatgagaaaattattcagaatatacaattagatgaaatttcaccagaataacattgggactaygtccaaataaagtagtaagtcatttgtttttctcattaagacactcaaaattactttgcttgttctattagaaaaaaaaatatgtttacttctcagatatcttcaaaagagtattcaataattatcatacaaaattttcaaatcaaaatattagactaaaatttctttattttactttaagttctgggatacacgtactgaatgtgcaggtttgttacataggtataca

SEQ ID NO: 452976 - DNA, 581 bp, Homo sapiens
ctcacattcttaaagattgggtgaatattctttgtatccaggctcaagtgcgtgactcaattttggccaatcagagcaaaatatttgatgatcacagtgactttttcagaggttggagcatgaagtactacagacaaattatatttagagttttcctttgtttgctttttcctgtcactgttgggagtgagattggtcattccattaccaatattctgtcacatttagaaaatgccaaatttcctaggaaatgatgataattttagtaaaaactaagcaatatgtgccaaaagtagtgataattcctctctggagaacaataacgtgaccatagtccaaaaaaagattcccacaaaaaattatayaaataaaatgcctgtgacacagtcaaaaataaccgcttatatggtaagccaacaaagtctgtttgaaaaatagcaaggcataaaaatagaaggctagtaaaagagactcatgaagaatcaagatgttaaactatcacaaattttaaattaattatgctgtcaataatcaaaggggtttaaaaaattgagaattttggcagagaacagtacatcaca

SEQ ID NO: 452977 - DNA, 468 bp, Homo sapiens
gaatgtgtacattatgcttcttccgaaggaggtatctgcctttgctatcactgaaaattcaactcaagaatcatctctcttgaaatgatttagtgtaactgttactttcatcctcctctgtaattaaactgttctttttctgtccttacataggctgatacatatctatctctagaattatagccatcaacatgtaatatgttattcatttgcctacttcccttccagtctatatcttcttgtagtcagaaactatatkttatttacattatattttcactacattttgtgatacacaaagtcctcatcaataaattaatgtgtcaatgaagccctgaaatttttcagtatttttagtgttaattcaatgcattgtctgccttctgtatatttattcacttatattgagtccaagaagaaactattacaaaaagtgactataattaatttttctcccatatttaacag

SEQ ID NO: 452978 - DNA, 624 bp, Homo sapiens
ctgtgaagttcattcaataaatagctgagtgcctactatgtgccaagtccagcaataagctctgggagcataacattaaagggtaaaagactgtccttgtgaagatttcattttaataaaataaggcaagtcataaaatgggagccaaagaaatatatactgtgccagctggtgagtggcacactatacacaaatcaaggtaaggaaaataggwatttctatggttagggacaaattgctatgctgtattgggtagtcaaggaaagctgacatttgatcagaagcagaaaactttgtggctatctggggaaaagagcaaatacaaagacccttcagtagtgtagaatgatgttggggatcctgggcagcagcaaggatggttgttgtggttaggcagagtgaaaaagagagaagtagtaaagtcacaggtaaagtgtggtgaagttcttctaggccagtgtaaggttatttgttttagtctgtgtgtgatacagaactaatagacagttttgtgttgagcaagggggtgactttgacaaatttaaaggatgattttagctgctctactgatcatagactgtaaacacacaaatttgaaaacaggaaagagactaaggaataatc

SEQ ID NO: 452979 - DNA, 625 bp, Homo sapiens
tggtttttagtcccaagatatcttaaagaacttgaataaaattgcttcatagttatataatgtatttaggtatatttgtttcttcttttaccaagtatttagcatacaacacatagatgtaaaaaagggcatataagttagtttgaaaaatatcaattcygaatttgctaactctatttaaatatttttctgcagtagttgttttcctaactctaataaggacagcattcaaacatctctgttatgggcttaatcacctgacaacatatgcttttctggcctaaagcgaaagttccaagaatttttctaagttaatttatttggttctagtacactttttatttttaagcttttgtttcttttgccttttatcccagtgttgttaacatgtctagctgcaatgcaggtacttagagcaccatctagagatgaaaagttaaaattaacataaaaaaagaagacctagaagcagtgtaaccagaagatgactttgcaatttacaattagcgtgcaaattatattttcaaatgattggttctaagaaagtcacacattcctaattgaaagcaaatacttgtttaatgttgatgctctgcatgacttttccaaaaatacattgaatagc

SEQ ID NO: 452980 - DNA, 616 bp, Homo sapiens
gaattccttttagcagttcttgtacagctgagtttgtagaggcaaattctctcaacatttgtttgtctgaaagagactttatcttttcctcacttatgaaacttaattttgctggatacaaaatccctggctaacaattattttgtttcaggaggctaaagatgggaccccattcccttctggcttgcaaggtttctgctgagaagtctgctgttaatctgatagttttcctttataggtcatctgatgattttttctcacagctgttaagattytttccttttttttgaattttgataacctgatgactctgtgcctaggtgataatctttttggaatgaatttcccaggtgttctttgagattcttgtatttggatgtctagatctgtagtgaggcaggaaagttttcttcaattattccctcaaatatgttttccaaacatttagatttacctttttcctcaggaacacgaattgttcttaagtttagctgtttaacataatcacaaacgtcttagaggctttgttcattttttcaattattttttcttcatatgtatgattaggttaaactgagagccttatcttcaggctgtaaaattctttattctgctt

SEQ ID NO: 452981 - DNA, 616 bp, Homo sapiens
atttcccaggtgttctttgagattcttgtatttggatgtctagatctgtagtgaggcaggaaagttttcttcaattattccctcaaataygttttccaaacatttagatttacctttttcctcaggaacacgaattgttcttaagtttagctgtttaacataatcacaaacgtcttagaggctttgttcattttttcaattattttttcttcatatgtatgattaggttaaactgagagccttatcttcaggctgtaaaattctttattctgcttgttctactctattattgaaattttccactgcatttttctatttctccaagtgtgtctttcacttccagcagttgtgattgctttttctgtatgatatctattactctgaataatttttcatccagatcctgtactttttaaaaatttctttaagttggttttcacctttctctagtgcctccctgagtagcttaaaaatcaatttttggaactctttatctggcatgcagagatttcttcttggtttggatccattgctggggagttggtatgatcttttgggcatgttatagaactctgttttttcatattactagaattactagttccttctcatttgg

SEQ ID NO: 452982 - DNA, 616 bp, Homo sapiens
atttcccaggtgttctttgagattcttgtatttggatgtctagatctgtagtgaggcaggaaagttttcttcaattattccctcaaatatgttttccaaamatttagatttacctttttcctcaggaacacgaattgttcttaagtttagctgtttaacataatcacaaacgtcttagaggctttgttcattttttcaattattttttcttcatatgtatgattaggttaaactgagagccttatcttcaggctgtaaaattctttattctgcttgttctactctattattgaaattttccactgcatttttctatttctccaagtgtgtctttcacttccagcagttgtgattgctttttctgtatgatatctattactctgaataatttttcatccagatcctgtactttttaaaaatttctttaagttggttttcacctttctctagtgcctccctgagtagcttaaaaatcaatttttggaactctttatctggcatgcagagatttcttcttggtttggatccattgctggggagttggtatgatcttttgggcatgttatagaactctgttttttcatattactagaattactagttccttctcatttgg

SEQ ID NO: 452983 - DNA, 616 bp, Homo sapiens
atttcccaggtgttctttgagattcttgtatttggatgtctagatctgtagtgaggcaggaaagttttcttcaattattccctcaaatatgttttccaaacatttagatttacctttttcctcaggaacacgaattgttcttaagtttagctgtttaacataatcacaaaygtcttagaggctttgttcattttttcaattattttttcttcatatgtatgattaggttaaactgagagccttatcttcaggctgtaaaattctttattctgcttgttctactctattattgaaattttccactgcatttttctatttctccaagtgtgtctttcacttccagcagttgtgattgctttttctgtatgatatctattactctgaataatttttcatccagatcctgtactttttaaaaatttctttaagttggttttcacctttctctagtgcctccctgagtagcttaaaaatcaatttttggaactctttatctggcatgcagagatttcttcttggtttggatccattgctggggagttggtatgatcttttgggcatgttatagaactctgttttttcatattactagaattactagttccttctcatttgg

SEQ ID NO: 452984 - DNA, 583 bp, Homo sapiens
tttgcttagtgttgctttggctgtgcaaggtcttctctgattccataagaatttcagaattattttttctagttctgtgaagaatgatgatggtactttaatgggaattgcattgaatctgtagaatgcttttggcagtatgatcattttcataatattgattctacccwttcatgatcatggaaggtgtttccatttgtttgtgtcatggatgatttttttcagcagtatttttgtgttttttttctgtatagatctttcacttccgtggttaggtatattcctaagtattttattattactattattttgcagctgttgtaaaagggattgagttcttgatttgtttctcaacttggttgttgttgttgtacagcagtgctactgatttgtgtacattgattttgtatcctgaaactttactgaattgatttatcagacctaggagctttttggatgaatgtgtaggattttctaggtttacaattatatctttggcaaacagcaaccatttgagttcctctttatctatttggatgcctttaatttctttctgttgtcttattgctctggctaggacttc

SEQ ID NO: 452985 - DNA, 535 bp, Homo sapiens
tgataagtagtgttttcatttccatttagttcaaaatatttttacttcttttgagatttcttctttgawgtatatggttaatttctatatattttgggattttccatttgtctttctgttgttgctttctagtttaattctattgtgttatgtgagcagacattgtataattttaatttttttgtttaggtatatgttagggcccataatgtggcctatatggtaaattttctatatgagcttgaaaagaatacataatttgctgtggtttgataaaatagtctgtagatgtcaattatatccaactgattgatgatgtcttgagttggaccacgttcttagtaattttctgcctactggatccatccatttttgagagaggtgttgaagtctccatgtatactactgggttaatctatatctccctgcaactctgtcagtttttgctttacatattatgattctctgtagttgggtgtggctttgtcctctttgataattgacttatcattatttggtgactttatctctcata

SEQ ID NO: 452986 - DNA, 485 bp, Homo sapiens
ctatactaatttgatcacatgtcttatactaaaaatatgaatttatggtgaacagttattttttctctgggggtcaggaatctgagtagatgaggtcagccatgcaggcactgtatgccaatatgagtgacctctccgcaaaaaatcctggactcaagattcaggtgagcttcccttgtgggcaamatttaaaatgtgtagctacacatcattgtggggtgaattaagtgtgtcctgtgagactcttctgtgaagagacacctggaacccagggcttggtttcttctgaactataccttttgcaccttttcgctttgctgattttaatccgtgttctttctctgttatcaactgtaagcaggagcataacagtttatgagtcccatgagtcttactctcaatgatcactgaaagtgaggatagtcttgggaagctcaagtataccatataactttacatcattataggttctggagattaggaca

SEQ ID NO: 452987 - DNA, 485 bp, Homo sapiens
ctatactaatttgatcacatgtcttatactaaaaatatgaatttatggtgaacagttattttttctctgggggtcaggaatctgagtagatgaggtcagccatgcaggcactgtatgccaatatgagtgacctctccgcaaaaaatcctggactcaagattcaggtgagcttcccttgtgggcaacatttaaaatgtgtagctacacatcattgtggggtgaattaagtgtgtcctgtgagactcttctgtgaagagacacctggaacccagggcttggtttcttctgaactataccttttgcaccttttcgctttgctgattttaatcygtgttctttctctgttatcaactgtaagcaggagcataacagtttatgagtcccatgagtcttactctcaatgatcactgaaagtgaggatagtcttgggaagctcaagtataccatataactttacatcattataggttctggagattaggaca

SEQ ID NO: 452988 - DNA, 583 bp, Homo sapiens
tttgcttagtgttgctttggctgtgcaaggtcttctctgattccataagaatttcagaattattttttctagttctgtgaagaatgatgatggtactttaatgggaattgcattgaatctgtagaatgcttttggcagtatgatcattttcataatattgattctacccattcatgatcatggaaggtgtttccatttgtttgtgtcatggatgatttttttcagcagtatttttgtgttttttttctgtatagatctttcacttccgtggttaggtatattcctaagtattttattattactattattttgcagctgttgtaaaagggattgagttcttgatttgtttctcaacttggttgttgttgtygtacagcagtgctactgatttgtgtacattgattttgtatcctgaaactttactgaattgatttatcagacctaggagctttttggatgaatgtgtaggattttctaggtttacaattatatctttggcaaacagcaaccatttgagttcctctttatctatttggatgcctttaatttctttctgttgtcttattgctctggctaggacttc

SEQ ID NO: 452989 - DNA, 603 bp, Homo sapiens
cctggttctttagaataatcccaatgtcatttctaaaatccaagctaaagtttatttctttaggcttcccaaaggtattgtaatgcatttcatagagaacaatattttctttcggacagaaagtatattccataaatataggaatatggtctattttattcactgatacatgcaaacacaaatacctaaaacaatacttggtcccaagactgcgcttaacatagcaataaaaccctgaaaataatcacttgataacattttatttttctatagactccatgcaattagaaattcagtccatctcactcactctacgtttctcttttcaccataaagtctctcagcttttggtctattcaagacacgtatttcaagaaaccagatgtcaatcatgcactaccaatacatgaccttcttatgctaatggaaacctcttttgcaagaaagtgatgttattcttttgaaaatttaggggtctggcttattctaaaacatttctggagatacattaatttgaattygttgggctactgtatccaagtaaagacaaagacaagttgctttttagagtacttgctatattccattgttctgtgtgctggg

SEQ ID NO: 452990 - DNA, 501 bp, Homo sapiens
gttgcactttctcaatgtattttttggaaggggtagataatccctattccaggccactcttattcacctgttagataactgaaatgtatacacaaatacagatagctttaattggcctgaaaagtatgtatttcctacataagcttgcacttctttgacccctttttctaagtgtttggcttctattttttaagtaaaccagaaatacttcttcactagaaatgtttccaaatccataattctgatatcaaagaatgattttactgcatttcagagttggaagggatatttaagtttatttaatttagttactctttctgggcttgaattcctttaaaagcatcaaattaaacttttcagttaaattcaattagaactgcatttattaagtacttcccctttagctaacactatkctaggctctaaatgtacaaagataagtataaagttccagccttagatactcattatttaatgaagaggtagggacaagcataaaaa

SEQ ID NO: 452991 - DNA, 588 bp, Homo sapiens
gttacccaattaattaaaatgttcaatcaatggcttctactctgtacaaaataaagggcaaatactttaatctcctagtcaaatctctttacattatagtttggaattaatataatgtgatcaatgatttaaattaggaccaggtacaygaagaggactcactcaagatatggaagaagttattgagcattaatgtgaggatgcagtacacacaaagtaatataaaagaacaaaagtggctgggcggagtggctcacgcctgtaatcccagcactttggtaggctgaggcaggcagatcaggagatcaggaaatcaataccatcctggctaacacagtgaaaccccgtctctattgaaaatacaaaaaattagctgggcatggtggcgagcgcctgtagtcccagctactcgggaggctgaggcagaagaatgatgtgaacccgagaggcggagcttgcagtgagccgagatcgcgccactgcactccagcctgggcgacggagcaagacaccgtctcaagaaaaaaaaagaaaaaagaacaaaagttatgataaaatgatctaaaatcattacaaaatataaacttc

SEQ ID NO: 452992 - DNA, 526 bp, Homo sapiens
ctcattttggaaagataaaggaagtaataggagctattttcagaccatatggaactgcataatgtattggggttgtcgccagattcaagcaaagtggttgcattttacaagctggagagtccctttcrcaagtaggattacagaataattatgctcatctttagatgtttctgagagttttcattgggtctatatatgatgatagaaaagtaggatgatgataatcttttcccaagttttaaatacattatgtgtttctgcctttttatttttgtttaaagattgttatgccaggctgtgatatgtttccatttggttaagtcaataaggacattcaattttttcaagatcatgtgcttcacaacttccaaatcttatttttcaagaggagttatttcctggattggtggatatttaagctatgcatgaaacaacaacaaacagaagtttttgttcttctttctttgatacacaaaagctctctgatagtccccgatttatttattttcagtggacttggctaaac

SEQ ID NO: 452993 - DNA, 620 bp, Homo sapiens
tcattgctgaaagtcacctccaaatcaacataaacatacaattactactctggggtgagaattttctttttttctataagcagagtatgaaatggctttagatgtcaagaaatagaatagcggaaatgaggtgattactcatttaagccaaatggaaaactgtgtctaattgtctaactgctccattgacttcaaatagtctgcagacagtcacagactcctgatacgtttaatgcactcccaaggagctaaacagaccttctgcagtattgaatttccatgggaattcaaaacatgattcttattgcttctgtgtttcttctcgtcatcctcagtgctaatttctttcaatcacacataaattttttggttcatagtttaccttggtttcttggaaactggcagagaaaacaaaagcttaggagtagtagtatcaaagtaaaaytagaatatctcttttttagtttacatctaagcaaaacacactggcatcatttttggtctctcaaatcgaactgtgactattactagtactcggtatttattcaaccattcaaaaagattttctttcatagatgctgttcaacttcctaacagcactgaccttcttaccagtaaag

SEQ ID NO: 452994 - DNA, 620 bp, Homo sapiens
tcattgctgaaagtcacctccaaatcaacataaacatacaattactactctggggtgagaattttctttttttctataagcagagtatgaaatggctttagatgtcaagaaatagaatagcggaaatgaggtgattactcatttaagccaaatggaaaactgtgtctaattgtctaactgctccattgacttcaaatagtctgcagacagtcacagactcctgatacgtttaatgcactcccaaggagctaaacagaccttctgcagtattgaatttccatgggaattcaaaacatgattcttattgcttctgtgtttcttctcgtcatcctcagtgctaatttctttcaatcacacataaattttttggttcatagtttaccttggtttcttggaaactggcagagaaaacaaaagcttaggagtagtagtatcaaagtaaaattagaatatctcttttttagtttacatctaagcaaaacacactggcatcatttttggtctctcaaatygaactgtgactattactagtactcggtatttattcaaccattcaaaaagattttctttcatagatgctgttcaacttcctaacagcactgaccttcttaccagtaaag

SEQ ID NO: 452995 - DNA, 548 bp, Homo sapiens
tcctgcagttctgacaatgagtttgactaatggtaagagctgtgtgaataggtagtgacaagcagctctgcaaaaccattagtttttgtttgttatatttatcaaattgacaaacatttttccagcagcaagcatctccattcctttgtatttcttttacctacctagcaaaatcagtttataattccaaaggcagaaactatttcattcatatcctgagctcttagcaygctttggttttgtagtgatgcggtaagggcagataatgcatctgcaaaatgaatgagctgctctaggtagaacataaaacagttctttttacatgatctacactatttaattgggtcataatcattttctcttagttatattttatattaacttttattaaatcaatttagcataaatgttacattattatgtgtttaaatatcacccatcttttctgtaaaattgaaacaaagtagaaacaaattaagaaagcagttgcttttcttaggaatctttatactgaaaaattccttaacttgttccttcttcccttgctc

SEQ ID NO: 452996 - DNA, 511 bp, Homo sapiens
ctttggttttgtagtgatgcggtaagggcagataatgcatctgcaaaatgaatgagctgctctagstagaacataaaacagttctttttacatgatctacactatttaattgggtcataatcattttctcttagttatattttatattaacttttattaaatcaatttagcataaatgttacattattatgtgtttaaatatcacccatcttttctgtaaaattgaaacaaagtagaaacaaattaagaaagcagttgcttttcttaggaatctttatactgaaaaattccttaacttgttccttcttcccttgctccctttcttttctccctttctttcatcttccttccttcctagcttcccttcctcctctcttccttccttctggacaaatatgtagtttacttgatcttgtttgtagaggttaggagaacaagacagaaatacaacactagtgctcatttagctttaatcattttggaagagatgtaagatacaaatatgaatatt

SEQ ID NO: 452997 - DNA, 548 bp, Homo sapiens
tcctgcagttctgacaatgagtttgactaatggtaagagctgtgtgaataggtagtgacaagcagctctgcaaaaccattagtttttgtttgttatatttatcaaattgacaaacatttttccagcagcaagcatctccattcctttgtatttcttttacctacctagcaaaatcagtttataattccaaaggcagaaactatttcattcatatcctgagctcttagcatgctttggttttgtagtgatgcggtaagggcagataatgcatctgcaaaatgaatgagctgctctaggtagaacataaaacagttctttttacatgatctacactatttaattgggtcataatcattttctcttagttatattttatattaacttttattaaatcaatttagcataaatgttamattattatgtgtttaaatatcacccatcttttctgtaaaattgaaacaaagtagaaacaaattaagaaagcagttgcttttcttaggaatctttatactgaaaaattccttaacttgttccttcttcccttgctc

SEQ ID NO: 452998 - DNA, 597 bp, Homo sapiens
aaaatccttgtagttctcatgcaacccaatattctgagcctgttcccccatttcaccaatcacctttacctccttcagtccccaggctcccaggacccttttaagaaagcctgtggcccttacttaaagaggaatggacaccgatacatatgtccagcagaaactggaagtgatgtattacatctatgtgcctgttaataattaaataaatactttaaaaaggtattgcaactgctaaaaatctaagaacgcagtttgaaattaaatactattaatatttactttgaagtcattgtttttcttcttataattcgtattatgtgggttaagctagcaattgacttttggagtattccaracatgagatcattatacctctggatttctataaaagttgttcaccactacaacctacttgtctgaagcctggaacaaggggataccttcactcaacaaaagaaaataccagtattccagagcctctttagacagaaaattctgaattgataccttgccatgaatttggttgagagaaatgctatggagaggatattatctttattacatagtacacatttactcttctatgtattatga

SEQ ID NO: 452999 - DNA, 584 bp, Homo sapiens
cactacaacctacttgtctgaagcctggaacaaggggataccttcactcaacaaaagaaaataccagtattccagagcctctttagacagaaaattctgaattgataccttgccatgaatttggttgagagaaatgctatggagaggatattatctttattacatagtacacatttactcttctatgtattatgagttctatctctgagttcatctggtggtcagaaatttgaccatttcactgtattaaccaattcttttacagactatcctttacattttggtatttatttyacggctttttaattttaatatatcttttattaaagcacatatacttacagaatactgcccatgagatgcatgtacgattagatgaaatttcatgttactgacatgaagaccaacaagaatattacagggttgcctcaaaataattttcgtcttcattttcttaatacagatctttagaacctatgaatttttgccttcatttttcaatggtatttttcctgggttcaggatttttggttatttccgcttagaaagaagtcaatccatcgtctttttactttcgtgatttc

SEQ ID NO: 453000 - DNA, 596 bp, Homo sapiens
acattttggtatttatttcacggctttttaattttaatatatcttttattaaagcacatatacttacagaatactgcccatgagatgcatgtacgattagatgaaatttcatgttactgacatgaagaccaacaagaatattacagggttgcctcaaaataattttcrtcttcattttcttaatacagatctttagaacctatgaatttttgccttcatttttcaatggtatttttcctgggttcaggatttttggttatttccgcttagaaagaagtcaatccatcgtctttttactttcgtgatttctattgagaagttggctgtcaatcttatgcttgcccatttgaagaaattatgtcttccttttttcattaactttttcccttagtttacatattttcttttaacttctgtttttctctgttttctgtgtctaacctaatgttactataatctagagctattaatttcagatgtcttatttttcagccccagaattattatgtttccctttactgttcctaatgagcgcactctatattttcatctactttgtccatccattttaaaaatttttaatagtcattgtaaaa

SEQ ID NO: 453001 - DNA, 584 bp, Homo sapiens
cactacaacctacttgtctgaagcctggaacaaggggataccttcactcaacaaaagaaaataccagtattccagagcctctttagacagaaaattctgaattgataccttgccatgaatttggttgagagaaatgctatggagaggatattatctttattacatagtacacatttactcttctatgtattatgagttctatctctgagttcatctggtggtcagaaatttgaccatttcactgtattaaccaattcttttacagactatcctttacattttggtatttatttcacggctttttaattttaatatatcttttattaaagcacatatacttacagaatactgcccatgagatgcatgtacgattagatgaaatttcatgttactgacatgaagaccaacaagaatattacagggttgcctcaaaataattttcgtcttcattttcttaatacagatctttagaacctatgaatttttgccttcatttttcaatggtatttttcctgggttcaggattyttggttatttccgcttagaaagaagtcaatccatcgtctttttactttcgtgatttc

SEQ ID NO: 453002 - DNA, 578 bp, Homo sapiens
ttttatctattgctgcataaaaaatccttctaaacttcagtggcttaaaacagaaacatactgcttttctctcagacttcagtggattgactggactctgacgggtagttcttatttggaatttcttatgaggatgcagtcagatggtggttggactggagcagcggtgtgctagagtcagtttttgctagtgcaaaagacaactttgtgcatgtatttctagttttgcctccggtgatgtcacattgatagctagaaacagccagggtagtggtagttcaatgaagattgaaattgccatgaatcaagggctctatatccacagccccacctttggaaactgtatctatcagcaaatcactggactgaaatcatttgaaggctaagtattgccaawttctctttctagaagtgtgtaattgcttatgccatccacgtacttaccaacaatgtacggaaatgtttgtctcctcatggcctgacagacatattatattaccaatcttttggatttttgtaaatctaagaggtaagagattgcatttcagcacagtgaccacttgcattttttcttacta

SEQ ID NO: 453003 - DNA, 452 bp, Homo sapiens
aacatttgtagatgcctttaatcaactttgaatagtttccctctattgctattttgctgaaactgtacatcgtcaatgtggatgtttgattttgtcaaatgctctttatacattaattgatgttgtgtctggaattggtgggttcttggtcttgctgacttcaagaatgaagccgcggacgctcgctgtgagtgttacagttcttaaagatggtgtattcggagtttgttccttctgatgttcagatgtgtccagagtttcttccttctggtggatttgtggtctgctggctccaggagtgaagctgcaaaacatcctggtgagtgttacagttcataaaggcggtgcatcctgggttgtttgttcctcccggtgggttcgtggtctcgctgatttcaggagygaaagctgcagacctttgcagtgaatgctacagctcataaaggtggcat

SEQ ID NO: 453004 - DNA, 620 bp, Homo sapiens
aaaatgtaacagagagacatgaaatgagcacgtgctattggaaaaatggtgccagtagacttgctcaatgcagggttaccataaatctccatttttaaaaagcataatatttgccaagcacgaaaaagcaaaacaggataaaatgagatatgcctatatgtgttgtggcatacattttaaaattcttctttctatagcacataagagtcttttcctaaacactggtagtatctctgtatggtatttattaaactcaatttgactaatactaaatraagtattcattatagttctaaaatcatgtaagttgtattatggttattttatatacattattcaacttttactgagattatgtcaatgccaaagcattcattgattgggtgctagtattgtcatacatattttcttgaattttatacatatatattcttctgttagtattactctttggtataaatgagtgagtattgtaacttgatttaaaaagtcaccctaaatgtggaaactgagctaagagtttagcacaaaagtcatcatcggtacagtcattagaaagtgtgcatttctgccccatgtgtgcaccttatttccaatctaaaaccaaatttatttttttt

SEQ ID NO: 453005 - DNA, 481 bp, Homo sapiens
cccatcattgcattgcatgtgttttaatctgctgattctgtgcctgacggtgatgaggtttatctgatgtaagtgattcagtgtaggtcaggtcctagaacgatttgcctggtattagacctatccaaggaaggttactgggctcaccaactttcaaactagccatggaacaatgtgataaagccaacctattcaccttccaagcaatgctcagatcaacgagcaggcagcagtggccagtgcaacgaagggactctcagagcaactggaacaagtgagtgggatagagcatttttcagggagcgccattcgcagggaattcaacattgtgcgggacgcatcctgctcaaccacacccacctccacctcggagccacactttgccgctttccaacctttgggtccttgggcaatagttacatcttctaagcctcaaatatctttcctataaaatgtrtcactcttttataagtcactttga

SEQ ID NO: 453006 - DNA, 583 bp, Homo sapiens
gtggaatttaaaactaagcagacatgatctctagtactttgatacaggtaaatactatactctccttaagctttatattcttgatttttaaaatggagctaataataactatctatcttgaaagattattgccatcactgaaaataatattcatgcatcaaccaataccataactcctctataggacatggaagagtattatatatgacaaatgattgctatgattattattatcagtgttattattatcctaatcctaagtaatccaataaaagaaaaatacatctgtgcctgtgcgtatgtgcacgtgtgtgcagtcaaatacaygttgagtaaaggtaaagtctagctgtatttaatcaacctacctgaatcctcaggaaaaaattctaaacctagtttaaaacatgtaaactctaagctctctccttatagtcagttagtagcagcacatcttaaaatctggtgtgaatattctcttagttctacatgagtctaactaaacagaggattattcttaggtgtttgaaagagacatatgtgacactgctgttttgagaacaatttaagtgttgtcttgtca

SEQ ID NO: 453007 - DNA, 574 bp, Homo sapiens
gacaaaatgaaagtgtcttttcaactacgcaataatctacaaatataatattagtaattgaaacctgaagttattctatttaaatttctggttagttggggaatcattaggataagatattcatcttaactccaaaatatattaacttcaacaagataatttggaaattaatttccttttaatcttcataccaygtatatttatatatgttaaaaatattttataattttactgtcttggagtctgtaaagaagatagctgcgtaacttatttaaaaaaaaaaaacaaaactcataaacctggaaaactaccttgtattagtccattctcacattgcattaaaggactgcctgaaactgggtaatttacaaagatagaagtttaatttaatcacagatttgcatggctggggagacctcaggaaacttacaattatggcagaaggagaagcaaacatgtccttatttacatgatgtcaggaaggagaagtgccaagtaaaatgaggaaaagccccttataaaaccatcagatcttgcggtaactcactcactataacaagaacagcagcgtggg

SEQ ID NO: 453008 - DNA, 434 bp, Homo sapiens
agggtcccatgagtagcaggttgtgaagctcgtatataaaacaaagacattttggtctcagagaacacatccttactcacaacacaaccctgtcactctgagctctatctacttttgtctgtctgaataaccgcattgtttaccacacaacctaatatatgcacttttggtttcatatttcggagaaacataaatttacgttccccaaatcttgtacatattagatttatttataatagtcaagaatgaggacaatccaaatttttctcaataggagaatagttacagaaattatggtatttcacaccatgaaatacagcaataaaagctgaagaactattgatatacacaactayaacaatttggagggatctctcaaggacgtagtgctgagtctagaagctaactctcaaaagacatgcacaagtcatact

SEQ ID NO: 453009 - DNA, 626 bp, Homo sapiens
attaattctctttaaaaacagatgattatatggtcaaaaaataataaagaaacggctgactcaattactatttttttgttttttttccagaatggatttttaaaaactgaattgactaaactgaacagctaattctggaaacaaatggacacaaacatagtgttgaatggaatggaggatattggaaagggtttggaagggcaccaagaataacttaactaagctcccgaaggaccggaaaggaagaatgtgtttcagtatttattgtaagaacgtattttgatacaaagttgcttgtatttcttaatggctgtgcccaggagaaaacctctcgtattataacagcacatggtctttctttttcaaataaaatgtaagtaggtaaagagaatgaaagacttgttcaacaaaagaaatatatatgctgccggatgtgtctagttgagtctctctctatatcttatacatgtattttactaatytatccttaactgttttttaaagcattttggtctacattttaagtcaactctcagaaaagttgattatgtgaacctcttatctaaaaagctccgttatctgaattaggccatgtttctgtacatgcatcatttacgttaagaact

SEQ ID NO: 453010 - DNA, 473 bp, Homo sapiens
ttgctttccagtttccaacactactgacatagaaatgatagttatgttgtatttagcccaaaagtaaggtaagtttaaattttgccagaaacataattttaaaacttgacatataggtttttatgcacatatataaatatatttttacacgtatgtatatataaatacatatgtagtctattgaaatgtgtgcttaatattataaaactaaaggttttattctaatttttagagttttattagtaaataaaaacaaaatgataggtgagaaattaatattgggtgctgtattgaatttctcaacatatgaaaaaaaatttaaaaacaggaggagcccactaagttactaaactgttgaagaattgtttttytcgcatgttcctctgttttatcttcccatactcaattccttttacaaaactgtgtttgcaccgtcaatattcctaaaaaaatagttttgaggctacatactg

SEQ ID NO: 453011 - DNA, 579 bp, Homo sapiens
ggagagagagtcctatcactctctattgaggagaaaactgcaaaaatttgagaaataggacaactttttctggaaaagcttgtgttgacaacaacagtaacaaaaatgccatgagaggtaggaggcttgcattaatcaggattcttctgattgcatttaacacacattaaatcggggctgctttcggcaaaaggctgaatttattgaatcataaaatacttcaaggggcacaaggcctccagaacaaatggatgtgggattcagaaattccttcctgtctctccacttggtctctgcatctgtctctgttgtggtaaaacacatggtccccagctgacctgaggttttgcagcagcctctgggcattttcctgtgagactctcaccttgacacagcaagcaggagtgattacagagcagtttccaaattctcttagagacagtggtaaaaatgagtttcccrtggccttctctgaggttcgctccttccagcagttcttgtaaacacataattttgagaaataagtgtagttccacctgaaaaaaccagagttgtttctgttttcctgagcaaaccctg

SEQ ID NO: 453012 - DNA, 579 bp, Homo sapiens
ggagagagagtcctatcactctctattgaggagaaaactgcaaaaatttgagaaataggacaactttttctggaaaagcttgtgttgacaacaacagtaacaaaaatgccatgagaggtaggaggcttgcattaatcaggattcttctgattgcatttaacacacattaaatcggggctgctttcggcaaaaggctgaatttattgaatcataaaatacttcaaggggcacaaggcctccagaacaaatggatgtgggattcagaaattccttcctgtctctccacttggtctctgcatctgtctctgttgtggtaaaacacatggtccccagctgacctgaggttttgcagcagcctctgggcattttcctgtgagactctcaccttgacacagcaagcaggagtgattacagagcagtttccaaattctcttagagacagtggtaaaaatgagtttcccatggccttctctgaggttcgctccttccagcagttcttgtaaacacataattttgagaaataagygtagttccacctgaaaaaaccagagttgtttctgttttcctgagcaaaccctg

SEQ ID NO: 453013 - DNA, 524 bp, Homo sapiens
cattgtatttttttcctttgaaaatcacatgcaattaaacagacacatagatcaatagaacagaatagagaaccctgaaatgaatccacatatatacagccaactgatttttgacaaagatatcaggaacattcattaggggaaggacagtctcctcaataaatggaaaactgggtatccttaagcagaagaataaaactagatccttctatttcaccatacacamaaaaaaaaacctcaaaatgaattatagacttaaatctgaaacccaaaactataaaactactggaagaaaacaaagggggaaatgcttcaggacactgatctggtaaaatattttacgaatgagacctcaaaagcataagaaacaaaagcacaaatagacaaatgggattatatcaaaccaaaaatctttctgcataacaaaagaaataatcagtagtaaaaaaggcaatctctaaaataggacaaagtgtttgcaaactattcctctgacaaggaattaatatgaagagtgtacaagg

SEQ ID NO: 453014 - DNA, 557 bp, Homo sapiens
ttaattacacaaatcttatatacaaagttgacattattttttctttcttttctgaaagttatttaatcttcattataagttcccacttcrtttaagtagaagggaagtttagatttatcctttaatttttatcttggttttatcttgttaaaaagcctcgtttggttaaattttcagctcattctatgttcaacttctagataagaagattttacattttctcatattcaaggtgaaacaagaaaaacctgattatatttcctggcaacaaaataaaggtaactagtctcagctctctcctttttggctggtccttgctgtagaatggatgtcaggttgattggtctctgtactgtcatcaactgagattaatgcattcatccatctcttgctgtggcttcgaaaccactgctgctgaaagtcgaccaaatccaatccaatccccaatctctgccaattgaatgatcctttaaaagctgcatgtgcctcatgagagcacacaaaatcttcttgatttcctgaatgctaagaacaagttgtggggtgattccatcacc

SEQ ID NO: 453015 - DNA, 509 bp, Homo sapiens
caaagcatcatctgtatttacagctgctcctcattgctcatattaccacctgagctccatcccatgtcagaycagcagtggcattagcttctcacaggagcatgagccctgttgtgaactgtgtatgtgaggggtctaggatgtgcactctttatgagaatcaaatgcctgatgatttgaagtgacactagtgctggggagtggtggcaaatccagattaacattagtagagtggtttggctgcacagagaccataataaatcaatcgcttgcagactcatccaaactctatcaatgagtggagagtgacaattgagctgcatcttgtggcaggctttatagtggcaagtgagctgatgtacttcgattgtacagctgcatctggtggccttaaaagtttgtttgagacaacttcaaatctccatatgttctgggttaaagtcaaggtggaatattctgagactgacacaaaagcactgaaaagcctgcttccattactaacatcctgt

SEQ ID NO: 453016 - DNA, 509 bp, Homo sapiens
caaagcatcatctgtatttacagctgctcctcattgctcatattaccacctgagctccatcccatgtcagatcagcagtggcattagcttctcacaggagcatgagccctgttgtgaactgtgtatgtgaggggtctaggatgtgcactctttatgagaatcaaatgcctgatgatttgaagtgacactagtgctggggagtggtggcaaatccagattaacattagtagagtggtttgrctgcacagagaccataataaatcaatcgcttgcagactcatccaaactctatcaatgagtggagagtgacaattgagctgcatcttgtggcaggctttatagtggcaagtgagctgatgtacttcgattgtacagctgcatctggtggccttaaaagtttgtttgagacaacttcaaatctccatatgttctgggttaaagtcaaggtggaatattctgagactgacacaaaagcactgaaaagcctgcttccattactaacatcctgt

SEQ ID NO: 453017 - DNA, 509 bp, Homo sapiens
caaagcatcatctgtatttacagctgctcctcattgctcatattaccacctgagctccatcccatgtcagatcagcagtggcattagcttctcacaggagcatgagccctgttgtgaactgtgtatgtgaggggtctaggatgtgcactctttatgagaatcaaatgcctgatgatttgaagtgacactagtgctggggagtggtggcaaatccagattaacattagtagagtggtttggctgcacagagaccataataaatcaatcgcttgcagactcatccaaactctatcaatgagtggagagtgacaattgagmtgcatcttgtggcaggctttatagtggcaagtgagctgatgtacttcgattgtacagctgcatctggtggccttaaaagtttgtttgagacaacttcaaatctccatatgttctgggttaaagtcaaggtggaatattctgagactgacacaaaagcactgaaaagcctgcttccattactaacatcctgt

SEQ ID NO: 453018 - DNA, 573 bp, Homo sapiens
tttccgattgagtgaacataaactgccttgtgtagagttttctgagaattttttcattgatcaaatatacccatatattgtctactataaaacagtaagttaattaagagtttctcttccattggtaaaaaaaaaatgtcgtttcagacttttactygggttttagagcaaattaaaaaatagacataaaatggcatagatcagagattttcaaagttgaatcatcgacataatcaaaagtaacaatagtttaaaatgacattttttaggggaaaacttactgtaacaaaatatttgtgaagaaaacaacatcaaaatcaaagtgaaaatggaaagaagagtctcggataaagtatttgaagaactatgtaaaaggtgatattcattattaacatttcacagatatttaacatataattgagctactatgaattaatgagaaagagaccaaaattaaaaatctgcaatgtatatgaacaggaaatttaaaagaaatgtaaatggtaagtaaaagttaacacgacagtatgttcaaactcattgatcctcaatggaaagtaataaaataacaat

SEQ ID NO: 453019 - DNA, 573 bp, Homo sapiens
tttccgattgagtgaacataaactgccttgtgtagagttttctgagaattttttcattgatcaaatatacccatatattgtctactataaaacagtaagttaattaagagtttctcttccattggtaaaaaaaaaatgtcgtttcagacttttacttgggttttagagcaaattaaaaaatagacataaaatggcatagatcagagattttcaaagttgaatcatcgacataatcaaaagtaacaatagtttaaaatgacattttttaggggaaaacttactgtaacaaaatatttgtgaagaaaacaacatcaaaatcaaagtgaaaatggaaagaagagtctcggataaagtatttgaagaactatgtaaaaggtgatattcattattaacatttcacagatatttaacatataattgagctactatgaattaatgagaaagagaccaaaattaaaaatctgcaatgtatatgaacaggaaatttaaargaaatgtaaatggtaagtaaaagttaacacgacagtatgttcaaactcattgatcctcaatggaaagtaataaaataacaat

SEQ ID NO: 453020 - DNA, 550 bp, Homo sapiens
gaaatgaataaattactggatacatacaacctaccaagattgaaccatgaaggaatgcacacccataatagacaagtaacaagtaatgtgactgaagtcataatgaaaattatcctggacaatgacaacaaaaaaccccatagcttcactctaaatatgaacaaacacttacagaagaactaaaaccaattctactcaaactattttgatgagtaaaaaggtgagaatacctccaaactcattctgcaaagccagtattaccttgagactcaaaccaggcaaagacacacacaaaaagaaaattacaggccaatatacctgatgaacattgawgcaaaaattctcaacaacatacaagcaaactcaactcagcagcacgtgaaaaagatcattcatcacgaccgagtgggatttatctcagggatgcaaggatggtataacatatacaaatgaatcaatgtgatgtaccatgtcaacagaagaaaggacaaaaaccacatgatcatttaaattgatgctgaaaaagcatttgctgaaattcaacattttc

SEQ ID NO: 453021 - DNA, 584 bp, Homo sapiens
cacaccactactaaggtctcttcctctgctatctccaagttagggaaggaacataaaccctgagatttccccagagctgcagtgggcagcccaagagtgccaagctgcgatctgcagccagaactcaagggggagaaaagcccacactttcagagcactgagagggaacaaggctgcaaaggagaggaaacatggggaagccacacaaccgagcaaggatctaccaactgacaaatacacctaagcaccacctactggatcatacctcaaagcctcagcaccaaaaatatcttgctaaaaaccccacttgctaaaagaagtcagcttcaaataaaaacgctgcagaaaacctcgaccctgtgagaacatttagaaaagacatctattgactrtacttaatctacactgcacttaaaggaacacccacatgcagagatgagaaaaaaccaatgcaaagcctctcgtaactcaagtggccagagtgtcatatgtcctacaagtcaccacaccagtactcctccaacaagagttcttaaccaggctgagctggctggtttttgtattgtccatgaaaacttccccaa

SEQ ID NO: 453022 - DNA, 583 bp, Homo sapiens
ttttttttcttttaaatttatggacaccatttagggagatttcaattcccattaataatatgtgcaattgatctacatttaagagaatttaatcatgtcttggtgacaaatttagcttaaagcagagcttcacttaggacttccaagtaaatttccattgaaaaggtcaatttctaacatttgtcagttaaagcccataccagacaaattaaattctcctccacttgtctgctgcgtgaacactttcaatgctgaatatcaccagcggttgtcaattagkaaaactgccaccctgcccaaaaaaaatcataattgagaagtttttaaaagaagacttgaatgtttatccaatagttagaattttttttcatactaaaaagtgatctatctcatagtggcaatgaaaaaacaaaataaaacactgtcttactggattttgagtaaaatcaattcaatggtataagtatgtgaacatctattactaggaaagaagtcagggcagggcctaaacttttactgaagcttgagtttcactgggatacaaaagcacctgagcaattagaaattaacatgtaatcatcaa

SEQ ID NO: 453023 - DNA, 583 bp, Homo sapiens
ttttttttcttttaaatttatggacaccatttagggagatttcaattcccattaataatatgtgcaattgatctacatttaagagaatttaatcatgtcttggtgacaaatttagcttaaagcagagcttcacttaggacttccaagtaaatttccattgaaaaggtcaatttctaacatttgtcagttaaagcccataccagacaaattaaattctcctccacttgtctgctgcgtgaacactttcaatgctgaatatcaccagcggttgtcaattaggaaaactgccaccctgcccaaaaaaaatcataattgagaagtttttaaaagaagacttgaatgtttatccaatagttagaattttttttcatactaaaaagtgatctatctcatagtggcaatgaaaaaacaaaataaaacactgtcttactggattttgagtaaaatcaattcaatggtataagtatgtgaacatctattactaggaaagaagtcagggcagggcctaaacytttactgaagcttgagtttcactgggatacaaaagcacctgagcaattagaaattaacatgtaatcatcaa

SEQ ID NO: 453024 - DNA, 598 bp, Homo sapiens
gatgagttgctggcttatttctctttacatcctacagtgcatagcacattgcctagcatacagtttgttgactgttaaattaaatttgctaaaaatgtgaactagaagaaaaattaagagagattgtaaaaatcgatacaaagccaacaaacaactaaatttcatcataaaaataaaagatataagttcagttccttaatttgggactgcatacagcagatcaaaattgtttaggtgtaattgttgatgaagtagccagccaattaagggaagataggaatgtttgggtgtagttctaaatttgtgaggttgacagtattggttgtgtggtactgtggccatcagccacccacagctatatcaatttaaattaattaaaattaaatgaaatttaaaatccaattactcagtaacactagccatatttcaaacattcaaaagccataaattgttaatgtctaaagtacagaagagcttagaagaaaatttctatcatcaagttatgctggacacttcagcaaraaaaaagaatgaagagaaaacattaattaagcttttactattctgtgctaagcacctgaaatgcctaatttcatat

SEQ ID NO: 453025 - DNA, 588 bp, Homo sapiens
  misc_feature (1)...(588): n = A,T,C or G
nnnnnnnnnnnnnnnnnnnnnnnnnnnnnnnngttccacaataggccatctacaatctgaggagcaaggagagccagtctgagtcccaaaactgaagaagttggagtccygtgtttgatggcaggaagcatgcagcatgnggagaaagatgtaggctgggaggctaggccagtctagtcttttcatgttttttcgcctgctttatattctagccatgctggcagctgtttagatggtgcccacccagattaagggtgggtctgcctttcccagcccactgactcaaatgttaatctcctttggcaacaccctcacagacacacccaggatcaatactgtgcatctttcaacccaatcaagttgacactcagtattaaccatcacagtaagaataggtgagctctagaaaagtttgtcacatgagcagccagcttttcaccagagctgagggaccagtggtggtggtagtggtggtggtggcagaaggcatgtgtctctggaccaagctgcatctaaccctccagactaccctggcctgctccaaggagcctgcagagaaaagctaatgaagataagaaagacagaaag

SEQ ID NO: 453026 - DNA, 588 bp, Homo sapiens
  misc_feature (1)...(588): n = A,T,C or G
nnnnnnnnnnnnnnnnnnnnnnnnnnnnnnnngttccacaataggccatctacaatctgaggagcaaggagagccagtctgagtcccaaaactgaagaagttggagtcccgtgtttgakggcaggaagcatgcagcatgnggagaaagatgtaggctgggaggctaggccagtctagtcttttcatgttttttcgcctgctttatattctagccatgctggcagctgtttagatggtgcccacccagattaagggtgggtctgcctttcccagcccactgactcaaatgttaatctcctttggcaacaccctcacagacacacccaggatcaatactgtgcatctttcaacccaatcaagttgacactcagtattaaccatcacagtaagaataggtgagctctagaaaagtttgtcacatgagcagccagcttttcaccagagctgagggaccagtggtggtggtagtggtggtggtggcagaaggcatgtgtctctggaccaagctgcatctaaccctccagactaccctggcctgctccaaggagcctgcagagaaaagctaatgaagataagaaagacagaaag

SEQ ID NO: 453027 - DNA, 588 bp, Homo sapiens
  misc_feature (1)...(588): n = A,T,C or G
nnnnnnnnnnnnnnnnnnnnnnnnnnnnnnnngttccacaataggccatctacaatctgaggagcaaggagagccagtctgagtcccaaaactgaagaagttggagtcccgtgtttgatggcaggaagcatgcagcatgnggagaaagatgtaggctgggaggctaggccastctagtcttttcatgttttttcgcctgctttatattctagccatgctggcagctgtttagatggtgcccacccagattaagggtgggtctgcctttcccagcccactgactcaaatgttaatctcctttggcaacaccctcacagacacacccaggatcaatactgtgcatctttcaacccaatcaagttgacactcagtattaaccatcacagtaagaataggtgagctctagaaaagtttgtcacatgagcagccagcttttcaccagagctgagggaccagtggtggtggtagtggtggtggtggcagaaggcatgtgtctctggaccaagctgcatctaaccctccagactaccctggcctgctccaaggagcctgcagagaaaagctaatgaagataagaaagacagaaag

SEQ ID NO: 453028 - DNA, 619 bp, Homo sapiens
tgatttttctgggatattatctgtgtctatctaacactgatgtagtaaaaaataaattaattaatgataaatcaggttcaggcagtaaattctratcaatgcatacattccaaaacttactttttccttcctcctatcttttcttgtcccccatatctgctaatttgcctggttctcagaggtggtttactgctttacttcatgtggcattaagtacttttttttttttttatttttttgagatggagtcttgctctgtcacccaggctggagtgcagtggcacgatctcggctcactgcaagctctgcctcccagggtcacgccattctcctgcctgagactcccgagtagctgggactacaggcgcccaccaacacgcctggctaatttttttgtatttttagtagagacatggtttcacagtcttagccaggatggtcttgatctcctgacctcgggatccgcccgcctcggcctcccaaagtgctgggattacaggcatgagccaccatgccctgcctagtacaaagtatttttttgatagaaagaagcttcctgcttaattaacatatttgttattcttcatttgtaagtgttatgtctatcacatataagaag

SEQ ID NO: 453029 - DNA, 619 bp, Homo sapiens
tgatttttctgggatattatctgtgtctatctaacactgatgtagtaaaaaataaattaattaatgataaatcaggttcaggcagtaaattctgatcaatgcatacattccaaaacttactttttccttcctcctatcttttcttgtcccccatatctgctaatttgcctggttctcagaggtggtttactgctttacttcatgtggcattaagtacttttttttttttttatttttttgagatggagtcttgctctgtcacccaggctggagtgcagtggcacgatctcggctcactgcaagctctgcctcccagggtcacgccattctcctgcctgagactcccgagtagctgggactacaggcgcccaccaacacgccyggctaatttttttgtatttttagtagagacatggtttcacagtcttagccaggatggtcttgatctcctgacctcgggatccgcccgcctcggcctcccaaagtgctgggattacaggcatgagccaccatgccctgcctagtacaaagtatttttttgatagaaagaagcttcctgcttaattaacatatttgttattcttcatttgtaagtgttatgtctatcacatataagaag

SEQ ID NO: 453030 - DNA, 578 bp, Homo sapiens
ttaaagccccaaatttggagagatacaggtaaagctctcttgaagcccatacattcatggggctcaaagtgaggggaagactcctcctacccctatgtgatggggaaagaaaatagcccagaactctgatgcctttttctcaagttctcttcactcagctccttacatacaagacctacagaatgcctctgcttccctggtccttatcaggctccactgatgcaacaggaaccaaattcctgamatagggaaaatggacttcagagcataatttcatctagatatatcagacttacaatgttctctcactttctcctctcttaattccatttcaatattctttatctgactcctctatttgattgaagagcgcaaatcgtattaaacagaatcattatataatcatttaataacaaatgttattaaaaagaatcatctgcttaataactcagtgcaagggacacagggagtcgggaggaaggagaaagtctatctcacacatgccttggaaccatgacatccactgcattgctacccctatagaaactataaggactcaataaaaacaataggaaact

SEQ ID NO: 453031 - DNA, 578 bp, Homo sapiens
ttaaagccccaaatttggagagatacaggtaaagctctcttgaagcccatacattcatggggctcaaagtgaggggaagactcctcctacccctatgtgatggggaaagaaaatagcccagaactctgatgcctttttctcaagttctcttcactcagctccttacatacaagacctacagaatgcctctgcttccctggtccttatcaggctccactgatgcaacaggaaccaaattcctgacatagggaaaatggacttcagagcataatttcatctagatatatcagacttacaatgttctctcactttctcctctcttaattccatttcaatattctttatctgactcctctatttgattgaagagcgcaaatcrtattaaacagaatcattatataatcatttaataacaaatgttattaaaaagaatcatctgcttaataactcagtgcaagggacacagggagtcgggaggaaggagaaagtctatctcacacatgccttggaaccatgacatccactgcattgctacccctatagaaactataaggactcaataaaaacaataggaaact

SEQ ID NO: 453032 - DNA, 617 bp, Homo sapiens
catctactgtttgtggatggcagaagggaggcactacaattatggaatagaacatgtccatgattaatagcatctttttgtggggaggtgaaaaatgtttaagttagccaaaagcagtggcccacgcctgtaatcccagcatttcggaaggcagaggcgggcggatcacctgcggtcaggggttcaagaccagcctggccaacatggcaaaagcccgtctctactacaaatacaaaaattagccargtgtcgtggcacgcgcctgtagtcccaactacctgggaggctgaggcaggagaatcacttgaacctgggaggcagaggttgcagtgagctgagatcatgtcactgcattccagcctgggtgacacagtgagactccgtctcaggaaaaaaaaaaatgtttaagttcagtgacaggcagtagcccactagtccaagctgccttaaagctacatcagtccaaatttaaagcaatataaccccctcttcactcatcttgcaggcaatgatatatgttagaatttattcccaaatttgttttttaaaaaaatacctgcaattttttaaaaaaatgttcttctttcaagggctctttgaatagcactttgtatcta

SEQ ID NO: 453033 - DNA, 521 bp, Homo sapiens
atccacacttcaagaaaataaccacaaaatcagctctcttgacatcagtggtatttctcaacaccccaaaagtattttgtatgcaaagggaacaaaaatgttgccttctttaaaccgtttcaaacaacacgatcttttatggatctggcctagtatcttttatacagctagtcaccacaattgcttataggcaaggatcctcatcaatcagaataattcctaatcaaggggctaccatgaagtccaattataaaagctccaattctgttttgtgactatacaaaagccattttcagacccaggttcatattcatgataagttgaataagttcatgaagatacygtcattttaaaagttgtctgatcttgattcaagagctgccttgatcatatgaaagacagttcatagatggtttggctttctttgaatgtgtcatgaatagggtgaacatacattacatgttgcctttgaaagtcttggcttattcctatagcaccatcataaatattattactgacat

SEQ ID NO: 453034 - DNA, 586 bp, Homo sapiens
tcctgtttcaaatggacgtacttacccactgcttattctcccattgtatcttggaagtaactaagttgtcttttattttacaggctcatagacagacaggactaatcttgtctcagatgagactttggactatgggcttttgagttaatgctggaatgagttaagacttgggggctgttggaaaggcatgactggattttgaaatgtgagaaggacatgagatttggaaggggccggggtggaatgatgtggtttggatctgtgtcctcactcaaatctcatgttgaaatgatgtaatccccagtgctggaggtggagcctagtgggaggtaattggatcatgggaggcagtttctaatggcatagcaacatccccatagtgctgttcttgtgatgaagtcctcacaagatctggttgtttaaaatattgtgcccctgctccagggatctgtggaatgttgagcttgagagtgatgatttaggggatctggtggaraaaatttctaagcagcaaagtgctcaagatgtgacttggctgcttataacagcttatgtccatatgtgtgagcaaaatggattgagcaaa

SEQ ID NO: 453035 - DNA, 527 bp, Homo sapiens
atttgaaaagttagcacgagtacttccctgtaatggcaataaagcagcataaggaagggactctcttttctaatttgcccaaagtcatcatttgggcttgtggcaggyaaatagctctgcccttttttgagtacttagtatgggtcctttatgcatattacctcttcagatccttaaaacaacccgacaaagtcagccttgttccagttttcatcaaagaagagaggcttagaaaggcttagaggttggtgacttacccaaggtcatgcatctaggaagtggctgaggtgaaatgtgaacgaggattcagccatctctcaaacctgtgcttataaccactttggtttctaccttcatccttgaaaaagatggaggggttcttagatccatcctttggcctgtaagtcccctctgcaaggctaggggttcttgtattgagcagtgttagaatcacccggagggtttgttaaagcagatggttgggttcccaccggcagagtttccaggtagagtctgaaaaatgtgca

SEQ ID NO: 453036 - DNA, 559 bp, Homo sapiens
gaaatcagtggttagggagaggttaaaaataagaaagggaatcatgacctacataatgcaaggcatctgaatgtgatgatttcctcctttaggcttggttctggtgtgcatttccagggctaagctgactggccaggaagcagggagcaaagggggttggacacagccagcaaatcacgcagcattaactgggctgygaggccggatcctgagtgggcaagcaggtggcagctgaagtattgtgaatcgagagcctgaaattcttcaggatcttctaagattatccatttgattgggtcatggaattaatgtggataagcctagttgatcaacctgagtagagggtgctgtcacctgcacaacacctaccacaacttcctagaacctagtggccgagcttgttaagtgtccccaaatgcccattctctccttccttttagtcaaggagccctgaattttagggaagaacatgatcatttagctcaggaccacagttcccagactccctgcagctggatgtggatgtctactcagttcttgctaaaacgatgtgtgcaat

SEQ ID NO: 453037 - DNA, 574 bp, Homo sapiens
ctgtggttagggcttgttctcgttcctcctaggaaaccatttaatccagactctgaaggatcaggggatgggaggaccttcttgctggtaggcagagtggctggcctgtaaatggcattattggagaggcatccccagctgagccccaaacacttcctctgctcccctctgtctttccctgttagcagcacttccattgagctgtcttcactcaccctcagaacgggtttttattgagttcctacactgtgccaagcactttacctacattatctcgtttaaaccttgcaatgactctgcccaacaggttttattgtctttctactctatcattcacatctcagtaggattaattaaccaaattaatcctataagcaaatctcagttgcaccgtgaatgtctcaggctaaagaacaggttttaactactgtggaggaagaccggcccctttaaggaagaagtgactgcaaccagggttgaagcaggttgtaaartgttgaaatctgctgagctccggaatggaaatttctttcaatgtagattaggccttgattcagggtacggagagagactg

SEQ ID NO: 453038 - DNA, 593 bp, Homo sapiens
  misc_feature (1)...(593): n = A,T,C or G
tcatgaggctgctgcccactttctttccttgccccctcctaattttttcacagctaactagaggaagaaagatgtggaagaaagaaagcaaggattggttccagagagtcccaccatgcacgaccttccttcttgggcaagttatctccacctccttgtgactcagtttctttatctgtgaaaagtcagtgctccaagnnnnnnnnnnnnnnnnnnnnnnnnnnnnnnnnnnnnnnnnnnnnnnnnnnnnnnnnnnnnnnnnnnnnnnnnnnnnnnnnnnnnnnnnnnnnnnnnnnnnctctccccgggctcacactgctccagtcaccttaacttttgtctattcctgaaacatgccaagctcatttctgcctcaggggttttgcacatgtggttccctctgccagatcttggcatgactcattcccctacaggcagttcatgaccagtgcagcctcctcagcacagcaaggccttccctgatgaccccaacaaaaccagcacctccctccatttttttctaatctctttacattatttctctttgttttacttatmacttaagacctgaaattatgttacttcatctactt

SEQ ID NO: 453039 - DNA, 606 bp, Homo sapiens
actcctgagactctgtcaacacggcccttactagattttgggcacctgagccagtaatcatctcttcatctcagccagtttgcactgtggttcygttactcacaaccaaagaattctgttgtgataaatgaatccatgtacaccaaatgcctggcacggtgcctggatcgaagcagatgcgtgattgttgttagctcccctcacagcactcctatagtctcatccttctttgcctcctctcctcccatctcagatgagagtgtccctcctcccttcccaggtcacctccacatcccatttctttccccctcagaaacttgcttctgaaattttctcatctcttttccatttttttattttattttttgagacagggtctcactgtgtcacccaggctggactgcagtggctggatctcagctcactgcagtcttgacctcctgggctcaagtgatcctcccgccttggcctcccaagtagctgggaccaccatgcccagctaatttttatttttatttttgtagaggttggtcttgagcttctgacctcaaataagcctcccatctcagcctccaaaaattctggcattacagacatgagccactg

SEQ ID NO: 453040 - DNA, 555 bp, Homo sapiens
ggtaccgtgggtgccctgggcccttcccttgaaaccattcagttctcaaggccctggcgctctggaactataatgggagtggcarcctcaaaaatctccaaaatgcctttggggtcattctttctttatcctgatgaatagcatctggctccctttcatctgtgctaatctccttatcaaacattcgcttggctaccccgttggtattctctcctgaacatgcttttttattctgtacatagcaaagctgaaaattttccaaaggcttaaattctgcttcccttttgattataaattccatctttaattcatttctctcttcttatattttactataagtattcaagataaatcatccagcaccctgaacacttagatttcttctgccacatatcctagttcatggctcctaagttctgccttctacaaagcaggagggcatgaatacaattcagctaaattcttctccactttgtaacaagaatggtcttttctccagtttccaatgacacgtttcctcatttccatctgagacctcatcaggattgcctttac

SEQ ID NO: 453041 - DNA, 555 bp, Homo sapiens
ggtaccgtgggtgccctgggcccttcccttgaaaccattcagttctcaaggccctggcgctctggaactataatgggagtggcaacctcaaaaatctccaaaatgcctttggggtcattctttctttatcctgatgaatagcatctggctccctttcatctgtgctaatctccttatcaaacattcgcttggctaccccgttggtattctctcctgaacatgcttttttattctgtacatagcaaagctgaaaattttccaaaggcttaaattctgcttcccttttgattataaattccatctttaattcatttctctcttcttatattttactataagtattcaagataaatcatccagcaccctgaacacttaratttcttctgccacatatcctagttcatggctcctaagttctgccttctacaaagcaggagggcatgaatacaattcagctaaattcttctccactttgtaacaagaatggtcttttctccagtttccaatgacacgtttcctcatttccatctgagacctcatcaggattgcctttac

SEQ ID NO: 453042 - DNA, 606 bp, Homo sapiens
actcctgagactctgtcaacacggcccttactagattttgggcacctgagccagtaatcatctcttcatctcagccagtttgcactgtggttccgttactcacaaccaaagaattctgttgtgataaatgaatccatgtacaccaaatgcctggcacggtgcctggatcgaagcagatgcgtgattgttgttagctcccctcacagcactcctatagtctcatccttctttgcctcctctcctcccatctcagakgagagtgtccctcctcccttcccaggtcacctccacatcccatttctttccccctcagaaacttgcttctgaaattttctcatctcttttccatttttttattttattttttgagacagggtctcactgtgtcacccaggctggactgcagtggctggatctcagctcactgcagtcttgacctcctgggctcaagtgatcctcccgccttggcctcccaagtagctgggaccaccatgcccagctaatttttatttttatttttgtagaggttggtcttgagcttctgacctcaaataagcctcccatctcagcctccaaaaattctggcattacagacatgagccactg

SEQ ID NO: 453043 - DNA, 606 bp, Homo sapiens
actcctgagactctgtcaacacggcccttactagattttgggcacctgagccagtaatcatctcttcatctcagccagtttgcactgtggttccgttactcacaaccaaagaattctgttgtgataaatgaatccatgtacaccaaatgcctggcacggtgcctggatcgaagcagatgcgtgattgttgttagctcccctcacagcactcctatagtctcatccttctttgcctcctctcctcccatctcagatgagagtgtccctcctcccttcccaggtcacctccacatcccatttctttccccctcagaaacttgcttctgaaattttctcatctcttttccatttttttattttattttttgagacagggtctcactgtgtcacccaggctggactgcagtggctggatctcagctcactgcagtcttgacctcctgggctcaagtgatcctcccgccttggcctcccaagtagctgggaccaccatgcccrgctaatttttatttttatttttgtagaggttggtcttgagcttctgacctcaaataagcctcccatctcagcctccaaaaattctggcattacagacatgagccactg

SEQ ID NO: 453044 - DNA, 465 bp, Homo sapiens
atcgcatggccactgaagttagtggttccttctctaggctcccagggccccagagttttgtcatggaactcatcattgttgattgtcattattcatttgctggtgagatttccaggggtacgggctatatggagtcactatgatgactcaacatagaatcgacagcccagatgctggtgggatgataagaaaggctattaatgtgcycagtactgggctaacctctccatattcattgtatcattgattactcatgacaatccatgagacagtcattactattcttcccatgtcatatttggaacaactgaggcttagagagctgaaacaatatgtccaactcccacagctagaagaggcagacctggggttcaaactcaggtctggcttattccagagcccatgcttttaactgctatatcacactccttctcctcgacgtgttctctgaaatcctgtagtggt

SEQ ID NO: 453045 - DNA, 544 bp, Homo sapiens
catcccggcatcccaggcatccctgattatcctggtatgaacagataatcacaacacaagctataaatgcaggtagcctggagaaaggagtaaataattagtcaaacagagggagtgctagggaaagatttcaaagcagtggggatacmtgaacagggttttgaaagttaaataagagtcttccaggagacaaggaggtagaaggacaccagacatacagagcagcatacacgaagggagggagggaaggagagagagagagagagctgctgggtggtagggaaactccaagtgattagaaatttcacccttcctgtctctccttccgcagctgactctgctaggaaatgtggaaagctgcagctgcagacagctggctgtgcctgcttcactggagttctcagctctcttacacctgtctgtttagaaaggagcagacaggctgtgaagctctgcaggattcttttcagtgctggggcagaaggagaaatggtggggacagccactctgggcatcagaaccgaatacctgctccccactcctc

SEQ ID NO: 453046 - DNA, 554 bp, Homo sapiens
  misc_feature (1)...(554): n = A,T,C or G
aagcatgcttccttccttttcattaagccccaccctggacttctccctggagctctctctgttgcttcctatctcaccacgttctggcagagggggccagtgaccgtctcttntggctcatttactccttaatccactgctatttggctcaattcacgatctaaaaatttttactttgatatattgtgcataggaaaaaacatttatgatatacatatttacagaataataagataaatatccacatagctaccacttagcttaagagctagaacatccctaaaacttttatgctgccccacagctcaccttctctcccacccagaggtaatttgatcactgtcttgatttttgtgtgtgttattttctcttttttcccatgtggaatttattycataaggagccacagaggagaccctgggtaggtgggagaggttttactgtgtccccctttttataacagttttctcttttgtgtgtgtgtgtgtgtgtgtttgagacagggtcttgcactctttcatccaagctggagtgcagtggtgcaatcatagctc

SEQ ID NO: 453047 - DNA, 581 bp, Homo sapiens
actcctgcgccacagaaccttgggcatctctttatggctaagtggtgtctaaaaatgggctttggatcattaaatcacaaaatcacaccttcttcccatggcaggcgttctcattggttaccggctaaagaaaattaccatgcaagcagggagatgctgcctgtcycaatattatagatctttcctttatttgctttcgatcagtactttttttggcctacttcctcagttttatgttttcctaaatatccatttcttctgtcctgtcattgatggtattttagcagtaggctagctgttactagcaacgttccaaactctgtttgaggagggggagataagcacaccattaccccacaaggtagggcatcagattcagtgcttctgcagttaacagaataaaagggacagtgagccaacagctccaatgccatctttgcttcatcatttaaacaaaccactattttagataaggaaatttatgttggattctcaggacagccattgattattattcattctgacacagtctcgttaatatagtcatccgtgcatctttgtcaggacatctgtgatggagt

SEQ ID NO: 453048 - DNA, 581 bp, Homo sapiens
actcctgcgccacagaaccttgggcatctctttatggctaagtggtgtctaaaaatgggctttggatcattaaatcacaaaatcacaccttcttcccatggcaggcgttctcattggttaccggctaaagaaaattaccatgcaagcagggagatgctgcctgtctcaatattatagatctttcctttatttgctttcgatcagtactttttttggcctacttcctcagttttatgttttcctaaatatccatttcttctgtcctgtcattgatggtattttagcagtaggctagctgttactagcaacgttccaaactctgtttgaggagggggagataagcacaccattaccccacaaggtagggcrtcagattcagtgcttctgcagttaacagaataaaagggacagtgagccaacagctccaatgccatctttgcttcatcatttaaacaaaccactattttagataaggaaatttatgttggattctcaggacagccattgattattattcattctgacacagtctcgttaatatagtcatccgtgcatctttgtcaggacatctgtgatggagt

SEQ ID NO: 453049 - DNA, 581 bp, Homo sapiens
actcctgcgccacagaaccttgggcatctctttatggctaagtggtgtctaaaaatgggctttggatcattaaatcacaaaatcacaccttcttcccatggcaggcgttctcattggttaccggctaaagaaaattaccatgcaagcagggagatgctgcctgtctcaatattatagatctttcctttatttgctttcgatcagtactttttttggcctacttcctcagttttatgttttcctaaatatccatttcttctgtcctgtcattgatggtattttagcagtaggctagctgttactagcaacgttccaaactctgtttgaggagggggagataagcacaccattaccccacaaggtagggcatcagattcagtgcttctgcagttaacagaataaaagggacagtgagccaacagctccaatgccayctttgcttcatcatttaaacaaaccactattttagataaggaaatttatgttggattctcaggacagccattgattattattcattctgacacagtctcgttaatatagtcatccgtgcatctttgtcaggacatctgtgatggagt

SEQ ID NO: 453050 - DNA, 565 bp, Homo sapiens
tgtaaatcataatacactttgactaacgtggagaaattccttctaaaacagaagcagtcccatgtcctccactcccccagaaacacaccactcctgcatggcttattgtattctacatgtcccgtacttgccattcactygcataggttttattaacaatcatctttgacatttttattttttagtgttacttactttgattcactcagcgatattatatattttgttttccatgagagctttgtttattaataataaagattcttcaagaatatcaactttcttttactaacaagacttatgtttaaccattagacacatgatgtgtcataagatcatgggtgcttaatgggccagagttataatgactattggaatgcatggcggtgcatgcttatattttaaattattcagcttcagtttctgatatagtaaatatcaatagatacaatccacttaaacaaaagctctttggaatctgccatcattttttaatgtttttatctttttctcaccatgaagagagtttaattaaatgtagtactgttatagcatgaaatactat

SEQ ID NO: 453051 - DNA, 565 bp, Homo sapiens
tgtaaatcataatacactttgactaacgtggagaaattccttctaaaacagaagcagtcccatgtcctccactcccccagaaacacaccactcctgcatggcttattgtattctacatgtcccgtacttgccattcactcgcataggttttattaacaatcatctttgacatttttattttttagtgttacttactttgattcactcagcgatattatatattttgttttccatgagagctttgtttattaataataaagattcttcaagaatatcaactttcttttactaacaagacttatgtttaaccattagacacatgatgtgtcataagatcatgggtgcttaatgggccagagttataatgactaytggaatgcatggcggtgcatgcttatattttaaattattcagcttcagtttctgatatagtaaatatcaatagatacaatccacttaaacaaaagctctttggaatctgccatcattttttaatgtttttatctttttctcaccatgaagagagtttaattaaatgtagtactgttatagcatgaaatactat

SEQ ID NO: 453052 - DNA, 565 bp, Homo sapiens
tgtaaatcataatacactttgactaacgtggagaaattccttctaaaacagaagcagtcccatgtcctccactcccccagaaacacaccactcctgcatggcttattgtattctacatgtcccgtacttgccattcactcgcataggttttattaacaatcatctttgacatttttattttttagtgttacttactttgattcactcagcgatattatatattttgttttccatgagagctttgtttattaataataaagattcttcaagaatatcaactttcttttactaacaagacttatgtttaaccattagacacatgatgtgtcataagatcatgggtgcttaatgggccagagttataatgactattggaatgcatggcggtgcatgcttatattttaaattattcagcttcagtttctgrtatagtaaatatcaatagatacaatccacttaaacaaaagctctttggaatctgccatcattttttaatgtttttatctttttctcaccatgaagagagtttaattaaatgtagtactgttatagcatgaaatactat

SEQ ID NO: 453053 - DNA, 544 bp, Homo sapiens
accatacactcagagttagtatcaagctgaaccttagtgcttcactttaaaaataatgagtttagatttaggggtgcgtttcttytgtcaggacagcaacatgacagaaatatcctgaagaaaactaagaagataggttgaataaaacatgcagttaacatttcaaaggcaagattctgattcagatatctgtaactaaaatagaaaagtatgcatacaaccatgtgtacatgctgaggaggagaaaagtgatctttaaccagcagagcaaattgtgaccctgggcagataaatgtccaagctgatggtagaacgctatagtgtgtctttaatgtgacacatcagaatcatttataccattctactacaagtacctactatgtccttcaattggtcctagaatgtagaaagcacacagttgtcatgacagttcatttgaatgtttaattcatttctcatcagagaaagtgttctgaagtgattactttggatccacacttacagcaaaatagttcataaaaatgtttattttttttccatacct

SEQ ID NO: 453054 - DNA, 621 bp, Homo sapiens
gcgtttcttctgtcaggacagcaacatgacagaaatatcctgaagaaaactaagaagataggttgaataaaacatgcagttaacatttcaaaggcaagattctgattcagatatctgtaactaaaatagaaaagtatgcatacaaccatgtgtacatgctgaggaggagaaaagtgatctttaaccagcagagcaaattgtgaccctgggcagataaatgtccaagctgatggtagaacgctatagtgtgtctttaatgtgacacatcagaatcatttataccattctactacaagtacctactatgtccttcaattggtcctagaatgtagraagcacacagttgtcatgacagttcatttgaatgtttaattcatttctcatcagagaaagtgttctgaagtgattactttggatccacacttacagcaaaatagttcataaaaatgtttattttttttccatacctatttgggcttactgataggtctacatttcttatatcctctagtttggccatcttaaatttttttatccactcatgcaagaaggtatataaaacatttctaaaaataatgtataagaagctttcaacattgaaatattaataaaaaatgcatt

SEQ ID NO: 453055 - DNA, 612 bp, Homo sapiens
atgtttttaaataaacattctgtcacatttttaaataaaatacagttcctaccttcttgttcctttattgtactttttcctctttgaccatcagctccagttaagygactatcatatttctgtggaacattctcaaaggtagtctgttgaaattataatgaataatgagtttcaatgaaaaaacaatgaatttctcaatatttcctaatcatgttctgaatttcctgatttaaaagcaatgagacctagaaataaggaaagcatgtattgaaaaccaaaatatttcaacagaggaactcatatatgctctccagatcaagcaaaacttttatctccatatggctattgactctgtaaactgaacatagaaagccaaaggaaacactgtgacagacacaatattagctcatgtgtatatttcagcgaggaactaacttcaaatacctaactctactttgtgttcactaccaacaataagagggcattaaaaaaaaccaacacacttggtataatacttacaacattcatatttgaaatatttctaactacataaatgatcttagtgttaaaataagatactcggcatgataggtaacttcagggtatgttacg

SEQ ID NO: 453056 - DNA, 612 bp, Homo sapiens
atgtttttaaataaacattctgtcacatttttaaataaaatacagttcctaccttcttgttcctttattgtactttttcctctttgaccatcagctccagttaagcgactatcatatttctgtggaacattctcaaagstagtctgttgaaattataatgaataatgagtttcaatgaaaaaacaatgaatttctcaatatttcctaatcatgttctgaatttcctgatttaaaagcaatgagacctagaaataaggaaagcatgtattgaaaaccaaaatatttcaacagaggaactcatatatgctctccagatcaagcaaaacttttatctccatatggctattgactctgtaaactgaacatagaaagccaaaggaaacactgtgacagacacaatattagctcatgtgtatatttcagcgaggaactaacttcaaatacctaactctactttgtgttcactaccaacaataagagggcattaaaaaaaaccaacacacttggtataatacttacaacattcatatttgaaatatttctaactacataaatgatcttagtgttaaaataagatactcggcatgataggtaacttcagggtatgttacg

SEQ ID NO: 453057 - DNA, 612 bp, Homo sapiens
atgtttttaaataaacattctgtcacatttttaaataaaatacagttcctaccttcttgttcctttattgtactttttcctctttgaccatcagctccagttaagcgactatcatatttctgtggaacattctcaaaggtagtctgttgaaattataatgaataatgagtttcaatgaaaaaacaatgaatttctcaatatttcctaatcatgttctgaatttcctgatttaaaagcaatgagacctagaaataaggaaagcatgtattgaaaaccaaaatatttcaayagaggaactcatatatgctctccagatcaagcaaaacttttatctccatatggctattgactctgtaaactgaacatagaaagccaaaggaaacactgtgacagacacaatattagctcatgtgtatatttcagcgaggaactaacttcaaatacctaactctactttgtgttcactaccaacaataagagggcattaaaaaaaaccaacacacttggtataatacttacaacattcatatttgaaatatttctaactacataaatgatcttagtgttaaaataagatactcggcatgataggtaacttcagggtatgttacg

SEQ ID NO: 453058 - DNA, 612 bp, Homo sapiens
atgtttttaaataaacattctgtcacatttttaaataaaatacagttcctaccttcttgttcctttattgtactttttcctctttgaccatcagctccagttaagcgactatcatatttctgtggaacattctcaaaggtagtctgttgaaattataatgaataatgagtttcaatgaaaaaacaatgaatttctcaatatttcctaatcatgttctgaatttcctgatttaaaagcaatgagacctagaaataaggaaagcatgtattgaaaaccaaaatatttcaacagagraactcatatatgctctccagatcaagcaaaacttttatctccatatggctattgactctgtaaactgaacatagaaagccaaaggaaacactgtgacagacacaatattagctcatgtgtatatttcagcgaggaactaacttcaaatacctaactctactttgtgttcactaccaacaataagagggcattaaaaaaaaccaacacacttggtataatacttacaacattcatatttgaaatatttctaactacataaatgatcttagtgttaaaataagatactcggcatgataggtaacttcagggtatgttacg

SEQ ID NO: 453059 - DNA, 540 bp, Homo sapiens
gtctcactgcctagcacacagtcaggagtcaagaacagaaattccttcaaggtcaaaaacagaatctcattggaaaggtctcaagtgccaaatcactggattcccttaggatattcccatagtctactgaaacttaatgtaaaccaaagtagaagtcgacatgcctgttctaactttcccttttttttctcggcactrctgccatttcattgttcaggtttacaaaaagaatcctcaatatttactaaatcactgaatcccactgtgatcattttgtcctacacttgtatacacactttacagtttacaaaaggatttaacatttctccccaaatttgttcattagacatacttaagaggtaatatttatgagtgtcattcttataatgtgaattacagtaaggtacatggagaagtacagatatatatggagactttaattcataggatagccctaaaaatacttattagaatttacaattttttgtaagtatttctgtaataaagacttcaattttcttcctacaaaataagacattc

SEQ ID NO: 453060 - DNA, 459 bp, Homo sapiens
aataggaaatcaaaattataaagagtaatgtacaacctgaaaagatatatttaaaagagcataggttggggctaaaagaaagttaaaaaaattttcatctaaaatccaaatctgagcttacagttagaggatattagaaaaatactgtaatctgctttcctactgatgacatagttctaatttatttccttcttatttataacatatttgcataactcatgtgaacttataacctaaacattaatttaagccatattttggaaatgcactagatgttattattagatatcttctgcatattatattacctataacattctgttatatagaaatttacttgtccgttcatttcttcatgttcaaacatgattaaaacacttcttacatgcaagactttaggtactttaggatacacaagaataygttttgtaatattcactagttcacagtagtgcagga

SEQ ID NO: 453061 - DNA, 459 bp, Homo sapiens
aataggaaatcaaaattataaagagtaatgtacaacctgaaaagatatatttaaaagagcataggttggggctaaaagaaagttaaaaaaattttcatctaaaatccaaatctgagcttacagttagaggatattagaaaaatactgtaatctgctttcctactgatgacatagttctaatttatttccttcttatttataacatatttgcataactcatgtgaacttataacctaaacattaatttaagccatattttggaaatgcactagatgttattattagatatcttctgcatattatattacctataacattctgttatatagaaatttacttgtccgttcatttcttcatgttcaaacatgattaaaacacttcttacatgcaagactttaggtactttaggatacacaagaatatgttttgtaatattcastagttcacagtagtgcagga

SEQ ID NO: 453062 - DNA, 645 bp, Homo sapiens
tccctctgtgtgtatgtataatcaaatcgattttttctcacttaatataccaaagtacatcttcccatgtcaacatacatccatatctattgccaccttcagaagttacatataatttcatcctatggatgcactgaaatttatttataaaatcctttatttgccctctccttaatacattgctattggaaacagtgctgagaaaaacgaattgtatgcatctctaattattttctgaaaatattttagtataatggaatcaatgggtaaaggatacatacctttttaagagtgatgttcaccaccaaattgtttatttaaaaagttaacagcaacttaaactttaagcagtggtgtaagtactactgattttccagatcactagtagatttggaaaaagtactttgaccaattttaaattatagttcttatttctttaaaaaaaattctctgtaaaaggaagayacatttttcattgcaaataataaatgtctatatttatgtatataatgtgaatattttgcaagtatgttgtcttttattttgttaacttttttctgatgtaaggggagttttaatttttgttttctaaatcaacctgcagaatgcattcataggaaggtctttgtcaacataaaaatgtat

SEQ ID NO: 453063 - DNA, 603 bp, Homo sapiens
caaaatatcatgtgaaccccaaaatatgtacgagtattatgtatcaataaaaaatgaaataaagcattgctagaagaaaaaaagtacgatttaaaaaaatctctacacatgagcctctttccacactttttataaatgccaccagatatgtagtgttcatagcatttatgaggttccaaacaatactatgtcactagtgtatgaagaactttattttacagtaataaaaatgttagaaatgccttaattaactgaaattcaatacatggaaacatatttatcacataacttcttttttcatttaatttgttaaaattttattttagatgcagaggtacacgtacaggtttattacatgggcataccgtgtggtgctgaggtttgggcttctaattgtcttgttgcccaagtagtgaaaatatgtttttcaaccttgcccctctctctccccyactacataacttcttatgtcataaaatgtcaataacataacttacctttgttttcttaattttgtaggatggcttctggaaacttacaccagaactgggatttatattaaatcttaatacaaatgctttgcacagctttcttaaacaaaaa

SEQ ID NO: 453064 - DNA, 603 bp, Homo sapiens
acaaaactgaacactctttagagtaagatagcatagctgagagtctctacaaggtgtcatttttaatgttcagtatggaatgaaaatttaataacatatgaagaagcaggatatgacttgtgatcaaagggaaaatgggctacaaatgctgacccacagatgacccagatgttagaattagcagacacagactttaaagctgctattaaaaatatagtgaaggattgatttaccagaaaaggatggaatgggtgaataaatggcagaatctcagcaaatagatggaaactawaaagaagaaccaaatgaaaatcctagaactggaaaatatagtatctgcaatgaaaaggtcattgaatgagcttaacaacagaatggacacaacaggaaaaaaatcatttaattcaatttgcaatgtactcaataaacttctctaaactgaaatatagaaagaaaaaaatagaatgaaaaaagaacagaggagccaagactgtggaatgatatcaaaagatttaacatttgtgtaactagggtttcaaaaagtgaaagggtagacagaaaaatatttgaacagttttgtaaaattgatcaaagacagcacct

SEQ ID NO: 453065 - DNA, 603 bp, Homo sapiens
acaaaactgaacactctttagagtaagatagcatagctgagagtctctacaaggtgtcatttttaatgttcagtatggaatgaaaatttaataacatatgaagaagcaggatatgacttgtgatcaaagggaaaatgggctacaaatgctgacccacagatgacccagatgttagaattagcagacacagactttaaagctgctattaaaaatatagtgaaggattgatttaccagaaaaggatggaatgggtgaataaatggcagaatctcagcaaatagatggaaactaaaaagaagaaccaaatgaaaatcctagaactggaaaatatagtatctgcaatgaaaaggtcattgaatgagcttaacaacagaatggacacaacaggaaaaaaatcatttaattcaatttgcaatgtactcaataaacttctctaaactgaaatatagaaagaaaaaaatagaatgaaaraagaacagaggagccaagactgtggaatgatatcaaaagatttaacatttgtgtaactagggtttcaaaaagtgaaagggtagacagaaaaatatttgaacagttttgtaaaattgatcaaagacagcacct

SEQ ID NO: 453066 - DNA, 603 bp, Homo sapiens
acaaaactgaacactctttagagtaagatagcatagctgagagtctctacaaggtgtcatttttaatgttcagtatggaatgaaaatttaataacatatgaagaagcaggatatgacttgtgatcaaagggaaaatgggctacaaatgctgacccacagatgacccagatgttagaattagcagacacagactttaaagctgctattaaaaatatagtgaaggattgatttaccagaaaaggatggaatgggtgaataaatggcagaatctcagcaaatagatggaaactaaaaagaagaaccaaatgaaaatcctagaactggaaaatatagtatctgcaatgaaaaggtcattgaatgagcttaacaacagaatggacacaacaggaaaaaaatcatttaattcaatttgcaatgtactcaataaacttctctaaactgaaatatagaaagaaaaaaatagaatgaaaaaagaacagaggagccaagactgtggaatgatatcaaaagatttaacatttgtgtaactagggtttcaraaagtgaaagggtagacagaaaaatatttgaacagttttgtaaaattgatcaaagacagcacct

SEQ ID NO: 453067 - DNA, 520 bp, Homo sapiens
agggggcagatcacttgagcccaggatttcragaccagcctggccaacatggtgaaaccccatctctacaaaaattagccaggcatggtgacatgcacctatggtcccagctacttgggaggctgaggtgggaggatcacctgagccctgggatgttgaggctgcagtgagccatgattgtgccactgcactccagcccaggtgacagagtgagataaaaattcaagataaatatattgtcatgtgaggctagagctcagggaagaggtcagagttggaaaagactgggagaattctcaatgtcagtagtatttaaagcctggcactggatgaggtcacccaaagaaagaaggtggtctgagcagagcaggtgctaggaccagcctgccacacagcagggtttagtgttcagactgcacaagaaccagcaaagacgctgagaaggagtggcctgagaaacaagaggaaaactggagaaaattgaatcacagatgcaaggggatgggatttcatggatgta

SEQ ID NO: 453068 - DNA, 423 bp, Homo sapiens
cccagcactttgggaggccaaggcaggaggattgcttgcttccaggagctcaagaccagccttgaccacatagcaagaccctrtctctacaaaaaaaattaaaaattagccgagtgtggtagtgtgtgactactcaggaagctgaggtgagggggattgcttgagcccaggaggccaaggctgcagtgagttgtgattgtgccactgcactccagccagggcaacaaagtgagaccctgtctaaaaaaaaaaaaggagaatcataatttactatatgtaatttatacttccattttttaaaaagcaataccttctcattagtttgccaaggaagatgagaatttattcttttttctatttggggggctttcttttttttgtatttatttatttatttatttatttatttatttattttattta

SEQ ID NO: 453069 - DNA, 536 bp, Homo sapiens
ttggatggaatccaggactcagtacataaaacccctcacggcctctggaatgtgtccagacttgctggctccttgcttcttgctctcccaggatcataaattgattgtatcttgaggtagaaggaaatgttcaacattatctygagtagcagaacatgttccatatgcttcaaagaaaatgctagactgacacagctgtaaactaaacacttgatgtgactgcttcctttcaaccagcacatcctcgccacctgcttctttgtttaatcaccaataaatggtgtgggctcccagagttcaaggccttcacagcctctatactagcgttggccccctggacccactttatgtactattagcttgtcttgtctcattcctttgactccgccggactttgtagcccccacggcctggtgttgggtttgatcacctcaacaccaatgtggatatttgtgactgcctttgttttataatatttttattattcaccttgtacagatgaagacttccagctgtagaggccaaaggggccacac

SEQ ID NO: 453070 - DNA, 536 bp, Homo sapiens
ttggatggaatccaggactcagtacataaaacccctcacggcctctggaatgtgtccagacttgctggctccttgcttcttgctctcccaggatcataaattgattgtatcttgaggtagaaggaaatgttcaacattatcttgagtagcagaacatgttccatatgcttcaaagaaaatgctagactgacacagctrtaaactaaacacttgatgtgactgcttcctttcaaccagcacatcctcgccacctgcttctttgtttaatcaccaataaatggtgtgggctcccagagttcaaggccttcacagcctctatactagcgttggccccctggacccactttatgtactattagcttgtcttgtctcattcctttgactccgccggactttgtagcccccacggcctggtgttgggtttgatcacctcaacaccaatgtggatatttgtgactgcctttgttttataatatttttattattcaccttgtacagatgaagacttccagctgtagaggccaaaggggccacac

SEQ ID NO: 453071 - DNA, 511 bp, Homo sapiens
tgggagggcaaattactggagtgacttttagagtgaatggaaaggaaatgtgagccycttgagtaaggcagttctctcaaggtcatcatacctaagtggcatgatcatgaaccatctaattttcttgcggtttagctgcatttttcgaatcttatatgagtatacagtctaacactttgaagatcttttaaattaaatacatatggcatttaaaaaatgcaaaaccaaggtattataagtttataaaattacagaactaaaaagactacctgaacatttctagattatggaagctgatcatcattttgctcatagttataattaaatatcacagaaagactaaaagtttcatgggcagtattttgtgcttgataaaagccattcaactctaggatattttatcctcatcaaatatacagagtaacgactcatattaaaatactgagttccacaacaggaataaaaggggatcaatgaaggaaacaatcttattatagaaactaaatttttg

SEQ ID NO: 453072 - DNA, 511 bp, Homo sapiens
tgggagggcaaattactggagtgacttttagagtgaatggaaaggaaatgtgagccccttgagtaaggcagttctctcaaggtcatcatacctaagtggcatgatcatgaaccatctaattttcttgcggtttagctgcatttttcgaatcttatatgagtatacagtctaacactttgaagatcttttaaattaaatacatatggcatttaaaaaatgcaaaaccaaggtattataagtttataaaattacagaactaaaaagactacctgaacatttctagattatggaagctgatcatcattttgctcatagttataattaaatatcacagaaagactaaaagtttcatgggcagtattttgtgcttgataaaagccattcaactctaggatattttatcctcatcaaatatacagagtaaygactcatattaaaatactgagttccacaacaggaataaaaggggatcaatgaaggaaacaatcttattatagaaactaaatttttg

SEQ ID NO: 453073 - DNA, 459 bp, Homo sapiens
caaattctcatgtatggtttacatccatgtagtttaagtgtcataaagccacagacaacatacctgggctacagtgtctatgattctcctygatgtggacatcctccagaggaaccaagttcccagaggcatcctggaggctggccttggtgctgctggaagttttggcatctggtaactggtaatctaaatgttaaaaatgttaccattagctttcaaaaccatccctgtctatttttgttatcttgatctttattccttctccatgccttcatgcattttattttagggaaaatggataaacagcattttatgattttcaatagccaattttgaaaagcaagtgaacccacatgagaaaaatgggagatgcctttttttttgagacagcatctcactctgttacccaggtgggagtgcagtggcacaatctctgctcatggtagactcatcctctct

SEQ ID NO: 453074 - DNA, 500 bp, Homo sapiens
tgaatggcccaaagaatgagattctgggagggcaaaatcgagtatsccaataacatcttaatatggctttagtaattttgtttaagccactactcactgaatactcaccctatcccagacatgtcctaagtccttcacatttaagcctttcaacttcccttaggtaagtactattatcaccattttacagatagaaaacctgaggcttggaaaagtgataggatggtgcaagacaagacaaagatttttcttttctttcactccaaactcttgaaaattatacaaatcttttgagaagtgtttgttcatatccttcacccactttttaatgggattgtttgtttttttcttgtaaatttgtttaagttccttgtagattctggatgttagtcctttgtcagatggatagattgcaaaaattttctcccattctataggctgcctgttcactctgatgatagtttcttttgctgtgcagaagccctttagattaattagat

SEQ ID NO: 453075 - DNA, 642 bp, Homo sapiens
tgtgagtacatgtcaaaacgcatatgtgtgttacatgtctctgctataaccccatataattagtattaggacatatcattatattgcttttggacgtaaaagaaaaagacataggctatatattgtacctatataaaatctagttatttaattaatctatttctttattaaagttatttgctactttaattaatattaaatacttgcacagttttaactctagaagacccatttgcttgctgagaggtacaccagactttgtgcagccattattggaaatgatgtgatcacatgcaggtaggacactctgagacatatatgtggaggcaatgattttctttgaagcatatacatgtaaaaacgtcctgatgatggttctgctttttactgcttcccatatgacaagtggaaagtattcctctggaaataatgcaggttagtgatatatctcagaaattagagaagcaagctgtcatcacatctataaaaatagtgtcatgtggttaatgtgggctactaactrtatagcagaagtgatattaaatatgtgccctctccttgtattccaatcaaatagctgccaactttctgtgaatagctatgtaacatagatgggactcattctaattaaaacagtattct

SEQ ID NO: 453076 - DNA, 595 bp, Homo sapiens
ggtctagggaggtggtagggtgaaggggtatgaaaatagagttgaacaactcatgagctgacactcaacatagagattatctcatgtgagtaatttatctcagtactggtcagtttttaaatagaaattcttgggcttagggtaaacacaaaaaccaggatctacttactctgaatagagtcatgcactagctaactttaaaagtcaaataatatcttcctctagagtcttttgacaggcataaagcaatttttctcacattaaattattccttttataamctttgcttcccttagttatttgaattatgatgtgaatttcttcatttagctgttctttttagtatcaacggcagcgttacaatgaaatactcttatttctcattataattcattaacctagcattttataaacttaatattgtaaatctcattaatttaaaattcaggaaagaaaaaaatagcacctccaataaagaagcatttattgtacctgataattcattttaaccaccaaagaacctgacattgagccaatttccttttccaagaaaataatttatgaaagaatcaaatgacttgaaaatgggtatgtt

SEQ ID NO: 453077 - DNA, 578 bp, Homo sapiens
gtggcatcaacacgacctttctttaaatattattgaacattcccaaagataaaatgaaacagactgtagtatttagttctcattaccagctacagcttttaaagtgaaatctctttcttaatgtcctcttttactttaatgttagaggacatcagggtcagcttctactatttatataaagcaggaattcaaatagctaactcacagagaaaatgtgatttcactttctttcaaagactcaatgcaaattccatttggattcctgagagaccttgaggttcacttcacatttcacttgaaatgcagtgtgtagtgtggttgaaacacakgagaaaaacctctgaatgcctgaactgctccccaagatcaaatgaagcacttaaagaggtcagaaaggtattgtcatcttctacagtgaagctgagacctaccatatttgggcagggtataccggtgacttaaaactgactagcagctatgagaacagggtcatatcagtagaaagaactggaaacagattttgataagaaaaaaagttaagcacaaactatgagcaagattatagtgacttgggggtc

SEQ ID NO: 453078 - DNA, 519 bp, Homo sapiens
ggttatgggcagatgttgcccacctatgctttatatcttgaatctgtaatacaagagtaataayagctacctagcagagctatcgtgaagcttggagttaattcttaacacagtatctgatgcatggcaagtgcttgatatatggcaactttatgattttattccctttatgttatatatttttttatgactggctgcatgatttgtattcattgccgcattatggcaaatacgcacctataattctgatacagcctttcacaaccagtagcattctcctctatcctctttaatgtctcttcctctctcaacaatatgtacagaacagaactgattcactactaactctggggaacataatttgttcagcagaagtctcttctttctaagaatgtgctctggtgggagagggtttcagggaagttagtattagatacctactatgtgagaggcattatggtgaatggttgtggtacacaaaggtcaaagaggcatgatcattctttctttgccggaagt

SEQ ID NO: 453079 - DNA, 519 bp, Homo sapiens
ggttatgggcagatgttgcccacctatgctttatatcttgaatctgtaatacaagagtaataatagctacctagcagagctatcgtgaagcttggagttaattcttaacacagtatctgatgcatggcaagtgcttgatatatggcaactttatgattttattccctttatgttatatatttttttatgactggctgcatgatttgtattcattgccgcattatggcaaatacgcacctataattctgatacagcctttcacaaccagtagcattctcctctatcctctttaatgwctcttcctctctcaacaatatgtacagaacagaactgattcactactaactctggggaacataatttgttcagcagaagtctcttctttctaagaatgtgctctggtgggagagggtttcagggaagttagtattagatacctactatgtgagaggcattatggtgaatggttgtggtacacaaaggtcaaagaggcatgatcattctttctttgccggaagt

SEQ ID NO: 453080 - DNA, 646 bp, Homo sapiens
tgtacaacatcaggcacagcagcatgtaaatactcaactatttaaaactgatgmattacatgcccactgtgtgtaaggaaatgggctaagcattcatggattttttttaatagaaaacaataaatagtttatacctaatttcctgcctcttttttgattcaacaccctcctcttccagtgatgattttaatgttaccagggctctccttatgtccagggaataagagatgacacttatttttacagataagaaaactagttatcttgagtaaatatgggatcgaactcttcttattttcaacagcatttgaagactcaacatcatccttgagcacaaatacatacttttgagaagttgtaggactacaggaagcagctgtggatattcaaccctggtccttaaactcacatgcagcaacaagcaaggaatgggcctcttcttccataaacccacgaacttcaaaaacccagttcatcctatgccaaacacaaggaactctccctatgcatcactacccttaccctgctcctggcaagatgcatttggtagtacaagtgctgctttgttcagcaaaggaatggtataaagaaagttataaaaatatcagccagacagtaaagtcagggagctttggcaagaaaaaag

SEQ ID NO: 453081 - DNA, 558 bp, Homo sapiens
acacccttctgttttccactatgttaggacgcagggttcctcacctcttagaggatgcagcaacaagggaccagcttgaaagcagagagcagctatcactagacaactgaacctgccaccagtgccttgatgttggactttccagcctccagaactgtgggaaatatatttttattcgttaccaattaaccagtctcaggtattttgttatagcatcacaaatggactgagacagtgacacgaaaacaaaataggttataggaatagactgaataggtcagcagggtgtgtgtgtgtgtgtgtgtgtgtgtgtgtgtgwgagagagagagagagagagagagagagattactttagattagatagtcatcaggaaagaactttctaagaaggtcacatttgaactgagaccagaataataaagagacagccacacaaagacctgaggaagagagttccagaagaaaagggaagagaatgttcaaattccctgggtaaatgacagtctgaacaagtttgagaaacagaaagaaagataacgtaactagagttgaagagg

SEQ ID NO: 453082 - DNA, 621 bp, Homo sapiens
aaaatcaaagtctagttttggccactgagtggaaaataaagtataggagagtaagagtaaaaacaggaaggttagaattcagtttgtcttaattattgaggccaaagatgatggcagcttggtttagagaaaygacatgacgacagattgcatgggaggagaagcacagaatcaaaagtcagcctttcgttcttagcccaggtagctgagaatgatgagttagccatgctaccacataagaagcagcagtgttgagaaaagaaagtgaactttgttttgttcaaattgagtacgagggatcaacaacatagctaagaaaagagacccagtgggcaggtttaactacaagcctatagctcaagaggtaaaaatttgtgaataattaaactggaggcttttcagtcaaaaaaaaatttaagattatcatgactagagctgagtgggatgaagtcatggttaaaacattgaaggtaaattcataagaagagaaataaataaaaaaaagatgacgaagtaagaaagaaagcaggaaagacaggtaacagaataatataaattttacatcccagcactttggaaagcctaggtgggtggatctcctgaggtcaggagttcaagacc

SEQ ID NO: 453083 - DNA, 577 bp, Homo sapiens
taaggggtgaagaacatggagaataaaactgaatgttgacaaagtcatggaaaaagattagaagaagcatttctcgttttgaaaccttttttgaagaataaatcagtttcttcagggtgataaaaaggaaagaagtatccaaacaattaagtttatgtgttcttttctaattttttttttgttgtggcttactgtgaacaatcattgtgaaatattaagcctatagtccgtatcttatattagtttatataaagatttaacttmatctacattatacatcattaaaatcagccaattagatttaatggatctgttatctcaagttcctcagctgcacttggtttctatatccttgaaatgcatactcccatactcttcactgtgatgttacaaggataatttgttttctataaggttctctgagctcctttgaacaaagcactaggtaaatatagcataactttatgacagcattttggctatgctgaggatttatcagaaagtcacaagctatatgaaaaattcaggtaagactggacaggatcttataagatagagaagaaaccaatttaataca

SEQ ID NO: 453084 - DNA, 547 bp, Homo sapiens
aattttaaatacggacagtggtgatttaatatagaattcagcaccaataattctcgtagcagtttctttcagcagtatatgcatatgattttagcaatatatgtacctctatacaaattagggtgtcagtattatttatgaaagactccatgattctaaaaagtcttgttttcctctttccttcaatagctaattaaaacaaaacaaaacaaaacaaaacaaaacaaaacaaatcctgtattttccaagggaaataccaataaacttacaaatttagagtaggctgaaggaacacaaaacctaatctgggagttttgccaaatctttattttaatgaactttatgcagagatgcagtaagaacattatgctgaaaatgcagaaatgaactcagcagtctttgtagaagtacctttgaatctacagcataaaaagagttaatctgaaacgcaaactgtagttgcattaaatatgytttgtttgccattcaataagctttgttttaatggcaaaggcaatactgacattgggtgagtacttaaacttta

SEQ ID NO: 453085 - DNA, 540 bp, Homo sapiens
gttctcttttttttgccttatgtctacccttycactacctatttcctagaatgacatgtccaggtttatctgctagattgttttcccttttttctttctggattatgaagttgagaataaatgggtttgctcatcttacctcttccttgtttcaaactgtcctttatttgcattctacttctcctcctttgttgtcatctctatggtttaattctatggttatttctaaggttttgaatcccatccaatcccttcttcaatatttctctctcaaaaaaaaattgcctgatatcatatatcttatttaaatatcaacttctcttattgctacttcctttcaactactgttttctccctggttctcttcaaaatcaatatcagaggtacaaaatttggtttgagcccaacaactttttaagttttaaattaaaatttccagttacctacaaagtatgctttctggaaatcttgttagtatgtcatgtctaagtagcagttgtaataataaaacctagatttaaattgtggttctactactta

SEQ ID NO: 453086 - DNA, 593 bp, Homo sapiens
aaactatatccaattaatataagtaggcaaatgaattcagaaattttagacatctacagttatatacttgytacctttagaaaataataacaacaatcatttatcattctgattatatcgcaagcatgagactacatgttttataaggggtacctcacttgagctttaaaacaatccttggaggtgccataatgattcacatttacagatgaaggagtggagacttagtaaggttaactgcattctccaggattgcatagctcctaagtagtgactatggagatttgagcccaggcagtctgatccttagttcatgtgcttaactaatactatatgcttcactcaggttttatatggtgctttcattagaaattgtcaaaataagcattttgacaatatttaaatgtgttcgtatgtttaatctgtccagaatatttaaaaatcattatcaaccatgtttgcgttaaggagaaattcaatctttttcatatgaagaaacaaaagacatgaaacaacttaccggactcttgaggtattgaaaattatttgagtagtagttgtttttatggaatataatgtgtaaccgtttctaa

SEQ ID NO: 453087 - DNA, 593 bp, Homo sapiens
aaactatatccaattaatataagtaggcaaatgaattcagaaattttagacatctacagttatatacttgctacctttagaaaataataacaacaatcatttatcattctgattatatcgcaagcatgagactacatgtyttataaggggtacctcacttgagctttaaaacaatccttggaggtgccataatgattcacatttacagatgaaggagtggagacttagtaaggttaactgcattctccaggattgcatagctcctaagtagtgactatggagatttgagcccaggcagtctgatccttagttcatgtgcttaactaatactatatgcttcactcaggttttatatggtgctttcattagaaattgtcaaaataagcattttgacaatatttaaatgtgttcgtatgtttaatctgtccagaatatttaaaaatcattatcaaccatgtttgcgttaaggagaaattcaatctttttcatatgaagaaacaaaagacatgaaacaacttaccggactcttgaggtattgaaaattatttgagtagtagttgtttttatggaatataatgtgtaaccgtttctaa

SEQ ID NO: 453088 - DNA, 571 bp, Homo sapiens
gtaggcaaatgaattcagaaattttagacatctacagttatatacttgctacctttagaaaataataacaacaatcatttatcattctgattatatcgcaagcatgagactacatgttttataaggggtacctcacttgagctttaaaacaatccttggaggtgccataatgattcacatttacagatgaaggagtggrgacttagtaaggttaactgcattctccaggattgcatagctcctaagtagtgactatggagatttgagcccaggcagtctgatccttagttcatgtgcttaactaatactatatgcttcactcaggttttatatggtgctttcattagaaattgtcaaaataagcattttgacaatatttaaatgtgttcgtatgtttaatctgtccagaatatttaaaaatcattatcaaccatgtttgcgttaaggagaaattcaatctttttcatatgaagaaacaaaagacatgaaacaacttaccggactcttgaggtattgaaaattatttgagtagtagttgtttttatggaatataatgtgtaaccgtttctaa

SEQ ID NO: 453089 - DNA, 593 bp, Homo sapiens
aaactatatccaattaatataagtaggcaaatgaattcagaaattttagacatctacagttatatacttgctacctttagaaaataataacaacaatcatttatcattctgattatatcgcaagcatgagactacatgttttataaggggtacctcacttgagctttaaaacaatccttggaggtgccataatgattcacatttacagatgaaggagtggagacttagtaaggttaactgcattctccaggattgcatagctcctaagtagtgactatggagatttgagcccaggcagtctgatccttagttcatgtgcttawctaatactatatgcttcactcaggttttatatggtgctttcattagaaattgtcaaaataagcattttgacaatatttaaatgtgttcgtatgtttaatctgtccagaatatttaaaaatcattatcaaccatgtttgcgttaaggagaaattcaatctttttcatatgaagaaacaaaagacatgaaacaacttaccggactcttgaggtattgaaaattatttgagtagtagttgtttttatggaatataatgtgtaaccgtttctaa

SEQ ID NO: 453090 - DNA, 593 bp, Homo sapiens
aaactatatccaattaatataagtaggcaaatgaattcagaaattttagacatctacagttatatacttgctacctttagaaaataataacaacaatcatttatcattctgattatatcgcaagcatgagactacatgttttataaggggtacctcacttgagctttaaaacaatccttggaggtgccataatgattcacatttacagatgaaggagtggagacttagtaaggttaactgcattctccaggattgcatagctcctaagtagtgactatggagatttgagcccaggcagtctgatccttagttcatgtgcttaactaatactatatgcttcactcaggttttatatggtgctttcattagaaattgtcaaaataagcattttgacaatatttaaatgtgttcgtatgtttaatctgtycagaatatttaaaaatcattatcaaccatgtttgcgttaaggagaaattcaatctttttcatatgaagaaacaaaagacatgaaacaacttaccggactcttgaggtattgaaaattatttgagtagtagttgtttttatggaatataatgtgtaaccgtttctaa

SEQ ID NO: 453091 - DNA, 532 bp, Homo sapiens
ctctaccgtttacatgtttatctcatgcattcatctcatctttcaggtcacagtattaaatgttatttctaagaagaaatagagagacctcactgttttttattttattttattttaatctgaagtcgtttccaaacattattctgtatgttggcaccctgctaatttcctttaacatataagaatttgtaattatttttaatcgcatctcctgtctatttatatttacattgaatttattgtgtgttacattcaagttgcttctccaggtccttgagctctacttggcacatagttaaaggtcaatgattatytgtataatgaattaatgggtagatgaatggatacataaatgattgaataacacagtatagtttcttttgtaatttttttccctttggtattagtctaaatatacttttctatacaattatattcaattacaattatactatacaattatatatatactatatatatgttatatactatacaattatattctatcctataaataagtttcacttcaaaa

SEQ ID NO: 453092 - DNA, 579 bp, Homo sapiens
gcctaaaactgactctaacatttatcctccaagccacactaaaggcatactttgggagaagcttaaaaatctcctcagcttttagtgatataatcagtagtaagttataaggttaaaaatagaaaaaaagtatatttattagagatatttcatatacatattaggcttccttaaaatttccaagggaacacaatcatatgtgactaaagattatttttcttttttataatacaatttaaatttaytggtttgggataatgtctcacttatataagaccaatgattttgtcattgcaactagaaaaactcacataaattacaaaaatgacactttcaaggacatcagagagctatgtaagtagtgagaatgagatgaactaaatttccagaaagtagagatcttttctgaggtaagccaaatatttaattcatttctttttctcctgcgaaagtttcttaattctgggtaagaattgagggtcaagcacgggtgaggcagagcacctctcgggtagaaagataaatgaatataatttggttggccagagatggaaaaatatagtgaaaatttgaggggcc

SEQ ID NO: 453093 - DNA, 513 bp, Homo sapiens
cagaattgcaattttccctttcctttaagagctttgggaacttagggaagagtccagtgttaagcacccagctggtctcaccctcaagacagttgatagattttgaagttgcttgggcagaaagctagaacatggaactagcaacttctgaaggctgagctgaatctccctctgtctctcagagctgacaggatgggcacatrtaggctctacaaacatcatggagaaaggcagcctaagcagatatagtcttattaaaagtgcaaaacagccctgacccagatcaatttccgaatgaattaaagtatcaactcctcactgtatttgaatagctaaggaaaggaaggatactttttgggatacattagccagtatgatttgaaacccatatgtttattttatgcaatgtctgacattcaataaaatattaccggatatgaaaagtggccaggagatacgacagacaaaaagaaaagcaaagtagactcacagattatgcagatcttagagtta

SEQ ID NO: 453094 - DNA, 570 bp, Homo sapiens
attctcctactttctgtctctttctctttgtctcagtttctttgtctctcttggtctctctgtctgtagctccagctawctgttctaataaactacccataagagtagaggaaagtaggagaaataaagtccttaaatgggattcaagttctttaacatctgtaaaaaatgttaggtaaagatgactaaataatcactccaacatttgtatttgtttgtttaatgaagatttgaatcatagaaacagagttttaaggaacaataacctaaaaggggatatttatacctaactcttcatatttccctatggaagagcttccattagagtagtatctttagcctttctccatcttcatcactcactcatctccagggaaggaggagtgatatacctgtccaataaatttaggagaaagcattggtatgcttggatcaactccctttgctttagatttgtctacctacaggggcatacattctgccaattacacacagcttgtctccccaggtgtgtgtttgtatgtatgtaaaagagaggaagaggaggaagaggagagagaagagagagag

SEQ ID NO: 453095 - DNA, 567 bp, Homo sapiens
ttgaagcaaggaagagcttggggcatcgagttcagcagggctggaaggagaagagtaagaccaagtatagagtaatggtctggtgagagaggccatgattagagcctatagggccacatgggcagccattgaagggttctaaaaaagtgaaatgattcaattttaaattttaagatagtttgccttctgtgggtagaatagatggccaatgccgtggaggagaccagtgcagtgcttcaaccctgaaacattgatggctttaggtaggatgattagactaaagatgagaaaaattggtggatacaaggtaaattgaagaggtagacaaaactatgtgagaayttaggaagacaaaggggtcaaggatgatgcttgctttctgagttgaggagctgggtagtaagtggtactgttctcctccatctgcccccttaatccaattttcatgccacatcaaaagagtaatctctaagataaagtttaatcccacaattttctgcttaaaaccctcccatgcttctccagtactgacaggataacacagaaagaactaagatagctgtgctt

SEQ ID NO: 453096 - DNA, 561 bp, Homo sapiens
tgtgctaatatgatcaaccacccaggatcacctctcaactttgtcaatttctctattctcacttggttccctgatcacttttactcacagaaaaacatggaagaataatttggcaaaagaagcttgacatttagagcttagttttctgtccttcaaaatgtactgtaccttcaattgactcatttatcatttamtgaaaaaaaaaaaagactgttaaccagctctctctgtctgcaacaatcttcctcttaacaaaaacaaaatagacttatgctttgttgtttttaactctttactcttaggctgaatagcttcctgagtgtttaaaaaagtgtcatttgacattactgcatacatgagaaatgcacttaaaaatgttaacccatgcgaaacaggtgtatagttcctctgctactagatatagtaaattcctccaaccacggaataactccgcatttttttctgatgaaatcttgtgccaaaaaccacctcattagagaaaaacaaatctcaaaaaaagctaggttcagcatggttccaccgtatcagaactatatgact

SEQ ID NO: 453097 - DNA, 545 bp, Homo sapiens
catgctactcaatggcacacaacttaaaacttataaattgtttatttctggaatattttcatttaatattttcagattacagttgatagtgggtaattgaaaccaggtaaagcaaaaccttacataagaaggaactactgaaccttgaacaggctatttttgaagatgataattattctttaaagagaaatatcatttaagacttcttagttttgtcacttattttgttatctattgaatgcttattctttttatgctacacataatataatggggaaatgtaaggtgattatagcaccttccttttagtttkcaagaagagtaagttttatggtcttttagaaacagatccttgtaaatgttcatcttctttacacaagtaattcatgatttcaatccaaacatgaacacaaaataaaatgtggtagaattcatttttgtatgtttctctgaagattaaaaacaaatcaatatgggaaatgccttaggaaataaattccccctctttcctcagaaagtaagactaagaacagcattcctgcaga

SEQ ID NO: 453098 - DNA, 612 bp, Homo sapiens
actcaagccagaaatcagtgttacccttgacatatctatgtcctcacttcttgaatccaattcatcattgtacttacagtttcacttctaaaacatagcttaaagttgtcttctcatgcccaccttgactgtcacacattaggccatcagaccctatctaaattaaaacaactcactatgttccctgcttccattgttgtgcctttcctattcattctccacaatgcagtcagcataggttttaagtataaattgaatcatgttactcccaggtttccygttatacttgtataaaataagaaatccttttcagggtctccccatcctggtctctaacttcttcctctatgttagctcttgaccttttacattaacaattactcttcagtcatactttcagtctttcatttcaaccaactcctctcttgactaattattatatcaggtcctggcttgtttatggatctgtagatacttacttcatcttactaaaataaaacaaaaaacaaacaaaaaaagcaaaaaacccataggtcctatacctttttcaaaatagggagaactgaagtatgtgtgcctaaccaaatgtaattttttgaagagagaaaaggg

SEQ ID NO: 453099 - DNA, 520 bp, Homo sapiens
atacttgtctaaatattaatatgtcaaaaatactcacaaatttatgttgaataaacataatatcaatccytccactatctctcacaccccagtcagttatggaatcctatcaattctagcctcagacagactctcaaattcatacccacatgtcagttcctattcttaccaccagcaattcctgtcttcattgtctcctgcatgaattactattaaaagccttctatctacatttggactcactgtgttgatggtgtttcccaacttcaatcaattctattttctcatcttacatatgttctaccaaagcacaactcttgtcaggtaaagattcagtgactccctattatctttagaattcagaaccatgaatcaacatgcctttccaatttgattttacttccttcacttctatacatatgtgcttctattaaaataggccatttttttccccaagcacaatttcaactttgacatctctatatcatctttgctaaaagaatgttctggactgtaacca

SEQ ID NO: 453100 - DNA, 520 bp, Homo sapiens
atacttgtctaaatattaatatgtcaaaaatactcacaaatttatgttgaataaacataatatcaatccctccactatctctcacaccccagtcagttatggaatcctatcaattctagcctcagacagactctcaaattcatacccacatgtcagttcctattcttaccaccagcaattcctgtcttcattgtctcctgcatgaattactattaaaagccttctatctacatttggactcactgtgttgatggtgtttcccaacttcaatcaattctattttctcatcttacatatgttctaccaaagcacaactcttgtcaggtaaagattcagtgactccctattatctttagaattcagaaccatgaatcaacatgcctttccaatttgattttacttccttcacttctatacatatgtgcttctattaaaataggccattttttyccccaagcacaatttcaactttgacatctctatatcatctttgctaaaagaatgttctggactgtaacca

SEQ ID NO: 453101 - DNA, 527 bp, Homo sapiens
gaataatggtaataattttaggattacaataatattaatagccctagtgcatgtgctttacatgtacaaatacaaaacacacttatgggattattgtccatattttaggcaagaagaagcaagacctcaagaaggttaaacagcatacctaaggccatattgtatctttaatagtggctaagcagtatctacctaactgtccatctatgcatctatccatctatccatctacctacttatctaccygcctacctagaggaccatctgcctccatggtccaagtgattttttcaacatcatggcacctcatacagtacaaatggacgagtgtttttttatttggcaacctgattgtgtcaatagttcatagtgtttggaacataaaggctattgaaaatgtcacatgaattttcatgtgtataacccataaagcttataaagtcatcctgcattatataaccactttagagcagaaaatcttttgaagtcaggttaatttcttgtggccattcagcaccactgcattt

SEQ ID NO: 453102 - DNA, 625 bp, Homo sapiens
ttattggttaggtatataattattacacattaaatccttaaggttttaagttgcttaaacttgcacagctttttttcacatgtataaatattccttccagactggtatggtaacgatcatttgtttcctcaaaaattactaggatataacctagactgacttaaaaatatcttgttttcctgaaatagcaagcyattaatttagtcacatattttttacactttgttttgccaacttcaagttctgaaataaccctaaccttacctgttgtgcatcttcccatttttccttgttttcttcatctagaaggttgctaactatttgaaagaagttctgtaaattaaattagataaaagatttaatattacatgagagaattatactttttaataacacccatttgggttgactacgtggtaaaggtataagcactttgcaatattgctttatgaccctaacatagtattctagaagatcactgaggatccttttacagaaccgtaattctaggattttcatataccttcatttttgtactctcagaggaggtcagaatagggaaaacactttcactcaaaattatttgttccattatagtatctatattccactctgtaatgtcatt

SEQ ID NO: 453103 - DNA, 382 bp, Homo sapiens
gatttgatctaatccttaaattgtaaagaacaagtaacttggatgttmctggcttgatgtttaaaagaaatgttttaggtaatttcaattgtgagcacctctttgcaaaggctagtttggagaacaaatcatcaccctcttgatgcttgcttatatccaagtccaaacagagacgaggcagtcagttgtttgaaatattagtgcaaaccatggagttcagtgccataatgcctgagcacaataatactatctacgtgggcagcctgacaacaagcgtcactactcaagtcccctgcaggaaacccgactggtcagaaaagctgagacacagcatgaagctggcaccaaaataactggattgttttcacttctggtttgctat

SEQ ID NO: 453104 - DNA, 398 bp, Homo sapiens
atcatgaaggttttctgttaacagactgaagaagaggcaacttatatggattcrtaaaccaaagcttgggaaagtgatgatgggaaggtttttgagttgaaatgacaattcatgaatattttctcagtggtgttttggtggactggagagatgaaggaataggaactggaggtaaattacttgtgctgtaaatttaagtcagtacatgtggtatctattccttccaaattttaactgattttaaatttgtaatctatgtacttttaagttgttaatataatctatagcatggagccataggatcatatgtcaaaatttagttccaaatgtgcctttcaagaagtcttttctcctcagatcattctgcagctgttccatcggtgcccatttacactata

SEQ ID NO: 453105 - DNA, 596 bp, Homo sapiens
tggtattttggtaggtaccatcatacataagcttatctgttaactatttcttattgttgaaggttcaggttatttctaccttttggctattaaactaacactacaactagcaaaattttaacaaaatgcacattacatttaatcaatttagttgccagggtttgcttcttcacgttccaaatttgagttatatattatgtgattgtttttaatatattatttgtgtctattactttgttcctcattttgtatattgttgatcactaatttgtaatactaattctagtaaacgtatgccaggcaccgttctaagcactttccatatatttgcacatagtacaaaataatgggcacagtgcccaatgcatactcaattatattttttctttcctcagctttactccccttaaaaaaagtaagttaaaaaaaaattgaacccttcttggaaacaacacagtctaaaagtctaagctttataawctaaccattaacatcttgttcagaataaaaccctttgggaactctatttgaaatacatctaggctcccctggaaaatgcctggccatcagttctccctgctgaatgcacagatgcc

SEQ ID NO: 453106 - DNA, 596 bp, Homo sapiens
tggtattttggtaggtaccatcatacataagcttatctgttaactatttcttattgttgaaggttcaggttatttctaccttttggctattaaactaacactacaactagcaaaattttaacaaaatgcacattacatttaatcaatttagttgccagggtttgcttcttcacgttccaaatttgagttatatattatgtgattgtttttaatatattatttgtgtctattactttgttcctcattttgtatattgttgatcactaatttgtaatactaattctagtaaacgtatgccaggcaccgttctaagcactttccatatatttgcacatagtacaaaataatgggcacagtgcccaatgcatactcaattatattttttctttcctcagctttactccccttaaaaaaagtaagttaaaaaaaaattgaacccttcttggaaacaacacagtctaaaagtctaagctttataaactaaccattaacatcttgttcagaataaaaccctttgggaactctayttgaaatacatctaggctcccctggaaaatgcctggccatcagttctccctgctgaatgcacagatgcc

SEQ ID NO: 453107 - DNA, 620 bp, Homo sapiens
cacttttcatttcctggttctctgttgacagtattgcttatttccagatggataaatagtttgcaccttaatgtaatcaaagactgaaaaaaagatgccacttgaaaaacatttgrgaaaagagaaaagaaggggaaaataggcctctgaggtggtatctataatgtggtactgaatttcactctatcttcacaaacaataaacctcatgttttataacattttactgaagcattattttctaataaatccccttttgttttgattcttgttgctgtataataagcaaagaagaaaagaacaatggctggaaattctgtctgtgtgatttgaagtgctctcacttgcatgctgagaagtgttataacgaatatttttggcatcagctgatgatagcagcttggtactagcagcacttgattcagaatgtcatatgatacaataatacacaaattgagtgcacagagggggaaaaatcatgcaacctgtcataggtacagcgatattccatgagtattcagggctggagatgtagaagtagaaacctgaaatctgaaatatgaaaaaaatgaacaaacacttaacatccacaaataccaagcaaaaattaacaaatgaaac

SEQ ID NO: 453108 - DNA, 554 bp, Homo sapiens
gaacacatcaacttgggtaacacaaaatatgagtaaaaacaaatatgagagaaaaacatatatgtaaactraacacaaaaattgaattgaaccattaaaagttcgctgatcttatccctaaacaaacttctgggatatgtgtatttcatcattcgtgtgtttgaaattaaattttatttaactggtatttttaagctaactgttctaccaccaaaatcagttttaaaatacacttctagtttctgctacattctcatataatttaaaatcagccgtgtgaagaaaatacaaaccttagattcaaagcctagaatcaactatatacctaaaatataccagaactgattgttttataaatgagcaacagtgagcattcttctctttagaacctggctcataactcatctctcccaccaaccttcttgttgcttcctcaaatcttcccttctctccagctgaaaactacagcatcatcatacatatctgccttcttctcatgttaaatgtaatctatgcctcgagaatctcacctaatacctgctggacatttctaa

SEQ ID NO: 453109 - DNA, 539 bp, Homo sapiens
gtgtttgaaattaaattttatttaactggtatttttaagctaactgttctaccaccaaaatcagttttaaaatacacttctagtttctgctacattctcatataatttaaaatcagccgtgtgaagaaaatacaaaccttakattcaaagcctagaatcaactatatacctaaaatataccagaactgattgttttataaatgagcaacagtgagcattcttctctttagaacctggctcataactcatctctcccaccaaccttcttgttgcttcctcaaatcttcccttctctccagctgaaaactacagcatcatcatacatatctgccttcttctcatgttaaatgtaatctatgcctcgagaatctcacctaatacctgctggacatttctaaacaaatgtccatatgtacccccctcagcaaattattcaacagctgaaaagtgtctttctccagatttgacagtcttgttgtattccctaaagaagttaatgccaacctcatcctctcagttgctcaagagcaaaacttcta

SEQ ID NO: 453110 - DNA, 587 bp, Homo sapiens
acctaatacctgctggacatttctaaacaaatgtccatatgtacccccctcagcaaattattcaacagctgaaaagtgtctttctccagatttgacagtcttgttgtattccctaaagaagttaakgccaacctcatcctctcagttgctcaagagcaaaacttctacataatcttctataaccctttctccctggcccctcatctctaatcagttaccaaagtgtgcccaatctatctccgtacggactataatttacaaccccatcagattttaagctctatcatagtaagaatattagatttgtttgaaatactgtacccattacccagtaccatatctggcacaagaagatacacagtgcatatttgttgactaaagttatatattactatatctaaaggcaattattttagttgttagcctttatatttcacataatcacacatgagaggattttcagggatcttttgcccatcacagaacactgatctaaatttgcttatattccctgttttcctgacgccccaaagtccttaccaatatgcacacagacacacacacacacacatacacacacacacaca

SEQ ID NO: 453111 - DNA, 621 bp, Homo sapiens
gtgcatatttgttgactaaagttatatattactatatctaaaggcaattattttagttgttagcctttatatttcacataatcacacatgagaggattttcagggatcttttgcccatcacagaacactgatctaaatttgcttatattccctgttttcctgacgccccaaagtccttaccaatatrcacacagacacacacacacacacatacacacacacacacacacacacacacgtttaaccttaacaacatttcaaattgataatcactatatagaaattatttttaaaagaaaaaggctattaggctattatctttttttcatcttctaggctttcctcaaaataaagtggaaaattggcaagcaatgagtcaatttgataaaatgtaaacagtcaaatgaaatagatcaggccaaatgctttattgaaatatttagtttcatccatctacttaattgacaaaattggccatattgttaaaagtttaatttatctcagccttgctgatatatctataatcaaaagcagcattttggaatggaatagttccttatacatatttatatggagttgactttttaaaaagagttttcaacaaaatttcacataatgtag

SEQ ID NO: 453112 - DNA, 621 bp, Homo sapiens
gtgcatatttgttgactaaagttatatattactatatctaaaggcaattattttagttgttagcctttatatttcacataatcacacatgagaggattttcagggatcttttgcccatcacagaacactgatctaaatttgcttatattccctgttttcctgacgccccaaagtccttaccaatatgcacacagacacacacacacacacayacacacacacacacacacacacacacgtttaaccttaacaacatttcaaattgataatcactatatagaaattatttttaaaagaaaaaggctattaggctattatctttttttcatcttctaggctttcctcaaaataaagtggaaaattggcaagcaatgagtcaatttgataaaatgtaaacagtcaaatgaaatagatcaggccaaatgctttattgaaatatttagtttcatccatctacttaattgacaaaattggccatattgttaaaagtttaatttatctcagccttgctgatatatctataatcaaaagcagcattttggaatggaatagttccttatacatatttatatggagttgactttttaaaaagagttttcaacaaaatttcacataatgtag

SEQ ID NO: 453113 - DNA, 477 bp, Homo sapiens
ctgtatcccagatccttcctcacactgcttgttcaagagcattaccacagcagtttttctccttgagtattctttgctttcttaccagmttaaggagaattcaaaaggtttttaaaatactatatctagcatattgaattgttttctgcagagcattgaatggagtgccagttaaccatgttggagatatattagtggttaatcctcagttacatctcacttgatccatcagcagcgttttatacaattaatctcccctctttattaaaacactcttccatgtggcttcaggaatcatgcttgctcattcctcccatcagatgtttttccaggttcttcctcaaatccctgtgctgtaaagatcagcctgcccaacagtccagctccaaaccaggccttgtcactatctatactgatttccaggtggagccatggactcagttactaacaactcccaaatttacatccccaatcctc

SEQ ID NO: 453114 - DNA, 566 bp, Homo sapiens
gaggcggtttctggtaatatctgttatatatstagtttacatttttcaaacagcccctcaagtaggagtccaataataagaattaaaggaacttgagttttccttaatgttttaggtgcattatatgctgcttttgaaaatgtgaaggtggaactgattttggctgggtggagaagcattaaacccatttttctctttatttcccccccacctccaacctcccaacatgcattttctaaggtttactcattataatttttaatttttacttttcaaaattcacttttaatagaaggctgtcagattggctccaagagcaaacagcaggctgactggcgcttggcggaggagggagagggtcgcgcgttgggtctgggtttggggctggggctggagctggcgggtggggagacttcaggaggggccctagcagagagactgcagtgacactgccctccctgggctggttgaagcatctcactggtgacgggtctgaaagcacgtggctacgtcatggaaagccagtcttttcaatgcaaacttcaactcctcctcctcctccctct

SEQ ID NO: 453115 - DNA, 448 bp, Homo sapiens
tggcaattgaggctctggtagtagcctctggctgctccgtggactcggtgctgcagtgggctctgggctctgccctgagtcctcctccctgtgttctagttcttacaccgtttctattcaccccatctgtttcctcctcctccgtccttttaccctcctctcttcttaactcctcagcgtttagcaactctgaaacgacacaccaacctgagaattgcccaaggggaaaacagtgttgtcacctttccacccgcatgtctaattcagctatgaagtgtaccccaagatgtactccaagtccccgacatcaaacctaaaacttgctgacgcttggttcatacaaaaccaacttacatytgcaacactatctcacagcctaatatgaagaccctttttgcaagacttctcaaagtgagaaaggccaagggctgcagtgggaagggcaggg

SEQ ID NO: 453116 - DNA, 566 bp, Homo sapiens
gtgttaagtgagtctcctgaaggctgcagatagttgattggtgagttcttatccatactgtggttctgtatctgtttgttgttgttgttgttgttttttgtttgtttttttgacagagttttgctcttgttgcccagactggagtgcaatggtgcggtcttggctcactgcaacctctgcctcccgggttcaagcaattctcctgcttcagcctcccaagtagctaggattacaggtacctgcaccatgcctggctaacttctatatttttagtagagacaggttttcaccatgtggaccaggctagtctcgaactcctgacctcaggtgatccacccaccttgacctcccaaagtgctgggattacaggcatgagccactgcacccagccggttctgcatcttttaagtggagcacttaggccatttacaatcaatgttactattgaaatgtgaggtagggttgcattcatcatgctctttgttgtttgggaattttggatttttttgttttttgtttttkctttttaacttttagttttgttttataggttctgtgtgatttat

SEQ ID NO: 453117 - DNA, 554 bp, Homo sapiens
ggcccacaattgtaatcccagcactttgggaggccaaggcagggatcacttgaggccaggagttcaagagcagccttagcaacatagtgaaaccctgtctctacaaaaaatttaaaaaattagctgggcatggtggcatatgcctgtcattccagctactcaggaggctgaggtaggagcattatttgagcctgggtagttgagggtgcagtgagttgtggttgcaacactgcactccagcttaggcaacaaagcaagaccttgtctcaaaaaaaaaaaagatttattctatttgatagttaaagaattcaatgctgggtaattctgaggcagaccaaattgtggactttgaattcgtagttttagctttgtcgctcagcattaaaatcataaaacctgagacaaagaagcaacaagcagtaatgctttatatgtaaggactttcttgttccaagaaatgtatcaccttatatacaacacaatgtactatttaaatgtaacataaattatrtattcctatgcattatttttctgttcatgtatatttttatatt

SEQ ID NO: 453118 - DNA, 650 bp, Homo sapiens
gtcactctggatcttgcaacatgttcctgttaggtgtgtttcatggccagggcagttgggattgccagcgctgttaggagtcattgcttcttatgcaaaagtgcgagagggcttcattgatttccgcagcaggccttactccctcccactctgcacacttcctaaagcctccttccacctttacaaactcagccccctcctggccatgtcaactcctgatgatgtgtcaggtgtcagcttgtacacatccacctcaccatctcaggggggtcttctgtgacaccgatgacaagctgccacactgggtgctccttcagcacctgcatatctcctttaggacactttctacggtagaattatttaattattagcaatactgtgatgagttactcacccatgagttctctgagggcagtgattgtctcttgagtcattgtaaatccctgatgtcgagcatagggcctggtacctagaaggacctcartattgactgactggcaggtctgcttctcctgtccacttctggaataacactaacgaacccagcttctgaactttgccattttaactggccatggtcatgcatctcaccatgtatttcccctttatttttgggctctgctcggttccttagcttttcttgataggac

SEQ ID NO: 453119 - DNA, 600 bp, Homo sapiens
ggctgttcttaaatacacaacagaactgctttaatgattgtagcacctgtgtcatattgttgactaatactaaaattctgatcactgcaatgcctcgctagtcacatgatgcattttaactatacaagcaatacatgatcactataaaaactagaaaattcagatgaaaaataataatttaaaatcagcaattaatgccactaccgagaaacatccagtgttgaaattttataaccttgaagacttttcccatgagccatctttattgatatatatgcatatgttrtgtgtaatgtgtgtatgtatatgtatgtgtatatattctgagcttatatgttctctctctctatatatataaatatatatggctctgtacgctgccatatatgacatagtctctttatgtcagtaaacagagttccattctgccttgagaagcaatgtgacatagtggataacaatctagggtttgaattcagatggccctaggctgtacatcccattgcttactaattatatgacctgggatgggttactaatcttttctaaacttcaattatatagttatttatagttagttatacatttatatagtatatg

SEQ ID NO: 453120 - DNA, 584 bp, Homo sapiens
gtttatttagctatatagtatttcattttatgaatatacctatttacaatgtctttaaattargtctactttatcctaccattcaatttttgaatcctgaagctgaattttttatttttgtgcttgttaaattttattttattgatttcaaccaaaatacttcaggatttgggataatttaaagatacttttcaatctttatcttttgaatctgtgtgttactacacatttgataatcagaaatttaatccaaatgatagacaaaaatgttaaatgtagtagagaactatatattccatcattgttaccattatagtaactctccccattgttgtcctagggatatgaatacactaataaccagtacactttgattaatgttattaattggctattgaatctatccaactgattggtctgctcctgattaacacccttttccagtccaaaaggagagcaagagaaatcctgcctggagccctgaagaaatagaatatataatctttgttgcattcttacattttacctctccaagaagagtttcataaaagtaaataaagttaggttagtctaatacatgttta

SEQ ID NO: 453121 - DNA, 644 bp, Homo sapiens
tgtacacatattaatttaaaaatactttattagttaaaaaaaatgccgacaatcatctgagcctaccatgagccgtaatctttttgctggtggagagtctcgcctttatgttgatggctgctgactggtcagggtggtcgttgctcaagtttggggtggctgtggcaatttcttaaaataagacaacaataaagtttgctkcatcaatggactcttcctttcactagaaatttctctgtagcacatgatgctgtttgatagtattttacccaccatagaactttcagaatttgactcaattctctcaaacccttcttctgctttatcaagtaagtttatgggatatgctacattctgtattgttgtttcaacaacactcacagcatcttccatcaggagtagattccatctcaaaaaaacactttctttgctcatccataagaaatgctttctcatttgttcaagttttatcatgagattgtaacaattcagtcacattttcaggctccacttctaattctaattctcttgctttttcaacccaatcagtagttacttccttcactgaagttctgaacccctcaaagtcatccataaggattggaaccaacttcttccaaattgcagttaatgtggacatcttg

SEQ ID NO: 453122 - DNA, 583 bp, Homo sapiens
ataaacagttttgctgtcattcaggctttattgttctatttatagaggacaggtacataattcttgagggctctaggattttcagaatgatraattagtattggcttcaacttcatatcgccagctgcattagtccctaacaacagagtcagcccctcttggctgagtttgaagctttgaagccaggcattgacttatcttctctcactatgaaagtcctagatggcatttccttccaatagctggctgtttcatatacattaaaaatctgttgtttagtgtagacacgttcatcaatgatcttagctagatctcctggataacttgctacagcttctgcatcagcacttgctgtttcacgttgcacttggatgctagagagatggcttttttttccctaaaccttatgaatcaacctcttttagcttccatttttaattctgtggcttcttcacctctctcagacttaatagaactgaagagagttaggaccttgccctggattaggctttggcttacgggaatgttgtgactggtttgatcttctctccagaccactaaaactttctccataccagcaata

SEQ ID NO: 453123 - DNA, 583 bp, Homo sapiens
ataaacagttttgctgtcattcaggctttattgttctatttatagaggacaggtacataattcttgagggctctaggattttcagaatgatgaattagtattggcttcaacttcatatcgccagctgcattagtccctaacaacagagtcagcccctcttggctgagtttgaagctttgaagccaggcattgacttatcttctctcactatgaaagtcctagatggcatttccttccaatagctggctgtttcatatacattaaaaatctgttgtttagtgtagacacsttcatcaatgatcttagctagatctcctggataacttgctacagcttctgcatcagcacttgctgtttcacgttgcacttggatgctagagagatggcttttttttccctaaaccttatgaatcaacctcttttagcttccatttttaattctgtggcttcttcacctctctcagacttaatagaactgaagagagttaggaccttgccctggattaggctttggcttacgggaatgttgtgactggtttgatcttctctccagaccactaaaactttctccataccagcaata

SEQ ID NO: 453124 - DNA, 583 bp, Homo sapiens
ataaacagttttgctgtcattcaggctttattgttctatttatagaggacaggtacataattcttgagggctctaggattttcagaatgatgaattagtattggcttcaacttcatatcgccagctgcattagtccctaacaacagagtcagcccctcttggctgagtttgaagctttgaagccaggcattgacttatcttctctcactatgaaagtcctagatggcatttccttccaatagctggctgtttcatatacattaaaaatctgttgtttagtgtagacacgttcatcaatgatcttagctagatctcctggataacttgctacagcttctgcatcagcacttgctgtttcacgttgcacttggatgctagagagatggcttttttttccctaaaccttatgaatcaacctcttttagcttccatttttaattctgtggcttcttcacctctctcagacttaatagaactgaagagagttaggaccttgccctggattaggctytggcttacgggaatgttgtgactggtttgatcttctctccagaccactaaaactttctccataccagcaata

SEQ ID NO: 453125 - DNA, 655 bp, Homo sapiens
gaatcgtacaacttatatgtcatgtatagtatatgttatatgacatgtaatacagcacatatgtgctatatgcactatgttatgctttctgttttattgttggactcttatgaactgtattatgatttttatttcatagatgtggaaattgattttcagcaaagtaaagtaatgaaattatagtgaatagccagttagctgtagagagctgaacgctagaaagccccctggactttccccttgtgttactyctacctccctctatcattaaacgtaatattccagagttagccttactgtagaataaagcaaaagtggaaggattatacaaataaatatggtttagaggctgtattattatatttgttgtagatcatattgacatactgtgtttactagaatacgtttactacaagatatacttcaataaagaagtcaattgtttgctgatatatgtagtaaaacaaattatgataccttatccaaaaaattattttagaagtaaactgctataggatgttctgcagcagtggtaatagtagaccaataaattctggctaatatgcattctgctattggataaagctatcaaagttagggacataatacaaataataataacgttatttttattagaacatgcctcagtatccgt

SEQ ID NO: 453126 - DNA, 565 bp, Homo sapiens
agttagagaagttgtttgcaaaacatgtacctatcaagagaatcatatccagaatccataaagaactcttgcaaatcaatacagaaaatatagacaacccaatagaaaaatgggcaaaaggtttgaaccagcactccacaaaagaggatatctaaacggtcaatgaacatttgaaaatatactcaaaagaactactcagcattcaaagggcawtgagattatacaaccccacaaaatagtttaaatgattgtgtgtgagtatggacataaaaagacagagaatattgagaaaataccaattagagcattcatacagtgagtgggagtggaaattgaaaaacctactttggaaaactgtttgtcagtatcagctaaagtagaacataggtatgcccatcatttggttattccatacctacatacatactcagaagtaacatgctcatatgtcctccaaaagaaatgtgcaactattaggttagtgcaaaagtaattgtggtttttgccattacttttaatgtcattacttttaatggcaaaaactgcaacacttttgcaccaacca

SEQ ID NO: 453127 - DNA, 625 bp, Homo sapiens
cctcttaagtgggtgtttagcccatttacattcaaggtcagtattgatatgtgttatttggatcctgtcatcatgttaactcattgttatgtagacttgattgtatagttgctttagagtgtcaacgggctatttacttaagtgtgtttttgtgggtggcaggcattgttcttttgtttccatgtttagcattccctttagggtctcttataaggcagatgtagtggtaacaaattcccttagtgtttgcttgtctgtaaaggactttatttctcctctgtttatgaagcttagtctgaaggaatatgaaattcttgattgaaatttcctttctttaaagattgggtgctccattgttggatgtatttatacatccaagtgttgttatatcttattgttaaattgatttctttatcattatacaatgactttctttgttttcctcttactgttgttgatttaaaggctgttctatatgatataaatacagctacttctgtttgcttttgtgtctatatgtggaatatrtttttccacctcttcattttgagctcacaaatcttttgatcatttagctgggtttcttgcaggctgctttgtgttgatcttgttttatcacccatcc

SEQ ID NO: 453128 - DNA, 614 bp, Homo sapiens
tttttttagtacaataatcaacatagtaaatacctgaaaatatcaagatgaatttgaaaattggtaatttttgtacctatagaaaatttagcatatattaaattataaatgagcatactatttctttatcctaattaatttagaatttcttttcgtgggaaaaaaaattttgttcccttaagctttctttcctttttcaatgaggacttggtagacaattgttatcaaatttttattawtatgtaatatacaaattatatgtgtgtaacatagctaaaagctgtaacactttcagtttaagctttgttatgtaaaaaacctaacagtaaccactcccatgttcttgacaaaaaaaacaaaagaagacaaacaaattgaaaaatcaatgaattttcttggacacatcagttgattgaggtcacacagaatccccttaatctccaaaactggagcgatatgttacaacaaataatcacagctgagatcacgtgacatgtggaaaccatttctgataaagctaccataatctagataatatggtattggggaaagcatagacatatggatcaatggaacagagtacatggctcacataaataaggtgaactgatctt

SEQ ID NO: 453129 - DNA, 619 bp, Homo sapiens
taagagcacatctcaacatgtagatggagaactttgaaacatgtcacagaataacccattagcataacatgttcaataagtataagcattagtcattatttttcacataaagaatgaagtgtatataaaacagattgctgattcaggtaagttaattaacagagcttataattttctaattccccatcagtacctaattccaccatgtggtcacaagtctctttcttttcawtacagcacttataaatatgcaattttatttaatattgttgtcatccggctggtttctagagatagaaaaagaaaacaaggatatctctcttaactacatttcttctataaaactcagactcatcattttagacttaattcattgattgcatctgataaagattaaaatattcaattacaagttccctgctctgaagaaggtgttgctcattctttatcttatttaatagtagagagcaaacttgtgttgggaaagtatctattataattattatctgtaggtctttattaatgaacaacaatataggctatgatgtaatccagagcagaaacagagttttatttagattttaaattgttcggttttatggtagagaagatggtaggt

SEQ ID NO: 453130 - DNA, 495 bp, Homo sapiens
atggtagagaagatggtaggtaatcaaagagatagcatgtattgactacttacgaagttctaggaaatctgctaaatgttttacatgtattagttcattgctgttctatagaatataacaaaatraatactattagcgtttaaagtctgcagataatatgttgaaagtgaaagaaattacaattttctcaaggaatgtcttacagtaagtgagcaaattctgtctgagcaagttatggtaaaaatttgatactatgttcttggtctcctggtatttacacactaatggtgtagtcatgtatcagtcaaagggttttaataatgaatgcataattacacattgggagaattgcacaaaattgaaagataaattatttactattacatttgatgcttttgttcttgaattcacaatatacattgtatttacttgttcaatgccatcagctatacatttgtgatcatgtcttatattacattgtggacaacaaataat

SEQ ID NO: 453131 - DNA, 555 bp, Homo sapiens
atctctttgtaaaggatgcagttttttaaaagaaatgttcttgtagacttgtcacattattattattaataattttgtcttcactccttaaacttcacagttatctacacttgtttttcaaataaaccacttcatgagaaagctggtgaatacattttgctattatcagtgtgactgatgattatagttatctcttaatcatattgatcttagtcttgagtcatacttaytgggtggaaatcaatattaattgattggaactattaccagtgaaggtatcagattgatttagttgttcaaagttaattttatgaatgatctatgtttctggtaaatctattgttttttattattttaccaatacttataatagcaattacataacaatgtaggttagtttaaaagttatacatgttgtatgtcaacaaagaagtttgcattcagcaatgtaacatttttttaaagaagcccctatccacaaaaggaaaaataaagtttcatcaatgaaaggattatttgagaatgaagaatttcacattagttttattcaaatct

SEQ ID NO: 453132 - DNA, 568 bp, Homo sapiens
aaatacaaacatgtataagtggaacagatttaccatccagaaataaagccaaatatacttacaaacctaatcaagtctctgagtatagaatgtcttatttaataagtaaaatgagaagaaagtcaaacataaatttatayttcatattatacaccaaattgatctctagtgcatatagtgacaggcgagatatttctagtaagaacttcccttatgcctcacactccttccctgcccacacctcccctggaagaaaaaaaaagtccagaagcaaatcgggatcacagaagctcttaaattatccatgtcttggaaattcactgttgagcaaacttagtaatattagaaagatattagtgtgttactgtaaaagcttgatatggctaatatatttgttgtagaaattcaccgtaaacatgttatacagaaaatttgtgaacactagaagattattaagacaaatataagtatttacttaatttttaaagtggttttaaatagttggctttaaaacatttaagaaaaatactacatatgtcatggctccaataatgatttcgctgtttga

SEQ ID NO: 453133 - DNA, 614 bp, Homo sapiens
tatatcaatatgtgtacatgtgtaatcatataatttttgactttctttttcattttcattttactttgttggggaatactatttgtaagcattaaaatgcagctatgttaggctacaagaaaatattaatattagccagataaaatttatctttcaaatgtctctctttggaaatacagatgaaacttgagtaagacaaattttatactttatccaaggagtttatagtcttgtgcaatgaacacagaagggacattacagtgaacaaaattacagcacagtgagattgataatttcatggaaaatgtatgaaaggctatgatatacttatagaaaatcaaccagaccctggaattgatgaaaatttctggatcagcataaataattcaagtaacagaaatggagaactaaacatttccaaacggaaaaaaaatttaaaaaaaamaacaacaacaacagtagaaagtcctgtaagaacaaagaagcattgtgctttgagaaaatgagtataatatcattagacttagagaggcagttggggagacagacacataatctaggaagtgaaggatatgtaggcccggtgaagggctttggaatttatcttgagaaca

SEQ ID NO: 453134 - DNA, 619 bp, Homo sapiens
gaagggctttggaatttatcttgagaacaatggaaagttattgaagatttgtaagtgagaaccagagatccatccagtagcttagtgaagattggggcagggggaagctaaaaccagagacagcaagatacattagaagatggtgccataatttacttttcttaaaaaggttactcgtctgtctttataccagtggttctcaaagtgaaccgtcagatccctggagggtttctgagataaattcaggaatccataagataaaaatgagttacataataataggaaaactttatatttctacttcattatgttgtcatttgcacaatgcaacytcatgggaacaaaagttcagtttcatttatgaatgttctagataaagcagtacttttaaaaaatttattaaatctctactcttaatgtcttttttaatattctgtatcacaaaatgagaaatacacataaagtccttcagttgcatgcataagtatgaggctatcttgagtgagatcacttgaacaattgtttgagttacgaaatgaacttgcagctttttgtttttggaatatcattttacttgaaagaaagcctgaatataaattatggtttcatatgtttgtgg

SEQ ID NO: 453135 - DNA, 489 bp, Homo sapiens
actggtatctgagccccacactcagatattctgaattaaaattgatgcaggatttttttttttttttttttttgctccttagttcagctaaaatacaggttcttgtctcatgaccaggaaaacttaggcacgcaaagacattgaagggtgaggaggatggatttattaggagaaagctctcagtgcagaaaaacggggkgctaccaacaggctcccatctcatagattgaataccaggccactacacacagctgaagagtcctggctcctcccctgcataaggcataaattcctggaggccccacaccattctcccagcgctcatgcaggcccttaatctgagccactccacagtgacttatttcccttatgatgcatgtattaagggacaaaatttttcacaatgggcatgtttaggcaagccccttgtgcacaatgacctgggtagcatttggctgtctcctgtctctatcagtatgaattgatttt

SEQ ID NO: 453136 - DNA, 578 bp, Homo sapiens
aatgaaaaaatatatactaaatggcatttttttccttagaaaaatactggtatctgagccccacactcagatattctgaattaaaattgatgcaggatttttttttttttttttttttgctccttagttcagctaaaatacaggttcttgtctcatgaccaggaaaacttaggcacgcaaagacattgaagggtgaggaggatggatttattaggagaaagctctcagtgcagaaaaacggggtgctaccaacaggctcccatctcatagattgaataccaggccactacacacagctgaagagtcctggctcctcccctgcataagrcataaattcctggaggccccacaccattctcccagcgctcatgcaggcccttaatctgagccactccacagtgacttatttcccttatgatgcatgtattaagggacaaaatttttcacaatgggcatgtttaggcaagccccttgtgcacaatgacctgggtagcatttggctgtctcctgtctctatcagtatgaattgattttttttaaaccccagatgattttaatgtgtagtaaaaattgacaat

SEQ ID NO: 453137 - DNA, 598 bp, Homo sapiens
ttctcttttgattttatttttaaatggcagtcttcaaactcactaattctttctcctgtttgatcagttctgctgttcagacactctggtgcattttcagttcattaattgtgtttttcagctctaggatttatttttgatttaaaaaaatatttcaatctctttgtaaaatttctctgataattttttaattgattcactgtgttttcttgaactttaaatagcttcctcaaaacagctattttgaattttctatctgagagttcacataatttcatcatgttagagttggtccctggcaccttacttagtctattgttgaggtcatgttttcctaattgttctttatgcttttggacatttctcaawgtctgttcattgagaagttggatatttattccaatctccaaagtctggccttttttgaacctatcctacttcagagcaccttccaagaattcaaagagggttgactgttgagtttcctaatcctgtgttcactgcagcaatttcagcactaaagggtgccctaagttcagatatgctgtgattcttgcagactcctggataaccagtcctgatgcactttgagaagatg

SEQ ID NO: 453138 - DNA, 419 bp, Homo sapiens
ggggtgacactgagttccaatgcaaagccccacactcacgtcactctgcttctcccaagcccacaggttctctctctgcactgagatgccttgggtttggtggacaggtggtgtaggcaaagaaaaactgtcctttctgtccccwtcaattagccttttcttgttattgtgcaacaaccaggtacttgattctctcatgtgattattttgttcttatgaaggtgcttttctaggcggagagttgttctccttgataattccattgggggacaattggaagcttctatttggccgttttgctccacctcctcagaaaatcctatcttctaaacacttttgttaatttagaactattaaaataaagttttattaaaaacaaacacaaaaagaacaggttcagtggaaaaaatcttgcacaa

SEQ ID NO: 453139 - DNA, 578 bp, Homo sapiens
tattagagattttgagatgagatcattctagatgatctgagtaagtcttaaatccaatggtccttataagaaaaacacagaggtgggatatgaagagaagagaagaaggccatgttaaggacagaggcagaactggttaatttttaagtaagagaaacacatttctcacagttctggaggctgtgaarttcaagatcaaagcatcagatatattgttcagtgaaggcttgccatctgctctgtagatggtgccctagtgctgtgtccccacatattggaagaggtgaacagcttgcttgaacttcttttatagcgtcactaatcctattcactcatcacttaattacctcctaaaggccctacctcttaatactattattgtattggcaattatattttaacataggatttttgggaaggatgcattcggaccatggtaatctgattttggcctttctgcctccagaattgtgagagaataaatttccatggttttaagccacacccatgttgtgttaatttgttactacagctgcaaaacaataatacaggtactttctaaggaaattagttgtgtt

SEQ ID NO: 453140 - DNA, 646 bp, Homo sapiens
tggtgggcattatactgtagttgttatgaatttacccctcacttccaacttttttctcaatgaattaacagggaagccagtgatagcggaaatttaagaggagaaaggaatacaaggtgtgccttgtcccatccacttgctatctgtagatggctrtatgaacatgcagcctgcaaatataaaagattcaatagatgggatattgtccagacatatgggtaaagttttaataagacataataatgtccttttatttgtgtgtgtgtgtgtgtgtgtgtatatatatgtacacacacatacatcttatattggttctgttttgctgaagaatcctaattgataattgcactttatgaaaatagaaggagatagctttctattgtttttattttactgattgcatatgtatagcatatgtggatgatgatgttttcttgtaagctttcttacatgttaaattttattaaagtaattttaatatataaaagggagagtatcaaaggagaagatatttaccaacaatatttgagtgtgtcaatgcgagtatttataggaaataaattttaatatcaaattccctgctagataaaataatgtagtcatattaaagggtgtgaatgctagaataacagcttagaaaacaacg

SEQ ID NO: 453141 - DNA, 646 bp, Homo sapiens
tggtgggcattatactgtagttgttatgaatttacccctcacttccaacttttttctcaatgaattaacagggaagccagtgatagcggaaatttaagaggagaaaggaatacaaggtgtgccttgtcccatccacttgctatctgtagatggctatatgaacatgcagcctgcaaatataaamgattcaatagatgggatattgtccagacatatgggtaaagttttaataagacataataatgtccttttatttgtgtgtgtgtgtgtgtgtgtgtatatatatgtacacacacatacatcttatattggttctgttttgctgaagaatcctaattgataattgcactttatgaaaatagaaggagatagctttctattgtttttattttactgattgcatatgtatagcatatgtggatgatgatgttttcttgtaagctttcttacatgttaaattttattaaagtaattttaatatataaaagggagagtatcaaaggagaagatatttaccaacaatatttgagtgtgtcaatgcgagtatttataggaaataaattttaatatcaaattccctgctagataaaataatgtagtcatattaaagggtgtgaatgctagaataacagcttagaaaacaacg

SEQ ID NO: 453142 - DNA, 646 bp, Homo sapiens
tggtgggcattatactgtagttgttatgaatttacccctcacttccaacttttttctcaatgaattaacagggaagccagtgatagcggaaatttaagaggagaaaggaatacaaggtgtgccttgtcccatccacttgctatctgtagatggctatatgaacatgcagcctgcaaatataaaagattcaatagatgggatattgtccagacatatgggtaaagttttaataagacataataatgtccttttatttgtgtgtgtgtgtgtgtgtgtgtrtatatatgtacacacacatacatcttatattggttctgttttgctgaagaatcctaattgataattgcactttatgaaaatagaaggagatagctttctattgtttttattttactgattgcatatgtatagcatatgtggatgatgatgttttcttgtaagctttcttacatgttaaattttattaaagtaattttaatatataaaagggagagtatcaaaggagaagatatttaccaacaatatttgagtgtgtcaatgcgagtatttataggaaataaattttaatatcaaattccctgctagataaaataatgtagtcatattaaagggtgtgaatgctagaataacagcttagaaaacaacg

SEQ ID NO: 453143 - DNA, 605 bp, Homo sapiens
atccttaccaagccgagtagaacaacaacaacaacatgaaatttaaggatccccagacagaggattcaaggtcyctaaaagaagagaggtacagagtccgactgaaactcagcaactgttttcccctccaggcacttgcagataattccgtaggtgcctagaggataaagagccaaggtgaaagtggctgaaaagcccagcagttttcagaagacttactataccaaggtgcctagagatgggggtcaggaaaaaacaatgaggggcgtaggaaacaatgacctctgcaggtaaatctggatcactgcatggatacccaccatgtgggtagcttttccagatagactgaggcttaccgggactgaacaccagccttgatctctaattggattaaagtaatttactccaccctgagcctcatgtaacttaaagtggatcttctcaggagaaagctaacatcacagtagcagatgatttcggttccctaccaatccccacggatcttaactgttttactttaaatcaatcctttttcaagatgagaaaacctgcataggatcccactggtttagtgttagtgtggcaggccagcaagggtgggcctt

SEQ ID NO: 453144 - DNA, 580 bp, Homo sapiens
tttcctctttcatactaaaatacaaacagaaaaaatactttaaaatgtatatttttaatgaatctaatgcacacactaaagtcagctttgagcacagtgattcaggaatgcatgcttgaaacagttattgaacatataattttgttaaaatactccttactaaatacttggtgaatttctaaaatgtaaagttyatttaacaataattagaaaaaaatagtgtgtcatattccaactaacttgacatgtaggtaataatttgttttgcaaaacaggctatcttataaaacaatgaattctccttccactgtatcttatgcttctttctattttgatttagggtatattaaagttattaaatccacttgaggttgcatgaatttgtttacaaaaatgggaaaacgaagcacattatataagcctcatttattccattaccaagactcttactttctttagaaataatactagataaagtcacttggactgaaacagatggaattagggaagaattaaatcattccaattctggatttattgcaaatcctaagaattacccaaaaaggggaaaaaaggaaaa

SEQ ID NO: 453145 - DNA, 582 bp, Homo sapiens
accaattattttaattatatattaccttgataatatttagcttgcagctttacattactggacaaagaacccaaactttagtatagtacaaactactctacaaaatcaaatggtctacacccactacccttggaatacaataattatggatatttttactatcaaaacaatggtttaacaaaatcacatctctgaaatcgagtatttaaacagaggcattttatatattcattcrtaaagagtgataattccaagtacataaaattatccataaattggttaattttacttaaagttaaattgcaaaattatactagaccaaaaattagagtttggtgacccatagtcagattcctgtatgtgaaataattacttttatgactgattaaattttataaatttctttattagtagagaagaggtcacatttctttatattttctacgtatccaaagacatttattgttaagtatgaggagaaaagtcttttcctggttaagggagataaaaacacacacaagaatgtgatggaacctggagaatgttaagaggttattatcaaaagactcactcatactaaat

SEQ ID NO: 453146 - DNA, 305 bp, Homo sapiens
atgtttatgcagtacacccatttatccttaagagctatcaagtctaagtcttgatccactagattgtaatagtacaaaagtaaattcaaatatctctttggcaaaaatgtaatatgtcctgaagtctattccacataaatggaaattgttcttagctgaactcagaaataaaatggaaaatataatgactaagtttaatacaaatgtcaatccactcagccaataacyttagtgtacattatttaccatgctaagtatggctgaaggtattaagaaaaccaattatgttcatccttaatcatcca

SEQ ID NO: 453147 - DNA, 609 bp, Homo sapiens
tgcaaaccctacaatatgaaataataatccagaaatattttwaaatattttatgtcagtacatttggcaatctagataaaaatgcataactttctcagaagtcacatattaccaaaatgatttaagaataaaaaagatcaataatagtatatattttgaatgaacttgtaattataaatcttgacataaagaaaactcaacacgcagaaaactttattaatgaatgatatgaagacttgaaaaaaatacctttattcccattcaaatttctttattatatagagaatcagagagtcctttcttaatcatatgaggatgctaaaattactttgatagcaacactgaaaaagtaagaagaaagaaacttaagctttaggatgtcagctataatgctttgggactatggactaaaaatactgaacaaaacattaccactaaagaaaaatatgatcaaatatgattttctaataacatctatgtgttgttaacatttaaacatcaattgatataattttgaatattactataatttgaaataaaagtaaaatatataattatccactcaatccatgcaaggaaaaaaatacattttccaacactcagtaccat

SEQ ID NO: 453148 - DNA, 609 bp, Homo sapiens
tgcaaaccctacaatatgaaataataatccagaaatattttaaaatattttatgtcagtacatttggcaatctagataaaaatgcataactttctcagaagtcacatattaccaaaatgatttaagaataaaaaagatcaataatagtatatattttgaatgaacttgtaattataaatcttgacataaagaaaactcaacacgcagaaaactttattaatgaatgatatgaagacttgamaaaaatacctttattcccattcaaatttctttattatatagagaatcagagagtcctttcttaatcatatgaggatgctaaaattactttgatagcaacactgaaaaagtaagaagaaagaaacttaagctttaggatgtcagctataatgctttgggactatggactaaaaatactgaacaaaacattaccactaaagaaaaatatgatcaaatatgattttctaataacatctatgtgttgttaacatttaaacatcaattgatataattttgaatattactataatttgaaataaaagtaaaatatataattatccactcaatccatgcaaggaaaaaaatacattttccaacactcagtaccat

SEQ ID NO: 453149 - DNA, 540 bp, Homo sapiens
tggcagtgggtagggaaatctcagcttgtgccttttctatgctaatgtgacccacagactgactcacatggggtgggagcaaaggttaagtgcaccttccattctgacagcaaatgactgagttcattgaggaacaggggcaagtctggggttcttattcccagcgtatggtagacacttgacaactatttgttattactgaatgaaagatgcttttcattaagctacatgtttctctcatgtaaaagtagggttaactagtctatatggcagggacratctggcagtacttatcctgctttataatgactttgtctttctttagcaattgatttatgctctcttaactttccattcttcaaaatgaggctaccaaactgcaagtgttgtgattaagatgaatatgttttgaactcgtagaaaacatgattaatttaactttactgaaaatataatagaaattttgaattctaaaaaaatccttaggggaataaattctgaacatattataggtgagtcttttttttataggcaaatatt

SEQ ID NO: 453150 - DNA, 540 bp, Homo sapiens
tggcagtgggtagggaaatctcagcttgtgccttttctatgctaatgtgacccacagactgactcacatggggtgggagcaaaggttaagtgcaccttccattctgacagcaaatgactgagttcattgaggaacaggggcaagtctggggttcttattcccagcgtatggtagacacttgacaactatttgttattactgaatgaaagatgcttttcattaagctacatgtttctctcatgtaaaagtagggttaactagtctatatggcagggacgatctggcagtacttatcctgctttataatgactttgtctttctttagcaattgatttatgctctcttaactttccattcttcaaaatgaggctaccaaactgcaagtgttgtgattaagatgaatatgttttgaactcgtagaaaacatgattaatttaactttactgaaaatataatagaaattttgaattctaraaaaatccttaggggaataaattctgaacatattataggtgagtcttttttttataggcaaatatt

SEQ ID NO: 453151 - DNA, 616 bp, Homo sapiens
gttagcaaacatgaaagaaaatgttggtcaacataaacgttcaataagaaaacttggctgttattcaatgaggaatgaagagtatcatatgcagagtttcccttggtaaacatatttaaaataaataaatctggaagtgtctgagagtcaaaaatgtggtgcatgcaatatatgatgtaaaacaaaggcgggtggtttacgtagctcagcagacaagacgccagatggtatgtatgcttgattgaaagtacccacctgttattctgcgaacacaatgggaggaacagaatcctacatttcctcatcccctttaytgaggactctccttctttcatacttagtatttttatattacctgtatctattattctacgtggcaagaagtccttttgggaaggcagagtataaataatgtagttttattaatagataagtattagtaaaactttgcattagaagatgtatgactgacgttgcatagagttgtgtgatgtagagtaatattcatggtgtacacatcataattatgtttgcgaaacatgaatacctactacaggtctttgtgatagacatcagggtggggatgcataggggacaaaaatgtacacaattttgt

SEQ ID NO: 453152 - DNA, 616 bp, Homo sapiens
gttagcaaacatgaaagaaaatgttggtcaacataaacgttcaataagaaaacttggctgttattcaatgaggaatgaagagtatcatatgcagagtttcccttggtaaacatatttaaaataaataaatctggaagtgtctgagagtcaaaaatgtggtgcatgcaatatatgatgtaaaacaaaggcgggtggtttacgtagctcagcagacaagacgccagatggtatgtatgcttgattgaaagtacccacctgttattctgcgaacacaatgggaggaacagaatcctacatttcctcatcccctttactgaggactctccttctttcatacttagtatttttatattacctgtatctattattctacgtkgcaagaagtccttttgggaaggcagagtataaataatgtagttttattaatagataagtattagtaaaactttgcattagaagatgtatgactgacgttgcatagagttgtgtgatgtagagtaatattcatggtgtacacatcataattatgtttgcgaaacatgaatacctactacaggtctttgtgatagacatcagggtggggatgcataggggacaaaaatgtacacaattttgt

SEQ ID NO: 453153 - DNA, 589 bp, Homo sapiens
gttcatttttcagtggaggaaactgaggcatggaaaagtcagatggctaccttaggatcatagagccaataaatgaccaagttctgattcaaacccaggccatctggctgaagagcccacctttgtaaccaccacatatagcatcttaggaagtgtgctgtaagggacgggccagctggcagacttcctggtgsactatcatttggaggaaattgcaacacgcgtgaaccaaagtataattaacccaatgtcaattcaatgtcaatgtcgatgtcaactgaagttgccaagaactttaagtggacaggtaaaaactcttccaaggatgctttcacaaattgaaacaatgaataaatatgcggccacgacctcagctcagggactatctcaatgacagtttctgcaagtggtcagttacaatatgtacatcctgtaactgaaaagatgcatggcagaatcttgttttcaaggaaaatataatttacttcattacctaaatgttaattgctttaatatgtctccaagaagtagtctggtttgtaatattgcaatagaaaaccaaaaagaagatatattttgcagagctgag

SEQ ID NO: 453154 - DNA, 589 bp, Homo sapiens
gttcatttttcagtggaggaaactgaggcatggaaaagtcagatggctaccttaggatcatagagccaataaatgaccaagttctgattcaaacccaggccatctggctgaagagcccacctttgtaaccaccacatatagcatcttaggaagtgtgctgtaagggacgggccagctggcagacttcctggtgcactatcatttggaggaaattgcaacacrcgtgaaccaaagtataattaacccaatgtcaattcaatgtcaatgtcgatgtcaactgaagttgccaagaactttaagtggacaggtaaaaactcttccaaggatgctttcacaaattgaaacaatgaataaatatgcggccacgacctcagctcagggactatctcaatgacagtttctgcaagtggtcagttacaatatgtacatcctgtaactgaaaagatgcatggcagaatcttgttttcaaggaaaatataatttacttcattacctaaatgttaattgctttaatatgtctccaagaagtagtctggtttgtaatattgcaatagaaaaccaaaaagaagatatattttgcagagctgag

SEQ ID NO: 453155 - DNA, 589 bp, Homo sapiens
gttcatttttcagtggaggaaactgaggcatggaaaagtcagatggctaccttaggatcatagagccaataaatgaccaagttctgattcaaacccaggccatctggctgaagagcccacctttgtaaccaccacatatagcatcttaggaagtgtgctgtaagggacgggccagctggcagacttcctggtgcactatcatttggaggaaattgcaacacgcrtgaaccaaagtataattaacccaatgtcaattcaatgtcaatgtcgatgtcaactgaagttgccaagaactttaagtggacaggtaaaaactcttccaaggatgctttcacaaattgaaacaatgaataaatatgcggccacgacctcagctcagggactatctcaatgacagtttctgcaagtggtcagttacaatatgtacatcctgtaactgaaaagatgcatggcagaatcttgttttcaaggaaaatataatttacttcattacctaaatgttaattgctttaatatgtctccaagaagtagtctggtttgtaatattgcaatagaaaaccaaaaagaagatatattttgcagagctgag

SEQ ID NO: 453156 - DNA, 589 bp, Homo sapiens
gttcatttttcagtggaggaaactgaggcatggaaaagtcagatggctaccttaggatcatagagccaataaatgaccaagttctgattcaaacccaggccatctggctgaagagcccacctttgtaaccaccacatatagcatcttaggaagtgtgctgtaagggacgggccagctggcagacttcctggtgcactatcatttggaggaaattgcaacacgcgtgaaccaaagtataattaacccaatgtcaattcaatgtcaatgtcgatgtcaactgaagttgccaagaactttaagtggacaggtaaaaactcttccaaggatgctttcacaaattgaaacaatgaataaatatgcggccacgacctcagctcagggactatctcaatgacagtttctgcaagtggtcagttacaatatgtacatcctgtaactgaaaagatgcatggcagaatcttgttttcaaggaaaatataatttacttyattacctaaatgttaattgctttaatatgtctccaagaagtagtctggtttgtaatattgcaatagaaaaccaaaaagaagatatattttgcagagctgag

SEQ ID NO: 453157 - DNA, 416 bp, Homo sapiens
aaatatattgaacaaaattaaaatgtgaagtaggtttgagagccagccctttctctgggcccaccagcttcctggcacacaagggtccagtgtgtgtttgttgtagccaagtagcaaaagatgtactaagcagggaaaaattgtctgttggctttttccccccttaactctaacttcaaaaagttttggaagtaattgaaccaaagatctgattaattttgagctaaaatgaaagatgcaaaaataatctttgaaagtagtaaagtgatcatatgaacacatcaattctgactargatgaggggagtaagcaaatttacaacagagcaaggcattctttaaatgctgttgtttaaaatgttctttaaaatgttttcttagataagagtggggtaaatcacacacatattattatta

SEQ ID NO: 453158 - DNA, 416 bp, Homo sapiens
aaatatattgaacaaaattaaaatgtgaagtaggtttgagagccagccctttctctgggcccaccagcttcctggcacacaagggtccagtgtgtgtttgttgtagccaagtagcaaaagatgtactaagcagggaaaaattgtctgttggctttttccccccttaactctaacttcaaaaagttttggaagtaattgaaccaaagatctgattaattttgagctaaaatgaaagatgcaaaaataatctttgaaagtagtaaagtgatcatatgaacacatcaattctgactaagatgaggggartaagcaaatttacaacagagcaaggcattctttaaatgctgttgtttaaaatgttctttaaaatgttttcttagataagagtggggtaaatcacacacatattattatta

SEQ ID NO: 453159 - DNA, 534 bp, Homo sapiens
acaccatttataacaataagtagctaagagttgggagggactttaaaaacaggtactctgtcagctgttttgcttttgcactacccacccccaaaataattttggaaatctatctgtccccttgcacatttttaaatgaagcctaaaatttatatcacaaatttaaatactacagtcccaaattatgtagtttttaatgtaaatgtttccattttagaacaaaaatggtacatctctcttttaagaatatatgattatatctggaaactaccgtgatttgttcaytactgctattcatttaaaatacataaataatctcttctttaacatatggaaatttttctatcctttcctttcctccatgaactgttatttccatttaactttcttcacagaacttaaagtaatatatctatactttaaaggcttttattgatcactctttcatacctctctataatgaaaatatttatataaattaaaaatttttttttctgaattagattttcattagtatcattgatcaaaataatt

SEQ ID NO: 453160 - DNA, 534 bp, Homo sapiens
acaccatttataacaataagtagctaagagttgggagggactttaaaaacaggtactctgtcagctgttttgcttttgcactacccacccccaaaataattttggaaatctatctgtccccttgcacatttttaaatgaagcctaaaatttatatcacaaatttaaatactacagtcccaaattatgtagtttttaatgtaaatgtttccattttagaacaaaaatggtacatctctcttttaagaatatatgattatatctggaaactaccgtgatttgttcactactgctattcatttaaaatacataaataatctcttctttaacatayggaaatttttctatcctttcctttcctccatgaactgttatttccatttaactttcttcacagaacttaaagtaatatatctatactttaaaggcttttattgatcactctttcatacctctctataatgaaaatatttatataaattaaaaatttttttttctgaattagattttcattagtatcattgatcaaaataatt

SEQ ID NO: 453161 - DNA, 630 bp, Homo sapiens
gaaacacaccatttataacaataagtagctaagagttgggagggactttaaaaacaggtactctgtcagctgttttgcttttgcactacccacccccaaaataattttggaaatctatctgtccccttgcacatttttaaatgaagcctaaaatttatatcacaaatttaaatactacagtcccaaattatgtagtttttaatgtaaatgtttccattttagaacaaaaatggtacatctctcttttaagaatatatgattatatctggaaactaccgtgatttgttcactactgctattcatttaaaatacataaataatctcttctttaacatatggaaatttttctatcctttcctttcctccatgaactgttatttccatttaactttcttcacagaacttaaagtaatatatctatactttraaggcttttattgatcactctttcatacctctctataatgaaaatatttatataaattaaaaatttttttttctgaattagattttcattagtatcattgatcaaaataattttagatttaggtaaccaataaaaataactatatttgttttaaaatgcatctgttaatgaaacagatgggctttaaatattttaattagttt

SEQ ID NO: 453162 - DNA, 630 bp, Homo sapiens
gaaacacaccatttataacaataagtagctaagagttgggagggactttaaaaacaggtactctgtcagctgttttgcttttgcactacccacccccaaaataattttggaaatctatctgtccccttgcacatttttaaatgaagcctaaaatttatatcacaaatttaaatactacagtcccaaattatgtagtttttaatgtaaatgtttccattttagaacaaaaatggtacatctctcttttaagaatatatgattatatctggaaactaccgtgatttgttcactactgctattcatttaaaatacataaataatctcttctttaacatatggaaatttttctatcctttcctttcctccatgaactgttatttccatttaactttcttcacagaacttaaagtaatatatctatactttaaaggcttttattgatcactctttcatacctctctataatgaaaatatttatataaattaaaaatttttttttctgaattagattttcattagtatcattgatcaaaataattttagatttaggtaaccaataaaartaactatatttgttttaaaatgcatctgttaatgaaacagatgggctttaaatattttaattagttt

SEQ ID NO: 453163 - DNA, 557 bp, Homo sapiens
tctatctgttgtgtgcatggtatttatgatattcacaagataaactgataggagtgtgtgatctgctaatatgtatattttaaaagctttaattactgtttttatggaagcatgatgctgtgtactttgactccagggagatgaaaattagaaaataaaatagcaacacaaccaacacaaatgctcctgaacaacaagccttttatttttaaatgagtgatacttgatgtgtgtcttagcacactccaggacctcaaagggcttgtcagcattgctttctgattacagattaaatgaaaaaagagaacagatttgagtggagcgattcygcctttccccttgcgaatctctcaccgtcactgctttttgctggctatgtgttgccttagttgaatgaagagaggtgacttatgtttttcaaatgctatattaaccttggaaatgatcttggataacttatcttggaaattaaagttttaatgaagtgagagtccctagagaaaattacagaaaaacacatttttttcctctgtaaatcaaaggcacaatcccactaa

SEQ ID NO: 453164 - DNA, 435 bp, Homo sapiens
agaggtcttttgtactctccaaacagaaaatgcctaagggaaaatatgaaaaagaagaggctggatagacggaccctttggaaagactttgtaatgaattcatctagtctagtgtcaaagaytgggtttctggctccatgactaactaggtttgctacctaatcaagttgtttatcttcatcaagtcacaaaagtacctggctcattgggttgttctgaagacaaataatccatagaaagccactttaactcaccaactcaccacctagcatttagaaatcattcattaaatgttagctagttatcctagtattagaggtaaagtggtagaaggaaagatataaaaagataatctattgtatgaacatgttttaattcctcagaagaaagacgaactctctattaaaccaaggctttacactgttttaactaaaa

SEQ ID NO: 453165 - DNA, 645 bp, Homo sapiens
aaatttttctccagtcacaaagcttatccttctgttaatttctgttattttgcagtctgctgggtttaatatgggactccaagggggctcctagtttagacccttgcctcctggcaggacatattttcccctaatgagacagcactggccaaatgctttattcttctctgcacagtgtagctgtgggattgcatagggctcattatgcacccaagtagtcatgtcctagtttctgcttttttgcagtgctggtatattcatgaaagagtgtaatgtaatatacaacaggtttttttwaaaatatcttgggatattgtaaaaaggagtaatttgctagaaaggtaagaagagggaattaaagcttcaataaatctgtgttaggctcactgccttgctgtatttgaggtcttacctagtttatttcaagcttggggttctccctaaggtacacaggacccaagctgatatattttagatgcaataatatttgggacagaaaattccaactcttgttttgtgaaatgctaggggatcctcaactatttcaagaaggattacaagacagctaaaaggaaaatgattttaaaattaatttaataaactaacccatgccattgagttccctttttgcagtattgggttatg

SEQ ID NO: 453166 - DNA, 553 bp, Homo sapiens
tggaggccacaagactagggcacttaatatgatacggttagctttgtttcaaattaaaattggaaccagtaatgtcttaattctyttgtctagacgattgtcacggctgtaaattatcatcataatagctattgtatggtttctaatgactttaccaaaacattatttgccaatcctataaactttttgaacatgctgtttagtttatcctgatgaatctattaagaggtgacacatacatcctgcttcctctctccaaagagacatttgtggattcaattccttgcttgttgctaatgccactttgtaatctcaatactgatctaattctgttttctgtctgtctacaacaaatttaatcagaaaaatcattatccaaatgtaatgttctgtgttagtataattactgataaagtaagctttacatctgccattttgccacatgtgggttttttttactgttgttttgatttgagttttttttttttttttttgagactgggtctcactgcgtcacccaggcttgtatgcagtggtgtgatcttggctcact

SEQ ID NO: 453167 - DNA, 435 bp, Homo sapiens
ttttcaccaacagcaatcagattatttctattttgaccagagttatttccaatttgacctcacatcaggaaaatcttatttttaatgggcaaaattttgaactttatatttaaaactcttgaactttatattaaaattatttacctttaaaaattatattaraacataattttttaaacccttggtgtcctctaaataatgattgcatattaacagttgaaatatgaatcattaacaaaaatgtgtttcatgtatatattttcaggaatacattaattatatgaaacaagtaatttatcatcactgtctatgaccttcactgagggccatttttaattagtgtttgtacttagtagacattgacaccataacagttataaagattttatattccaatacatcccagtgaacttaagaggtttcctaacttacagg

SEQ ID NO: 453168 - DNA, 582 bp, Homo sapiens
tttcacacagcccctgagtgatgtacctgccgagctctggactgaaagggatatctggggctgtggacggagtccagaagtagggcttcgatggaagagctaaatgtttctttattcttcatatgtctctgaggatgttgttgatagcagaaaacaatcagcaagaaatttctgctatcagaagctttcaaatccatgccctgaaaatcaaacaaaacaaaacaatacacttccttctcctataagttctaattcttatatttttcctagggctatcactgatgtctcyatccctttaagccatccaggggggtagttggaattcctaacagcactaggattaatagtgcagtggtataatgccattcataagtgtttgtggggaatacaatttctagtggatttgattttttataaaacatacagacattttaaacccttggcccaagtatcagtcctatttattcttttaattggcattagtttggtgatcttggatctgaatttctccttggtaaacagtaataaatattagcttccaaagtttgttgtaagaatgaaagacaacgctgtaaatgaaac

SEQ ID NO: 453169 - DNA, 661 bp, Homo sapiens
gtgctctggtttgagataatagggagacttatgagttttaggccactttcatttttcttttcatagcagtgaagaatttctgctaattcacattccagcatttattctgttttttttttttttgatccttccaggttcttttatcctgccttttgcttataaaccatttatttattttttatttatttttatttttatttttttttggaaatgagtcaattcttgatatcctttttttttgtttgttttttgttctgtttttttggagacatggtctcactctgtcagattggggtgcagtggcaccaccatggctcactgcagtctcgacctcccaggctcaagtgatcctcttgcctcagcctcccaagtagctggggccacgggcatgcactaccatgcctaactaagtttttaaatttgtttttgtagaggcagggtctcactatgttacccaggctggtctcgaatttctggctttgagtgatcttcctgccttagcatcccaaagtgctggaattattggtgtgaaccaccacacccagctgatctcctstgttttcatgatcgtagtacagtcgccctctgttagataaaagagatttatataagtgatttggccaaatctatttatttgaattaaggtaattgtttggagttg

SEQ ID NO: 453170 - DNA, 581 bp, Homo sapiens
gcatcctccataatcttattctcattcrtcaggtctttagcccagcatgtaccagaaggggttctggacctgttatagcagagactacaaattcttctccattttctgttctcttcttcttctttttaaagtaataaaagaggtttcagctgagcataagatcatgtcgctaaaggctacatttcccagcctcccttgtagctagttgtgatcatgtgatcaagccatagccaatggaatttcagtgaaaatagtgtaaccaattcccaggtcatttgctcaaaagagtgcaatatgtccccttcttttcttgtctccattgagtggaacatgagcgtgatggcaggagctggggcagtcatggatgaaaagttgcttttgcaggaccacagagcaacaagatagaaggagccttgaaaccaccatacaagctttgggctgattgtgctctctcagagaaagagataaatgcctaccttatctaaaccactactagttttcaacatagataatctgaatcctaacgtttttcagatattaataaacataacttaataaaaggtttggaaaacattgacata

SEQ ID NO: 453171 - DNA, 529 bp, Homo sapiens
taggcaaaatacaatcctgatgtgttcacagaaaatcaagatacatttaattattttggattttatagatacttatgagttgaatgctgttaccatgttgaatgctattacgagtaaaatgctattttactcgtcattatttaataaataattatttattatttattaaataatgacgagtaaaaacaaaactaaaactctayattggttacaagatatatgggcatggtttctacattccatatctgaggatcaaagacagaatactccaagtcagacataaccagaatatgggttaaatcattggttttcaatatttcttccaccaagggccaatggcttcttttagtatgtatgtgtatgtgtgtatgtgtgggtttgaaccccttgtttgacaggcttttaacattctaaacaagctgcattctttaaaaaatatattatatatatgagtgttaatcagaacttctgagcaacattttataaaattggcatttcattcttcttgtttattcatcacctgcaacct

SEQ ID NO: 453172 - DNA, 581 bp, Homo sapiens
atgactttacagcttgaacagacaattcagcaagaaagggaaaaacaaatacccagacataaaatacaatgcaatgtacaatatatatgtctatatgtctatatatttatgctcacttacagttcaaagcatgtaagtgaaattcaacttatattgtttacagaagtaaattcttggcaagcaggttgacaatatgtgtaaagatccttaaaagcttttatatatttggtaagtaattctgtttctgagaatctatcctaagaaaacaaacctaagtaggcaaagtgttacagtaatgaaaacagctgaaatttctatctatagagaaatgttttgagattcagtggtaaagtcatttcatgtaatatgatacagattttgaaatatgatttattaaaattgtgtagtaacataggaaatgcttccaatacagcataaaataaaaatcagagtaaaaattatgtttatgcttaaaatatatgaartaccttagagacacacagagagagagagagagagatgaaagacatttactatatggatgtttctaagtgaaggaatatggttcttttatttttttt

SEQ ID NO: 453173 - DNA, 502 bp, Homo sapiens
aatacaaaataaaataaagattgccaggctgataatttaatgcctcagaaattcaccacatccctacttacatctgaataaaattctgtcatataatttttcttaatactgtttttataagagatgacaaacagttatcaccattctttatataatagctcacctaaaattaaaagcagaattatgctttttatggtcttccccaatctgcctgtgctatccatgctgacagacactttcagagttaacacgaagaactttgttttacaattgtagtctattgctgattgtgaaatttgtgatatattagcagaaattgccttgactgttgaattygcatatgtccagttggtctccacctaggacttagtggcttttggttttcctgatgaactgtttttcacttttccaatatttgtgccaaacaagtcattcactgcctgtttcagaccacatttttctgtatcacccaaacattaagcttgaattatgtttttctcag

SEQ ID NO: 453174 - DNA, 299 bp, Homo sapiens
cgggaacgtgggaaacagctccctctgtccggtgaggactgaagaagtagtatttatacttatgtttttaaaagatgcagaaaaacatgctcctgcttttttccagagcaaagacataaagcaatgggtgtcatagaaacagtactggaatcagagacagattcctacttcgggctctatcacagactagctatgyggcatcttgggctagtatgggatgttcagtgctttatctttatctataactctgcttcattcgttcattcatataaaaaacatatgtggcgaacctagactgt

SEQ ID NO: 453175 - DNA, 619 bp, Homo sapiens
gggtcgataaatccagagataagcaaatttactatgatagtgggatgatatatatgctatgagacaggaggacgtgagtatctacaaaaacaaggaggagtgtctcctaacagggactggagaaccaaggttgcagtcagggaagtttttataagggaagagatgttggatggacaacatagaatgagactctgtttcaaaaaacaaaacaaaacaaaacaaaaaaccagtcaaataaaattatttaggagagatggcagggggtggggatgtgctcacaaagggagtgtggtctgttgaggagctgtgaggggctcagtttgtgtccacagggcagctgggttgatgagtggtgggcatggacctggagggatgagctgaggccagagccccatgcagcctagcatgtcatgctttgtatctcatctggagagtggcaggagccactgaagtctttcaacagaggagtaagatcatgwtatttgcatttcaggacagcctctttgtgccttggtagcgcccatcacaaaatgagcagatgaatgaggagatgatttctaactttttcagatcatgttcttttttgagaatattaattttttctctagaaaaaatacac

SEQ ID NO: 453176 - DNA, 545 bp, Homo sapiens
tgggttagttcagcttgaagagctaggaagaagaaaagaaaggagaagactgaaggtggcccctccagaaacactgcagactgtcagccttgtcaaatgcttgggttcttgcatgaagcgctcccttttccttgtggcttagtggcagcaagtatgaaaaatggaagtattgatggaaaaaatatacattggcagaagatgggtagttggggactctattggttagaaatgcacatgcaaacggctgggcgtggtggctcacacctctaatcctagcactttgggaggccaaggcaggtggatcacttcaggtcaggagtttgagaccagcctggcttctactaaaactacaaaaattagctgggcgttgtgatgtaygcctatagtcccaactactcaggctcctggggcagaagaatcacttgaacctggtaggtggaggttgcggtgagccgagatcatgccactgtgctccagcctgggtgatagagtgaaactccgtctcgaaaaaaaaaaaaaaaaaaaaaaaaaagaaaagaaaggaa

SEQ ID NO: 453177 - DNA, 545 bp, Homo sapiens
tgggttagttcagcttgaagagctaggaagaagaaaagaaaggagaagactgaaggtggcccctccagaaacactgcagactgtcagccttgtcaaatgcttgggttcttgcatgaagcgctcccttttccttgtggcttagtggcagcaagtatgaaaaatggaagtattgatggaaaaaatatacattggcagaagatgggtagttggggactctattggttagaaatgcacatgcaaacggctgggcgtggtggctcacacctctaatcctagcactttgggaggccaaggcaggtggatcacttcaggtcaggagtttgagaccagcctggcttctactaaaactacaaaaattagctgggcgttgtgatgtatgcctatagtcccaactactcaggctyctggggcagaagaatcacttgaacctggtaggtggaggttgcggtgagccgagatcatgccactgtgctccagcctgggtgatagagtgaaactccgtctcgaaaaaaaaaaaaaaaaaaaaaaaaaagaaaagaaaggaa

SEQ ID NO: 453178 - DNA, 545 bp, Homo sapiens
tgggttagttcagcttgaagagctaggaagaagaaaagaaaggagaagactgaaggtggcccctccagaaacactgcagactgtcagccttgtcaaatgcttgggttcttgcatgaagcgctcccttttccttgtggcttagtggcagcaagtatgaaaaatggaagtattgatggaaaaaatatacattggcagaagatgggtagttggggactctattggttagaaatgcacatgcaaacggctgggcgtggtggctcacacctctaatcctagcactttgggaggccaaggcaggtggatcacttcaggtcaggagtttgagaccagcctggcttctactaaaactacaaaaattagctgggcgttgtgatgtatgcctatagtcccaactactcaggctcctggggcagaagaakcacttgaacctggtaggtggaggttgcggtgagccgagatcatgccactgtgctccagcctgggtgatagagtgaaactccgtctcgaaaaaaaaaaaaaaaaaaaaaaaaaagaaaagaaaggaa

SEQ ID NO: 453179 - DNA, 633 bp, Homo sapiens
ttggaggatgcaggaagggaagtctaaaaagagtcatgtaaagggtgtggcatctgatttccactgaagcacgagggatactgggttccaattgccccaacgtgaatttggaaaaggtgtctcctctgattgtgcagagcatagctagtagagaaaacccaaatcccataggctcagaactcgatggctggcatctctactggactctagccctcctcgccccttgtttttgtcctttatgcagtgtacaaactttactgtctgcagcagtcctcaggatgaaggaaatgctgtttcatcatgagatcctgtttcttgatgttttaaaagattgaatttggaagtgaataaaacaaaatccaacaagccaacagaaaaggttcttggggaaccaacagtttttacaaagtccagaggcttagagtgccataaaagctccagccctcactcagagccttctgactgggtgcagcagcagacaggtggattgcaagacaggaaataaarggaattttcaaacagacatccaggccttaagaagtcagcagccaggagggaaccttgtacctctatctccgtagttcccagagacaaagataccataccaatgagtagtgatttgatgtagcattc

SEQ ID NO: 453180 - DNA, 633 bp, Homo sapiens
ttggaggatgcaggaagggaagtctaaaaagagtcatgtaaagggtgtggcatctgatttccactgaagcacgagggatactgggttccaattgccccaacgtgaatttggaaaaggtgtctcctctgattgtgcagagcatagctagtagagaaaacccaaatcccataggctcagaactcgatggctggcatctctactggactctagccctcctcgccccttgtttttgtcctttatgcagtgtacaaactttactgtctgcagcagtcctcaggatgaaggaaatgctgtttcatcatgagatcctgtttcttgatgttttaaaagattgaatttggaagtgaataaaacaaaatccaacaagccaacagaaaaggttcttggggaaccaacagtttttacaaagtccagaggcttagagtgccataaaagctccagccctcactcagagccttctgactgggtgcagcagcagacaggtggattgcaagacaggaaataaaaggaattttcaaacagacatccaggccttaagaagtcagcagccaggagggaaccttgtacctctatctccrtagttcccagagacaaagataccataccaatgagtagtgatttgatgtagcattc

SEQ ID NO: 453181 - DNA, 590 bp, Homo sapiens
tctatgtgtctgtttttgtactagtaccatgatgttttggttactgcagcactgtagtatagtttgaagggttacgtgaagcctccagttttgttctttttgctcagaattgccttggctattygggatatatatatatatatatatgttccatataaaatttaaagtagttttgtctacttctgtaaagaatgtcattggtagtttgataggaacagcattgaatctataaattgctttgtggaatatggccattttaaactaacttgatgttgattcattgaaacataatagagtcaatcattaactgcctaacaaacctggatataaaatttcctcattttccccaatgaataacaaggatttgtgtttctctgtgttgaaatttgctttgccttctctgtcagtgccagctccatctgttttaagtgcttttgcatggcgttgggatataagttgagggtttgccattacactttcaaaccaactcaccttgattttcaaaaggtagcctagatagttacatctgtgtagcattgcttgctctcctttgttaattcaacatttgaaggctgattggctatttgaaa

SEQ ID NO: 453182 - DNA, 590 bp, Homo sapiens
tctatgtgtctgtttttgtactagtaccatgatgttttggttactgcagcactgtagtatagtttgaagggttacgtgaagcctccagttttgttctttttgctcagaattgccttggctatttgggatatatatatatatatatatgttccatataaaatttaaagtagttttgtctacttctgtaaagaatgtcattggtagtttgataggaacagcattgaatctataaattgctttgtggaatatggccattttaaactaacttgatgttgattcattgaaacataatagagtcmatcattaactgcctaacaaacctggatataaaatttcctcattttccccaatgaataacaaggatttgtgtttctctgtgttgaaatttgctttgccttctctgtcagtgccagctccatctgttttaagtgcttttgcatggcgttgggatataagttgagggtttgccattacactttcaaaccaactcaccttgattttcaaaaggtagcctagatagttacatctgtgtagcattgcttgctctcctttgttaattcaacatttgaaggctgattggctatttgaaa

SEQ ID NO: 453183 - DNA, 595 bp, Homo sapiens
gtttgccattacactttcaaaccaactcaccttgattttcaaaaggtagcctagatagttacatctgtgtagcattgcttgctctcctttgttaattcaacatttgaaggctgattggctatttgaaaatcttaacattataatgactgccaaggggtgtaacaacgttgatactgatggtcatttgctttatcaattstcatattgagtatgatcattcttaaattttttgagaatacatatagcaaaagcagtagtctagctgtaaaggagagatgaattctgtgaatgtatctcgcagtggcttatcagatatcttggctaaattacttgaactttctgtgcttcacttcttttctaagacaaaagaaaatgaaaatgtccacctatcacataatctgttttagaaagaaaggaatgaaacaaaacattggtaatgttttatgtatcgtgatcaattgcaagtttttcaagtggtaagtaggaaaaatgaaggcatccggtttttaccagactgtaagctgctaagtttgtgtttttcttactatactttaaaattgtatgcacttgatctgtcttgcacgcagatttgttc

SEQ ID NO: 453184 - DNA, 558 bp, Homo sapiens
atgcaattttgtgtgtgaattggtcaaaaagtagaaccctaggaaaccagagaggatgtgggagctgcacaaaaaccatggcatccctatttctgtgtatcagggatgagatttctactgcacacccaacttgcaagttacacttttcaacaaaagaactcaagacaaatacagaactcaaaaatgcataattcagacccagcacagatctacagtactcctcaaattccaagaagattcagtctcagagtaataagtaccagtttaaattttayaggacacatggagaatacagaccgcgtttgtagtactctcatttaaaacttagaatttaggggaagctttgaaggaatcacataggtaaggaattagcgcttactaaatataatgatgaggggcttctacattaggaaaagcatcccagtgcagaacaggatgggatgagaatagtaagagatgcttcagagcatctgcttagtctagacaacccaagaagagaaacctgagcgggacttgaaagagttctcatcaacatagttgccaaaggatttttaatag

SEQ ID NO: 453185 - DNA, 558 bp, Homo sapiens
atgcaattttgtgtgtgaattggtcaaaaagtagaaccctaggaaaccagagaggatgtgggagctgcacaaaaaccatggcatccctatttctgtgtatcagggatgagatttctactgcacacccaacttgcaagttacacttttcaacaaaagaactcaagacaaatacagaactcaaaaatgcataattcagacccagcacagatctacagtactcctcaaattccaagaagattcagtctcagagtaataagtaccagtttaaattttacaggacacatggagaatacagaccgcgtttgtagtactctcatttaaaacttagaatttaggggaagctttgaaggaatcacataggtaaggaattagcgcttactaaatataatgatgaggggcttctacattaggaaaagcatcccagtgcagaacaggatgggatgagaatagyaagagatgcttcagagcatctgcttagtctagacaacccaagaagagaaacctgagcgggacttgaaagagttctcatcaacatagttgccaaaggatttttaatag

SEQ ID NO: 453186 - DNA, 587 bp, Homo sapiens
agaacgacttgggaatgtgaaggcaacaagtgacccttaccatttcttgtttatactagggtaaagggatatgggacttgaaattatgctcctttttttgttataagttttctcatacatgcatgtaatctgtcctatctatgcaaaggggaaaaaaatcaccaggaattggattgctattgcgacagagtcttctagctagaatctacaagagtgcccctttctgtatgagtgcccctttctstacaatgatcaaagcgtccactgttcattatcagtctggtgggatataaagactcgaattcttttaatttgtgttttcctgatttctggtaaagccaaacatctttattcatgttaatttgacatttgcatattccccccaccctctgccaccctgagaattatcttttcagaacccttgcctatttttacattttgccctttgccttttctcctaatgatttgaagaagcacttttcatgttatggaccttaaacatttcctattatgtattttgataatttttttaaataagagggtaaaaattattctcttgtattgtttctcctaattttgtttattcc

SEQ ID NO: 453187 - DNA, 571 bp, Homo sapiens
gtgtccaggttttcttggtcatttagtggctccattcatttgcagagctccagaaatcaaagggaccacttttggttaggggcattatttcataatctttwttttttacttgttagtcacatgtgcagctaatgctataaatgcatgttccccatttagcagtttcaccagcctcattcaaattccaaagcagaaaattggtaggagtcttccgtaagccttgctactcagtgtggtcctcacaccagaagcatcagcatctcttgggagctggctaggaatgcccaacccagaagtattgagtcagaatctgcatttcttacaagattaatgtttgagaaacacttttctgtagcactaatggaacaaatataatttggcttttaatttctatcatctttagttcgtctgataagtacactagacatttctttgaacagaaaacaaacaagcaatataaaccccaaaaaaaccagtttggccacagtatgatgaaacagaaaaatctgtacagtaactgggtaatagacatttctacaatgcaattgctacttcagggctttggagtctg

SEQ ID NO: 453188 - DNA, 571 bp, Homo sapiens
gtgtccaggttttcttggtcatttagtggctccattcatttgcagagctccagaaatcaaagggaccacttttggttaggggcattatttcataatctttattttttacttgttagtcacatgtgcagctaatgctataaatgcatgttccccatttagcagtttcaccagcctcattcaaattccaaagcagaaaattggtaggagtcttccgtaagccttgctactcagtgtggtcctcacaccagaagcatcagcatctcttgggagctggctaggaatgyccaacccagaagtattgagtcagaatctgcatttcttacaagattaatgtttgagaaacacttttctgtagcactaatggaacaaatataatttggcttttaatttctatcatctttagttcgtctgataagtacactagacatttctttgaacagaaaacaaacaagcaatataaaccccaaaaaaaccagtttggccacagtatgatgaaacagaaaaatctgtacagtaactgggtaatagacatttctacaatgcaattgctacttcagggctttggagtctg

SEQ ID NO: 453189 - DNA, 647 bp, Homo sapiens
gcacatataaaacatgtacacacacttgagttacataaatagtgcacatatgcaagcaatgcaggcacacaccggagttatacatgtagtgcacatacaggctcacacataagttacatacacagcacacacaggaaacacagacacacatcagagttacatacataatccatggaaaacatacagacacacacctgagttatacatgtggtgcacatatggagcacaaataggcacatgcctgagttatttaggtagagtacatatgggggacacacaagcaacgcctcggttacatatggaggacaaatctagccttttcccattaactcaagataaataaatagcactgcctccgtctaatcagattattaattcatcaaaagtgtgctacaaaaattgcatgattaaactgyattaggaggcccagataacccagacatgcatagattacttttttagggctataatcaaagtataattacaaaattgattattttcttggataacacacaggcacagggaaaatgttcatatactcttgtttgagaaactctgctattgataacatgacctatgtccaaacattttaaaaagttttttataaaacagaatcctagaattcctgatttgaatagaacttgtgg

SEQ ID NO: 453190 - DNA, 647 bp, Homo sapiens
gcacatataaaacatgtacacacacttgagttacataaatagtgcacatatgcaagcaatgcaggcacacaccggagttatacatgtagtgcacatacaggctcacacataagttacatacacagcacacacaggaaacacagacacacatcagagttacatacataatccatggaaaacatacagacacacacctgagttatacatgtggtgcacatatggagcacaaataggcacatgcctgagttatttaggtagagtacatatgggggacacacaagcaacgcctcggttacatatggaggacaaatctagccttttcccattaactcaagataaataaatagcactgcctccgtctaatcagattattaattcatcaaaagtgtgctacaaaaattgcatgattaaactgcattaggaggcccagataacccagacatgcatagattacttttttagggctataatcaaagtataattacaaaattgattattttcttggakaacacacaggcacagggaaaatgttcatatactcttgtttgagaaactctgctattgataacatgacctatgtccaaacattttaaaaagttttttataaaacagaatcctagaattcctgatttgaatagaacttgtgg

SEQ ID NO: 453191 - DNA, 623 bp, Homo sapiens
gttgctaactcagtgcaacagcatccrcaacagcctctaagggttgggagctctggcatttaatttaatctagtccccatcattgcccttcatcttctcctcattgctgctgcttctcctctcttttccaccttcgtgccctgtccttgctgttcttaagtaccacgcacatttgaggacagacaaaacagacataccatgaaacagatttgttttcagtctgaaagcccacaaaacagcacctctgtggaagaaaagccatagttacagttggttgtgtggctggaaattctgaattcccctggaaacatttaagactaggcccttttccgctatcaattacagaacaaatagacccccaggtctgctcacctgcacaatccacacagaaagtaatgggtattccacatataatgggtaaatgatttgacattttgctattacatatatagttatggtctgcataaggacagttgaaagataagtagacacctaagaagctgatttattgaattcagcaattcattaaatttaacaaatatttatagagtgcttattttctggaaaatactgaacaatttttatttttctctttacagcaattgtgaaatgcaagaaccaga

SEQ ID NO: 453192 - DNA, 227 bp, Homo sapiens
aatagttaatgtgattaatggattgatgggctaatggattaatgggaaatcaggggagtgggtttgttatcacaagagcgagtctgttattaaaagccagttcaggtctctcatgagccctccaccatgtgataccctgcaccaccttgagcctctatggagaatccccaccagcaaggctcttgctcaatgtggtttcttgacyttggactttccagcctgcagaa

SEQ ID NO: 453193 - DNA, 516 bp, Homo sapiens
aagggccagtagaaagcagcagcgtgtcagtcattagaatgtgcgggcatcagccttgctgtctaaacatcatcaggagggtctttaccaataccccccacgraacaaagctataacacctctcccgcagaagcagtggagatgggcgctcttactctgagttaacaaaggtcttatgagttgtgttcaacataaactaataaatacatactcagggaatcagttcaccaggattgtaaagaaataaaaatagaaacaaggtcaggtactaatgggaagatgctaattgtgctctgtcatggaacctcacccttgttggcctgtcatcttcacacttcattgaaaatccattaaaacgattgtgaggccattaaccctgactttcaggcagaagcttcccttgggcgcagttgtgtgactagggttctttcattaatatttagtgtaattgcttgagagccggataattgtgattacagactgccacttaaatatggaaggggagcatgaagatgg

SEQ ID NO: 453194 - DNA, 516 bp, Homo sapiens
aagggccagtagaaagcagcagcgtgtcagtcattagaatgtgcgggcatcagccttgctgtctaaacatcatcaggagggtctttaccaataccccccacggaacaaagctataacacctctcccgcagaagcagtggagatgggcgctcttactctgagttaacaaaggtcttatgagttgtgttcaacataaactaataaatacatactcagggaatcagttcaccaggattgtaaagaaataaaaatagaaacaaggtcaggtactaatgggaagatgctaattgtgctctgtcatggaacctcacccttgttggcctgtcatcttcacacttcattgaaaatccattaaaacgattgtgaggccattaaccctgactttcaggcagaagcttcccttgggcgcagttgtgtgactagggttctttcattaatatttagtgtaattgcttgagagcyggataattgtgattacagactgccacttaaatatggaaggggagcatgaagatgg

SEQ ID NO: 453195 - DNA, 573 bp, Homo sapiens
tggtttgccccttaacatgtatttaaaacttatgtttaccactttacattttcttattcaacttattccactcttaactattgaaagcttcattatgtatgaactgcttaagcatcagagattccataaatgttcagattattatgtcctgcactagagaatgtcaccaatatttgcattttctcaaagtgtaatgggcttgatatttgtattttacctctttacttccctacttctactccctgtcaacttactacttatgctttttacagctggattcttgttcaatacactgattgtattcatccaagagctccaatggttaagctacacatctctgattccttaatcaaaacttaatctggattcacaaaaaacctcatacctgactcttaatggcacttgtgtgtgggagaatggaggtaggttttggktggttaaatcttatgaaattctaactagtgaaaattttgtgtaatttctggaatatatttcagagaaggataatctccacagaatgtatgttcagtgttctcatattagctattaattcagcccagaaagcacaaaaat

SEQ ID NO: 453196 - DNA, 606 bp, Homo sapiens
ctattatacattcttcaaatttcagttaatattccactctaatatgcattgggctgtcagttttaatctgcttctccagatttgaagaaataaacaaaattaaaaatgaaatattatataaatttaatttcagttgattttcagttctttccttctgatggatcttgataccattctgagttatgaacaatattatgtcactaatgaacgatkaacagatattaaaaataaagcacagataatatttctaccaaataaaaagttaacatatttgacttaaagcaccatatcttttaacttgctaaatgtatgattggtatttcagtcatctttgtttaaagcaggcaaacaaattagaattatatttgacaagcaagttaggccttttccacctagccaagaatttgtctctaatagccctaaaataatttgccaaggaggaaaaaaaaaagaaatgatgaagagtttattggctcttgctattattgtagataagaagaattatttcttactaagagtcaattagtttgaattaacaaatttcttcattctttgcccatgttttagctgcccttgccccactacccattgagtttctcctctaga

SEQ ID NO: 453197 - DNA, 577 bp, Homo sapiens
aataataaatacaaaaaaataggaaggtgtgatggcatgtcccctacagtcccagctgcactggaggctgaggtggtaggatcacctgacctaaggaggtcaaggctgcagtgagttgtcactgcaccactgcactcgagcctsggtgacagagagagaccctgtcaaaaagaaaaaaaaaaaaagaaagaactattttttggccacaggatgaaatctttaaaagcaggcattgagtaaggactgcggtgttatgtatttattaaaattgacatttgaaaagagaaaaggaggagcataagtaagcaaaaaaaaaaaaaaaaaaaaaaaggttgaactgtgatgcaggccaggtaaggcctaggccaaccccacaggaatctctgaaacatatatggcctctcagagtttttcacatgatcagtcaaaatagatcttttattccattgctgaataccttgaggtgttgctttgccaagggcatgtccttgtgtaaggaggcttttgttttaagataatcctccctgatctgtaacatttcaagtctcacaagcaggggaactgaagctcttggtct

SEQ ID NO: 453198 - DNA, 569 bp, Homo sapiens
aagaacaaaccaaatataagctagaagaagaaaagaggtagcaaggattacagcagaactaaatgtaattgagataataaaaaactatacaaaggatcaatgaaacaagaagttgctttctcgaagggacacagaattgatacagtgctagccagataaaccaagaaagaaagagagaagattcaaataagaaaaactagaaatgacaaaggtgacattataactgttgccacagaaatacaaaagatcttcggagactactgtggttagctctatgtgcacaaactagaaaaaactaaataaaataaagataaattcctggaaacatacaaacccccaagactgaaccagaaagaaatggaaaacctaaacagaccagtaaccagttatgaaattgaataagtaaaaaaaaagaagaactatctaccaataataataatartaaacccttgagcagatggattcacagctgaattttaccagatatgcacagaagagatagtataaatcttactgaaactattccaaaacaatggaggaagaagtatttctccctaactggttctatg

SEQ ID NO: 453199 - DNA, 551 bp, Homo sapiens
ataacacagataagacagctcgggcatggaaggaggaataaagtctcttgggtaaccaccaaacttcattttcatacaatgggccccaagtaaaacagtggacccaaataagcacattcttttccctttaggtgcactaagatggggaagctaaaagcagacttgggggttatgcctgcaactgtagaaagatgtgtggatatagacacaaaaactctctctcccagataagaaagacaaagagaccagatacatttttagcctgtgataagccctcctgtcctgaamccttaaatactcttagtctgtatgagagagtgctcctgaactaacttggccagaagcccctctcaggtttattctttaaaataatcctgtctctgactgttaagctgctcttcatgtttctttcttccttcttcaactcttacagaaggaaaaatagaaggtgtgaacttgtttaaattttcttctagaggataatatttaaacaggtatctgaagagtgcataacacatcaatattgatttttgtactttactttgtaaatt

SEQ ID NO: 453200 - DNA, 570 bp, Homo sapiens
gttgtagctctctaacacccattacataagttctaaaaatcttaggtcaaggaggctttaaaatcctaatgtttacctccaatcagttatatctgtatctaatactcctgtggtccagaaagacttagaacatttttttttttttttttttttttttttttttttactaatggggcacagcgttcttttatattttttgccacagaggtttccatttctttgttttgggcttgacatatatgttgaagtttcaggatattttctataactgtgtgtatttgtagtaaaaaagggacacttctacatcagcctcgtttgccattatttcctaaagtccttataatgccttccgyaatacgtgtgggtacacagtattatagtagaacaggatggaatgaatctacctcattatgcctgagatggtaatgaaaaatcttataagtgatatgataaataataagtagatgtttaatgtagttaaagcataccagacaatggggataggaagtgaaataatttaatgacagaaagaaagccatttagcataacgcagatagttaacaatttcta

SEQ ID NO: 453201 - DNA, 477 bp, Homo sapiens
gctagtgggtcaaccttcccattcattttctgctggtatgcaggtaatactttaacatgaatgcctctacccactgtccaacgttctcactttatagtgttctgtatttggcaagtcagaatcctcagtgcccattgtcctgattagtattatcacaactctttcagcagggttgsctgataaatcctgataaaattgggaggcttgcttctgcttgcaaagtaaagttccttgggactatatgagcagagtcacaactcactgcttacagcaatcaaataaaaactgctatctctctgaccttcactggaaaaaggccacacaatattattgggttcattggatattggagagagcacacatctctgtgactgatggttctgttgatgttgattggagctcccgagaaagagaggtagccaacttacagaggtgccctttgagattttggactccttgcctccctgacatggatct

SEQ ID NO: 453202 - DNA, 642 bp, Homo sapiens
tgtgtgtgtgtgtgtgtgtgttactatttgtgtgtatatgttcatatacatgtgtgtatgatatactggcccttttcggcttgggatccatgtcagcagatgctcttgcctgagtgtaagggaaccaacaaatgaaaaagaataggctgaatatagaatgtaaatataaaaaatgtagcatayaaaactgaaactattggaattagtttcataacaaatgaagagtgaaaagaaaaaaaataaatgtttcagggaaaaatatattagaaatgaatagaaaattaaagtccataaaaaaattacagagatcaacatgggaagtgggaagaaagatcatatggaaccacttactgtaaaatgggagaattttaatgaggtaaatgaataaatgctgcagaaatgtctaataagataatatccagaaataattttatgtagaagaatactattagttgtctgcctgacagcattttcccaatttgttctttgtagtaagaatctcattttgagaatataaataaaaataataatctgtgtagagggattagaaaagaaaaagaataccagaaaaaataaaaagtaaggatttatataagtcacaatgagccaagtttagtagcagataaaaacatttgaaatgtt

SEQ ID NO: 453203 - DNA, 642 bp, Homo sapiens
tgtgtgtgtgtgtgtgtgtgttactatttgtgtgtatatgttcatatacatgtgtgtatgatatactggcccttttcggcttgggatccatgtcagcagatgctcttgcctgagtgtaagggaaccaacaaatgaaaaagaataggctgaatatagaatgtaaatataaaaaatgtagcatataaaactgaaactattggaattagtttcataacaaatgaagagtgaaaagaaaaaraataaatgtttcagggaaaaatatattagaaatgaatagaaaattaaagtccataaaaaaattacagagatcaacatgggaagtgggaagaaagatcatatggaaccacttactgtaaaatgggagaattttaatgaggtaaatgaataaatgctgcagaaatgtctaataagataatatccagaaataattttatgtagaagaatactattagttgtctgcctgacagcattttcccaatttgttctttgtagtaagaatctcattttgagaatataaataaaaataataatctgtgtagagggattagaaaagaaaaagaataccagaaaaaataaaaagtaaggatttatataagtcacaatgagccaagtttagtagcagataaaaacatttgaaatgtt

SEQ ID NO: 453204 - DNA, 420 bp, Homo sapiens
gggaatgttcagtaccattgaactagaaagagttggacatcctaggcaaaccgagtggcaaacggagagagaaactgattataaracactggaaaaaaatggtagttctttaaggaatctccacactgttttccacagcggccgtactagtttacattcccaccagcagtacagaagtgttccctgatcaccgcatccacaccaacaactactattttttgattctttgattatggccattcttacaggagtaaggtggtatcgcattgtgggtttgattttcatttccctgatgattagtgatgttgagcattttttcatatgtttgttggacatttgtatatcttctgttgataattgtctattcatgtccttagcccactttttgatgggtttttttttttttttttactgatttgt

SEQ ID NO: 453205 - DNA, 420 bp, Homo sapiens
gggaatgttcagtaccattgaactagaaagagttggacatcctaggcaaaccgagtggcaaacggagagagaaactgattataagacactggaaaaaaatggtagttctttaaggaatctccacactgttttccacagcggccgtactagtttacattcccaccagcagtacagaagtgttccctgatcaccgcatccacaccaacaactactattttttgattctttgattatggccattctyacaggagtaaggtggtatcgcattgtgggtttgattttcatttccctgatgattagtgatgttgagcattttttcatatgtttgttggacatttgtatatcttctgttgataattgtctattcatgtccttagcccactttttgatgggtttttttttttttttttactgatttgt

SEQ ID NO: 453206 - DNA, 420 bp, Homo sapiens
gggaatgttcagtaccattgaactagaaagagttggacatcctaggcaaaccgagtggcaaacggagagagaaactgattataagacactggaaaaaaatggtagttctttaaggaatctccacactgttttccacagcggccgtactagtttacattcccaccagcagtacagaagtgttccctgatcaccgcatccacaccaacaactactattttttgattctttgattatggccattcttacaggagtaaggtggtatcgcattgtgggtttgattttcatttccctgatgattagtgatgttgagcattttttcataygtttgttggacatttgtatatcttctgttgataattgtctattcatgtccttagcccactttttgatgggtttttttttttttttttactgatttgt

SEQ ID NO: 453207 - DNA, 382 bp, Homo sapiens
tggttgaggctcttataacaaaagacagattaataagagaaaagcatacaraagcatttaatataaggtttgtatgacacaggagctttcataaggaaataaaaactcaatgaaacaggaaaatgtgtgtaattttatgcctaggtttgatgaagaatggacagtcatgtggaagcatgattggacaaaggaggcatgatgttatgataacacactaatgggaattagcaagttctgtttgttcagagttttctgtgtacctgtgtctgcagggatcaggatgtggctttcctctgggtatggtgagtgcactgttcgaaggagggtgttgaaactgctctgctgtctggggtatatatcctggggttcgttgtaacgtgcc

SEQ ID NO: 453208 - DNA, 382 bp, Homo sapiens
tggttgaggctcttataacaaaagacagattaataagagaaaagcatacagaagcatttaatataaggtttgtatgacacaggagctttcataaggaaataaaractcaatgaaacaggaaaatgtgtgtaattttatgcctaggtttgatgaagaatggacagtcatgtggaagcatgattggacaaaggaggcatgatgttatgataacacactaatgggaattagcaagttctgtttgttcagagttttctgtgtacctgtgtctgcagggatcaggatgtggctttcctctgggtatggtgagtgcactgttcgaaggagggtgttgaaactgctctgctgtctggggtatatatcctggggttcgttgtaacgtgcc

SEQ ID NO: 453209 - DNA, 382 bp, Homo sapiens
tggttgaggctcttataacaaaagacagattaataagagaaaagcatacagaagcatttaatataaggtttgtatgacacaggagctttcataaggaaataaaaactcaatgaaacaggaaaatgtgtgtaattttatgcctaggtttgatgaagaatggacagtcatgtggaagcrtgattggacaaaggaggcatgatgttatgataacacactaatgggaattagcaagttctgtttgttcagagttttctgtgtacctgtgtctgcagggatcaggatgtggctttcctctgggtatggtgagtgcactgttcgaaggagggtgttgaaactgctctgctgtctggggtatatatcctggggttcgttgtaacgtgcc

SEQ ID NO: 453210 - DNA, 513 bp, Homo sapiens
ttcttttttccttaaatattagtaatttgtattcaagctaaattttattttaaggttttgactgagttttaaattaatagcttattattaattaaaagatcatgtatcaaaaggttttyttctttttggtatcatttcacagtttactcactaagtctcacccagtgagtctcatctttcttcagtggtcttaacaattttggccttgagttaattaattcaaagtctccaggaatgaaagaaagaacaaactaggttcagccacctcattttccattgatggtaaaagaactttagcaatgcaaggttctaatcataaggcttaaaacaaaactgggttgctgcattatcttccaataacttaaacatactaaatatgcaatatgtttcctgaaaaaaaaaattcaagtcacatttacatctaagtgtgtttcattttataagcacagattgattattattctgatatcttttcatccagttaaatgtttaaaaattaaggaccatgcctta

SEQ ID NO: 453211 - DNA, 601 bp, Homo sapiens
aactaggttcagccacctcattttccattgatggtaaaagaactttagcaatgcaaggttctaatcataaggcttaaaacaaaactgggttgctgcattatcttccaataacttaaacatactaaatatgcaatatgtttcctgaaaaaaaaaattcaagtcacatttacatctaagtgtgtttcattttataagcacagattgattattattctgatatcttttcatccagttaaatgtttaaaaattaaggaccatgccttatcaatcaatgcatcttttaagtcacggtcacagcctgaagtttttatttccagtttctcagctaaaggwatagagttcagcagtgcatttaattggaatttagacatcctaacattttatttcccatcagaatggtttcaatttctaacaaatggtctgctgtattaaagtaatcatcaatataggaagtgttagtttaagaaaaagatactaggtaagtgaagaattttaaattactaagagacgtatttacacttgagatttccatgcctttgaaatgtttaaaaccactagccctaggagatgtactatgcaccagtgagaacagtttaggaag

SEQ ID NO: 453212 - DNA, 604 bp, Homo sapiens
aaccaatgcaatggaaggaaaaaattgcaaatcatatatttggtaataatacataaagaatatatatgaggaatttctacaacttgaaaacaacaacccaattaaaaattatcaaaggattttctgttttagtctgttttcacgctgctgaataccygagactgggcaatttacaagaaaaagaggtttattcacttacagttccacatggctggggaggtctcacaatcgtggtggaaggcaaggagaagcaaattacaccttatgtggatgatagcaggcaagaagagagcttgtgcagagaaactcccatttttaaaacggatcttgtgagacccattccctttcacggagaatggcatgggaaagacccgccccatgattcaatcatctcccaccgggttcctcccacaacaggtggaattatgccagctacaggatgagatttggatggggacacagccaaaccatataaacttaaatgtacatttcttaaaaaaacatatagaaatggccaacaagcccatgaaaagatgctcaacattactaatcattagaaaagcaattcaaaaaccacaaaccacaatgagatatcaccttacac

SEQ ID NO: 453213 - DNA, 604 bp, Homo sapiens
aaccaatgcaatggaaggaaaaaattgcaaatcatatatttggtaataatacataaagaatatatatgaggaatttctacaacttgaaaacaacaacccaattaaaaattatcaaaggattttctgttttagtctgttttcacgctgctgaatacccgagactgggcaatttacaagaaaaagaggtttattcacttacagttccacatggctggggaggtctcacaatcgtggtggaaggcaaggagaagcaaattacaccttatgtggatgatagcaggcaagaagagagcttgtgcagagaaactcccatttttaaaacggatcttgtgagacccattccctttcacggagaatggcatgggaaagacccgccccatgattcaatcatctcccaccgggttcctcccacaacaggtggaattatgccagctacaggatgagatttggatggggacacagccaaaccatataaacttaaatgtacatttctyaaaaaaacatatagaaatggccaacaagcccatgaaaagatgctcaacattactaatcattagaaaagcaattcaaaaaccacaaaccacaatgagatatcaccttacac

SEQ ID NO: 453214 - DNA, 612 bp, Homo sapiens
acaacattctttacataacaatggtgccgatgtttgctgtagggtactttagaaggtcagataaacccaatagcagtaaaaatatttcacattcaaaacaaatgacaagaataagaattatttgacagtatttctgagattaaatttattgcttatgaatcaattattatttttctttgtttttgtttaaacaactatcataataggcttttattctatattttggaatgtttaagtatttatctttattatcattaattttagggtaccttcgataatgtggttgtgaataggttcttgtcacagaacaaaattactcttatgatataatctttaagaaatataaaatgaaaattcaaaattatattaaaagttttctaaagacaagaggtgaagggtattaactttttgtttyttgtggtaagaacatttgacatgagctctactcaattaacaaatatgaaaaattgataatgttaacttataagaacaataccctaagtactgaacagctaagtactgaaaggataaaatgtatctaaatacaaaggtgcattgaccacctattaattaccacacccttaagtaagccataaaacagtgttacagaga

SEQ ID NO: 453215 - DNA, 563 bp, Homo sapiens
agtagacttctttgaaaaatgattcatgatttgagagagattagggagccatggtgattttgggaaacaagaacattttaggaaaagggaacagccatacaaaagcatgtacagaaagtgtgaggaataaagacaagtccagtgtagtgagacagagtatgcagttcagagagtaataggatgtgcaatcwgggcattaaaggaaaagggtaagatgctgtggagacttacaggccattgttaaggcctttgattctaggtgaaatgcagagccattgcagggagagcagagaaacggttttctgactgatattgtacaattattctggctgttattatgataatgaaatagaaggtggagaaagattcaaagcaaggagatcaattaagaggcatttaaaacaatccaggccagaaataaagttgggaagtgttagggaaaaagcaatagaagtagggagaagtagttgaaatcaggataatttttgaagaatgcaagaaaatgttctgaaatagcacatgtgagttgaaagaggagtcaagactagccatttaaaaaaata

SEQ ID NO: 453216 - DNA, 563 bp, Homo sapiens
agtagacttctttgaaaaatgattcatgatttgagagagattagggagccatggtgattttgggaaacaagaacattttaggaaaagggaacagccatacaaaagcatgtacagaaagtgtgaggaataaagacaagtccagtgtagtgagacagagtatgcagttcagagagtaataggatgtgcaatctgsgcattaaaggaaaagggtaagatgctgtggagacttacaggccattgttaaggcctttgattctaggtgaaatgcagagccattgcagggagagcagagaaacggttttctgactgatattgtacaattattctggctgttattatgataatgaaatagaaggtggagaaagattcaaagcaaggagatcaattaagaggcatttaaaacaatccaggccagaaataaagttgggaagtgttagggaaaaagcaatagaagtagggagaagtagttgaaatcaggataatttttgaagaatgcaagaaaatgttctgaaatagcacatgtgagttgaaagaggagtcaagactagccatttaaaaaaata

SEQ ID NO: 453217 - DNA, 563 bp, Homo sapiens
agtagacttctttgaaaaatgattcatgatttgagagagattagggagccatggtgattttgggaaacaagaacattttaggaaaagggaacagccatacaaaagcatgtacagaaagtgtgaggaataaagacaagtccagtgtagtgagacagagtatgcagttcagagagtaataggatgtgcaatctgggcattaaaggaaaagggtaagatgctgtggagacttacaggccattgttaaggcctttgattctaggtgaaatgcagagccattgcagggagagcagagaaacggttttctgactgatattgtacaattattctggctgttattatgataatgaaatagaakgtggagaaagattcaaagcaaggagatcaattaagaggcatttaaaacaatccaggccagaaataaagttgggaagtgttagggaaaaagcaatagaagtagggagaagtagttgaaatcaggataatttttgaagaatgcaagaaaatgttctgaaatagcacatgtgagttgaaagaggagtcaagactagccatttaaaaaaata

SEQ ID NO: 453218 - DNA, 563 bp, Homo sapiens
agtagacttctttgaaaaatgattcatgatttgagagagattagggagccatggtgattttgggaaacaagaacattttaggaaaagggaacagccatacaaaagcatgtacagaaagtgtgaggaataaagacaagtccagtgtagtgagacagagtatgcagttcagagagtaataggatgtgcaatctgggcattaaaggaaaagggtaagatgctgtggagacttacaggccattgttaaggcctttgattctaggtgaaatgcagagccattgcagggagagcagagaaacggttttctgactgatattgtacaattattctggctgttattatgataatgaaatagaaggtggagaaagattcaaagcaaggagatcaattaagaggcatttaaaacaatccaggccagaaataawgttgggaagtgttagggaaaaagcaatagaagtagggagaagtagttgaaatcaggataatttttgaagaatgcaagaaaatgttctgaaatagcacatgtgagttgaaagaggagtcaagactagccatttaaaaaaata

SEQ ID NO: 453219 - DNA, 515 bp, Homo sapiens
atcaagtgtttagaggtgggtgcaatgcttacagagttcttgctattaagcacaattctgtctcttctatctctcattcagatgtattattattattttaagacagcattatactcaaataccttaaaatggtcrgcaaggtagtacacaaattggcatcatctcccttcatggcctgttatcttgcttatcacagtggagtcactgtgattatattggtcctgctaatcttgcaaatgtgaaaaaaaattcctgttttgggacattttctttagctgtttgtctgttgggaagcctctaactcctgatagctacttatcacttgaccaatttcctccctttcaatctttactcggatgttactttttccatgaagcttagtctggctattttacacagccagcactcataaaacctatcactactgctactgctacaagtctgattttctcctctctttctctctcctctactccaaatgtatgtgtgtgtgtgtgtgtgtgtgtgtttatctt

SEQ ID NO: 453220 - DNA, 567 bp, Homo sapiens
gggaaaacaactaaagaaacccaaatttcaaaatattatacaataacgtcatcagtctyatcacaaaaaggcaggagagtatgaaaaagaattacacaattccaggtaaaagaccaaaagaaaatgacactaccatgatagaaggaggctgaaacagttggtagagaagcagatgtgggttagagctgagctttcttcccaacaaccaatgccgatttgcaggcattagtcaaactgtcagtccctgtcaagcctttaaaagattacagccctggccaacactttgattttagcttcatgagaaaacaagacgcagatccatacaattggaattgttataagttcctcgtccacaaacactaaaaaagcatgtgaggggtggagcaacaggacaaagaagggttctccagtgatcatctccccagaaacatttattcaaactatccacagatgaaaataccttcagaagagctaggaaaaccagttgagaaattatagtatcttcttgtagcacaataataagaaataatgtattgaagagagtagaaaactgctttgtgtcagcca

SEQ ID NO: 453221 - DNA, 567 bp, Homo sapiens
atgtctcccttaattaagaagtcgaataatacatgtgagactttttggttttaagagctttaccacatgctctgaacagtccaatgaatatagaaagctaaaatgtattatttagtcaatgagaatataatctgtactgaattcatggtggtattgatttgcactttgccagttcattattaatcaataactatgagttcttagtatatctcgtcttatagttctattatgtttcttaagaaatgatgcaaaattagatgataaaataaagtcctggaatattacacattttataagtgagtgattcatctgctaaaatgtcaagagcctacagaaaagcaagcagaagcaatttgtatgtctcttttatctctaccaaggtgtcttgattgaattttatagttcttgagaggctatctctctaamatatgcataatttttattatgatacatttttatggtttaaattaatctagaaataagtctgggacttggtttgcttctgaaatctgatggattatatatattgccaggtccaataggtcaaaccattcctttcccattcta

SEQ ID NO: 453222 - DNA, 504 bp, Homo sapiens
ttaaccaagcctggtgatgcatgcctgtagtcccagacacagggaggattgagacggtaggatttcttgagcccagtaggctgaggcttcactaagctgtgatcacaccagtwtactccagcctgggcaacagagcgagaccccatcaaaaaacaacaacaacaggaaaaaaggcaggaaggcaggaaggcaggaagggaaggagggaaggagggaaggagtgaaggagggaaggagaaagaggaacagaggaaggaaggaagcaaggaaggaaggaaggagttaatttgttacaagttaaaatagacttgtaaaatataagatgttttatgtaaccctaatggtatccataaaacctattagtagattcataaatgataaaaagaaaagaatagtaacataccactacagaaaagcatcaaattaaaaagacaggaagatagaaaaaaaatgatcaaatacaaaaagtaaaggaaaatttaacaaaatgatagtagtaaagcc

SEQ ID NO: 453223 - DNA, 485 bp, Homo sapiens
catgggatggatacattggatacagcctgtgctcctcatttttcctaaccattgttggctttctcttttttaattgattatccacctatgccaggtcaccactctgctttcaaacccagaaaaactataaagcagaaagtgtggtgtaccagacacaccactttcctatcctcttgcatatgtgagagaccagagtgaattactaccctctcccctcmaagcagactttgacaaaacactgatggaaataaacatacctctttgattgggatagctatgagctgtgatatgagttttacattccttcttccaaattctgtcaaggattaaaaaatcaagtcctgcttaatggtggcttatgacaacatactctttatcagctgatttcacttctctatctgactttacacttctctactgggtctcaaaccttcaacataagccacttgcaattgaacctttgtcttaagttgtgctcaagataa

SEQ ID NO: 453224 - DNA, 436 bp, Homo sapiens
gggatagaaggaacatgcctcaacataacaaaagcatatatgacagacccacagctagtatcatactgaatggggagaaacagaaagccttttctctacaatctggaatgcaaccaggatgtttactgtcgccactgttttcaacataggactggaagtcctagctagagcaatgagacaagagaagraaataaaggccatacaaattggaaagaaagaagtaagattatccttgtttgcagattatatgagctgatatgtggaaaaactaaaagcctccaccataaaaactattagaactgataaattcagtaaggttgcaagatacaaaattaacatataataatcagtagcatttctacatgtcaacagtgaacaatgtgaaaaataaatttaaaaagtaattacatttacaatggacacatataaaattaaa

SEQ ID NO: 453225 - DNA, 592 bp, Homo sapiens
attgtttcataataaaaaccctcaaagatctggggatagaaggaacatgcctcaacataacaaaagcatatatgacagacccacagctagtatcatactgaatggggagaaacagaaagccttttctctacaatctggaatgcaaccaggatgtttactgtcgccactgttttcaacataggactggaagtcctagctagagcaatgagacaagagaagaaaataaaggccatacaaattggaaagaaagaagtaagattatccttgtttgcagattatatgagctgatatgtggaaaaactaaaagcctccaccataaaaactattagaactgataaattcagkaaggttgcaagatacaaaattaacatataataatcagtagcatttctacatgtcaacagtgaacaatgtgaaaaataaatttaaaaagtaattacatttacaatggacacatataaaattaaatatctagagattgaaggtggcagaagcccatctggagcagctgctgcaaagacaccagctgcagcaggggaggcaaagcctgggctacacactccgaagagctggcaggggcaagaaacaggtg

SEQ ID NO: 453226 - DNA, 629 bp, Homo sapiens
caataggaattcaagaaacatgtccagtggaggattttgatataaagcttggccactatttttcatgcatccctatatacacatctttcttatggtgccttgccatactaactacagatttagccttctgattctttttccagtaagtagacagaagcatattggatgtaagcagaagcttgaaaatttgtgttatgtctctgcttacttcctkgggcccctgtcaacatcatgataaaaagcctaagcaaacctactgacatatgagagaccatggagaacaaagcaatgtcattggagttaaggccattaggctcactcaccttaccaaatagttagttgcatattcacaaacgggcagagtcaggatcagcacacccatttggctattggtagatttgggagaaaatgtaaaagctcactgtttttactttataagtttgagaatagtttgttatacagcagtagctaacaactagagaatgtttatagtgaataatattttaagacacccttaaggaactatcattcttccagataatatatatcttctaaagtggaaagttgttatagtactgaggggaagatggaccaaggatgcatctcttaagtttgaagatataacaatg

SEQ ID NO: 453227 - DNA, 629 bp, Homo sapiens
caataggaattcaagaaacatgtccagtggaggattttgatataaagcttggccactatttttcatgcatccctatatacacatctttcttatggtgccttgccatactaactacagatttagccttctgattctttttccagtaagtagacagaagcatattggatgtaagcagaagcttgaaaatttgtgttatgtctctgcttacttccttgggcccctgtcaacatcatgataaaaagcctaagcaaacctactgacatatgagagaccatggagaacaaagcaatgtcattggagttaaggccattaggctcactcamcttaccaaatagttagttgcatattcacaaacgggcagagtcaggatcagcacacccatttggctattggtagatttgggagaaaatgtaaaagctcactgtttttactttataagtttgagaatagtttgttatacagcagtagctaacaactagagaatgtttatagtgaataatattttaagacacccttaaggaactatcattcttccagataatatatatcttctaaagtggaaagttgttatagtactgaggggaagatggaccaaggatgcatctcttaagtttgaagatataacaatg

SEQ ID NO: 453228 - DNA, 629 bp, Homo sapiens
caataggaattcaagaaacatgtccagtggaggattttgatataaagcttggccactatttttcatgcatccctatatacacatctttcttatggtgccttgccatactaactacagatttagccttctgattctttttccagtaagtagacagaagcatattggatgtaagcagaagcttgaaaatttgtgttatgtctctgcttacttccttgggcccctgtcaacatcatgataaaaagcctaagcaaacctactgacatatgagagaccatggagaacaaagcaatgtcattggagttaaggccattaggctcactcaccttaccaaatagttagttgcatattcacaaacgggcagagtcaggatcagcacacccatttggctattggtagatttgggagaaaatgtaaaagctcactgtttttactttataagtttgagaatagtttgttatacagcagtagctaacaactagagaatgtttatartgaataatattttaagacacccttaaggaactatcattcttccagataatatatatcttctaaagtggaaagttgttatagtactgaggggaagatggaccaaggatgcatctcttaagtttgaagatataacaatg

SEQ ID NO: 453229 - DNA, 567 bp, Homo sapiens
acatattctatttagatatgaaatgtgtagaattggtatcaatttaatatctatattatctatcaagttgatataatggtcaagagttgatgaggggctaaacagtcccaagtgtgtccttgggacaagattttgagaaatattggtgaacatttctgagagtgttcatccctaagtcttaggcaaaggtacactttgcgtaactgtccctctaaatagcttttctcacagcttacaatgacaagtgatttrttaaatcagtaggaggaaagacaacacagaagtaactgaaaaatgttgcttaacaaaagatagtgtaaaccaaaatcctctttttaaaaaaaaaaaaaatgtcctgttttgaattggagttggggcactgtaatcacaactactggattcctgagatgaatgaagtctcctaaggatcccccagttacaggaaaagtgtaggctcatctatatgggtagcagcaactgtgccacccagagccaaaggagcatgtttaatgatctttgagatattatttgaaaatttacctttggggaaaaattacagggaatctt

SEQ ID NO: 453230 - DNA, 567 bp, Homo sapiens
ctttgcacattccatgtctcagctggtactgttttcatattattgaaatatacactaartctcattaattatcaccattaactcagcgattatccatagccagccacaactttctttttactgggcaattacaatagccccttaatcattctcccagcttctaatacttctcctattgtccattctctatataaaaatcatagcaagcattgctgtattttttaaatattccaaatggttatttttcctgtttcaggaaatttgcgcctcagaattttacacttcctattgtctctattttgcccctcttcccccctcatatgtgattgtatttgtttttactctcatctggctcaaatgtcatctaattctagaagattttttttctggccaccctaaattattatcttttcattctctcagaaaacaatattttagattactgagaacatatatcattattagaaattattttattctactttgtcacaaattaaatataaatttactatgagaaataagtgctttatatataattataatgaatcattttgaatatctgaatta

SEQ ID NO: 453231 - DNA, 567 bp, Homo sapiens
ctttgcacattccatgtctcagctggtactgttttcatattattgaaatatacactaaatstcattaattatcaccattaactcagcgattatccatagccagccacaactttctttttactgggcaattacaatagccccttaatcattctcccagcttctaatacttctcctattgtccattctctatataaaaatcatagcaagcattgctgtattttttaaatattccaaatggttatttttcctgtttcaggaaatttgcgcctcagaattttacacttcctattgtctctattttgcccctcttcccccctcatatgtgattgtatttgtttttactctcatctggctcaaatgtcatctaattctagaagattttttttctggccaccctaaattattatcttttcattctctcagaaaacaatattttagattactgagaacatatatcattattagaaattattttattctactttgtcacaaattaaatataaatttactatgagaaataagtgctttatatataattataatgaatcattttgaatatctgaatta

SEQ ID NO: 453232 - DNA, 592 bp, Homo sapiens
atctcataaggaatgtttgaattgccctaggttagatcataacagtaagaaaaaaaatgtcaaacattatttggatttttattatttcatccagtaatcgtggcagaccaattaagtgtagtatttggcctccaagcattgtatttactcatttgttcactcatccatctgttcatctatcagtttattcattcaatatttactcaatgttatcacattctaagttctatacttaagagaatgcaatttcagaagaagcaaacaatgtgatagagctyatggaacataaacagtaattcaatgaatgtataatttgataataattttattgcagaattacattcaataaacattagtatagtttgaatgtttatctcctgcaaatcttatgttgaaatgtgatccccaatatcagaggtagggcctggtagaaggtgtttgggggcagatccctcatgaatgacttggtgccctccctgtggtagtgagtaagttctttctctgagttcacatgagatctgcttgtttaaagagtctggaacctcactccacattgatctctgtcttaccatgtgacactgcctgcgctccc

SEQ ID NO: 453233 - DNA, 592 bp, Homo sapiens
atctcataaggaatgtttgaattgccctaggttagatcataacagtaagaaaaaaaatgtcaaacattatttggatttttattatttcatccagtaatcgtggcagaccaattaagtgtagtatttggcctccaagcattgtatttactcatttgttcactcatccatctgttcatctatcagtttattcattcaatatttactcaatgttatcacattctaagttctatacttaagagaatgcaatttcagaagaagcaaacaatgtgatagagctcatggaacataaacagtaattcaatgaatgtataatttgataataattttattgcagaattacattcaataaacattagtatagtttgaatgtttatctcctgcaaatcttatgttgaaatgtgatccccaatatcrgaggtagggcctggtagaaggtgtttgggggcagatccctcatgaatgacttggtgccctccctgtggtagtgagtaagttctttctctgagttcacatgagatctgcttgtttaaagagtctggaacctcactccacattgatctctgtcttaccatgtgacactgcctgcgctccc

SEQ ID NO: 453234 - DNA, 638 bp, Homo sapiens
aacataaatcattctactataaagacacatgcacacatatgtttattaccatactatttacaataacgaagacatggaatcaaccccaatgcccatcaatcatagactggataaagaagatgtggtacatataaaccatggaatactatgcagccataaaaaggaatgagatcatgtcttttgctgggacatggatgaagctggaagccatcatcctcagaaaagtaacacaggaacagaaaaccaaacactgagtgttctcactcataagtgggagctgaacattaagaacacatggacacagagaggtgaacagcacataccagggcgtggtaggggttgggggctcaggggaggcatagaggatgggtcagtaggtgcagcaaaccaccctggaacatgcatacctatgtaaatacatgcacgttctgcacatgtatcctgtttttgattcatttttagagraaattttaacaaaaaaagaaaaaagagaaatgaatgtccttgacctctgaacaagatatactcaccatctggaagacttggctaaggagaacagaagagaataaatattcctctgctgtgagctcaaccacaaaacttctgtctgcagaggttaaaagttactacagtttcat

SEQ ID NO: 453235 - DNA, 525 bp, Homo sapiens
actcttccaactctgcaatgcttattctacttttcatgtctatttgaacacattatttagcttcagcttatgtgagaacatatggtatttgactttctgtttcttagttacttcactttacataatctgtttatcttttattgcctttcttttcgkttatttctatatggaatttggattccatcttgattaataatagcattttgagtatatctcctttgcatatattttagtggttgctctgagttttagaatatatgcatgtgacatatcagagtctattggtaacaatattttttcattttgaatgtgtgcatgtgtatgtatgtgtgcgtgtgaagtgtggaaaccttacatcagtttagttccctttactttggccactggtacatatcatagccttaaaatcagatggtgttatagtttttatttaaatcaccatatgatttgtgaaactcaagaggacagcctcttataaataatcatttttttctttttctattttatttcttccttcaatgttcc

SEQ ID NO: 453236 - DNA, 603 bp, Homo sapiens
gacattatttcttgttttctttcaatatgattagtaatccttcttgtacttcgggcaccagcacaaacaaacctctgcttaccacccacaaaacagtaagcctaagcagatttttttaaaaagctattattgaacagatattaaaggtgagagtataatttcaatccatggtgaagaatcaatttaagaattgaataaaattctaactgtaacatatttcaatacaaagttgatgctgctcatcttaatttagcattttgttttcttgccaaaaatcaatttgcagtagaaagtcgaaagcaatttagcatgaacaattagataattcctgatacatactgggsaaaaataaagataaacacataaggattgccatggagagattaccaggtgaatctaagatatctgggcaagcattttaatcacataaatgctatcactttcaattttttattgatacatcattataacatgtcttattatatatatgataatatactgtaagtatgaactacagtttagaattaaaagtatataaaatttaaaaatcattaataaattgcaacttttaaaatgatatatttcagtttgattttaatgtta

SEQ ID NO: 453237 - DNA, 521 bp, Homo sapiens
aatttgcatatatagggagaaggaggtacattttggagagagaaagaacataattatatgatcaaggtcaagaaagcaaaatttcacaatggaatattctaattaaaataagaaataggtggagagaagagagacagagagacctacgtaagtggaacacaaggtttttgtgaagagtartagaacggattgataaggcctatttaaaaggaaactaaatgttaagcagaggatctgaattatttttaaaaatacactaaaagttattcaccacacacttgaaataccttcaatatttcatggaaaagttaaaaataaagtccttactccaaaaaaaatctggtgttttatttttcatcacatttcagaatgtgagaatatatttctacatgaatggtagatatcaaaaagcagtgtagaaagaaacatttatgttggcatcttcttttcctttcttgataaaataacagccaatatttcaaacatttattaatttaccatttattaaattgtagtgaaca

SEQ ID NO: 453238 - DNA, 576 bp, Homo sapiens
tgaaacatttttaagcctttatgtcctcatagattagctcccacttatgagtgagaacatacgatgcttggttttccattcctgagttacttcactcagaataatggtctctaattccatccaggttgctatgaatgccattatttcattcctttttatggctgagtagtattccagaaaatatatacaacattctctttatccacttgttgattgattggcatttgagctggttacatatttttgaaattgtgaattgttctgctataaacatgcatgtgcaagtatctttttcgtataatgacttcttttcctctgggtggatacccaatagggggattgctggatcaaatggtagacctacttttagttctttaaggaatmtccacactgttttccacagtggttgtactagtttgcattcccaccagcagtgtgaaagtgttcccttttcaccacatccatgccaacatcttttttttttttttaattaaaggccattcttgcaggagtaaggtggtattgcattgcggttttgatttgcatttccctgataattagtgaggctgggaaatg

SEQ ID NO: 453239 - DNA, 597 bp, Homo sapiens
ccatctcagtggcatgaatagaagcatggaaaggtagttctctcagtcctagctgagcagctgtgactatgaatgcataccatctctctgtgctagagcttgggcagacctagcttgtgacactgtagacttcccaccccaaggagtaacactgacttggatagctagtgatacaggtttttttctattcaggaaccctgtagacatkcgagtctctgaggtccgtagagggttagtcctctcccatacagggctgcctctcttccttaatggaatatcttaggtgtattttctgttgccagattccctgcaagaggcaatgagcctaaacttaccttcctaaatgtggtagttttttcatgattaactaaatcaactactagaccatgaatgctgctaggtggttgtaatggacaacccacacagagacttcatactgtaggtacaatcgctagtttatcctggactacagccagggctggttttgtggacataccatctgtgcagttgcttggagctctgcttagaagggccctgaacttggtttaatgtttagctgttggtgtcttgaaattcttactaattttaaagcaaagg

SEQ ID NO: 453240 - DNA, 589 bp, Homo sapiens
caatcataagcgcccaactggtgagagaattctttctttggtaggatattgtaggacagaatcagaaaacaaattgctttagaattaagcctacactgggtgacagaaatattatataattcaatgtgtgcctttttaaaaaaggaattgctttacctcttgaattatctgcactctgggaatatacctggggaaatcattgccagttctcctccacccacttgygctaggtccctccctccatgctgcaagtgctaaggaataattcttctgattgtattccaattgctagtagaaagcccctaaaagtcacaagggaccggatgaaagaaagctagcaaagaatgcattcttaattcttacatcactttactgcacacactgtttttctttttgacttattaaaattctaaataagtgtttactctacagcatatgtaatctgaaagataaattctgcacaggcttgtgcttaggttcataaattggtctgtttccttcatcttgagctgaaagctgggcatattattgttgatatacataagatgttcaaactaacataataataactgatgtttttgagtgagat

SEQ ID NO: 453241 - DNA, 589 bp, Homo sapiens
caatcataagcgcccaactggtgagagaattctttctttggtaggatattgtaggacagaatcagaaaacaaattgctttagaattaagcctacactgggtgacagaaatattatataattcaatgtgtgcctttttaaaaaaggaattgctttacctcttgaattatctgcactctgggaatatacctggggaaatcattgccagttctcctccacccacttgcgctaggtccctccctccatgctgcaagtgctaaggaataattcttctgattgtattccaattgctagtagaaagcccctaaaagtcacaagggaccrgatgaaagaaagctagcaaagaatgcattcttaattcttacatcactttactgcacacactgtttttctttttgacttattaaaattctaaataagtgtttactctacagcatatgtaatctgaaagataaattctgcacaggcttgtgcttaggttcataaattggtctgtttccttcatcttgagctgaaagctgggcatattattgttgatatacataagatgttcaaactaacataataataactgatgtttttgagtgagat

SEQ ID NO: 453242 - DNA, 501 bp, Homo sapiens
tcgctcttgttgcccaggctggaatgcaatggcgtgatctcagctcactgcaacctcctcggtttaagtgattctcctgcctcagcctcccgagtacctgggattacaagcacccaccaccacacccggctaatttttgtatttttagtagagacagggtttcaccatgttggccaggctggtcttgaactcctgacctcaagttatccacccacctcagcctcccaaagtgctgggattataggcatgagccaccgcgcctggcctttataatttttaaaaatacayggtaacttgtgataagaccttgggcccttggtgcaaacagaaatcagttaactgtgagcacaccctgtcccccaacttcatgacctcacacacacacataagttaaaaacccatgaaattctgtaccctcaatgaaagggtagactagatagaagcttttcttctggcatagtaagaagcttttctgtcaaggcacaagctctgaaagagaaa

SEQ ID NO: 453243 - DNA, 448 bp, Homo sapiens
aggcttcctttatagagcaaaccagaactctccagaccccagagagctcagtgtcaggagataatgctatctgaggaaaggaagaaagcccacaattgagtatctgttgctccttcaacttctgctccaccaccatgaaccttctctctctctctctctctttctctgtctgtctctgtctctctctctctgtctctctctctctctctctcwcacacacacacacacacacacacacacacacagagagagagagtttgagccaagcagggaaatgtaggtggttcagagcactgtttgggtataggtttgtcaatttgggtcgggaaacagtataattctataaaactaaattcattctcttcacctatactttcttccaaaatgtcctatctcagtgaaagaaaagtatgtcaccaaccagttattcaaaccagagaccaggagg

SEQ ID NO: 453244 - DNA, 448 bp, Homo sapiens
aggcttcctttatagagcaaaccagaactctccagaccccagagagctcagtgtcaggagataatgctatctgaggaaaggaagaaagcccacaattgagtatctgttgctccttcaacttctgctccaccaccatgaaccttctctctctctctctctctttctctgtctgtctctgtctctctctctctgtctctctctctctctctctctcacacacacacacacacacacacacacacacasagagagagagtttgagccaagcagggaaatgtaggtggttcagagcactgtttgggtataggtttgtcaatttgggtcgggaaacagtataattctataaaactaaattcattctcttcacctatactttcttccaaaatgtcctatctcagtgaaagaaaagtatgtcaccaaccagttattcaaaccagagaccaggagg

SEQ ID NO: 453245 - DNA, 483 bp, Homo sapiens
cacacacacagagagagagagtttgagccaagcagggaaatgtaggtggttcagagcactgtttgggtataggtttgtcaatttgggtcgggaaacagtataattctataaaactaaattcattctcttcacctatactttcttccaaaatgtcctatctcagtgaaagaaaagtatgtcaccaaccagttattcaaaccagagaccaggaggccatctcttgctctccaatttcttcaccgtttatgtyaaatcagtgaatgagtcttgtttgtgaaatctgcttaacccttatctcttccccactcctgttcagtgactgcctcagtcagcctccatcatcttcttctgaaaaagatggtccctaataggtctctcttttccgtcaatccttcccaacccatgttccccacagattaatttgaacaaaaccacaatagttcccacactgctttcaagataaggtataaatgccacaaaggc

SEQ ID NO: 453246 - DNA, 564 bp, Homo sapiens
atacagcccctcgccattttggtttcccgcggactgccggtgcattctgggagcgcggagcgactccggtgccgaatggcagctctccaaagccgcgggggggcagggactgcgcggcgagcgcggaggaacaccgcgccctgcgtccccgactggggctgaacaaagaaggactctttaacgttgcagtgaggctcagtccttccgccgccggggctaacacaatagtgaaagctgcgctcctgrtcgtcggcaggctggcactgttatacaggaaaagggtcgtgtgcgaccttcggtgtgcgtggtcgtaacggtgctctgtgcatcttgctgggccgatttcttttccctggagaaaaccttaactgaagcacgtttcctctactttcatcctaaggcctgctgttagaatttccttcagaggggagaagacccaggatgtcgagattaaattttattcagcgattcactgtccagtcccaaactccttatcaggagctgcttttatgaaagactttcagacgatttttttcctaacgatgaaaggttgttttctgttta

SEQ ID NO: 453247 - DNA, 595 bp, Homo sapiens
gttgcagtgaggctcagtccttccgccgccggggctaacacaatagtgaaagctgcgctcctgatcgtcggcaggctggcactgttatacaggaaaagggtcgtgtgcgaccttcggtgtgcgtggtcgtaacggtgctctgtgcatcttgctgggccgatttcttttccctggagaaaaccttaactgaagcacgtttcctctactttcatcctaaggcctgctgttagaatttccttcagaggggagaagacccaggatgtcgagattaaattttattcagcgattcactgtccagtcccaaactccttatcaggagctgcttttatgaaagactttcagacgatttttttcctaacgatgaaaggttgttttctgtttacccgctttgcagtccttcctagttgtaatgaaatctgagaatagtcccctgcaaaatggtttaagaaaacagaattgtttattagtgcagacccttagcctgcccagattctgctgcctacaggggtcccaactgacaagctgtgagattgtatgcttgtctctttaacttacacctagrtacaacccagctcctcttagtagccacgtgtgg

SEQ ID NO: 453248 - DNA, 329 bp, Homo sapiens
tggactggttctctagacctgctgcatggaagttgtcttggggctttcctttaccaycatcctgggaattcctttctcttcccttctgtgtgacataccttgcattccgtgcctgccttttatttggtttactccctctgtttagttttattaagctcaaataaagtgtgcttgggggataaatctttaaatactttatatggctgaaaatgttctaattttcatacacatacactctttttttaaaaaaatacattttagagatagggtctctctgtgttgcccagggtggagtgtagtggctattcacaggcatgatcatagtacac

SEQ ID NO: 453249 - DNA, 635 bp, Homo sapiens
aattgacgtgtcatcttacagtgccaaaagtcatgacgaccaaacagagtggaactaaggcagctttttttccagtttccccatgcttataaatcttcctcctggagaattttatttcttaacagtgctattctaatgacctccatgaagtgctgatccaatcccaaggctcagttttgaactctttgagtaggaagtaggcggtctaaatgcagattaacagaattgctttgactttctttaggaaacttacatggggcagagtgaagagaaagttgacctcattttattactttcrtaaaggaaaagcttggtgctctcccattctattctgaattcctatcatcactcattcttggaattgtttaggtaaacaaagagtcatagaggtacagggaaaaaatgcagtgtgctggatggagacctgatccctgattaagacagaggaggttgctggggaatgcagcaagtgataatgccacagattttctaaagctttgggacctctagaagaggagctggagtgaggaacgggtgaaagcggctgctgcagccagagtcaaagggcatgtgagacagcatctctttcatcatcctcacacacgtgaacagcaactccattcggagtgtcagct

SEQ ID NO: 453250 - DNA, 635 bp, Homo sapiens
aattgacgtgtcatcttacagtgccaaaagtcatgacgaccaaacagagtggaactaaggcagctttttttccagtttccccatgcttataaatcttcctcctggagaattttatttcttaacagtgctattctaatgacctccatgaagtgctgatccaatcccaaggctcagttttgaactctttgagtaggaagtaggcggtctaaatgcagattaacagaattgctttgactttctttaggaaacttacatggggcagagtgaagagaaagttgacctcattttattactttcataaaggaaaagcttggtgctctcccattctattctgaattcctatcatcactcattcttggaattgtttaggtaaacaaagagtcatagaggtacrgggaaaaaatgcagtgtgctggatggagacctgatccctgattaagacagaggaggttgctggggaatgcagcaagtgataatgccacagattttctaaagctttgggacctctagaagaggagctggagtgaggaacgggtgaaagcggctgctgcagccagagtcaaagggcatgtgagacagcatctctttcatcatcctcacacacgtgaacagcaactccattcggagtgtcagct

SEQ ID NO: 453251 - DNA, 545 bp, Homo sapiens
gcacattaagacaaataaaaccacacagtattttatgtatgtgtgttgtaaaacacctccataaattatcacaatagattttgagaaaccgaaagactcctgcagagtctattgctgaaagtagaaatatctgaattttgtaaaacaaatcaccaaaaagaaaaaagaagtaaaataatgaaaaaaaaataaggtacaaaaaaggtcagaacttacctgcttgctaatgcttttgtcaccagtagccttgacaaagccaagaattatctcaagattaaaaaaaaaaaaaaaagtctcaggtcaaggatgaaacagaaatgttaagagatacgataatatactcaaaaggatacattgatgtcaggaaaatctgaaagataaatgtgaaatattcagaaattaattatgtcaaaacttctaactacccaraaatttcctcaagagaataagatagaatccaatttttaaataatgtcaaaccatttgagtaaacatagttttgtgacttttgaaaattaagagccttggggtgttacacattccta

SEQ ID NO: 453252 - DNA, 578 bp, Homo sapiens
taaatgtctctactgatgattcatggttaatttagactgtacgaagatttaaagttgttcacaaaacggtatgaaatatcaagtcaacaacctacattgtatccttgattatacacttcttgactttcttgttcatcttttttttttttttttttttttttttttctgagatgcagtcttgctcggtggcccaggctggagtgcagtggtgctatcttggcccactgcaacctctgcctcctggattcaagccattcttctgcctcaacctcccaagtagctgggattacaggtgtgcaccaccatgcccaactaatttttgtatttttagtagagacagggtttcaccatgttggccaggctggtcttgaactcctgacctcaggtgatctgcacgcctcggcctcccaaagtgctgggattacaggcataagccaccatgcctggccgttcatctttcttcataaaataaaaattttacttacaatgcacttctamctcaatttggatgaagagaaaaattatcatcttaaaattacacttacagtaatgaggtctcaaagggtctggcaaatatt

SEQ ID NO: 453253 - DNA, 516 bp, Homo sapiens
ttggcaaatacaaacaaatttgaagaaaaaaagtaagtcctccatagccccactgatctatatacccattatcagagtttaaagatttactttaaatttttaaaattaatattgtcttaattattagaataatctgtttcattttgtttactgaatgcatatgctgttaaaaattactatataattagcaattctttctcagcttgatctagcagtataattaccttatattttagatgttgctcctgttttgctactcaattttttagttaaagaatttcacctatttattctctttgtgattactgacatatttaggcctatttcttttaggctatttgctactatctatctgacctctctctcccagccttctcctcccctccyctttccatcctttattattctttccttctcatactttttcctctctccttcttttgggttaattaggtttctcttttatgtcttttttttttttttttactactatgactagttggtatacttggttgg

SEQ ID NO: 453254 - DNA, 490 bp, Homo sapiens
agatgttgctcctgttttgctactcaattttttagttaaagaatttcacctatttattctctttgtgattactgacatatttaggcctatttcttttaggctatttgctactatctatctgacctctctctcccagccttctcctcccctcctctttccatcctttattattctttccttctcatactttttcctctctccttcttttgggttaattaggtttctcttttatgtcttttttttttttttttactactatgactagttggtatacttggttggtatacttggtttctagtattttaaatgttacctgagtgatttmaatgtgtctattttacttaacactgtataaatttaatcaatattttatccccctcatgaataattttattcaccagttccactcatcatataatattttgtagtatttctcctttaactttcctttgtcccccaaattagacattatttttactgttattcattc

SEQ ID NO: 453255 - DNA, 490 bp, Homo sapiens
agatgttgctcctgttttgctactcaattttttagttaaagaatttcacctatttattctctttgtgattactgacatatttaggcctatttcttttaggctatttgctactatctatctgacctctctctcccagccttctcctcccctcctctttccatcctttattattctttccttctcatactttttcctctctccttcttttgggttaattaggtttctcttttatgtcttttttttttttttttactactatgactagttggtatacttggttggtatacttggtttctagtattttaaatgttacctgagtgatttcaatgtgtctattttacttaacactgtataaatttaatcaatattttatccccctcatgaataattttattcaccarttccactcatcatataatattttgtagtatttctcctttaactttcctttgtcccccaaattagacattatttttactgttattcattc

SEQ ID NO: 453256 - DNA, 560 bp, Homo sapiens
ttgatatccagtgaaactaagcttcataaatgaaggcaaaataaattatttcccaaaaaaatgctaagagaatttgtcactattagaatgaactatacgagaaatgctcaaatgagttcctaagatggaagggaaaacacaatactcaccatcctaaaaaagcacacrtaagtacgcataactacaaagctcagaaattccacaaagtaattacatagttgagactagaattcaactaacaatattatgacaggtacaacagtccatatattaatattaaccttgaatgtgaatggcctaaatgttgaatttaatacatatagactggcaaacaacattaaaagacatgatgtagtcatctgctgtcttcaagaaacatacctaatgggtctccaggctcagagtaaagaggtggtaaaagatatagcttgagagcagaaaacaaaaatgagtatgagtagctatacatatatcagataaaaaagacctgaaatcaacaacagtgaaaaaaaagacaaagaaggaaatcatgtaattacaaggggctcaattaaacaaga

SEQ ID NO: 453257 - DNA, 560 bp, Homo sapiens
ttgatatccagtgaaactaagcttcataaatgaaggcaaaataaattatttcccaaaaaaatgctaagagaatttgtcactattagaatgaactatacgagaaatgctcaaatgagttcctaagatggaagggaaaacacaatactcaccatcctaaaaaagcacacataagtacgcataactacaaagctcasaaattccacaaagtaattacatagttgagactagaattcaactaacaatattatgacaggtacaacagtccatatattaatattaaccttgaatgtgaatggcctaaatgttgaatttaatacatatagactggcaaacaacattaaaagacatgatgtagtcatctgctgtcttcaagaaacatacctaatgggtctccaggctcagagtaaagaggtggtaaaagatatagcttgagagcagaaaacaaaaatgagtatgagtagctatacatatatcagataaaaaagacctgaaatcaacaacagtgaaaaaaaagacaaagaaggaaatcatgtaattacaaggggctcaattaaacaaga

SEQ ID NO: 453258 - DNA, 585 bp, Homo sapiens
atgtaaaaattggtcttaatataagaccaatttacaaaatatttgcctcaaaattttacagctgattcattttacagtgagtaagatgaattctagtcacaacccctgaaatataaatttcttcttaggatttctcagggagacttttatttctgatttttgctcttcaagtccaggctgaaaaaacagagggtattcctgtgctctcccttcacagaagacatacagaattgtcttatggttttcaatcattatctgacagaaccttcagatcatgttggttttatgcaggtgtctctaattagacctcccaatacatttggtactaaggctttaactccttcacctctaattccatatatggtcccataagaccaaggttctaggaatgccacagatccactgaatagaraaaatgggggacagaagattggatagcaggattttttgtttttgcttattctttgcctggctgcagttctaggagacctgctgcattctatgttaaaaactccttctgggtggcccttttttcattatcttaagctatcgttagtcttctctaataccattacctgtttttgc

SEQ ID NO: 453259 - DNA, 574 bp, Homo sapiens
gtcatatgagtcagggatgcataaatgatgagtttttgttgttttagtaagtgactgaattacccttttgtgagaataaaaaacatcaacaattttgccataattttctttgaaaaatttggwgttttgaaaataataatctttttaatcactgttgaattgcaaagacaattttgcacatggtgttgtcatattaaaacggaataaaatgataattatttccaattacttcatgattaacacaataatgtagaaggaactggcaataatatagcaataatttaatttttatttaaattcttataattttttatattaacaccacactttcttcatttaatcttgttttaggttctcatttgagcttggaaatcagtgggctcagtcaaatcattgcatataaatataataatagaaagtattttaatgtaaatatgcacactctctctgtatgacctatcagctagactattacaattgaattggaaagccccaatagatttctaattagtacgttaaaccagaattttattatcttcatcctctgaatgcctgcatggacatgttgtttata

SEQ ID NO: 453260 - DNA, 574 bp, Homo sapiens
gtcatatgagtcagggatgcataaatgatgagtttttgttgttttagtaagtgactgaattacccttttgtgagaataaaaaacatcaacaattttgccataattttctttgaaaaatttggtgttttgaaaataataatctttttaatcactgttgaattrcaaagacaattttgcacatggtgttgtcatattaaaacggaataaaatgataattatttccaattacttcatgattaacacaataatgtagaaggaactggcaataatatagcaataatttaatttttatttaaattcttataattttttatattaacaccacactttcttcatttaatcttgttttaggttctcatttgagcttggaaatcagtgggctcagtcaaatcattgcatataaatataataatagaaagtattttaatgtaaatatgcacactctctctgtatgacctatcagctagactattacaattgaattggaaagccccaatagatttctaattagtacgttaaaccagaattttattatcttcatcctctgaatgcctgcatggacatgttgtttata

SEQ ID NO: 453261 - DNA, 574 bp, Homo sapiens
gtcatatgagtcagggatgcataaatgatgagtttttgttgttttagtaagtgactgaattacccttttgtgagaataaaaaacatcaacaattttgccataattttctttgaaaaatttggtgttttgaaaataataatctttttaatcactgttgaattgcaaagacaattttgcacatggtgttgtcatattaaaacggaataaaatgataattatttccaattacttcatgattaacacaataatgtagaaggaactggcaataatatagcaataatttaatttttatttaaattcttataattttttatattaacaccacactttcttcatttaatcttgttttaggttctcatttgagcttggaaatcagtgggctcagtcaaatcattgcatataaatataataatagaaagtattttaatgtaaatatgcacactctstctgtatgacctatcagctagactattacaattgaattggaaagccccaatagatttctaattagtacgttaaaccagaattttattatcttcatcctctgaatgcctgcatggacatgttgtttata

SEQ ID NO: 453262 - DNA, 617 bp, Homo sapiens
cttagggatgaattatatttctctagtatgtagtctagacttacaatgtctcccttcaattgtcttccaaactaagtgtttttaatcagaaaatgaactgttgacagtatgtatagcaatgtattgatgcaaatacatcactcaagrgaaagcaagtcatggtagtgcaaaggtagaaccttgtgatgctatatacttagaaaataaagcatattcattgttactgatgttatctatgacctgaaatttatagtttctagaacaatattccctctacttcgctcctattttactaaagaatattaattagggaccaaaacatcttcaaattgtctggaaaaaaattaaaggtcacaggttgtagatatataatcttattttctaagaattcaaggttagttgtatttgttatttggaaaccctttctaggaatgttttaatgaaaatgatagctatgaaataaatatttatgtgaattaaaaatgtttaaatttgactatcagtaacttccattcagttcagaaaacctactgtgaacccacttatcttccctttgagaagctgtttcttaaatggattcatgttatcctgtgaacttcgctcagcagcgttataaa

SEQ ID NO: 453263 - DNA, 600 bp, Homo sapiens
gtgactttacgcagattttatttaaaccttattgataaaaatgtcagcagttttgtatgctattggagtgtaaaatagtatagaatgtatcgatcagccttctttcatggactttcatccatttayccatgctgcctatattctagagaaagggaaatacactcatacatctctctctcttttttaatatatataattctttttcttaaaaaaaaaatagggatagggtctcactgtgttggccaggctggtcttgaacccctattctcaagctgtcctctcgcctcagcctcctaaagtgctgggattacagatgtgagctaccacacccagctagtcatacatatcttaatgatggggatacatgttcttgtgtgagcattatagagtgtatttacacaaatctagatggaatagcccactacacacctaggctgtatggtaaatggcctgttgctgctggattacaaacctgtatggcatgctactgtacatactacagggagttgtaacacaatggtaattatttgtgtacctaaacatacgtaaacatagaaaaggcatgcttaaaaatacggtataaaagataaaaaaaaggta

SEQ ID NO: 453264 - DNA, 649 bp, Homo sapiens
atgtacattcctcctctggtataccctatatgttgatgtgtatgctcccctatgctttcctaaaaattaatgtgccaatattcaatttttataatatttagatgaaaaatgttaaaatgtgctcacttgaaatgaatgataaagtaatagtttattttttaggtacaggaattagatccaatatttgtcttattggttttacatatktcatattattggatagttagatatttttctctttttctgtcaagaggtagtaattagaattatgagttgtcttttattcttgctgttataactttaacaatttcaatgatgtaaagcactgatcagaaataatgcagaatagctggtgcagtggctcatgcctgtaattccagcattttggaaggctgagatgggaggattgcctgaacccaggagttcaagaccagcctgggcagcatagtgagacctcctgtctacagaaaataaagttagctaggtgtgatgggatgcgcctgtagtcgcagctactcaggaggctgaggtgggaggattgcttgagcctgggaggttgaggctgcagtgtgccaagattgtgccactgcattccagccttggtgacagaacaagaccctctctctctcaaaaaaaaaaaaaaaaaaaa

SEQ ID NO: 453265 - DNA, 633 bp, Homo sapiens
tcagttaatactatttagatcttttgggttttttgtgaaattatttgccaatatttagagtacacagtatcttccatatttgtctctggtgtgctccacaacttaaaattttcaaataagctgccaaaagagagagggttttttggtttcactggttcatactagatatggggccaattgtggaagatgaaaggtgacaccatttccctgtgactcagaggtgaaaacagaagaatgatttaacttgcatatagatgactccctttgggaatatgaaggacagttaatgtttaagacaattatttaaattgtctgaatttgataatctttgtttttgttttttttaaagcattagttgtaaacaaggaaactgttgatgtgccacaccatatttattgcaataaggagatgtgaaataatgagaagtgtatctgtgccctgatatggttaggttttgtgtccccacccaaatctcatcttgaattgtaatccctataatccctacgtttsgagggagagaccaggtgaaggtaattgaatcatgagagcagtttcccccatgctgttctcatggtagagagttctcattgaaatctgatggttttataagatgctcttcccacttcactcagc

SEQ ID NO: 453266 - DNA, 575 bp, Homo sapiens
ttacaagagtatttctatatctaccatacaaatatctttatgaagatgaaggaagagaacattctaaaacacaaattygaacatactgagctgaagcttaccattatggcataaaataagggtccaaaagaagagataacttatgtacgctgatgaagtggggtgaacaccatgcctttaacatcaatcttacagtactgaaaagcaaaaacaataaaaccccaatattaacataaggctattaagagaaaaaaaaagagattacatatttcataattaacaaggaaaattacttatatttttaagacatacatatttttaagacactttttaataatgagtaacaataaaattcatgtaccacaacctatccactcactgctgaaaagtagtttcaactaggaaaggcaaaacacacttgccaagttacaattattactccttttctcaaaaatacttaacatctccagagagaaaaaaaatacattttttaaaatctcttctctatcactactgttgctattctcatttttcctttgaattattttaatagcttgcccactgggcttgatcac

SEQ ID NO: 453267 - DNA, 589 bp, Homo sapiens
gattcgagcagcatttgtttctccccacatctagaaattgtagttcatatgtacaccagctagtggctgtgaacaaccatttagttggtgtaaaaaactttatttcaatataaactgactctggggagcgttggtgatgctgtatcccaaagtgtagcctctgtaattgtgaatattaactgaggtagtgaaacgtgrtgtctggttttctattgcatttattcaagtagaaaagttaactaaatggttgacacacacgaattggtggagacattgtccatatgccaattttttgttaaaaccttttattttgaactagactgctttgagatatttcagaaggacagtattcagccacagctgcaaaggttgtaaatgcttatgattgagcatttttagggtttctccatccctggggtttgcaaattgttcacataaagagcattcttaaaatggttggcttcttgtctgtaagccagctgatctagtagtaaccaaaaattccagttttgagaataggaaagattccgcctgcttacctgtgaagacataagaaaatcttagtaactaccagattatctttagaatt

SEQ ID NO: 453268 - DNA, 589 bp, Homo sapiens
gattcgagcagcatttgtttctccccacatctagaaattgtagttcatatgtacaccagctagtggctgtgaacaaccatttagttggtgtaaaaaactttatttcaatataaactgactctggggagcgttggtgatgctgtatcccaaagtgtagcctctgtaattgtgaatattaactgaggtagtgaaacgtggtgtctggttttctattgcatttattcaagtagaaaagttaactaaatggttgacacacacgaattggtggagacattgtccatatgccaattttttgttaaaaccttttattttgaactagactgctttgagatatttcagaaggacagtmttcagccacagctgcaaaggttgtaaatgcttatgattgagcatttttagggtttctccatccctggggtttgcaaattgttcacataaagagcattcttaaaatggttggcttcttgtctgtaagccagctgatctagtagtaaccaaaaattccagttttgagaataggaaagattccgcctgcttacctgtgaagacataagaaaatcttagtaactaccagattatctttagaatt

SEQ ID NO: 453269 - DNA, 557 bp, Homo sapiens
tgccctctttccctctctgctcagaatccgacatcctttaccagctgttcacacctcctgtttgtggaggagctgtggaggaggtgtggacagccagcatttatgcggagacatcctcctcagccttcatgggctccaacactcaatattggctgtcacatgcttcccaccctaattgagctctaataccctgttcccggtgtaggttggggatccctgccatctatgcatttttccaactttagctattttatcacatttccttctaatcttttctctgtgcacttaacataatgctgataactatgatttttaaatcccatttatttatttttartaatttcaacttttattttagatttgggggtacatgagcaggtttgtgacatggatatattgtgtgatggtaaggtttaggatatgaacaatcccatcacccagatggtgagcatagtacccactagtgagtttttcaaccctttctccttatcctctctgcccactccattagtccttagtgtttattattgctatctttatgtccactagtacccaat

SEQ ID NO: 453270 - DNA, 557 bp, Homo sapiens
tgccctctttccctctctgctcagaatccgacatcctttaccagctgttcacacctcctgtttgtggaggagctgtggaggaggtgtggacagccagcatttatgcggagacatcctcctcagccttcatgggctccaacactcaatattggctgtcacatgcttcccaccctaattgagctctaataccctgttcccggtgtaggttggggatccctgccatctatgcatttttccaactttagctattttatcacatttccttctaatcttttctctgtgcacttaacataatgctgataactatgatttttaaatcccatttatttatttttagtaatttcaacttttattttagatttgggggtacatgagcaggtttgtgacatggatatattgtgtgatggtaaggtttaggatatgaacaatcccatcacccagatggtgagcatagtacccamtagtgagtttttcaaccctttctccttatcctctctgcccactccattagtccttagtgtttattattgctatctttatgtccactagtacccaat

SEQ ID NO: 453271 - DNA, 668 bp, Homo sapiens
atgtatctttttgtattatagccatcctagtagttgtgaagtgctatctcattgtggttttggttcacatttccttgacagctaatgatgttgagcaycttttcatgtgcttattggccacttgtatgtctttgcagaattatctattcagatctattgcccattttaaaactggataatttgtctttctagtgttgagttgtaagagttttctcttctggataccatcccttatcagatatgtgatttgtaaatattttcactcattttgagggttgcgttttattttcttaatagtcatttgaaacataaaaatgtttaattttgatgatgttgagttcatttatttttttcttttgttacttgtactttcagtgtcatacctaagaaactgttgcctaatacaaggtcatgaagatgtacatttaatttttttctaagagttttaaagctggcacctccagcttttgtcttggaaagtactgataagatcttcagatttaggtgaactatcacatgactcccacaacctcttggtgtgcagataaatgtttaacaaccaattttctgaaaaaaagtgtatgtgtgtctgggtgtacataagttattacagattttactgcttaaaaggaagtgtagcatgcaatttacaaataataataaaatgt

SEQ ID NO: 453272 - DNA, 608 bp, Homo sapiens
tttttatttttttttatttttattttttttttttttcagaattattctaacagtggctttaggaaagggggtgtcttatttactagcagtcacacaatacaaacggctgcctcgacttgcactttcagaagggcccatggcaatttgttggagaaacactaaatttatagactatatttctgtgtgtgtgtgtgtgtgtgtgtgtgtgtgtgtgtgtgacatgtatatcatatgtcttyatttattcagattttttatgtccttcaatcgagtttgaatatttttcttttgttcatcgttaggttaattcctagaaaagatagagctattttccttttgcaaatgacttcttatattatgttgtattttctttctggcttttgatggtatagaaagaatctattgacttttatgagctgaaatgaattcttatttctgagtgaattattctatttccctagataattcctcttacaaatctccattttgtttttgttcctttccctttttatgaaagtctttatgctggttcttttttatattatctttcatccttgaatgtggttagccatttactgaaaacaaaaaaaaagtagagaggctttgat

SEQ ID NO: 453273 - DNA, 608 bp, Homo sapiens
tttttatttttttttatttttattttttttttttttcagaattattctaacagtggctttaggaaagggggtgtcttatttactagcagtcacacaatacaaacggctgcctcgacttgcactttcagaagggcccatggcaatttgttggagaaacactaaatttatagactatatttctgtgtgtgtgtgtgtgtgtgtgtgtgtgtgtgtgtgtgacatgtatatcatatgtcttcatttattcagattttttatgtccttcaatcgagtttgaatatttttcttttgttcatcgttaggttaattcctaraaaagatagagctattttccttttgcaaatgacttcttatattatgttgtattttctttctggcttttgatggtatagaaagaatctattgacttttatgagctgaaatgaattcttatttctgagtgaattattctatttccctagataattcctcttacaaatctccattttgtttttgttcctttccctttttatgaaagtctttatgctggttcttttttatattatctttcatccttgaatgtggttagccatttactgaaaacaaaaaaaaagtagagaggctttgat

SEQ ID NO: 453274 - DNA, 608 bp, Homo sapiens
tttttatttttttttatttttattttttttttttttcagaattattctaacagtggctttaggaaagggggtgtcttatttactagcagtcacacaatacaaacggctgcctcgacttgcactttcagaagggcccatggcaatttgttggagaaacactaaatttatagactatatttctgtgtgtgtgtgtgtgtgtgtgtgtgtgtgtgtgtgtgacatgtatatcatatgtcttcatttattcagattttttatgtccttcaatcgagtttgaatatttttcttttgttcatcgttaggttaattcctagaaaagatagagctattttccttttgcaaatgacttcttatattatgttgtattttctttctggcttttgatggtataraaagaatctattgacttttatgagctgaaatgaattcttatttctgagtgaattattctatttccctagataattcctcttacaaatctccattttgtttttgttcctttccctttttatgaaagtctttatgctggttcttttttatattatctttcatccttgaatgtggttagccatttactgaaaacaaaaaaaaagtagagaggctttgat

SEQ ID NO: 453275 - DNA, 610 bp, Homo sapiens
atatgtaagggggacatagtgctgtggggttcattgctatgaggcattaatcagatatttaataactttcaaacaccattaaagtggcattaacatactactattaagagaatgtagtatcccggagggtagtaattatgtcccttttttatctgtttattttccagacacttagtgcagcacctaatgatggtgctcagtgaatattggttaaatggatgaatgggacagaggttgccaaactttttctgtaaaagtcaagatagtaaatattttaggctttgtgggccatacgatctctgtcacaactactcagagctgcttttgtaatgcaaaagcagccatagacaatatgtaagtaatgagcatggatgtgtttcaattaaattatttatggccactgaaatttgaattttatrtgattttcatatgtcatgaaatactctccttttgattttttcccaactatttaaaaacgtaaaaacagttcttggctcatagtgttacagggggcggggggaggggggtccttgctcccagagctcccaagatggtggcgggccacctccaaggtggtggcaaacctcgtgttctctgacctggtgtcacg

SEQ ID NO: 453276 - DNA, 610 bp, Homo sapiens
atatgtaagggggacatagtgctgtggggttcattgctatgaggcattaatcagatatttaataactttcaaacaccattaaagtggcattaacatactactattaagagaatgtagtatcccggagggtagtaattatgtcccttttttatctgtttattttccagacacttagtgcagcacctaatgatggtgctcagtgaatattggttaaatggatgaatgggacagaggttgccaaactttttctgtaaaagtcaagatagtaaatattttaggctttgtgggccatacgatctctgtcacaactactcagagctgcttttgtaatgcaaaagcagccatagacaatatgtaagtaatgagcatggatgtgtttcaattaaattatttatggccactgaaatttgaattttatatrattttcatatgtcatgaaatactctccttttgattttttcccaactatttaaaaacgtaaaaacagttcttggctcatagtgttacagggggcggggggaggggggtccttgctcccagagctcccaagatggtggcgggccacctccaaggtggtggcaaacctcgtgttctctgacctggtgtcacg

SEQ ID NO: 453277 - DNA, 610 bp, Homo sapiens
atatgtaagggggacatagtgctgtggggttcattgctatgaggcattaatcagatatttaataactttcaaacaccattaaagtggcattaacatactactattaagagaatgtagtatcccggagggtagtaattatgtcccttttttatctgtttattttccagacacttagtgcagcacctaatgatggtgctcagtgaatattggttaaatggatgaatgggacagaggttgccaaactttttctgtaaaagtcaagatagtaaatattttaggctttgtgggccatacgatctctgtcacaactactcagagctgcttttgtaatgcaaaagcagccatagacaatatgtaagtaatgagcatggatgtgtttcaattaaattatttatggccactgaaatttgaattttatatgattttcatatgtcatgaaatactctccttttgattttttcccaactatttaaaaacgtaaaaacagttcttggctcatrgtgttacagggggcggggggaggggggtccttgctcccagagctcccaagatggtggcgggccacctccaaggtggtggcaaacctcgtgttctctgacctggtgtcacg

SEQ ID NO: 453278 - DNA, 498 bp, Homo sapiens
ctttttctgggtttgggcacatggggtaaaaaaccagagaaatcactaatgataagaaaagctgagcaactgaccctgtcatctccaggccgtctctggtcagaccaactcctttacaaacatcaccttaattaattaatttaaaactctccattatctgacattgacagtcctcattgctgctaccttgtgtcttttaatatacattcacttaactatttatacagttcttacatttttgagaatttaacccccgtctttgccgtattcctccttctttaaccagaacaagcagctcttcctttgaactggccatcctaggtgggctttggtaatccctggtgctaccataaaatcttatgtcgtgggtctcaagttttagtgtccmtgagaatcagctggaaaatattgaatatagaatcctcagattcccacccagtctgcacaaatcagaatttctgaatgcagaacagagaatttcattgtagcgattgcctt

SEQ ID NO: 453279 - DNA, 565 bp, Homo sapiens
agaataacattacccagaatcaatcacttcaattttaaaagatcctggagatgactaactttatagaaggatttaagtcattttttcctcaaagctttttggaagtattggcactgcaaagacagtgagacactattggaaatgaggttatttggtgtagtatcaaaaatcacagcagagggcgtcattgtaatgtgctggatttttctttcttcatgaaagaatattttctccatggctctgcatctttctgttcactcattttgaaacttgcaatatgtttatctgaaaaaaagaaaacacttaaataccaattttactatattgagaatgtagggttcaatttcagccttaaaaatcattacttattttgtttggttcccatgaagttattgcaattctggcacctttctggacttccttccagagcagtgaggagttgtgtaacctcttttrctttttcttgcaggttgtcaccttattaagaccattcaaattgttggcagatcattatgtgaacacattcattaattatgttactttattcaaagatcagaaaaattac

SEQ ID NO: 453280 - DNA, 646 bp, Homo sapiens
tttatatacacacatgcagatttacttaaggaactggctcatgtgattatagagggttggcaagtccaaaatcggcaggcggagttggcaggctggagacccagggaaaagctgatgttgcagttcaagtccgagagctgtgtgctggcagaattccctcttgctaaaggaggtcagtcttttgttttattcaagccttcaacagatagatgaggcccactcacattatggagggcaatctgctttactcaaagtccactgatttaaatgctaatctcatccawaaacacccttacagaaacatccacgataaagtttgaccaaatatttgggcactgtggcctagccaatttgcttcatgtaattaaccatcatacttctccttccttattcataccactgctagatggtgttttgaattaaattttatatcaatatgcctcaagtgaaaaattcatggtctttttatgtgtatatggtttagttctgccctttaaaccaaagaatgtgatgataattatttctttcctttctcttagattttacgagtagagacatctctttaggccatattttcttaatatttcatcattaatttattcatttgttcagtctttcaacaagtatttattgatgatttaggcac

SEQ ID NO: 453281 - DNA, 363 bp, Homo sapiens
attatagcagtagcctggtcattttggacttcttacactaatagactagaaggtaaagaaggattagtatattgaaaagaataattggctttgatgatcataaagagaaagattgctgctacataataatgacaggaagaagtatgtttgaaactcaggagattcactgggtacctctttataacttcaagtccaatgattaccataagtggaaactgctggaacaacatcctgacaaagttaaggtaactggaggggcagacctcttaggcacraaggtctgtgctatcttgttgaacgacagacctgcacgagcagaagtgctatccaagagggagaagaatctagaatgtgtgttagatg

SEQ ID NO: 453282 - DNA, 576 bp, Homo sapiens
ggtgcaacttgctccatctgtcagctgggcatgcttcttctctacatctgcaccccctgaatagtaagccttctgattaggatttggtttatgttctgcactgttcctgtctaaagagaaagcccttaaggcttcttgttcctagttagagggaggtaggaaaataaggttgctttcttaagycacttcagacctgtgggggactgggtgaggtggcagcagacactctctgcctctatcccacatgcttccaggcagcttctcatctgctgtaggaaacttttaggacttggcttattcctccaggcctccaccaagaagagagcctctcctttctaccatcacacccccaaacttctctggagctttgcatttacttgcttgcttttgaagcttactcttgttttagatggtggaaagttggaagaagtgcaggccgctgagatcattttcataagtgtctgttttgcttttccttcaattctttttgagaacatgaatagcaatattgtgtgatgtgtaggaatacatacgtcacagtcatattataaaaacatgtctggaaaaggcaaaccc

SEQ ID NO: 453283 - DNA, 545 bp, Homo sapiens
acatcttctggcagtcctcctgcagctagtggaataagtccttccttcctcaaggagaccctgtgaattatggcatccaccacagcaggccctacagataagacattctgccttatattgagttgacaccttcctcactgtgactttcatgtaagctattctcttctgagtcaattccaagtcttatcattattttctaacagataattctttactatattctggcaacactagtgctgtaatactgatacacatatatgtatctatatcacatatrtaagatatatatctcacatagatatcatatactcaaacgtatattacacacacatatataaggctcaaatatatatttatacacctttgcatatacatatgcccaactacacctgacacatagctgttagtgaccataattatgtcatttattggagataataaaataagtctgctcttctaagagaatcagattaggagattctgttttggacatattgaatatgaagcacttttaagacatccaagtaaaaatgttgggcaggcat

SEQ ID NO: 453284 - DNA, 579 bp, Homo sapiens
gtaatgacccagagctgggtttcccctttagatactggattttcccttcagtggagggcttcaccccctgaggtgtgtgcaatcactagtttagtgtcgggagagagaggacccgtggctgagacacaaacaacatcaatatttatttattttattttattttattttttattatactttaagttctagggtacatgtgtacaamgcgcaagtttgttacatatgtatacatgtgccatgttggtgtgctgcacccattaactcttcatttacattaggtatatctcctaatgctatccctgccccctccctccaccccacaacaggccccggtgtgtgatgttcctcatcctgtgtccaagtgttctcattgttcagttcccacgtatgagtgagaacatgcggtgtttggttttctgtccttgcgatagtttgaaagagcatcaatatttaaagactggtgggtgagaagtctggcactgagacgtggccagagatgtaagaggctgcagcccataggtacaaggggagagagaagtggttagaagtatacaattttttttttttttaggcagagtt

SEQ ID NO: 453285 - DNA, 541 bp, Homo sapiens
aagacttcgtctctacaaaaaatacaacaacaacaacaacaaatttagctaggcatggtggcttgcacctctcaccccagatactcaggtggctgaggctggaggatcgcttgggcccaggagttcgagtctgcagtgagctatgactgggcaacagagcaagactctgtctcaaagtaaaaaaaataaaataaaataaaaatatatcttgggaaaacatggactttccagacttgggttgttaataaaacatgattcaagaacgcgggtaaaaattaagttacataaggattaaatgagagaatgtactaaagcaagtagctcagagcccasttcttgataagctttcaacttaaaatagcccttattattatgacttaatgttcaatttcctcttttcttcaccccttttacttcaagggctcacaatctacttaaaaatttcgatatagtcactcatttattctacaaacatttaccaaagtcctttgatgtgtcaggtaagttaaataatttcaggcagtagtaattgtcatagcta

SEQ ID NO: 453286 - DNA, 541 bp, Homo sapiens
aagacttcgtctctacaaaaaatacaacaacaacaacaacaaatttagctaggcatggtggcttgcacctctcaccccagatactcaggtggctgaggctggaggatcgcttgggcccaggagttcgagtctgcagtgagctatgactgggcaacagagcaagactctgtctcaaagtaaaaaaaataaaataaaataaaaatatatcttgggaaaacatggactttccagacttgggttgttaataaaacatgattcaagaacgcgggtaaaaattaagttacataaggattaaatgagagaatgtactaaagcaagtagctcagagcccacttcttgataagctttcawcttaaaatagcccttattattatgacttaatgttcaatttcctcttttcttcaccccttttacttcaagggctcacaatctacttaaaaatttcgatatagtcactcatttattctacaaacatttaccaaagtcctttgatgtgtcaggtaagttaaataatttcaggcagtagtaattgtcatagcta

SEQ ID NO: 453287 - DNA, 534 bp, Homo sapiens
gagttcaatgacctcatgccttctttgacagtgctctttggttgagtcgtgaaagaattttacgaagatttactgtactgttaattccaatccaatattttttgaaaataaagaaaaattgccaaatattcaaaaatcaaagacaaaagatggcgatgtgatttaagttttcacagtgatatcacactgcatataaataagctaaacttgaaactccaaggaaaggtaatgcttatctgtggcctctctggacagatacaagattttaaaatgaaattaaaacttttcataatttaatcaataataacaatctttatyattttcttatatgagtcaatatgcagaagattgtaattgtaatggatagcattacttaaattggctaccaaaaccgcaagaaaaagtgtaaagaactcattgtggatacttataaacagttgcttttcaatctatcaatatcattttgagtcaatattaataatgccgagttcgcacaagagttaataaattaactttgatagttttgaaactgat

SEQ ID NO: 453288 - DNA, 541 bp, Homo sapiens
gagcatccccggcccagcgctgggagagggcacttcaggggaaatcaagagaaagtccagggttatccgcatctctgtgccttctgtgtgctggccagatccaagtaatagaaatggactaccctggcatcgtggtgtggagagagtttccttaaccagacctcaatagcaaatgtccagggaaagattaccagaaactacccaaggctgccagaagaaggggagggtagaagagatgagtcagctctcagctgcagcagcttctcccaggctagaggaaagtgagggatcctgttgtgttttggaagataggcagaaatcatcgtggaagggcttgaggctgggtaaagcagatcttccccaagacctggcactactgagacatttgggaaagtttggggcccatgagagtcaagagaagatgaaggaggggagagaagaagaagctggggagctgggaacatcatctcaggctggaggacaagcctgygacaggaccggttccacagaggagtcaaaagagttaaagcccagaaggcag

SEQ ID NO: 453289 - DNA, 494 bp, Homo sapiens
agtactggtaaaagtattattgggatgaataagttaaagtttgcttaaaaggacagaacagagattggtcaactttttttataaagtgtcagatagtaaacattttaggctttgcaagccacacagtctgtgacccaaccattcaactctgtccttggttgtgaaakaaatcatagactatgggtaaatgaatgggaatggctgtgttacaaaataatttattacaaaaacaggtgtggatcagatttggcttctaggccttagttttccatatctcatgaacaaaaattttccaaaactagatgatgctcaagaaccatctaggaagctttttcaaaaaacagctttctgggctgtccctcaagggattctgatacagtggaggtagatagtagggaagtaaactttgagaaaccccatgatgaactgttttcaaatgctcatgatgtaaaacaacactataatgaaattaatttgcacagactgtagtgtag

SEQ ID NO: 453290 - DNA, 670 bp, Homo sapiens
tattcaatggtgtatatgtacctcattttcttcatataatctgtcattgatgagcattcgggttgattccatatctttgctattttgaatagtgttgcaatgaacatacaagcatgtgtgtatttataataaaatgatttatattcctttggatatatacccagcaatgggattgctgaaccaaaggatatttctgcttttaggtcttggaggaactgtcacactgtcttccacaatggatgaagtaatttacactccctccaacactgtataaacattcctttttctctgcaacctcaccagcatctgctattttttactttttaataaccaccattctgactggtgttagatggtatctcattgtggttttgatttgcatttctctaatgatcagtgatgttgaccttttttcaatagtttgttggctgcttgcatgtcctcttttgaaaagtgtctgttcatgycctttgcccactttttaatggggatgagttggaaaacatcactgtcttgctacaaatacttcagtaaacatcctgaactctttcatatggccccaaaacactttgtaagcaacccatgtctctagctgcatgcccaccaccccctacaatgctgacagaaggaaaggatggatgaggagttggttaagttttgaaatgtagga

SEQ ID NO: 453291 - DNA, 670 bp, Homo sapiens
tattcaatggtgtatatgtacctcattttcttcatataatctgtcattgatgagcattcgggttgattccatatctttgctattttgaatagtgttgcaatgaacatacaagcatgtgtgtatttataataaaatgatttatattcctttggatatatacccagcaatgggattgctgaaccaaaggatatttctgcttttaggtcttggaggaactgtcacactgtcttccacaatggatgaagtaatttacactccctccaacactgtataaacattcctttttctctgcaacctcaccagcatctgctattttttactttttaataaccaccattctgactggtgttagatggtatctcattgtggttttgatttgcatttctctaatgatcagtgatgttgaccttttttcaatagtttgttggctgcttgcatgtcctcttttgaaaagtgtctgttcatgtcctttgcccactttttaatggggatgagttggaaaacatcactgtcttgctacaaatacttcagtaaacatcctgaactctttcatatggcmccaaaacactttgtaagcaacccatgtctctagctgcatgcccaccaccccctacaatgctgacagaaggaaaggatggatgaggagttggttaagttttgaaatgtagga

SEQ ID NO: 453292 - DNA, 557 bp, Homo sapiens
gtgaaactttggtttaaaggaacarttatagggccaggtgtggtggctcacccctgtaatcccagcactttgggaggcagaggccggtagatcacctgaggtcaggagctcgagaccagactggccaatatggcaaaaccctgtctgtgctaaaaatacaaaattagctatgtgtggtggcacacacctgtaatcccagctacttgggagactgaggcaggagaatgacttgaacccaggaagcggagtttgcagtgagctgagattgcaccactgcactctagcctgggtgagagagtgagctctgtctcaaaacaaaaacaaaaacaaaacaaaaacaaaacaaaacaaaaaaacaaaaaagaaggaaccactatagaatatctcattgttgtaatttatctgagtactgaccaaatgttttatctagctcaaaaattctcaatttagcttataaaattctatgctttacaatactatagttttaatattgttcttttcatacagatgtctattttagcacactaatgttgaactctagtagaatctttgatgag

SEQ ID NO: 453293 - DNA, 557 bp, Homo sapiens
gtgaaactttggtttaaaggaacaattatagggccaggtgtggtggctcacccctgtaatcccagcactttgggaggcagaggccggtagatcacctgaggtcaggagctcgagaccagactggccaatatggcaaaaccctgtctgtgctaaaaatacaaaattagctatgtgtggtggcacacacctgtaatcccagctacttgggagactgaggcaggagaatgacttgaacccaggaagcggagtttgcagtgagctgagrttgcaccactgcactctagcctgggtgagagagtgagctctgtctcaaaacaaaaacaaaaacaaaacaaaaacaaaacaaaacaaaaaaacaaaaaagaaggaaccactatagaatatctcattgttgtaatttatctgagtactgaccaaatgttttatctagctcaaaaattctcaatttagcttataaaattctatgctttacaatactatagttttaatattgttcttttcatacagatgtctattttagcacactaatgttgaactctagtagaatctttgatgag

SEQ ID NO: 453294 - DNA, 557 bp, Homo sapiens
gtgaaactttggtttaaaggaacaattatagggccaggtgtggtggctcacccctgtaatcccagcactttgggaggcagaggccggtagatcacctgaggtcaggagctcgagaccagactggccaatatggcaaaaccctgtctgtgctaaaaatacaaaattagctatgtgtggtggcacacacctgtaatcccagctacttgggagactgaggcaggagaatgacttgaacccaggaagcggagtttgcagtgagctgagattgcaccactgcactctagcctgggtgasagagtgagctctgtctcaaaacaaaaacaaaaacaaaacaaaaacaaaacaaaacaaaaaaacaaaaaagaaggaaccactatagaatatctcattgttgtaatttatctgagtactgaccaaatgttttatctagctcaaaaattctcaatttagcttataaaattctatgctttacaatactatagttttaatattgttcttttcatacagatgtctattttagcacactaatgttgaactctagtagaatctttgatgag

SEQ ID NO: 453295 - DNA, 515 bp, Homo sapiens
ctaaattttgaaaaattaaactatccagcatttgaaaaatttatgtaccttttcaggtaagcagtatattaataaggcatatttagttttcaattaagtttttaaataattttgtgaaggtaaggtattagttcttatccttatagattgaagaaatcaaagcataatgatattgtctttaatcacagctaaatttttaatgggtkagaacactgatcttttgaattttttaatcaagttaattgtgtttttaaagaagttgaatctactaggtatctacttgttactttctttataaaagaagtaaaccagtttttatcttgatatatgtaaacatttactctttcattgtattaagtgacatagtgtaaaatttaactattagcataaaagtctgagaacatttttacttaaaatatatgtaacagtttagggatgtcattaaaataaaattattgtatatttttatatgcccaaactacattggtccctatgggtactaacacaaatttagt

SEQ ID NO: 453296 - DNA, 515 bp, Homo sapiens
ctaaattttgaaaaattaaactatccagcatttgaaaaatttatgtaccttttcaggtaagcagtatattaataaggcatatttagttttcaattaagtttttaaataattttgtgaaggtaaggtattagttcttatccttatagattgaagaaatcaaagcataatgatattgtctttaatcacagctaaatttttaatgggttagaacactgatcttttgaattttttaatcaagttaattgtgtttttaaagaagttgaatctactaggtatctacttgttactttctttataaaagaagtaaaccagtttttatcttgatatatgtaaacatttactctttcattgtattaagtgacatagtgtaaaatttaactattagcataaaagtctgagaacatttttacttaaaatatatgtaacagtttagsgatgtcattaaaataaaattattgtatatttttatatgcccaaactacattggtccctatgggtactaacacaaatttagt

SEQ ID NO: 453297 - DNA, 607 bp, Homo sapiens
tttcccttgactcacaatttactcttcttaattttaaaatatgtaatttttgggaaaaataatttctatgagtagttgtaagtgccaccaattttggtatgaaacagatcattctctctacatttgaaaacaaaccaacaaagtcttgttcattatactaaagatatgatatrttgtaagtaatttcattttctagtaaatacatgattaataaagtaaaccttttaatttaaaatggagtcacttaaacagcacactttgctgttttattaatattttatgaaaatgtatgcattgatgattagaaattttctacagtagttttataaacatgttgtgcatcttcatagtgaaggttgtataaaagattggattaaaagaacactttgttgtttgctaaataagtcttttctctcttatttgtcactatctcctaaatttgaacttaaacaaataattacattgagatataaaatgtgaattccaattcatcaatattactttagaatcaataattagaaggaattttattttaataaatgaacaaatccacattacaaatcattactgaaagtataaccactcactggttatgaggtttcttatt

SEQ ID NO: 453298 - DNA, 381 bp, Homo sapiens
tgaattataatcgtatatcctaataaatgtgataaaaaatctggaatgggaggaggagcaagatggaatagaaatttccaccgataatttccccaacaaggacaccaagttaacaaatatctacacacgamaaaacaccttcataaaaataaaaaatcaggtgggtactgataatacttggttttaacttcagatcactgaaaatgacactgaagagatagaaaaaacagtcctgaatccttgaggctacaccccaccccacccccaacctggcagtgtcagcatagtacaggcagcatctgctggggaagaagagcacagctattgtgaggcagtgaactcagggctgtcctgttagagcagaaagggaaacggaactaa

SEQ ID NO: 453299 - DNA, 546 bp, Homo sapiens
agctttagtgctttagatgagatggacatcatctacccgaacaagtaaccagactcaggccagatactgcctataggctggggaagacattttgaggggggcacttttcaacacttggtctgagactggtttttaccactagtaacacattttctagcttatactgttgaagtttaaagagatagatatgagtgatttgggatcatcagaagtctagtatttataaaatttagcattaaaaatatcataagtactaatttagtcacctgttctatagacaaagaaaaaacagaaatcaggagaaccttccttccagaaatgtggttttctgataattacccaatgagaaaactctaggaaattgcatttcttaatttattggcacaaacctttgctgtagtaaacttcayttttgttatggttataaataaattatatttttatgaggcttactaccttaatagttacagatataatttactgagaatttacttttattctagccaatgttatacattttataacatttttctaaaatgtatacta

SEQ ID NO: 453300 - DNA, 589 bp, Homo sapiens
ctttccacctctgtctaggaagatgaaccctgcgctgcctaaggcaacagtagtggcaacatcccctcccgactcatcagcctttccacctctgtctgggaagatgaaccctgtgctgcctaaggcaacagtggtggcctcccctgaggcagttgccaggcaggataatgttgattctccttttctccttgagccacccccaacatccctgtctgcttctagacctagaagaagactaaagtcccagtgggcccctagaggtgaggttgagaatgtgacccatgaggaggtatgctacactaaaaaaaaaaaaaaaaaaaactgcttgagttttctaatatttataaatagaaatctggacaacaggygtgggaatcaatatattcagggtgtgcgataagggtggatggcacatagagttggatcaggctgaatttattgatttgggtccactaagcagagactctgcatttaatgttgcagttcggggaattaaaaaaaaaaaggtcctaatagtttatttgcttggttagctgaaatatggattaaaagatggcccaccgtaagtgagctggaaatgcctgatctc

SEQ ID NO: 453301 - DNA, 537 bp, Homo sapiens
gagattagtgccactatcaaggacttgaaagattcagggatggtgattcccaccacgtgctcgttcaactcttccatttggcctgtgcagaagacagatggatcttggagaatgacagtggattatcataagcttaaccaagtggtgactccaattgcagctgctatacaagatgtggtttcattgcttgagcaaattaacacatctcctggtacctggtatgcatccactgacatggcaaatgcctttttccccattcctgtccataaggcccatcagaagcaatttgccttcagctggtaaggccagcaataaccttcaatttcctacctcatgagtatatcaactctctggctttgtgtcataatcttattcggggagaccttgattgtttttggcttcccaaatatatcacactgatccattaaattgatgacattatgctgcttggatccagttcaagaagtaccaaacacactgcacttattggtgagacatttrcatgccagaggatgggaaataaatccaactaaaatt

SEQ ID NO: 453302 - DNA, 603 bp, Homo sapiens
acatacactgataaaactgagtggtgaaatgtgaaaagtttttattagttgttaaacaataaaagcctgaaaaaaaaatggaaggggaaacagtaactggagtggaaatatttaggtctgatttaccttacgtttatttaaagtagagaatcattctctaagatgattcgggtcttgcctttctgcaactattttgctgataataaacacatcaactgtaaacatacagggagtgtttccagggcttataggaatttaatcaacttgtgcaatcatcctcttttacagcctcctgccctgcagcctgttcttctgtgtccaggattggttccctccggtgggttcttggtcttgctgacttcaagaatgaagctgcagaccttcgcrgtgagtgttacagctcttaaaagtggcaaggacacaaagagtaagcagcagcaagatttattgtgaagagtgaaagagcaaagcttccgtgtaatgggacccgagcaggttgctcctgctggctggtgggggaggggggggttggccagcttttattctcttatttgtccccacccatgtccaactgattggtccattttacagagcgctgattga

SEQ ID NO: 453303 - DNA, 371 bp, Homo sapiens
cccctgagagcactttctcaggaaattattttctcaagaatttctgtctcagactctgctttcaaggactccaaccataacaaccttcctgattctccaaaccagttcttagacagcaaactccatcttgatatatctgttccgctacctctattgtaatgcaaaatgaatcrtattgcatggcttaggtgtctttcttccctacaaggctaatcttcttgagaaagggatgttgttttattgtctgtggattatgaaagtctttcacatagtgcctgacacatatcagatgctaaataaatgctgttgaacgaataattcaaaatatgctgctctgtattagcaccaagagtgagttttttaaaaatatt

SEQ ID NO: 453304 - DNA, 548 bp, Homo sapiens
cttgaactcaaactaacctggctccaaaggctgtcttcttccattataacacatttctgggactttattgtttaggaagcagagagctgttgaacacttctgaggaagggcatatcatgactggagtcattcttttatacaatctttaggaaataggataaccacgcatatgtcaagatacagagctatgtatgcatagcactatcagtgctatgcgggatggcaagcaaggggcttcaataaatttcaacatggagtaagaaaagttttacccagaaagatggcagcagagaatatattatagaaataataagaacatttgggaggccgaggcgggtagatcacgaggtcaggagatcaagaccatcctggctaacagggtgaaaccccgtctctactaaaaatacaaaaaattasccgggcgtggtggcgggcggctgtagtcccagctactcgggaggctgaggcaggagaatggcgtgaacctgggaggcggagctttcagtgagccgagatcgccccactgcactccagggtgggtgacagag

SEQ ID NO: 453305 - DNA, 606 bp, Homo sapiens
gattatatcttacttcgttaaggactctgaaaccatcacattaaaaatgccattcaggccaggctcacacatgtaatcccagcacttcgggagactgaagcaggcagattacttgaggtcacaagttcaagaccactctggccaatgtgacaaaactccatctctactaaaaatgcaaaaattattcgggcatggtggcacaggcctgtaattccagctactcaggaggctggggcatgagaatagaatcatttgaacccgggagayggaggttgcagtgagtcgagatcatgccactgcactccagcctaggtgacaaagtaagactttgtcacaaagcataacaaaacaaaacaaaacaaagtgccattcaaatgatttcctgcaccaaccttactatctttagaggttacaaatagctaaatagacgttttagacatttctaaagatcatattttggattgaaaccaatcaaaatccaagcacaataaaaaatgactacaatgtttaaacaacttggaaaagcaataacatcttaaatcgcaataaaaacacaaagcaatctttaaataatacatttagtaatagccctgtacaggcatgtgt

SEQ ID NO: 453306 - DNA, 535 bp, Homo sapiens
tacaaatttaacaaatgaagggaggattactgcaataattacaaaattaacaacaggcgtgatatagagaacatgtactcagttccaggagccatgctaaacattttacatatatcatatttttcaattcttacatccgtttaggatggctaatattattttcatttatagatgraaaaactgagtctcatataaggtaagtaacttccctggggtcaattaatattaagttagacctctttctttcactctccaatttctgggttcaggttattctagccattgatatactgaatttatcattgttaatacaagtcaagtttatcacttctagctggccaccatgaaatccatcagtatagctcattacaaatgtagggtggtcatctagtggtgaaagaggaattctataggctgtccactaaagaaaaagtcaataaaaatgaggaaaaaagactctggttcagcttttgttttccattattattgctagaaaagcactgtggcaaaaaaaaaaaaaaaaaaaaaaaaggaa

SEQ ID NO: 453307 - DNA, 597 bp, Homo sapiens
aaaatttatcatacatgcacatataagaagggagttttcagattaaaataagcaaaactttaagaatggtaaattgctaacagaagacatatgtaaatatagatacatgtacacatacattctaaggttttctattggacagaagatgaaacagaaaaacaattgtcttgaatttattctgttaatatttggtagtcttccaaatagttggtttgatggatcataaaaactaaatgtcacattttgagaaatgtgataatggggataaacacgaaaggatgaaaacaatactgactktgcagttaatattggaaaatatctttgttttgtcccatttcaagatgcgtattttctcttcagttataaggaaatttatatttagctttgcaagctaaagcttcattctggagatgagtatttagtgactgcatccattgaaagtcaaatttatgcaattaaaattacttcattctttggctgtcctggacaaaaaataaaccaaataaaacagcctaaccgaaaagtcacagctgtatggtcaatgtggctgataggaacaatttatagtccaaatctaattagcatttcttgatatga

SEQ ID NO: 453308 - DNA, 520 bp, Homo sapiens
gcattgatttgcctctttgctctaattacatcacagtgggggttatayagtggatcactctgagttgggtactttttcaataagaaggtatggtatggtgttggtttccaggtttctaggtaacatagtagttaagtactgtggtacttaagacacaaagtacacaaaacctattcctacaatagctgaggctaataaggaaaaaaaatgattcagaccagaaagctggtcctggagatagatctttttggctcttgtattggcagtttattactatatattaacatataaactcatcacatacactaccccactactcccactgccctgatagtgatgtaaaaaaaataacactagcttcgacatttctttgactcataaataatgtttgggatttgggactatgccttttacaagatggtgctcaataaaaactcactagttaagagagttataatttctggtcattttcacttgcagcttcctcctggttccctgggctcaaaaattatggattcat

SEQ ID NO: 453309 - DNA, 520 bp, Homo sapiens
gcattgatttgcctctttgctctaattacatcacagtgggggttatacagtggatcactctgagttgggtactttttcaataagaaggtatggtatggtgttggtttccaggtttctaggtaacatagtagttaagtactgtggtacttaagacacaaagtacacaaaacctattcctacaatagctgaggctaataaggaaaaaaaatgattcagaccagaaagctggtcctggagatagatctttttggctcttgtattggcagtttattacyatatattaacatataaactcatcacatacactaccccactactcccactgccctgatagtgatgtaaaaaaaataacactagcttcgacatttctttgactcataaataatgtttgggatttgggactatgccttttacaagatggtgctcaataaaaactcactagttaagagagttataatttctggtcattttcacttgcagcttcctcctggttccctgggctcaaaaattatggattcat

SEQ ID NO: 453310 - DNA, 634 bp, Homo sapiens
ttggttccttagctatgggaaacataccataccaatgtgagatgttaataatagaagaactggttgtgggtatatggcaactctctgtactttcttcaaaaccttttggtaaatgtcaaacagactttattttaagaaatacagtggtacccaaacaatctctggatggaatgaatcatgtcacygagtttgccctgatctgttgccctgtctgcatccttcagctttcacatggtaatgggatgggaaggattctgtctgtgacaataattgaggcatgggcaaatgtaagaatgaaagctgtaacattttaagtttcttattgaatcatttgttggctccaatcaatatacagttagaaattagaaaagaaaatctagaatcagcatattttcttaaatgattattttgccttttaatttgtatttgtttgtttaaaagcctatagtcgcatacaacttgggagcttatggaaaaattgttaatactgttagtgtattttttttcaactcaggcatataaaagatactattgcacagttattaaaaacaaaagaaaaacaaacaataacaacaaaaaaagcagattgaattcagataaatgtattagacctaattagaaatagcattaaaaa

SEQ ID NO: 453311 - DNA, 634 bp, Homo sapiens
ttggttccttagctatgggaaacataccataccaatgtgagatgttaataatagaagaactggttgtgggtatatggcaactctctgtactttcttcaaaaccttttggtaaatgtcaaacagactttattttaagaaatacagtggtacccaaacaatctctggatggaatgaatcatgtcaccgagtttgccctgatctgttgccctgtctgcatccttcagctttcacatggtaatgggatgggaaggattctgtctgtgacaataattgaggcatgggcaaatgtaagaatgaaagctgtaacattttaagtttcttattgaatcatttgttggctccaatcaatatacagttagaaattagaaaagaaaatctagaatcagcatattttcttaaatgattattttgccttttaatttgtatttgtttgtttaaaagcctatagtcgcatacaacttgggagcttatggaaaaattgttaatactgttagtgtattttttttcaactcaggcatataaaagatactattgcacagttattaaaaacaaaagaaaaacaaacaatarcaacaaaaaaagcagattgaattcagataaatgtattagacctaattagaaatagcattaaaaa

SEQ ID NO: 453312 - DNA, 594 bp, Homo sapiens
aaacgtaaagtgaagactaaaaaaacaagaaagatgtactattttcttggatacaaagattaaacatcataaaggtattgaaagtctcaaaattaatcagtaaatgcaatgccatttaaatgatgccatgtgatttttttctaattcaggcaagatgattctaaaatttatatagaaaaatcaagaaacaagaattgccagaacaattctggaacaggtaaataacaagaaaccactatcctcagcagatatgaygcacaaatcatagaaagagtgatgacacacatgaatagacagattgctgtgaaagcacataaagtccataagtagccccagtacacacaagcctaaagtctgtgattctgggaacatttcaaatgaagagcaaaataatggattaataaagaaatagaaaaagacttctgaaaaaaatgagggaagatcattatctcacatctgactccagtatcaaaaatttaaatgtaaaaaataactcgtaaatataccagctgatatcatgaattcttttctataatcttggagtaaataaagtctacacacaaaccattactcagaaaacactgggaaatttga

SEQ ID NO: 453313 - DNA, 574 bp, Homo sapiens
gtaacttttttcatggaaagtggtatttaccttaaagaacaactgtcagataaactatggttttacagatttcaatatttggcagatttttttgtgaaaatggacaaatgcgcctgtcatttcaagcggtagaactcaaatttgatgccagtggtcacacttgaacttctaagcaaaagttagaattttggaaaagtcatgcgaaccacactgggctggacagcttacaaatatatgaagatattttatgtgattcttagcactattaagaatcgttttatattttataaagtagtggggcagcgtgttaacatttggaaaatctgcacagctcagtgaaccaatattttccaaatgagtaatacataatttcaaaatatcatgccttggcaaaamaattatgccagatagaccaataaatttcaatgtaaaaaaaaacaatgaaaagttcactgatagggttgtaaatattggcacgttccaaatactctttaagaaacgcacttgtagacttttgtatagtgtcaaaaaagatccatacctcaaactgtatacaaaaattaagttaaaatga

SEQ ID NO: 453314 - DNA, 574 bp, Homo sapiens
gtaacttttttcatggaaagtggtatttaccttaaagaacaactgtcagataaactatggttttacagatttcaatatttggcagatttttttgtgaaaatggacaaatgcgcctgtcatttcaagcggtagaactcaaatttgatgccagtggtcacacttgaacttctaagcaaaagttagaattttggaaaagtcatgcgaaccacactgggctggacagcttacaaatatatgaagatattttatgtgattcttagcactattaagaatcgttttatattttataaagtagtggggcagcgtgttaacatttggaaaatctgcacagctcagtgaaccaatattttccaaatgagtaatacataatttcaaaatatcatgccttggcaaaacaattatgccagatagaccaataaatttcaatgtaaaaaaaaacaatgaaaagttcactgatagggttgtaaatattkgcacgttccaaatactctttaagaaacgcacttgtagacttttgtatagtgtcaaaaaagatccatacctcaaactgtatacaaaaattaagttaaaatga

SEQ ID NO: 453315 - DNA, 562 bp, Homo sapiens
ttagaaagcagagtgccaagtctcttcccaaagcaaattaaactggctgagttacaaacctctcaaaaattggatttataatgagtatgcaggcagatctttaactatagagactcctgagaagactgagctactctaacattctttgtgagcctaattgaaactgattgtggttggcaccttataataaactttagtttaaatgattttatcttggttctaaaaacagtttggccccatgtgtttctaaaatgtgcaataaaattcctttataattcaataaagataagagatctacaatgttggatttctactrtgttcaacgtccttttaaaatgcaaacatgaactcattccaagtgtagaccacaaaagtcatgcctctccatcttcaccctatgtgagtgtgtgtgtatacttgggaatttctttgcttttgctttcttacgggcgaaatccttaagagaacattctttctttaattctgtatttaagcaaaaactaagggagaatatgacttgccatcctcaaaactgattttattttataaatactttcaagaa

SEQ ID NO: 453316 - DNA, 589 bp, Homo sapiens
aggcaccaggggccaatactggagagacagagatatgtgacctttcaggcataatttgaaatggctgttttgaggaaactcagtgaaatgcaagataacacaaagaaggaattaagaattctatctaacaaatttaacaaagacattgaaataattaaaaacaatcaagaaattctgcagctgaaaaatgcatactgaagaatgcatcagagtctcttaagagcagaattgatcaagcacaagaaataaatagtgaacttgaagacaggctatttgaaaatacacagagcagacaaaagaattaagcccaccyaccagatctagaaaatatcctcaaaagtgcaaatctaagagttattggccttaaagagaggtagagagagagataggggtagaaagtttcctcaaatgataataacagagaacttcccaaacttagagaaagaccaatattcaaatgcacaaaggttgttgaacagcaagcatatttaacccaaataagactaccttaagacatttaataatcaaactaccaaaggtcaaggataaagaaagaaccttaaaagcagcaagagaaaagaaattaata

SEQ ID NO: 453317 - DNA, 562 bp, Homo sapiens
ttagaaagcagagtgccaagtctcttcccaaagcaaattaaactggctgagttacaaacctctcaaaaattggatttataatgagtatgcaggcagatctttaactatagagactcctgagaagactgagctactctaacattctttgtgagcctaattgaaactgattgtggttggcaccttataataaactttagtttaaatgattttatcttggttctaaaaacagtttggccccatgtgtttctaaaatgtgcaataaaattcctttataattcaataaagataagagatctacaatgttggatttctactgtgttcaacgtccttttaaaatgcaaacatgaactcattccaagtgtagaccacaaaagtcatgcctctccatcttcaccctatgtgagtgtgtgtgtrtacttgggaatttctttgcttttgctttcttacgggcgaaatccttaagagaacattctttctttaattctgtatttaagcaaaaactaagggagaatatgacttgccatcctcaaaactgattttattttataaatactttcaagaa

SEQ ID NO: 453318 - DNA, 600 bp, Homo sapiens
gatgaatgtttatgcaaaactcctcagcaaaatactaggaaaccaaattcaataacacattaagcaaatcattcatcatgatcgagtgggatttatcccagggatgcaaaaatggtttgacatatgcaaatcaatcatgtggtacaccatatcaatagaatgaaggacaaaaaccacatgattatttcaattgatgctgaaaaagcacttgataaaattcaacatccctctattataaaaaccctaaaaaactaggtatagaaggataatacctcaacacactaaaagacatatacaaaaggctcacagctagtatcatactgaatggggaaaaaccaaaaycccttcttctaagaactagaaaataacaagaatatccattcttgccactattattcaacataataatggaagtcctaactagagaaatcagacgaaagaaataaaggtgtccaaattggaaaggaagaagtcaagttatctttgtttgcatatggtatgatcttataattggtaaaacctaaagactccaccaaaaaaaaaaaaaacattaaaattgataaacacattcagtaatgtggcaggatacaaaatcaacat

SEQ ID NO: 453319 - DNA, 605 bp, Homo sapiens
cagaatatataagaaactaaaaaaattaaataggaaaatatctaataatttgattaagaaatgggcaaaagatctgaatagacatttctcaaaagaagacwtataaggccaggcatggtggcttacatttctaatcccaacactttgggaggctgaggcacatggatcacctgaggtcaggagttcgagatcagcctggccaacattgtggaaccccatctctactgaaaatacaaaaaattagccaggtatggttgtgggtgcctataaacccagattctctggaggttgaggcaggagaatcgcttgaaccggagaggtggaggttgcagtgagccgagatcgtgtcattgcactccagcctgggcaacaagagcgaaactccatctcagaaaaaaaaaaaaaaaaaagacatacaaatggtaaacaggcatatgaaaaggtgttgaacatcactgatcatcagagaaatgcaaataaaaactacaatgggatatcatctcctacttaaaatggattttatccaaaacacaggaaataacaaatgctggtgattatgtggagaaaggtgaaccctcatactctattgttgggaatataaattc

SEQ ID NO: 453320 - DNA, 557 bp, Homo sapiens
agttattattacacacttattaaattttttgttcttttaaatgtattactaaagtataatttacatacagcaaaatttaccctttttagtgaacaactatgtgagttttgacaagcagaggtttaagtttggacaaarttcaatttatcactttttaaaagtgggttgtgctttcattgtctaattatttaaaagatctttgcctaaagaagaggcatgaagcttttctcctatgtattcttccatcggttctatagctttaggttttacatttaagtctatgatttattttagcttaatgtttctattcacttctatctattgtcttcaagtcaatagatagaagatttccatcgcctgccccaaaattcccctgtatctctttgtcaaattccttcttccatcatagcccctggaaactatggatctgtgtttttgccttgtagttttgcctttccagaatgtcatataaatagtaccacatatatagctaaaatgtttaaaataaagaagaaaagacaacagtgacaggtactggtaagtatgcaaagcaaatg

SEQ ID NO: 453321 - DNA, 620 bp, Homo sapiens
atgtagtgtccctttgtggagaagttattgaagttagagactgtgcccaacargagctggccccaggcccagggccaggtttccatatctaagcttactgcatggtgagaccagtctgaacaatgctctctgcaggtagaccacaagagacgggtgatggaagaagctgagctacaggtattctggtcctctcccaaaccctccaatcaggcaattcactccacttccgtcagaggagtagtggtgggttttcaataaatctctccttgtagaaaacagaaatgggaaagaaaatgtgtctgctcatattgccaatcaacatttctttcatgaaaaatttaagcatattggaagctaacaaagtgtaactacaggattttttttaaatttattttccagcaagtgcccaatcctcctaaatcaccatctctagaaaactcatttttctgcaagaaatcatcaaatgagcatgttccactgcttatacatgttctaaatagatgatataggttccgctgcaatattcacttgactctgtgtcatttaagtctccgtgactttttataggtacagattttatagcagccagggatcatgtctgtttaattattgatgcatag

SEQ ID NO: 453322 - DNA, 620 bp, Homo sapiens
atgtagtgtccctttgtggagaagttattgaagttagagactgtgcccaacaagagctggccccaggcccagggccaggtttccatatctaagcttactgcatggtgagaccagtctgaacaatgctctctgcaggtagaccacaagagacgggtgatggaagaagctgagctacaggtattctggtcctctcccaaaccctccaatcaggcaattcactccacttccgtcagaggagtagtggtgggttttcaataaatctctccttgtagaaaacagaaatgggaaagaaaatgtgtctgctcatattgccaatcaacatttctttcatgaaaaatttaagcatattggaagctaacaaagtgtaactacaggattttytttaaatttattttccagcaagtgcccaatcctcctaaatcaccatctctagaaaactcatttttctgcaagaaatcatcaaatgagcatgttccactgcttatacatgttctaaatagatgatataggttccgctgcaatattcacttgactctgtgtcatttaagtctccgtgactttttataggtacagattttatagcagccagggatcatgtctgtttaattattgatgcatag

SEQ ID NO: 453323 - DNA, 539 bp, Homo sapiens
ttttggaatctccaagaaaataaaaattgtgcaattaactgtattataactaaataatcttataaaacattataaataatatttttatataaattgactaaaatttggtaacaaaatacctttgtaatgatataaccaatcgctatgataagaagaaaaacacaactaagtagttattaaaactgcagataattccacagaattttgctatgaaatctttattacctcaacagcttagcacaggctatagcaattttagatcagaaagtcagcagaactatgtcaggagcaccakactagagtcactggcataagtgtacttgctacatgcctgagtgacatctgtggcttgtttctttgtttttaaaggagatagttggactggatgcaagtttttgaaagctttagaccctggtcaactttgagaaaattataaaagctatggaactgctcctcagagaactctacatgtcctaaaatatttccatttcaggaacattctggatatccttgaagccactgtttagaatcctcaggac

SEQ ID NO: 453324 - DNA, 558 bp, Homo sapiens
cataatcttaaatcaacttatgtatctttttctccattttccaagtttaaaataaataatgcagaaagaatatatgtctaggaatatatatatatgtatgtaatatatatataatatttattattgtagcttattccttgcctttgtgtgcacccatgaaatgctaactactttacttgatgacaccgatatagttgtttatgtgcagtgtactaaatgatggtaatataattggtaaaattggctttcacttacccacaatgcaactacaaaatgaaatgacacaaacattagtctcaggaattctgccatgaaatctgattatttgattctgtgttagtgacagatactgtatactctaatgacacattagaagtaagtagcaacattcagagactgctgtctctgcttcaacttttttaatgttttattttgaacaagctctcctagaaaaaaaaawaacagtgaagaaaaacaccagttttgtttccgtatttctttttaatcctaatttatggttaaagttccgatgttgttatcgacaaaaaataatatatg

SEQ ID NO: 453325 - DNA, 621 bp, Homo sapiens
agtaaaccataaatatatataactatgttaaactctataactcttatatgattcaggatcacagattggaaagattgtgtaattatgacaatttaatttctggttttaaacttgaattttcttgatttataaaatagaatgtaaaaccaccaaggcaagatatatgtgagataactgaacacatgcatgcccacattcatatatatgtgtgtataaaagccctccaggacatggtttttcataggcaagagaatatatccataaatacatacttgtaaacatgcatgtatgaataaatgtatgtttataaatacacatgcatgcataaatatatacatgcatgtgtgtatgtcctgttgggggtgcaggacttarcataaatgcctgctattgaagttccctacataaggtagcttctgttgttttcagcaaagtccctgctagcatataaaacacattgtgcataataaaaaaaagagccccttctgagtgaatacaaaatacatcaaaagatatctgtttctcctagctgatacaggccagtaccaggggtcagaactggatttcagctcttactcatgccttgagctggccattaaaaaatagatctgcaaaacagtg

SEQ ID NO: 453326 - DNA, 635 bp, Homo sapiens
cagaaactctcatttcaatgacctactatgatactatgagtatcatcctcaagctctctctgtgctccaactaaattgtatacaaacatgagggtaattattagatttacatgtgcctstcaactaaattcaaagcctatggcagggatagaagatggcttgccttggaatcccaaagtctggccgatgctggacacagagcaggcactgaaatctgaatgaggcaggcaagcatctctctggcatccaaagtgagtgaagttggagcaatcttcagctcatatcctttataatccagtagctggtggccaactctgaccgtttctttcgccacatagactggtctatggagattcatggtgttttagatgtagaagagacatcgaagtccatctaatctggcatattctcttatataaaggaataaaaaaactctcccaaaaggttaaatgaatttcccaatattacacagctagtgtagccaagccaatgaagtcactgagttaaatatttaagcaggaaaaaatcttttcaatgtctgcttgttgaacagggggaacaaagctctcagaatcaatgtctaagggttaaaatattagcttgttgggaaaaataattaatcactcagttcccag

SEQ ID NO: 453327 - DNA, 630 bp, Homo sapiens
tgcctctcaactaaattcaaagcctatggcagggatagaagatggcttgccttggaatcccaaagtctggccgatgctggacacagagcaggcactgaaatctgaatgaggcaggcaagcatctctctggyatccaaagtgagtgaagttggagcaatcttcagctcatatcctttataatccagtagctggtggccaactctgaccgtttctttcgccacatagactggtctatggagattcatggtgttttagatgtagaagagacatcgaagtccatctaatctggcatattctcttatataaaggaataaaaaaactctcccaaaaggttaaatgaatttcccaatattacacagctagtgtagccaagccaatgaagtcactgagttaaatatttaagcaggaaaaaatcttttcaatgtctgcttgttgaacagggggaacaaagctctcagaatcaatgtctaagggttaaaatattagcttgttgggaaaaataattaatcactcagttcccagtctacagagcagagcctgagtatctcagtcgttaaatttaaggataattggtctccaaactagtacacaactagtaattcaaaataatttaaaagaaatgctgctttg

SEQ ID NO: 453328 - DNA, 635 bp, Homo sapiens
cagaaactctcatttcaatgacctactatgatactatgagtatcatcctcaagctctctctgtgctccaactaaattgtatacaaacatgagggtaattattagatttacatgtgcctctcaactaaattcaaagcctatggcagggatagaagatggcttgccttggaatcccaaagtctggccgatgctggacacagagcaggcactgaaatctgaatgaggcaggcaagcatctctctggcatccaaagtgagtgaagttggagcaatcttcagctcatatcctttataatccagtagctggtggccaactctgaccgtttctttcgccacatagactgrtctatggagattcatggtgttttagatgtagaagagacatcgaagtccatctaatctggcatattctcttatataaaggaataaaaaaactctcccaaaaggttaaatgaatttcccaatattacacagctagtgtagccaagccaatgaagtcactgagttaaatatttaagcaggaaaaaatcttttcaatgtctgcttgttgaacagggggaacaaagctctcagaatcaatgtctaagggttaaaatattagcttgttgggaaaaataattaatcactcagttcccag

SEQ ID NO: 453329 - DNA, 635 bp, Homo sapiens
cagaaactctcatttcaatgacctactatgatactatgagtatcatcctcaagctctctctgtgctccaactaaattgtatacaaacatgagggtaattattagatttacatgtgcctctcaactaaattcaaagcctatggcagggatagaagatggcttgccttggaatcccaaagtctggccgatgctggacacagagcaggcactgaaatctgaatgaggcaggcaagcatctctctggcatccaaagtgagtgaagttggagcaatcttcagctcatatcctttataatccagtagctggtggccaactctgaccgtttctttcgccacatagactggtctatggagattcatggtgttttagatgtagaagagacatygaagtccatctaatctggcatattctcttatataaaggaataaaaaaactctcccaaaaggttaaatgaatttcccaatattacacagctagtgtagccaagccaatgaagtcactgagttaaatatttaagcaggaaaaaatcttttcaatgtctgcttgttgaacagggggaacaaagctctcagaatcaatgtctaagggttaaaatattagcttgttgggaaaaataattaatcactcagttcccag

SEQ ID NO: 453330 - DNA, 538 bp, Homo sapiens
aaaccagaagcgttccccagaggcagtcagtcttagtatatagctacaaacagatatattagctcaactttaattcatgcaaaactaagattattgtctttgctaaactttcttcaaaattcagttggtcagttccaaataactctgtcaagcaagtgaattcattctctttcctggaggtacgtttcacagctaactattcttggcagacacactgagaatcaatgctgctttaaatcagacatttcgtagaagacttgctacagtttttctgctgccagtgtgggggactgttctcccggtgtgaaatgtttttaagccaaaaccttttctattgcattctgtggtataatgtgaagtttcagtaaaatgtttatcraagagcctaaacatatctaaccttcttcctgcagaaggacccaaggttgcttctaagtagcctggctgcgtgcagcagcatagaagatgaaaagagcatttcttccaccggaaatgagaactactgtttagtcttcttgacttctctgagtccataatt

SEQ ID NO: 453331 - DNA, 555 bp, Homo sapiens
tgttattatgatattatagattgtttctaaaaaataacggtgagaataattctattatggagaaatgcttctacttcttgactcatcaaacagtgtatagtgaaaatataatgttaacattgggaaatttcgtattccaagtacaaaaaagtagagatttttctaaagatgacttgcctttccctaaaaaaaaactctttgagttacatgttgctttatagccctgcgctaaaaaggcacaattttcctctttcaaggtaatcctacttttccaattgtgtttgtggaaaatgctcccttttgattcaagtaactttgctgattaaggaaaacaaaacaaaaaaagtccttaaactactgtaactgagttttttttaacaaattagtactgtccctatagacaatacagaacctgaaaggaaaagaaagaggaattaagcataycagtgactgttccccacgttttcacagaattctgtttaatctgagtttttattatttactttgcttctcctttgagataatcctgccttatttgaggtcagacagaaagca

SEQ ID NO: 453332 - DNA, 353 bp, Homo sapiens
gaaaacaaacaatcaaaccatagcacttatctctaattcaacccataattttagacagaaataatcagagattcaggccaggcacagcggcttttacctgtaatcccagcactttgggaggctgaggcaggcaaatcacttgagctcaggagttcaagactagcctgggcaacakggcgaatccctctctctacaaaaaatacaaaaattagccaggcatagtggtgtgcctattgtcccagctacttgggaggctgaggtgggaggatcacttgaacccaagaggttgaggccacagtgagctgttatcacaccagtgcattccagcctggacagcaaaatgaaaccctgtc

SEQ ID NO: 453333 - DNA, 509 bp, Homo sapiens
cagtctgggcgacagagcaagactccgtctcaagaaccagactttgagtctaggtctagtatgratcaagagcttgaacttttaatccctgtttatacttcctcccaagtcagcagttcaaaaatatacaacatagacccattcctctgctcatccattcactggttcattcgctgagagctggctgtgtgccaggcactgtccctggtgtagtgggtgtagaggtgaaacagatagaccagaagggtgctgcctgcatggagcctaggcaccagggagggagggagggagacaagagaacaaaaataaacccatcatgtaatgccagcgggggtaagtgcataaggaagggtcagaggatagagagcatcagggcccggatgggaggctattttaggcagagaagtcagggaatacttctttgagaagtggaaatgaatccggtgaggggtttttcgtggcaagaatggcagggggaaatgtagaagacagagtgactgtaagtgcaa

SEQ ID NO: 453334 - DNA, 509 bp, Homo sapiens
cagtctgggcgacagagcaagactccgtctcaagaaccagactttgagtctaggtctagtatgaatcaagagcttgaacttttaatccctgtttatacttcctcccaagtcagcagttcaaaaayatacaacatagacccattcctctgctcatccattcactggttcattcgctgagagctggctgtgtgccaggcactgtccctggtgtagtgggtgtagaggtgaaacagatagaccagaagggtgctgcctgcatggagcctaggcaccagggagggagggagggagacaagagaacaaaaataaacccatcatgtaatgccagcgggggtaagtgcataaggaagggtcagaggatagagagcatcagggcccggatgggaggctattttaggcagagaagtcagggaatacttctttgagaagtggaaatgaatccggtgaggggtttttcgtggcaagaatggcagggggaaatgtagaagacagagtgactgtaagtgcaa

SEQ ID NO: 453335 - DNA, 598 bp, Homo sapiens
atctatcaattatcaagaattaagtgcctaatattgcaatgttaacacaggaaaaataaaatgcccagcgccctcctgtgcttacccactagttggggatgtgaagaaaactagagccacatattaaagacagggtatagttaattgttaaattktatgatgtagatagactcaataacacagaaatacaaaaataggagagatcaaagattgaggattactcaataacacagaaatacaaaaataggagagatcaaagattgatgattactcaaattgggctttctggagtttggtatttccattctgtatattccagtcaccaggctggctggaccctaaaccctctacattcaccctgagagagtctcagcattcctgttttacaggtgaagaaaccaagattcacagacatgaagtggcttgcccaaggtcagatagcaaaaatttccaagtcgagaattgagcacaagtctttatccccaattccaaggctttttctacaatgcactgaaggatgagtagggtctggataggtaagggaaaacaagaagagtggttcatgtatgggaaataggattaatattttattattaca

SEQ ID NO: 453336 - DNA, 598 bp, Homo sapiens
atctatcaattatcaagaattaagtgcctaatattgcaatgttaacacaggaaaaataaaatgcccagcgccctcctgtgcttacccactagttggggatgtgaagaaaactagagccacatattaaagacagggtatagttaattgttaaattttatgatgtagatagactcaataacacagaaatacaaaaataggagagatcaaagattgaggattactcaataacacagaaatacaaaaataggagagatcaaagattgatgattactcaaattgggctttctggagtttggtatttccattctgtatattccagtcaccaggctggctggaccctaaaccctctacattcaccctgagagagtctcagcattcctgttttacaggtgaagaaaccaagattcacagacatgaagtggcttgcccaaggtcagatagcaaaaatttccaagtcgagaawtgagcacaagtctttatccccaattccaaggctttttctacaatgcactgaaggatgagtagggtctggataggtaagggaaaacaagaagagtggttcatgtatgggaaataggattaatattttattattaca

SEQ ID NO: 453337 - DNA, 598 bp, Homo sapiens
atctatcaattatcaagaattaagtgcctaatattgcaatgttaacacaggaaaaataaaatgcccagcgccctcctgtgcttacccactagttggggatgtgaagaaaactagagccacatattaaagacagggtatagttaattgttaaattttatgatgtagatagactcaataacacagaaatacaaaaataggagagatcaaagattgaggattactcaataacacagaaatacaaaaataggagagatcaaagattgatgattactcaaattgggctttctggagtttggtatttccattctgtatattccagtcaccaggctggctggaccctaaaccctctacattcaccctgagagagtctcagcattcctgttttacaggtgaagaaaccaagattcacagacatgaagtggcttgcccaaggtcagatagcaaaaatttccaagtcgagaattgagcacaagtctttatccccaattccaaggctttttctacaatgcactgaaggatgagtagggtctggataggtaagggaaaacaagaagagtggttmatgtatgggaaataggattaatattttattattaca

SEQ ID NO: 453338 - DNA, 585 bp, Homo sapiens
aatggtctatcaactttgtttatcttttcaaagaaccagcttttatttcatttgtcttttgtattttgttgttgttgttgtttcaatttcatttggctctgctctaatctttgttatttcttttcttcttctgggttttggtttagtttgttcttgtttctctagttccttgaggtgtgacattaggttgtcaatttgtgctctttcatgctttttgatgtaagcatttaatgctatgaactttcctcatagcrctacttttgctgtatcccagaggttttaataagttgtgtcactattatcattcatttcaaagaattttttaacttccatcttgatttcattgttaacccaaaaatcattcaagagcagattatttaatttccacataattgtatagttttgagggtactttctggagttgatttccagttttattccactgtggtctaagaagatacttgatataattttgattttcttaaatttattgagacttgttttgtggtcttcatatggtctatcttggagaatgttccatgtgctgatgagaagaatatagaatactacaggtgctgggaagaa

SEQ ID NO: 453339 - DNA, 558 bp, Homo sapiens
tctagatctaacaccccagaaacactcacccatgatggtatagggacatggaaaagaatggtcctcacggtgttgattgtagcagcaaagccttgagccaacaatggtgcctgtwactggggctgtaagaatcacatggtggatacactctggacacgatacaacagaattacccagatgcacattcgccaaatggataaatcctggaaaattatgccaaatggaaacagtaaaaagcaaatatacatatatatgcatatatatttactgaaataccatttatataaacttaaatgtcatacattttaatggcatattctcaacacattagtatgcatgtttataatatatcaagggagagaataggcattgggattggggcatgaaaggggaaaatatgaaaatgaactaacacatgggcaagaccatgagcaggtagatgccacaagctccttaggatgatgacttcaatttgtacctgagatccacactaaagaaaaaagggagaaagtggctctggatgaaggtctgaggagatcacctttgagttaagagcat

SEQ ID NO: 453340 - DNA, 579 bp, Homo sapiens
aaattctagtaattgttatgaaatcacaggctgtccctaatagcwtatataccactggatagagaccatttcaggaccccatgttgtcttttaactgagaaaagctttactggagtcaaaaccagttttttctttaatgtatcatttgagggcatcacatctccatcagcacacaggtccccaggtccctttgccactactttttctacttttcagtctgttctttccttttttgctattcttaaatcacccaacatacctttccattcacccaggtgcttccaaccttttccactgtggtcacgtctcccaggtcatgaactctttactcatatcccaaccctccacctccagctctttctaaaattggtcccttcctggttcttctcctgatagaccttaacttaggtgcatagtttacgactaaggacagtctctaagaccaggtatctctcatttcctctataaggctcagggctcctgtcacataccctacctccatatccccatgaaggaaaaagaatttttgccatgtcattttatctattaggttccctttgactgaaagtaacagagagc

SEQ ID NO: 453341 - DNA, 579 bp, Homo sapiens
aaattctagtaattgttatgaaatcacaggctgtccctaatagcatatataccactggatagagaccatttcaggaccccatgttgtcttttaactgagaaaagctttactggagtcaaaaccagttttttctttaatgtatcatttgagggcatcacatctccatcagcacacaggtccccaggtccctttgccactactttttctacttttcagtctgttctttccttttttgctattcttaaatcacccaacatacctttccattcacccaggtgcttccaaccttttccactgtggtcacgtctcccaggtcatgaactctttactcatatcccaaccctccacctccagctctttctaaaattggtcccttcctggttcttctcctgatagaccttaacttaggtgcatagtttacgactaaggacagtctctaagaccaggtatctctcatttcctctataaggctcagggctcctgtcacataccctacctccatrtccccatgaaggaaaaagaatttttgccatgtcattttatctattaggttccctttgactgaaagtaacagagagc

SEQ ID NO: 453342 - DNA, 675 bp, Homo sapiens
taaagttgagcaaaagagatgataccttgatcacattgaaattacccaagatgtttttctctagaaaatccaaaagatttttaattctacttttgtgagctagagatacgggtgtttttaaaattctaaataggaaaaaaaagagaaaagtggaaaaagcaggtacattacacattaaaataaatgtcaacaatgacctttcagccagaggacccaggctgttgtgttcttaaagagccatcaraccaggagctcaaccctcaaagatcacctgggaatcctggaacaacagaacccaagagacagggccgacacatttctcaacctcagaagctccaatccccttgtattctatccattctgcaggcctgccaggaatgcccttcagatcctgggagcactttttactagagcagtactgcctaagatggaaattctatgagcctcccaacctctatcccagcctgggtccaccctgtgagattctggggcccaggaaacagaggatgtcatataacaggagattttcagaagaaaacaattttcaatgagacgaatatgtcagcagatttcaatggaaatcctgaataaaggacaagggcaacattatcctaatgttcttgccctagggctttccaagataaacaatcatttccagattctctactcctggcc

SEQ ID NO: 453343 - DNA, 590 bp, Homo sapiens
tccagataggaggactatgatcagaaaaacattaccgaggtgattttaagttagacaactgcaaagggaatgtggactgctgcaacttgagggggctactgctgtaggagtacccccaagtgccaccatcagaacaacaaagactatgccttggaattgacctcatttgaaactcttctttacaatcttcaattataaataattcaacattayttcattttcagtgtttgtcattctagatcgttaaaggttcttttgttagtcatcattacctggaaccagaagtctatagaagaaaatggaagatggggggtgggaaatgagttttggtgggaagataaatgttaggcctaggaatgtagtctacatttgtaagcaagagggagtcattgaaggcttttgagtagagccatatgagattaaaacaaatgttcaagaagaatctaacaaccttgtgcaaaatgaatcaacttggctaaaatctactcaatactaaagtattgcagtcattctaattagaccttccactttcccctattgttgcatcatcatactcactcactctaaacccctggcaaattgtttgctaa

SEQ ID NO: 453344 - DNA, 477 bp, Homo sapiens
ctattttcctaatcatgaaattttaataccacatatatactgtayattatatatatatggatatatatggatatatctgtgctttatacataaaaagaataagattttttgctgcccttccctccctacaccccagaaagcatgaacttgggtcccactgaaaacgcacgtcctacagcaagtcagggtcagcagttctttcattcattccacagaatttgctgtgggcttcagaccagagcacctcacagtcattttccctcctgaaaagtggtgggacttactctaaattgtctcatcaaagagaaggggaagctcaattgaagtcaagaaacacaggaagctaggagtgaggtagagtaaaagtagccttatttgtggcagagggtctgcaggatgggactccagctgaagctggctcaacccattcaagtctggcaggaccccacctccacattagtgtccataatgccccta

SEQ ID NO: 453345 - DNA, 572 bp, Homo sapiens
tccatccttactagctgtgtatgtttggacaagttacctcacctctctattcagttttttattcctaatatatgttgaaatcacaatactatatactgcatagaaagtatacatacatagaatgcatgtgtctgacacaaaatactcaataaatgttacactattattattgaaattcaggatgtctgaccactgtagctaccaaaagactccaagcatttatctggtttaatctcctaaaaccccattttgtaagacttcatttcataagctgaggcatgattcaatggccytccaaaatgtgaacgagttcccaggcacaggtggtggggagcagctgttttccatctctgctgaggaccagctaagagtcttaaagagccacatgagtgattggagtataaagtattagaaatagcttcctaacgtttgaggaaccacaggctgaaacctcaaaggaagccatggaatcctgctctattgagaattctttaaaaattgggtaggttaactggctctctctaaggtaggtaagggccaggaaaacatctcacagtaaaataacaagcagt

SEQ ID NO: 453346 - DNA, 604 bp, Homo sapiens
ataaacattgcttacttttggaatttaaatactttggtggcctaattatgaaaagagaatctccttctcccctggttttcattatattattgaagatatatatatattcatattttcaaaaatcttttaaaagaactgaatgttttattgccatctctatgggctgcattttggtgtctgttatattttattacttgtatcactggccttctttaggggaatatcatatctttctaatagatagaaagtatcttgaagcaaactatcttattctttgtattcctccaggcacaaggacagtgcttggcctgcggtaattacttagtaaatatttactgatgaattggtgaacaagttggtagttagttccatggtatacaaagttgtgcttgttggaaattgtagtctccacccagtggtttactatttttttaatcttcataaaacattactgtactttgcagtagtcagcctctatgatgctcctgctgcaattagcttccttccaccratgcccatgtccaagccatggatatttctttcatgactaagtagtccctaacttcacacctgccactcccttcatctctcttccatccagaaa

SEQ ID NO: 453347 - DNA, 545 bp, Homo sapiens
attgctgaggaacagggaacttagcttctctcaaagtttccaatgatcccttcatccccaggacagagtgacactgcacccacactactgataccaacaccaactgtgtctcccacatctcaagagctattaaaatttaaacatgatattaatagtaactacatttattgaccattttctgggttccaggcccttcatatacatatctctgagctagctactactaatcccactttacagatgcagaaactgagacttggagaggytaaataattgctcaagaactcacatatcataaatggtaaactgggatgataaacctaggtctccttaatccaaaacctgtactcctggccagcccctccccctgagggcttccttacctgaggcacctgagatgggttgtaaagaggaacagccccttttaaggcaggtggaggaagaagaacaccagggttggagcagagctcaaaggaaacactctgtgatggaaaagcatggaaaatcccatcagtgcctgcctcccagattccagaatgtcaagg

SEQ ID NO: 453348 - DNA, 390 bp, Homo sapiens
aacaatacagtgcaacacaaaaaacactcagatatttaaaaacctgaatcatgaagcagaagctcagactgagggaacttagaagtgttagggatgtgtgaggctggcaggagctgggtggagaaggcgcctggacaacggggcggacttacacaggcaaggcaggcaccctgggaagcaaagggcgagtgctttcataaattactttgtctcgtagaatcagatcctgagcgtcagctatgtatatgctcagttcatcattttgggtacctgttgttgttcctcyggctcccgaaatatctgagcgagtaggatgaggatccccaatgtctcctgctaccttttgctatttaaaataaagtaaaattccttttaagcagcacaaaggaa

SEQ ID NO: 453349 - DNA, 612 bp, Homo sapiens
ctcagtggtaggcagtgtggtgcaacagttaaaagggctttgcaggctgactgcctggattccgartccaactcacccacaccctcactgtaccatctgagacaagttatttcatctccctgtgccttggttttcctcctccataagtgacgattaaaatctttgcttcacttcacttcttcatagggtaaatgtgtaataattaaaggaaatagtgcaaagaaaatgcctggcacaacgtaagagcttagtgactcttaacacgtatggggagggggatagagagatacagaacagggagggcctctagggagcaaatcgttctgtccatgcattcattcactgagagctgattgagggcctcctgcaggaaaagcctaatgctatggccaacagagaatgtcaccagtgggactctaagtagcttgtgcaccaagtcattgtagggatgctagggccccaaagagggactaaacataaacttcttccattttccagttttgcctgggtaggctctcagaacaggcccagggctgcctaacacggacccacaagcctccacatgtaaaatgttgtttttttaaaggaacaaagttagcttgttgagccagg

SEQ ID NO: 453350 - DNA, 612 bp, Homo sapiens
ctcagtggtaggcagtgtggtgcaacagttaaaagggctttgcaggctgactgcctggattccgagtccaactcacccacaccctcactgtaccatctgagacaagttatttcatctccctgtgccttggttttcctcctccataagtgacgattaaaatctttgcttcacttcacttcttcatagggtaaatgtgtaataattaaaggaaatagtgcaaagaaaatgcctggcacaacgtaagagcttagtgactcttaacacgtatggggagggggatagagagatacagaacagggagggcctctagggagcaaatcgttctgtccatgcattcattcactgagagctgattgarggcctcctgcaggaaaagcctaatgctatggccaacagagaatgtcaccagtgggactctaagtagcttgtgcaccaagtcattgtagggatgctagggccccaaagagggactaaacataaacttcttccattttccagttttgcctgggtaggctctcagaacaggcccagggctgcctaacacggacccacaagcctccacatgtaaaatgttgtttttttaaaggaacaaagttagcttgttgagccagg

SEQ ID NO: 453351 - DNA, 583 bp, Homo sapiens
gtgatccaccctcctcagccacccaaaatgctggcattacaggcatgagccaccacacccagtggaagtgtcatcttctaattcaacctctactmaacaggattaatggccaattcaaatattagttcagctgagaggatagcttcacagctttaaccagcactagaagctaaacactttgaggtagcatctttcttgctgtctgacccaagtctgccccttaaaggagggtccctcaccacccccaccacatttgtccctgccaacctgtggatgctaggcggagcctgaaggacttattcagaaacccttctccatccagcacccctatacccgccacctccatttgatcctggctctctttcactctgtttcatctccttattccaaactcctggctatggatccttgcttccatccctagctcattctggtttgggcatttttcctggtccacgctggcacccagatcacagtgtgctggcgtcatttctgactaagcatatcccttcagtctcaacacctcccactgccgccaatgcagacttctggatctcactgccagtgctaaaactccttttcc

SEQ ID NO: 453352 - DNA, 583 bp, Homo sapiens
gtgatccaccctcctcagccacccaaaatgctggcattacaggcatgagccaccacacccagtggaagtgtcatcttctaattcaacctctactcaacaggattaatggccaattcaaatattagttcagctgagaggatagcttcacagctttaaccagcactagaagctaaacactttgaggtagcatctttcttgctgtctgacccaagtctgccccttaaaggagggtccctcaccrcccccaccacatttgtccctgccaacctgtggatgctaggcggagcctgaaggacttattcagaaacccttctccatccagcacccctatacccgccacctccatttgatcctggctctctttcactctgtttcatctccttattccaaactcctggctatggatccttgcttccatccctagctcattctggtttgggcatttttcctggtccacgctggcacccagatcacagtgtgctggcgtcatttctgactaagcatatcccttcagtctcaacacctcccactgccgccaatgcagacttctggatctcactgccagtgctaaaactccttttcc

SEQ ID NO: 453353 - DNA, 561 bp, Homo sapiens
taggacaattggactgacctcataaaaaacaagttgaagacaaccaaatgcaaaatatgatccctgatgtccaactgaccctggatcaaaatttaaaataagatgaaaaattagcaacttcaattacatcaaaattaaggatttattcttcctaaggaaattccaaataatacatgtaaatactcctccgtcaaaaagstgaagcttaattcccctccctttgactgtgggctgaacctagtgagccatatccaaagaacagaatatgaaaaagaaaaaaatatagcttttcagtggagaaacagcagacaccaccttaaccaagtgttcaaagttagtatcaccagagataagttatgttaatattatgtaccctttgatgtggtgtgataaaaagagcactttacttctgtgatcttcttccaaaaaatgcataagcccagtttaatcataagcaaacatcacacacttattttttttcccaagatggtggattaaaggcttttaacattccttggccacttggaaatagcaacctagtgcataaagatcaactctgtg

SEQ ID NO: 453354 - DNA, 597 bp, Homo sapiens
tttatgagttaatacatatgttgaaatttataaaacataaaactgtacacttatcttwattttttttgaaataaaaataaaaatctgctgggcacagtggctcacgcctataatcatagcactttgaaaggccaaggtaggaggattgcttgagaccaagagtttgagatcagcctaggcagcatagtgagacaccttctatagtaaaagaaatgtgttatcccaataaagttattgggatataattgacaaaacagaaacaacaaacacaacagcaacaattaaaatttttttaaaaagagcataaataaatattgttattataatgattataatgaggtgaatgtatttcctgttgataatgttgaggcagggacatggcaagagtctgaatgttttaaaaatggaatcatgtgccaaaaatgttgtcttgtgagaatgctgttactgagactatcatttcagaaaatgcctgaggttagcgtgttcctagcactagcatcaaacctccacttgggtgccttggtcagcagcattcttaagtttgcagatcactgagaaatactgcagaaggtaaaagagaaaagcagtgtaaaa

SEQ ID NO: 453355 - DNA, 597 bp, Homo sapiens
tttatgagttaatacatatgttgaaatttataaaacataaaactgtacacttatcttaattttttttgaaataaaaataaaaatctgctgggcacagtggytcacgcctataatcatagcactttgaaaggccaaggtaggaggattgcttgagaccaagagtttgagatcagcctaggcagcatagtgagacaccttctatagtaaaagaaatgtgttatcccaataaagttattgggatataattgacaaaacagaaacaacaaacacaacagcaacaattaaaatttttttaaaaagagcataaataaatattgttattataatgattataatgaggtgaatgtatttcctgttgataatgttgaggcagggacatggcaagagtctgaatgttttaaaaatggaatcatgtgccaaaaatgttgtcttgtgagaatgctgttactgagactatcatttcagaaaatgcctgaggttagcgtgttcctagcactagcatcaaacctccacttgggtgccttggtcagcagcattcttaagtttgcagatcactgagaaatactgcagaaggtaaaagagaaaagcagtgtaaaa

SEQ ID NO: 453356 - DNA, 597 bp, Homo sapiens
tttatgagttaatacatatgttgaaatttataaaacataaaactgtacacttatcttaattttttttgaaataaaaataaaaatctgctgggcacagtggctcacgcctataatcatagcamtttgaaaggccaaggtaggaggattgcttgagaccaagagtttgagatcagcctaggcagcatagtgagacaccttctatagtaaaagaaatgtgttatcccaataaagttattgggatataattgacaaaacagaaacaacaaacacaacagcaacaattaaaatttttttaaaaagagcataaataaatattgttattataatgattataatgaggtgaatgtatttcctgttgataatgttgaggcagggacatggcaagagtctgaatgttttaaaaatggaatcatgtgccaaaaatgttgtcttgtgagaatgctgttactgagactatcatttcagaaaatgcctgaggttagcgtgttcctagcactagcatcaaacctccacttgggtgccttggtcagcagcattcttaagtttgcagatcactgagaaatactgcagaaggtaaaagagaaaagcagtgtaaaa

SEQ ID NO: 453357 - DNA, 597 bp, Homo sapiens
tttatgagttaatacatatgttgaaatttataaaacataaaactgtacacttatcttaattttttttgaaataaaaataaaaatctgctgggcacagtggctcacgcctataatcatagcactttgaaaggccaaggtaggaggattgcttgagaccaagagtttgagatcagcctaggcagcatagtgagacaccttctatagtaaaagaaatgtgttatcccaataaagttattgggatataattgacaaaacagaaacaacaaacacarcagcaacaattaaaatttttttaaaaagagcataaataaatattgttattataatgattataatgaggtgaatgtatttcctgttgataatgttgaggcagggacatggcaagagtctgaatgttttaaaaatggaatcatgtgccaaaaatgttgtcttgtgagaatgctgttactgagactatcatttcagaaaatgcctgaggttagcgtgttcctagcactagcatcaaacctccacttgggtgccttggtcagcagcattcttaagtttgcagatcactgagaaatactgcagaaggtaaaagagaaaagcagtgtaaaa

SEQ ID NO: 453358 - DNA, 405 bp, Homo sapiens
atttgaaattaagttgatctagattttaatgtcagttctgtcccttattgtctgtgatactgataataaattgttcaaatcctgtcagccttttttttaacctatgaaatttattacattgattaattggagataatgaatgagcaaattttcagaaaatgagttttcttcccattcttccttcattccttttcttaccaaatcaattatcagagaagatttaaggaagtagatgasactgtctttttatcctgaatatttgtgttaagacttgtatgagagagagagagagagagagttttcgcttaagacttgagtcagatttgtttaggtaattttttttgccaattattttttagtttagtgctaaataaatgttatttggttccttacattattggtgat

SEQ ID NO: 453359 - DNA, 594 bp, Homo sapiens
gaagggagacaggagatgcaggcactattagtgtaagtttacagaaatacattgtaatttctgttgactttttactattttctctaaacatgtttatttttaatargttgactatgtagtactgatctttctttcatcatttgcttttatttcagtgcccatatcatagaagtgtccatgtcacaaaagaagtcaaaagtagtctggaataattggaatctttccactagattgtctaatgtcaatttgttttctggcactgtgtcttctatgtcttcctcctcattgtcttggcattggtttggaggtactcatctccatcaagtcaccttcttttaattcctctgatgcagtacctattagctcttgaatttctttaagattgataccttgaaacctttcaccccttactttcttttgctatatctacagtatctttcacggtttccttaattgtctctgtcgtaaatcctgtgaagtcatgaacaacatctggacacagttttctccagcaggaatttcttgttgtgtgcttgatggccttcaaagctttttctataacaacaatggcatctttaatggcataagccttct

SEQ ID NO: 453360 - DNA, 586 bp, Homo sapiens
caacaatactgttaattttatctctagaatatctctaaatctatcctattgctccacatacacctaggtcaggatcttattaatgtcatttgaagtattaaaatggtttatttccttgccttgccaccagtttttgtttttttgtttgtttgtttttacttctattttcaacttgcaatttgtttgccacaaaggacttaattgatttaaagactaattttatcttattggtctcagattaaaggccttcaatggcttcctaacttctgcgtgatcaagtgtggagtccttaaaatggttcatgcagacttttgcatgatatggcccctgccttccaatccagtctcatttctaaccattgtcaactaataattggaatccggcaaatgtttggtaattgtacgtcttttaactctgttttactgtgagattaatagttcttcttttgcctaaaaagttcttaytctgcatttgaatttcactttaaatgccatctcttctctttatttgacccttggtatcctccctcaaggtgtctcttctcatcatgttttctaatgtcttgtgtatgctttcatcattgtat

SEQ ID NO: 453361 - DNA, 529 bp, Homo sapiens
ttattgagtcctttctaggtgttctgcactgaagtaggatttaagtatggtttccaagaattccccaggtaattttgatgtgctctcatttttaaccattgcctaggccgtatggctgcaatttaagcacagatcattgtaatattttgcacttcatatttggaacwtttgatttacctctccactcattcaacactgttttaaaacaaaacaaaacaacttttttcttatctgaacattgaaaatgcatgtgtaggtcacaatttacattttattgcaatccataaggttttaaagaagttattgatcttaaaactggaaactcctcataactggtatttcataatcatagtatattattcatgtgaacctcattaatagctttttcttacaggactggttaataaatatgtcaatgataaaaaataaattttctctcatatattttccctttcaataatatgtgtactaatatctattaaagtatccatataagtgagttaatatttttctaccaaaaatatatgta

SEQ ID NO: 453362 - DNA, 565 bp, Homo sapiens
aagaatatttaacacagaatattttctgttctttgattattataagggacaagataatttcttaatcaagactatgtttgttttttgaagtaattttaaagctgttagtttgatcaaaatgtaaaaagccatggaacctcctagagttttcactgggagccagagaaactcaccccattggatacattatcaaggatcaataaaaatcaaaaagaaagttgcatttggtcataatccatgcatcatttgtactcaacaatccagttagagaataaagctcaattctmtaaaaaatatcataggtgatttttttcttttatttggtgtttctgtattttataaaggaaaaggaacaaaaagcccactttactataacttacattaattaatctcatcaacatccccactagaaggaaggagttttgctaggtactccagattgaagggggtgggatgtataatattcaggcaacactccatacaggtttattgcattgaattgcagaactccacgaagtttataatccctacagttctatccatcaccccttctttttacaacact

SEQ ID NO: 453363 - DNA, 630 bp, Homo sapiens
gacatatcagcaacctgcagttaagtcatgtccaatcactaacagattctgaacttgaaggaacttacatagattaatgctgccttatackgtcttgactcagcagctatctagcctcattggagattgagtcacctttctgtcttgccctgcagcctttttaaaagtctaatttcagtattgcaacccaacggcaacagatctaaattcaaatttaaagatctctctaagactaattttctgcattaagaactgataatatccaaatacccattgcataaggttgttgtagatgttttttaagccgagcacagtgcatgtcatgtagaagtgcttgatgagggatacctgttattatcaagattcacagtgaacaatgcactcaagttgtgggccagtcttttctcatccttatgcctccaaattcaacagagctttagaaagtgaaagtaaaaaagttaaaaaaaaaaaaaaaggaggggaggaaagaagaatctgttgacattttagaaatatgtatttttccaaagtctaggacctatcttgtttggctttatatttttatcacctttaacatattcaacaataaaacattattctgtaatattgaaaactaggatgcagtataaa

SEQ ID NO: 453364 - DNA, 583 bp, Homo sapiens
cactatataaaattgtccctgtctctcaatgacttcagtctgagaggaagaatgttatacgatttaacaaattccactaatatgtgaacaaaaagcaacagctccttaacattctcagaaatcactggagtttttaaagaatgatgattttattgtgaattttttgattcatagaattttaggaaagataacaaggaagtcaagtgaaatcaggaagygcagagattaaaaatgggaacattcctgcttgagatagctccatagagcctttcctgcctttttcttccttctcctatctctacttcaatgtttacagattctgtgagattttcagttgctttcctggtgatgacattagtgacccagagtgaacagcctttgcatggcagggctatttgtcttattattttacttagctggattacaaactaactaaaccatgtcttacatgtatttttacttttatttttgagacaaggtctccctctgtcacccaggctggaatgcaatggcacaatcagagctcactgcagccttgacgccctccaggctcaagcgatcctcctgccttagcccctgagta

SEQ ID NO: 453365 - DNA, 411 bp, Homo sapiens
ttatgtggaatttttcatttttttctaaagycaatttctgattattggcagttttgataaaaagagcagaggaaaaataaacttgctttctttcactgttttcccaaggattttgaaataatatagcttagaccatccacccttaaaaaagattattacagtctgaggactttggttcatttgccttttttttttaatttgattagcttcaagaccccatttacaatgcatatatacaaggttgttattgactctccagtagttagcttttctcatttccctaactcgtagataacactaacaaaaaatttagtggctggatcacggtggatgctaaaaaaaaaaaatgacaaatttaacaactattttcacccactattgggtctatgtttaatgctttgttttttgcca

SEQ ID NO: 453366 - DNA, 585 bp, Homo sapiens
aactaggctgtaaatatctttatatcattcctcagatcaataatttcatagttactaaaggagtgccttaaagatcctgataccttaattggaccagttttaccctcactttttagttttagacattgtaacggtggctcttctttcataattttatgtcactgtgragatgctataaacttcctcttatccaggttataaggacccatagtgtcctctcaatgtattgttgtgcttctgctgggtttcttgaaaaaagcactgctttaacctagttctgacagggtctactaatgctacataaccctacaaccaactgatgcctgtgctctgaaccgggcttgtggcagacagcttgcaaatactagatagttttgacatttgcttatctacttttttgtttggtcctgggttcacaactacagtataagccccatgtagtagggattgttcctgatacatttctgagccatgttctctagaaaaaggtgcaggttaaattgggaatgtgaaacattttttttgttgttgttcttcagggttctttattccatctttcataaaagagatgtcagaaaaactgtt

SEQ ID NO: 453367 - DNA, 585 bp, Homo sapiens
aactaggctgtaaatatctttatatcattcctcagatcaataatttcatagttactaaaggagtgccttaaagatcctgataccttaattggaccagttttaccctcactttttagttttagacattgtaacggtggctcttctttcataattttatgtcactgtgaagatgctataaacttcctcttatccaggttataaggacccatagtgtcctctcaatgtattgttgtgcttctgctgggtttcttgaaaaaagcactgctttaacctagttctgacagggtctactaatgctacataaccctacaaccaactgatgcctgtgctctgaaccgggcttgtggcagacagcttgcaaatactagatagttttgacatttgcttatctacttttttrtttggtcctgggttcacaactacagtataagccccatgtagtagggattgttcctgatacatttctgagccatgttctctagaaaaaggtgcaggttaaattgggaatgtgaaacattttttttgttgttgttcttcagggttctttattccatctttcataaaagagatgtcagaaaaactgtt

SEQ ID NO: 453368 - DNA, 563 bp, Homo sapiens
accattctggagtctggagaataatggccctcttctcacaactccactaggcagtgacccagtgagaactctgtgtggggactctgacaccacattttccttccacactgtcctagcagaggttcttcatgagggttctgccctgcagcaaacttctgcatggacatctgggcatttccatacatactctgaaaaccaggcaaagatttccaaacctcaagaaytgagttctgtgtacccacaggctcaacaccacgtcgtggtccaaacttttatgctgccatgtggggcttgcaccctttgaagccactgcccaagctgtaccttggcctctttagccatggcaagaatggctgggacacaggctaccaagtccttaggctgcacataacagggaggccatgggcccagcccacaaaagtgttccttcctcttaggcttctggggctgtgatgagagggcctgccacaaagatctctgacatgccctggagacattttttccattgtcttggcaattaacagtcgggctctttgttacttatgcaaatttttgcaaccagc

SEQ ID NO: 453369 - DNA, 576 bp, Homo sapiens
ggaacaggactggctgagttccccaactcagtctgttatcgttagatcagatccttcttatccaactgtatttcaacatggctgtccatatttaattgaacctaagtataaaaatgaacagttatccctgtatctttgtgtcttcattctgaagattctcaagtcacttaaaactacaatgctttacttttgttaacctgctttttttttataggggtgtcagccatgacctttataatggggaagaaaggggtggttttctttccacccctaaaawgaaatgcctctaatcacagaatagctcagatttggttgcttgattacaattgaaatttatttgctcaaattaacatttataaataaaacattaatagctgagtatctttgatatcagttttctcctcaaccatcaccccacatcttaaattatcttattcttgatttctttaaaggactttttaaaggaaagtttataaaaataaatgtttgctcctcttgtttctttgtacatttatttttgtttaagctgtttggttgctaaaaggtccttttcttaagaaagtttccaggttgaat

SEQ ID NO: 453370 - DNA, 576 bp, Homo sapiens
ggaacaggactggctgagttccccaactcagtctgttatcgttagatcagatccttcttatccaactgtatttcaacatggctgtccatatttaattgaacctaagtataaaaatgaacagttatccctgtatctttgtgtcttcattctgaagattctcaagtcacttaaaactacaatgctttacttttgttaacctgctttttttttataggggtgtcagccatgacctttataatggggaagaaaggggtggttttctttccacccctaaaatgaaatgcctctaatcacagaatagctcagatttggttgcttgattacaattgaaatttatttgctcaaattaacatttataaataaaacattaatagctgagtatctttgatatcagttttctcctcaaccatcaccccacatcttaaattatcttattcttgatttmtttaaaggactttttaaaggaaagtttataaaaataaatgtttgctcctcttgtttctttgtacatttatttttgtttaagctgtttggttgctaaaaggtccttttcttaagaaagtttccaggttgaat

SEQ ID NO: 453371 - DNA, 532 bp, Homo sapiens
aggccaaataacaccctaaaataaagtttctcttaaattgcattcttattgtaaagaaaaatagcatataattgatgaaaaagctcacaacattctttcctccatctcctaaaatctgggattataaaaagagcagctgtacaacaagcattcaggccttttactattagaaagcccatctgtttttctgtacttttgcctaaatttttaataattatgtctagacatgtgacaaaaacacatagagattaactatttcttcactgattacaactttagaaatgaaccccatgaaaattcacactacataatttaattagttttattttaaatacagagaatgaaaatttcatcatgaacagggtttcaccacgttggccaggctggtctcaaatgaccctcctatttttaacttggatacctgctattctgccaaaagacartttctagagtagttttgaatgggttgatttcccccagtcccacaaactctgaagccagtgtctagcttactaaaaaaagagttatacat

SEQ ID NO: 453372 - DNA, 564 bp, Homo sapiens
ctgctgctgtaaagtgctctttaaatcttttttttaaatccctttctaatgaatgaaactaggggaatttcaggggacagagatgggatttgttgtatgataaactgtatgtagttttcagtctttctgtattgagaagccrtggttggggcatttttaagatggctggctactcttgttttccctcatgataataaatttgtcataactcagtaacatggacttgcccctagaggtagttgttaataattttgaaatattaaggtcttgccaagcttctgatgattcaaacctgtactactgattattaagcaggacagactgagctttctgctgcaaataccttggaggagaaagtaatttctaaatatacagagaggtaacttgactatatatgttgcatcctgtgcctcccttcatattaatatttgataaagattttaattcatataaaacttctaaagcagaatcaaagctcctcttggggaaatggcaagtctttaggacaggcgagaccctgtatgcatagtaccaaagcattaccacatggtagagaacacactc

SEQ ID NO: 453373 - DNA, 572 bp, Homo sapiens
ttgagtttttccttttgagttcatgcaaaaatgagaaggttgcaccctctccccacaaccacccaagatttgaaatgtgtaagaaaacagaggcaagggaggagaaaacatacatggtatggaaaaaaaaaataatagaaaagtggaaagacttaagttaactaatacytaattttaagttgttcattttgtagaagtgcagcacaacttttgctcagacattatgcaatgatacataaaagtcttgggaagggaggaggccggctggtaggtaggtggagggtgataattttgtatgtacataaaataaagtggtgatgtttctcatatagttcagtcacaaagcaaaggaaaaaagtgaaatgagactggagggggaagaatcaggatccaaggcatagcatgttagcttgggggaaccagcccctggctactgcagccattccagctagaacatcagacacgtgagtggggacactagttaagacgactccaggtgttatctgactgcggttgcatgaaagacctccaaatgaaaccacgtagctgaggcccaccaacccacagaggtg

SEQ ID NO: 453374 - DNA, 535 bp, Homo sapiens
ttcagttttagaaggatgagtttaaaaaactgattatttttgagcaatcattatatagaatataatattgagtggaatatctgagttgggtaatataatctccttttgactgatcaggaaactgtggttatgtagtaaggttgagcaactcacccaacatcatataactagtaagtggcagattgaggatttagtttctgatggattccaaacgcatacagctttatcgtgaagtgtatcaaaactttgaaattatagtgggtggttaaacataactgtaaatggtgttcagacctgacttctccatgtttaaggggttctatttaatmttgagcagtttggggaactaatttatatcagcaagtatgcatttcccataaaataaaaaatagaattgaggccgggcatggtcgctcatgcctgtaattccagcactttgagaggccaaggtgggtggattacttggggccaagagtttgagaccagcctggccaacatggtgaaaccctgtctctactaaaaatacaaaaattag

SEQ ID NO: 453375 - DNA, 613 bp, Homo sapiens
cctgcatgcggctctttccagcctttaatctgttgtaatggtcaaaacaataaaagagttttcagtggtctgaaggaaaatcattgaagttaaatacatgcatactcatggagtccatctataaaaacatatttgacagaaagaagaggttgggaaatttctttgtagaatggtaatttaaatgcttgacagtttggctaatgtttgcattattcatcacttrgtacttgatgaagatacttcactttttatcttgatttcattcctcacttgccctactaaagtatgtatatttcaagtaaagtcagcaaacattaacaatttcaagagctccaaaaattatatcggtaccaacactacataaagtaggttcatactaatgctacattgcacacattcagtgtacgcaatacaacattgcagaaaaagaaagtcaatttgatttttaagctgcaagatattacgctaatatcaaatttcatgtataattgggccattatgctcttaagatacagaaaatacctgaaattttttggagtgctttatttaaccagtgggaattattatttaaataatatacacttctgctttttaaaaacttgctataaataat

SEQ ID NO: 453376 - DNA, 584 bp, Homo sapiens
cgtcgataaattttccctctttagcagatcattcccagcatcataaataccaccatacttttcctactttaaatgcaaacaaacaaactttcttgatcttattttctctccaggaattccaccatttctcactctccctttacagcataccctctgaaagaattgtttatacttaccatcttcaatttctctcttcctaattgcatttttgtttacacttctccactctrctgacactgctttcatcaggctaccagttacccctagattgctaatctagcagtcaattctcagtccccaactttcttaacctatgggcagcattcatgtgaatttactttctcctttttgaaatagttttttcacttggcttccaggatgccacactcactagtcttcctccaattttatgacctctctttcttagtgtcatttgctgattcttcctcatctatatgctaatgattcccaaattcattttttcccagcagacctctcctatcaattcagaactgcatatccaattatctacttgacatctccacttcagtgtttaacagacatcttaaattgagcacattgaa

SEQ ID NO: 453377 - DNA, 649 bp, Homo sapiens
agcaaatctattgataatgcatagattaagtcttagtgaataaatttacatttgtatttttagttcactgttacatatcaaccacctaactgtactttaattttatttgaaaaatcttactatcagaaagcaaaaacaactggacagtagaacttaatttggttctacagaaatttcttgygctgacttgtaaaacaatgaaatactagttttgaaaaaaataattattaaattatttcataaaaatctttaaatactttataaaatctttttatttcacatatccctctattatcccatttctctgttccttcttaaaacaaaatgacttgaaaaatttttttgaactttctatttccaattttttttctcattctacgtttaacctattttagtcatattttgctcccgttatacggaaacgtaattttagtgaaagtcaccagtgatcaccacactgctaaatcaaagatcaaatcccagtccttattttactggacctctcagtagcattcaaagcagatgattattctctttttgaacttctttcttaatttgacattcagaacctcaactctcttgattttcatactatttcaccattcagtcctcagccacatttacctctcttctttaaccccttaacccg

SEQ ID NO: 453378 - DNA, 468 bp, Homo sapiens
ctcagaggtatcacaatgtgcctatgaatatgtaaacttgccttttaaatcaatagctgtgaaaatgtgaagaatatcttgtgaaattaaatggaagtaattgctaacatatttagagtttatgatgaggggagtactgtactaagcagctgacatccaataattcatttaattctatggaagctctataaagcagttgctataatttctcccaatataaagataaaagagtgactcrgttttagctcaaacaagcaaagtcatagcatctgagtgttatccaggcagtctgactacagggccctatggcttaaccatgaacctcagaaaattctgttcagacattttctggatgccaggtggtcttatccagcagacaatgccctttatttcataggcatatctctgtagagtgactgattttaacctgattgccccaatgcatgtaaattttaaaatttacacaag

SEQ ID NO: 453379 - DNA, 571 bp, Homo sapiens
gtaaagtcttactaaattctaacaaataaaatgtatatggattttttttttacttattcttaaaaggtgacaagaaaaattgagttatcagaaaatctaagtctctaaaacttctttacttatttttatcttctcaacttataattctcttgacagtttcttcaattttctaattcagtttatgtacatatgtgcagaacttagacagttacagttacagtggtttcccttcaataggttgggactgtgtttttttctaaaatattctatatcatttcttccatacatattttttaaaagtctctaatttacttttgtattttctccacttagaaatataactgtgataacagaaactttgaaaaaaataatagttgaggttaatgtattgaggattaaaatttctgayccacatttgaggcctgaatattgctttaagtgcagtaaaccattgttgagaactgaaaattattcccattagctaagaaaaaacagaggtaaaccacattaactttctctccacagtcttcagtgaaaatgctttcattgtgcatattttgcttagaaaatg

SEQ ID NO: 453380 - DNA, 519 bp, Homo sapiens
aaatctaagcagagtaatgtgtgttcaacctatcactactaaagtttgaattctggaaaattaacccattgtattagatcccacttgcatgatataatattgtatatttttacaaaggatgtttgctttcttcattaattctcatttgtctttctgacaattctatgcaacactgtcattcccaataagcctagtgaaatatttccacttgcatcctccaagtcacacctaactggctgcttcttgggtctctcaatttaattcccataatggttawttttaaattcttttatttatttacttaaacactacagttctggaaatgcagtatctccaatcagatcaaagctcttcagtaacaggagaaaattattcaaaattcaatgaatgtttatttagttcttgagataggtcaaacaatgtagtaagaagctgaaaattcatagatgaataagctacccaagaatgttgaaggcaatttgtaagaaggactatagtgtggatgtgcacagagtgttg

SEQ ID NO: 453381 - DNA, 608 bp, Homo sapiens
attaactactatcacttagtcattatgctaaatattaacattttaataatatactgtttttgcaaaagcaagtatatatatatgtataattatacaatttttcacttttattatatttattttaaatatttaaagttttaatataatattctaaaaatattataaatattttttctatatataagaaaaagtgsaaaaacacataccagactattggtggtggtagattcacagagaatatatggtacaggaagttttctttctatgctatatctcttgaatttttgataaaaacataaatatctttggtaattaggaaatatttcctaacaaaattagtagatgaacatatgaagagaatgatatgtcaaagagaaggtataaaccccattaagataggctctgtttctgtcttgttgaggattgtatttcacagtgcctgcctcacagaaggcacttaataaatattttttgaatgaatgaatcaaaacattaaagaagctgccgcaactaatttacaagctgtctttagagaccacatgaaatctttcttcatatgggaacatttgcattgttagactaggataatacatctttgaccactgccg

SEQ ID NO: 453382 - DNA, 647 bp, Homo sapiens
actgtttttgcaaaagcaagtatatatatatgtataattatacaatttttcacttttattatatttattttaaatatttaaagttttaatataatattctaaaaatattataaatattttttctatatataagaaaaagtggaaaaacacataccagactattggtggtggtagattcacagagaatatatggtacaggaagttttctttctatgctatatctcttgaatttttgataaaaacataaatatctttggtaattaggaaatatttcctaacaaaattagtagatgaacatatgaagagaatgatatgtcaaagagaaggtataaaccccattaagataggctctgtttctgtcttgttgaggattgtatttcacagtgcctgcctcacagaaggcacttaataaatattttttgaatgaatgaatcaaaacattaaagaagctgccgcaactaatttacaagctgtctttagagaccacatgaaatctttcttcatatgggaacatttgcattgttagactaggataatacatctttgaccactgccgtgggaatacatgccttggaaatactttcaggtgcaagtctttggaaatatagtcattcagcragaaacaaacaaacaaaaagtgtgttcat

SEQ ID NO: 453383 - DNA, 436 bp, Homo sapiens
ctggctgcactaggtgcagacacttactacaagckgagagcctggttgtgggacataatggaaaaagaaacaggagactttcctcttccagaacaataaaaaataaaaaataaaatgggggaaatgtaatcttaattgtgggaaaattacaaagaaattatcagagttttcttctttttatcattcgtccgaatcagaaaaactcccaaccaagtcacatccatgctttctgtgaaatgtacacactaacttagagtcaaagaagctgaagtattatcttaaaagcaatatgtcaactctaaaactgtatattcagctaaggctgagtagggtcatcaaccatgaaggcaattcaaaatcatgcctaagaggaggcagaatatttctggaatttactcgttcctcccacacaccaggaaaaaaaaaaaaggcgagt

SEQ ID NO: 453384 - DNA, 563 bp, Homo sapiens
cttctcttgcatttcctccctggcaatggcagcccacagcagcagttgctgtggtcaagggagcttgccctacaagtgtgtaaatatgtgctgaggtgtcattgctggatgtaggaaggtctttggcaatggcttatgcttcagccctgacaacaggagctgtgggcaggaaatgtcaatgtggctccagagatgtggagatacagaagctattggctcccaggtatgatgggggttggtggcggctgggctctccaaatggcatcttgctgtagctgcttagagcgtgggtggggggtgtgtgggacccaggattatcttcctctctggagcaatgtcttcccrcagtctccaggcagctccctaagtcagtcttagggtccacatgagtctaagggctttctcatggctgcagacttccagaagtctgcagtgccaatgtggactgctgggggtcattcgcttatgctttccctgcatttggaagactctcaaggctctgagctgatcatggccaagtaggctggctcatttccctctcctttcttgctttaggtgtttcc

SEQ ID NO: 453385 - DNA, 553 bp, Homo sapiens
ttgccttttctaaaatgtcatgtagttagaataatayagatgtagccattttagattggcttctttcacttagcaatatgcttttaaagttcttcaggtctttttatgacttggtagctcaacctcatttgaatattgtttctttcttaggcatgaaaattatctttaggaaaataaccagaagattctattatttatgccatctaggtaggcttaaagactagttctgtggcactattgtttccatactatgtaccaaactatttacattttatgttccacactctgcacattcaactcacatcattatcccataaataaacattttaaatggacaatttaataaagtttaaatagtttatttattatgataatttaatatagtttaaagatctatgaaacatgtccatattggatcaatctaattcccattattatcctcattcaacttcctatcattcttgttatctggagaatgcttgcatttcttactcttttctgcgaaaattatcctgataggtattttaaaaatagaaaaaataaaaagcaaaac

SEQ ID NO: 453386 - DNA, 423 bp, Homo sapiens
ttgtattagatttaactctagagttgtgagtagccatcttgctaaattcagagaaagcctgtttgaaaatgcaacgaacgtagaggaaagcaaagttaagatataaatagaaagatagaaatgaacagaggaagacacagagggaggaagaaaatatgattaagaaacaagaggactaagacttggtacatttgaactccttgttttagcagtgcctgaaaccaatttayctcagatttgtttttagttccataagctaataaagcaccttttttctttattattttattattttacttagacagttagaagtgattttctgttatttgtaaataaaagagaactgaaacaaaagatgaatgttgaacaacattgaccacagggagaatagtgagcaaatctttcttagttgcaagaagagat

SEQ ID NO: 453387 - DNA, 577 bp, Homo sapiens
aataagccattcagtagtttgtagaaaatagtagagggaaatatgtataggaatagtagaggaaaatatgtgtaggaatgtgtataggaatagtagaggaaaatatgctttggatagtgctaaaatagagataactagaagacaagatggcagcaccaatatatccagtacacagttggaaactgaaggttagaattgtcatctaaaaataaatatgtgtcaatcatcagattagaggtgatattttgaggaaatcgccaaagaatagtcaataagcaccaaatctagttttagtgatgttaatcatatgatcagacactaatttgtgattataaaaatatttttcccagcaaatccatatatgtaaatattgtagatatgtattttatttttaatgtatgttgtctcagttttttgtgcattaataggtattgaaaaggaaaaaaacagtgttggtaattccaagtaggagmagccaggcagtgcatgttgagatccttctaaagttgagcccatataacaggtgaaaccataatgaagagtgtaaggtgaaattctttcacttccaggagctgat

SEQ ID NO: 453388 - DNA, 505 bp, Homo sapiens
acagtttctcctttttgctgccctccccatttgttggctaactcaaacatcacaaatgaccaaatagcattaggctaaaatagttattctagagttttgctttgctttttttcctttccaaaaaccctaactgtaaataatgggttttatagaaatgcatgaggcactctgtattgtttgtcagcttttccagttccacactagtccctgcttcctctttcacatgcacagatcagaacaacaggatagcacgaagcgcgccaagtttagaactaatcaaactgtctaggagtaagctacaacagttgctgaagaatgctttattcactctcagaatgaaagcttttgatgaggggagaggggactagaaaaactaatggagaaaaatctaaaggaaacacaaattactgttgtacttcttagcaccttgggttcacatttgccaggaccggtaagtgtcattrccaatttgatggtgactaaaatgcagcatagtcacatgttt

SEQ ID NO: 453389 - DNA, 613 bp, Homo sapiens
taaatgaagttatataaatattttgcataaattggttgttctcagttggatgttatttaaaaccccatatgacattttgcaatggttgaagacatcttcagttgtcacaactgggaaagcaaggataattctggcatctggtgggtagagggsccagggatgctgctaaacatcctacaatgcagtggacaacctccagaacagtgaattatatgagccaaaatgtgtatagtgccatggttgagaaacccatagaatagggtaacatgaaataaatgtctattaagaaaagctcatttaaatttagggctgtcatcctctccaaagcaatttatagatttaatgctattcctacccaatttccaatgatattcttcacagaactagaaaaacaaactattttaaaattcatatggaaccacaaaagagtccgaataaccaaggcgattttaagcaaaaagaacaaaggtggaggcatcgcattactcaacttcaaactatgatacagggctacaataaccaaaacatcatggtactggtacaaaaacagacacatagcccagtggaacagaatagaggccaagaaatagggccacacacctaaaaccaactg

SEQ ID NO: 453390 - DNA, 613 bp, Homo sapiens
taaatgaagttatataaatattttgcataaattggttgttctcagttggatgttatttaaaaccccatatgacattttgcaatggttgaagacatcttcagttgtcacaactgggaaagcaaggataattctggcatctggtgggtagagggcccagggatgctgctaaacatcctacaatgcagtggacaacctccagaacagtgaattatatgagccaaaatgtgtatagtgccatggttgagaaacccatagaatagggtaacatgaaataaatgtctattaagaaaagctcatttaaatttagggctgtcatcctctccaaagcaatttatagatttaatgctattcctacccaatttccaatgatattcttcacagaactagaaaaacaaactattttaaaattcatatggaaccacaaaagagtccgaataaccaaggcgattttaagcaaaaagaacaaaggtggaggcatcgcattaytcaacttcaaactatgatacagggctacaataaccaaaacatcatggtactggtacaaaaacagacacatagcccagtggaacagaatagaggccaagaaatagggccacacacctaaaaccaactg

SEQ ID NO: 453391 - DNA, 576 bp, Homo sapiens
aaaataacacaacatttaagagttttaaatagtggcctgggtttcctaatgtgactgaactcttcattgctgaagtgtgcaagtagaagtgaaatgcagtgacatggtcgtactcatcaggagaggtctgatattgaaacagagcctgtaatgggctttgggggacagaaacccttcttagtttgctctggcagctgatggtgggttacctcatcctaaagcagtcatctttaggtgcacagacaactgtatggtggctctctgtggcagaattctgtgagcccyccaaagggcggccagatctagcaaataaaaatccagaatgtccagtcaaatttgagtttcagataatgggttcttttttagtataagtatattcaagtattacttgggctaaacttttactgaaaatatgattggttgttgatctgaagtctgaatttaactgggcatcccatatctaatctggcaaccctatgtctcacttcttccttgcagctgtccagctagagacgacgtttcccagcctctcctctcactaggtgtgctcatgtcagtttttgttgatgtgactag

SEQ ID NO: 453392 - DNA, 525 bp, Homo sapiens
ggcagttcgcagagggggctgagtacctgatggctaaggggagaaaaagaaagatgttaaatcagaaaaataaacacacgtaagactttaggagaaaaagtgaagtagctatttggtgttgacgaaccagtagagacttgtattggtggtaacatattggaaaccagaatcattagaacccttcagatgaaaccttctcgtttacttggcatcatagagccacatagaagggaggcacctgggatgtcattaaatgaaacctccctcagtgcaggaaatgcccctgsagcattctgatggagggggagaagggggggagtcttccaagctttgcttgaatatgtggagtgatggggagctcactacctgtcagacagcatgtggaaggggcagctgaggccatgaactcagcctcttttgctatcaaatgctccagttctctctgtgatcttcctttaatttgcttgctcaggctcaacttgcacatctgtggtgacaaatagttcatgacctcctaaactggcc

SEQ ID NO: 453393 - DNA, 617 bp, Homo sapiens
tccctctcactgctttcagagtcgacagtgatctgaagtgatagggttattygtctgcaggtttagtctgctccctgatttgcctgcaggctgccatgaggctgtggctgccatggctacctgtgtcttcccatggaagatgccggccgtggcgtgcttgctgggtgggctgtgtggaggctggctgagacatggccctgtcctggagaagttgcttgctgggagtcctgactggggaatgtttgggatgctgggggaggaagtgaggcagagcaggttctcgactccagcggagccagtgaacacagggacacctctccataggaggtaacactggtgctgaaactgaagtcatatacttggcagagaagattctggaaggggacacagcatgagcaaaggctaggacgtgtaccatattacaaggcccatacctggaatcctcaggtgctcagagtccggagcacacagggtgtctgaagtaggtaagtgggagggagggatgggccacaaaggtctttcatcatctctcccccaagcctaggctttctgtttggagatcctggacaaaacagccccttgaaggagactttaggatacctcaggccctgggcaca

SEQ ID NO: 453394 - DNA, 517 bp, Homo sapiens
tttccctgccctactcacttcccagatctgtggccaatgaacaaaggtttaagaaagcctgtaaaactgctaagagctgcccaggtgttgaaaggcagggttaggcagtaggtgagagggtagttagtggtattgtcactaacctgctaggtaaccttgggtaagttacacagcctctctrggtttctgtttcctcatcagtaaaatgaggttaaggacagcatctacctcccagaattgctgtgaggattaaatgagttaacgcatgataccagctgtcatcatcatcatcgctcttattatcatcgttgctttttattatcactgccacagtctctccctagctcaggggcccagttagccaatgatagctcttcctggtgttgacatcctgtctggatttctaaattctggtgctgggcagggaattcccttgggatgaagggggcattcccttgggatgaattgggacccacccagctgttctgttgcctaccttgcagggtgaatggtgacc

SEQ ID NO: 453395 - DNA, 517 bp, Homo sapiens
tttccctgccctactcacttcccagatctgtggccaatgaacaaaggtttaagaaagcctgtaaaactgctaagagctgcccaggtgttgaaaggcagggttaggcagtaggtgagagggtagttagtggtattgtcactaacctgctaggtaaccttgggtaagttacacagcctctctgggtttctgtttcctcatcagtaaaatgaggttaaggacagcatctacctcccagaattgctgtgaggattaaatgagttaacgcatgataccagctgtcatcatcatcatcgctcttattatcatcgttgctttttattatcacygccacagtctctccctagctcaggggcccagttagccaatgatagctcttcctggtgttgacatcctgtctggatttctaaattctggtgctgggcagggaattcccttgggatgaagggggcattcccttgggatgaattgggacccacccagctgttctgttgcctaccttgcagggtgaatggtgacc

SEQ ID NO: 453396 - DNA, 618 bp, Homo sapiens
ctgtgcagcctcactgtcctcatgtgccaggggctgcatctgcaggcttccctcctgccggcatggagggcttacctccatgctgtacttctccactgtccttcgcagggggtccacagcctgccagcagatcaggatacacaggtcgatcagcagcatgccccccacgatcacaagcagtttctggtccttgatgatctacagagcgggaaggagcagaggggagycgatgtgagagacagcttcccacgcagcaactgggggcccaggtcatagggggaacctgcatcatgaaccccccagccggagagtctcctgcgattccccatcacccacaggataaatccagccaagctcctctgtgtgacattcaaggcctttcacaagcttgaccttatcactccccaaacacatatgtgcattttgttgaagtttggccactcctagtccctggccgagctgtgattttcaccctccaggtctctgtaggtgctagttcttttgtctggaataccctattctttctatttggcaaacttctaataatccttaaacatctcgatcaattgtcacctcctccatgaagtcctctctaactcctgcagcacaactaattac

SEQ ID NO: 453397 - DNA, 605 bp, Homo sapiens
ccaacagccttttttacagacatgaaaaaactgatcgtataaatcatatggaatctcaagggaccctgcatagctaaaacartcttgcaagagaagaaaaaaatcagaagactcacacttccaattttaattgccacaaagctacaataatcaagtcagcatggtgttggcataaggatagacatataaattggtggaatagaattgagaatccagaaatacaagtacacatccatggtcagctgattttcaacatgggttacaagactattcaatggggaaaggatattcttttcaacaagtggtgtccaggggcggtagctcacgcctataatcccagcactttgggaggctgaggtcaggagtttgagaccaggctggccaagagcctatttttttagtctctactaaaaaaacaaaaattagccaggcatggtggtgggtgcctgtaatcccagttactcgggaggctgaggcaggagaattgcttgaacctgggaggaggagtttgcagtgagctgagattgtgccactgtactccagcctgggcgacagagtgaaactccgtctcgaaaaaaccaaaacaaacaagtggtgcttgcaca

SEQ ID NO: 453398 - DNA, 605 bp, Homo sapiens
ccaacagccttttttacagacatgaaaaaactgatcgtataaatcatatggaatctcaagggaccctgcatagctaaaacaatcttgcaagagaagaaaaaartcagaagactcacacttccaattttaattgccacaaagctacaataatcaagtcagcatggtgttggcataaggatagacatataaattggtggaatagaattgagaatccagaaatacaagtacacatccatggtcagctgattttcaacatgggttacaagactattcaatggggaaaggatattcttttcaacaagtggtgtccaggggcggtagctcacgcctataatcccagcactttgggaggctgaggtcaggagtttgagaccaggctggccaagagcctatttttttagtctctactaaaaaaacaaaaattagccaggcatggtggtgggtgcctgtaatcccagttactcgggaggctgaggcaggagaattgcttgaacctgggaggaggagtttgcagtgagctgagattgtgccactgtactccagcctgggcgacagagtgaaactccgtctcgaaaaaaccaaaacaaacaagtggtgcttgcaca

SEQ ID NO: 453399 - DNA, 605 bp, Homo sapiens
ccaacagccttttttacagacatgaaaaaactgatcgtataaatcatatggaatctcaagggaccctgcatagctaaaacaatcttgcaagagaagaaaaaaatcagaagactcacacttccaattttaattgccacaaagctacaataatcaagtcagcatggtgttggcataaggatagacatataaattggtggaatagaattgagaatccagaaatacaagtacacatccatggtcagytgattttcaacatgggttacaagactattcaatggggaaaggatattcttttcaacaagtggtgtccaggggcggtagctcacgcctataatcccagcactttgggaggctgaggtcaggagtttgagaccaggctggccaagagcctatttttttagtctctactaaaaaaacaaaaattagccaggcatggtggtgggtgcctgtaatcccagttactcgggaggctgaggcaggagaattgcttgaacctgggaggaggagtttgcagtgagctgagattgtgccactgtactccagcctgggcgacagagtgaaactccgtctcgaaaaaaccaaaacaaacaagtggtgcttgcaca

SEQ ID NO: 453400 - DNA, 605 bp, Homo sapiens
ccaacagccttttttacagacatgaaaaaactgatcgtataaatcatatggaatctcaagggaccctgcatagctaaaacaatcttgcaagagaagaaaaaaatcagaagactcacacttccaattttaattgccacaaagctacaataatcaagtcagcatggtgttggcataaggatagacatataaattggtggaatagaattgagaatccagaaatacaagtacacatccatggtcagctgattttcaacatgggttacaagactattcaatggggaaaggatattcttttcaacaagtggtgtccaggggcggtagctcacgcctataatcccagcactttgggaggctgaggtcaggagtttgagaccaggctggccaagagcctatttttttagtctctactaaaaaaacaaaaattagccaggcatggtggtgggtgcctgtaatcccagttactcgggaggctgaggcaggagaattgcttgaacctgggaggaggagtttgcagtgagctgagattgtgccactgtactccagcctgggcgacagagtgaaactccgtctygaaaaaaccaaaacaaacaagtggtgcttgcaca

SEQ ID NO: 453401 - DNA, 561 bp, Homo sapiens
tgtgtcaaggtatgttagcccaggagcttgctaagcaggaaggaagttttctaaaatcaggagaagacagctgacataaattttagcygacaggatggcatggctgtgggccctgatggacactggctccgcctgtgtgtgctcatgcagaggttactcacacacactcgatgtgacactctgtgctcacctggatgagaaccagacctgcgtgatggagagaaggacacttggaagtgtccactttctcatgaaatttcatgccactttctcatgaaattctaaccaccactgccacctccttcttctttctcaatgggattcaggcttcctagaattactgcctaaaccagtaattttaaagtaaagacctggagtctggttggggcattgtaaattgtggaaggggggaagtgggggactataagggactggaagggggtgtccacctttgtcttcctaagaggtatgaaatggttaagagtgtggaacctggagacagaattcctaggttctcatcttggctccacttgctagccaggtaaacttgagcaaggaatc

SEQ ID NO: 453402 - DNA, 590 bp, Homo sapiens
agctagtcactggccctaggagcaggtgtatccttagccaaggcagttcctcatggtggagggtaattmgcagtaaggaagtaggctgggaccttcagtagccaatattctcaggagctggggaatgatggtgctttggccctaaagaggccaaaatactgggcaagccccccagttacccctatagataacaacggggcctaccttaaagggctgtgaggattaaagaggtttatacatgttgagtgcctgggacacagtatgtgctgaattagtgcaaggatgacaaggaagaatgtatttggataccaacttcacagtcttctagaccctcaaacacctataattaattttccatgggattctgtggttggtgggtccccaaccagctgcttcagttggattcttgcagctcttgccatctttggtaattcacattctgacattcatatgcacgcaaacacactcacatgcatgcatgcacacacacatccctaaatatgtggtctatgggtattcatattcatcatgtatacagctatgtatcaacgtattccaggagttttcaaacttgtttttcaaaggagatt

SEQ ID NO: 453403 - DNA, 590 bp, Homo sapiens
agctagtcactggccctaggagcaggtgtatccttagccaaggcagttcctcatggtggagggtaattcgcagtaaggaagtaggctgggaccttcagtagccaatattctcaggagctggggaatgatggtgctttggccctaaagaggccaaaatactgggcaagccccccagttacccctatagataacaacggggcctaccttaaagggctgtgasgattaaagaggtttatacatgttgagtgcctgggacacagtatgtgctgaattagtgcaaggatgacaaggaagaatgtatttggataccaacttcacagtcttctagaccctcaaacacctataattaattttccatgggattctgtggttggtgggtccccaaccagctgcttcagttggattcttgcagctcttgccatctttggtaattcacattctgacattcatatgcacgcaaacacactcacatgcatgcatgcacacacacatccctaaatatgtggtctatgggtattcatattcatcatgtatacagctatgtatcaacgtattccaggagttttcaaacttgtttttcaaaggagatt

SEQ ID NO: 453404 - DNA, 569 bp, Homo sapiens
agctgcttcagtaattcatgtttaatgaccttagctgctggacagatgtcttgagaattaaagtctcctgtgaacagagtatcctgagcttctaaactccagtgtaatggaaacacgtcccatttctcccacacacccccaaagtgatgggatttggagcagacatccagcctggggtcctctcctcrggctcacactgcccactctagcctttatgagtggtggtgaccagactggaggccatgggatttatctgacatgtcctgggttggacagtcagtgggcctcacgtggggctgagttctgtgcctcaattcatctgtaggatagaggagatggtgcctggcatggtcaaagagaccctcagagtgctcaggactcgggactccaaaataatggaaaagaaaaggtttatgatgagaaccaacatttactaagctcctgaagtactaaatttcctcggaacaagccctgtgagggagacacgattaggaccatcttatagaagaggaaactgaagatcaatgggttgtgtagcttgtcaaattcatgcaggtgggaaatgccag

SEQ ID NO: 453405 - DNA, 579 bp, Homo sapiens
cttcttaagctgacttctgtataaggctcgtgcttcagtggtcctcgggatgacaatcatgacttygtcaggtaaggctcacctgtgtctgtctaaaacaatgttcagatagatgcttcaagtcatgagtttacgaagacataaactgcacatagaacagctggttattcagtaattcaaccagagtttattgaatgcttgctctgtactaggcattgttgacacaattgtagaagatacagcccctgccctcaaggaactcggactactgaaagtcaaataaacaaaggttatggtagaggatatgatcaaagagcattctgaaatcagtccctagaaggaatttactattctgtgacttattaatagtatgtagtaaggtcctaatctagaatccagcattcttcttagcaaagggctattgaaaagcaaacccttaacccagaaacattttcatcttgttgaggcatcctcctagttatgtttaattttttgtcttgccctcatgtgaagcccatgctgggcttcacagggatgtcattttcttacatcaaggcccttactgaaattacagcaata

SEQ ID NO: 453406 - DNA, 551 bp, Homo sapiens
ttgtggcatgcaaatgcaatacaaagattgtcaggctttgaattttcctctagaattttatatcaaacagccataytttctccccgagttatcaggctctttcattcttgctgttggacattttgagaaatctgacttttagaaaatcagtaatttgtagtatatatatacacacacatatatatatatacacacatatatatatatatacacacacatatatatatatacacacatatatatgtatatatgtatatatatgccttcatccaacatttgtgacacactgacactaagaaaacacttttttagctgaagttcaaatttaactgatcattctctttttatttgttaaatctggcaaacctacacatctcaagactactactacttctgcctgattttatgccctaacacacctcacatttattccaattctctagtactatttcaaattctttcactactagtggtttcctatactttcatactcctgcaaccctatctgatctcaatattccctcagcctagaattcttctcctcactcatt

SEQ ID NO: 453407 - DNA, 388 bp, Homo sapiens
aacaaatagcattggtgggaaaaatgacagtcacattggctgtgttttgtcctgtttggcagatgggtttggagacagcctaaaatccatggcaagaacattagccaggagcctatgttacacaggttttttttaaagtagtgattaaagcacatggaatcggcggsgggggggggggggaacaggctgtgggaagatagtattaacaacgcaatgtaaatatcaaatgtttaaacatgcagccattaataaggtaaatggtttagaaaacaaagagtaaagactgattatttcatggtcacatgcaaaatccatcatacctcattttagaaacagtgtcactgagggaaaagtcctgggtttgttctctggaatgatcaaatcaatt

SEQ ID NO: 453408 - DNA, 649 bp, Homo sapiens
gacagtcacattggctgtgttttgtcctgtttggcagatgggtttggagacagcctaaaatccatggcaagaacattagccaggagcctatgttacacaggttttttttaaagtagtgattaaagcacatggaatcggcggggggggggggggggaacaggctgtgggaagatagtattaacaacgcaatgtaaatatcaaatgtttaaayatgcagccattaataaggtaaatggtttagaaaacaaagagtaaagactgattatttcatggtcacatgcaaaatccatcatacctcattttagaaacagtgtcactgagggaaaagtcctgggtttgttctctggaatgatcaaatcaatttgtctctatcatatgttcctcagatcatccttagttcctaaccagttggattagacacactccccaattcaaacgagccgtgctggaaagtctcctaatcaatatcagcccatcagcagtattatatttgaaattcaataatacgtacagtttgtacccatgaaaaaagtacccatcctaatatgtaaagatgaggggcagagttaatgctctaccaccttgtaactaggtaacgggacaattcctttgatgtctgtgaactttagttccttaatgagaaaattca

SEQ ID NO: 453409 - DNA, 554 bp, Homo sapiens
tgattttattttattctttatggctgcatggtattctatggtatgtatgtatcacattttctatatccaatcaaccattgatgaatacctagaaggattccatgtctttaccatcttcaatagtgtcttaatgctcatgcaagtacatgtgtcttatggtagaacaatttcatttcctttggacatacacccaataatggaattactaggtcaaatggcagctctgttttagctcttatgagtaattaccaaacttctttccacagtggctgaactaattcacattcccaccagcagtgtacaagcattctctttaatccacaaccttttcagcattttttgacttatrataatagccattctgactggtgtgagatggtatattatcgtgattttgatttgtatttctctgatgattagtgatgatgagcatttttatatgtttgttggccacttatatatcttttttaatgacatgtctgttcatgtcatttgaccatttttaatggggttatttgttttctgtttgttgattttttttaagttccttatag

SEQ ID NO: 453410 - DNA, 576 bp, Homo sapiens
tagcaaggttgaataacttaccagaggtcacacagctggtgaactaggcattaaatgttcttattaaaaaaggtaaatgtttatctaggtaaatatatgtataatatatatatttacatgtataaagtggtagggtgagtgtatatatattatatctatatctataytatatatatctatatctattatatatctataatatatccattatatctatcatatatatctatatctatatctataatatatatatctataatatatattctctctctgtatatatatacatatatatgtgtgtgtatatatatagtgtttacaggaaaatggtgaaactttgaagacaaggagatctgggttcagaacacaactcaacagttcataaatcatgagacattcaatatgttatagtgaaaaacaaaatacaaactgaatcacattaattctctgcttgggactatgttctggttcctgattaccataggtcccttcatgacacaccttctctgcctccccaacatcatctctcatcacccttctctttgcttcctgtattagatcacacaccaccaccta

SEQ ID NO: 453411 - DNA, 586 bp, Homo sapiens
catatgcaaatcaatgtcatttgctgcatatacagaatttttttaaatgtaataatctcaatggacatgaaaaaggcctcagtgaaattccatatccattcctgaaaataataagagttgtctgtgacagacccaccaccaacatcatactgaatgagcaaaagctggaaaaaccccccttgagaaatggaaaataaccaccatgcccattctctccagtcctaatcaacatagtactaaaagtccttgccaggtcaatcaggcaagagaaagaaatgaaaagcataaaaatagagggggaaaaaaaggccaattatctctctttgctgacaagatgatcctatacctagaaaaccctaaagactctgccaaaatgttcctggaacttayaaaaggcttagtaaagtttcaggatacaaaatcaatgttaaaaaattggaatttctgtacaacaaaaacgttcaaactgagagccaagtgaagaacacaattcaatttacaacagccacagaaaaaaataaaatacataggaatacatctaaccaaggaggtgaatgatctctacaaaaagagctacaaaacactg

SEQ ID NO: 453412 - DNA, 586 bp, Homo sapiens
catatgcaaatcaatgtcatttgctgcatatacagaatttttttaaatgtaataatctcaatggacatgaaaaaggcctcagtgaaattccatatccattcctgaaaataataagagttgtctgtgacagacccaccaccaacatcatactgaatgagcaaaagctggaaaaaccccccttgagaaatggaaaataaccaccatgcccattctctccagtcctaatcaacatagtactaaaagtccttgccaggtcaatcaggcaagagaaagaaatgaaaagcataaaaatagagggggaaaaaaaggccaattatctctctttgctgacaagatgatcctatacctagaaaaccctaaagactctgccaaaatgttcctggaacttataaaaggcttagtaaagtttcaggatacaaaatcaatgttaaaaaattggaatttctgtacaacaaaaacgttcaarctgagagccaagtgaagaacacaattcaatttacaacagccacagaaaaaaataaaatacataggaatacatctaaccaaggaggtgaatgatctctacaaaaagagctacaaaacactg

SEQ ID NO: 453413 - DNA, 589 bp, Homo sapiens
taagtacaagtcttaaaaatacaacaactggttcagtgtaaactatcaatctttgtcatgtacttgtgcatacaataagggtcagataagtgctaaggacagtgtatatagtaaaaatttacaggaagcaaacactacttgaaggcagatagatctggttagaatcttcgtagaataggtccatcttagaaataaacaatgagcttcagataaacagagggaagacagggagtgattgtcaagtagctgaaacaattaaagacttgaagatcttatttcctgggaccaaaaaaagaaatttaactgcattgggcagaagattttatgagtaatatgargtaatgttaaaaatgtaggtgagaagaatgacgcctgctttgctcagcattttatttctagctcctagctagaatgcctgacatttcatatgtgattaataaatatgttttagtatgaatgattgtttacattgttctaaattggaaaaggccacaggaactttggatcagcaaaataagccaaacgatattttagaaatattattagaatagtgataagaggcactggagtaagaaagaacaggtatgaa

SEQ ID NO: 453414 - DNA, 612 bp, Homo sapiens
ctgttattgtctctatcttcattgatcagaggtttccctaagggattttaactcactagtacttgatgaatccttcagaatgactgagtgggtttccacagccattccagatagtgctatccaacaagtcttggtgcagaaagtgaatgacaaaaactatactgaagttatacctgggtgtagcttgttgtcatagcaatggctggagtgaaaaagtgggtcaagaagatgtaaagtgagacataaatatgtgtaatacagagtggcattgataattgatgtttgaaacttgaactttcaaaaacattcactatgtatttattacatacatwtgtatgtataatgtcttccacttactaggcacgttggttgatttaggatacaattttgaagaaaattgttacccttgacatcataagtcttacaatatagtatgatctgaatacgttcagttcaaacagttcacaagacttgggaaattttaaaaattccatttctagttgtgttcatatctagagaaattgtaagccttttgttataagagcttaaatcatttgggagttagaaatgcaaattcctgggctccacctcagatctactaaagaagaactt

SEQ ID NO: 453415 - DNA, 601 bp, Homo sapiens
tgctcattaagtggtctctttggatattaatgtggatgtyaaaatgtgggtttatttgatgagtgtcctaacacataagtgatttctaaagcatttcaaaagaaaataaaaaatggttgggaatcagcttgttttattagcttaactgtactggcctgggaagaaaaatctatccttaaagtgtcatacttgacaagaaaaggtaaattcagagagagatttcaaaggtgcagaaatgatactaagggctgatattgctcatctgacatagatataaaatgagttatatttatcaaggcttttatagaaggaatgaaagatgagtatagatccctacactagaatcaagcagtgaaaggttgttatttgcttaaatgccatgtttcacacattggaagattagtactcattttgaagggcattatccattagtctcctacagacagactagtctcctctggtctctgaccagagtttaagaatgaacctttccagtggtcagaaaagtgtatgtttttaaaaaatggttttggaaccaactctttacaatttcttttttctatttgactcataccttgacctggaaatctcaaactcccaa

SEQ ID NO: 453416 - DNA, 524 bp, Homo sapiens
aacttgtacactttaacctgttcctttatgactgaytgcagtcatagctaactgtttccacaggagcaaatggcaaaatgtattgttggaagtaggctagacatattcactatattattagtccttcattctctgttacttcttccatgtttggtgtctactcttttcggctaaatacagagttcattctgttggcacatgggttagtgcatttgtgctgctataagaaaatacctgagtgggtaatttataaacaacaggtttttttttttctctctctctctcagagttttggaggctggaaagtccaagatcaaggtgccggcaggtttgtctgatgagggctgccctctgctcccaagatggtaccttgatgctgcaacttccagaggggaggaagaatgtgtcctcacatggcaggagccagaaggataagcaagctgtgcaaagccttttttataagggccttaatcctgttcaagggggaggagcacttatgatctaatcgcctcctcaaggtccca

SEQ ID NO: 453417 - DNA, 565 bp, Homo sapiens
gtcatagctaactgtttccacaggagcaaatggcaaaatgtattgttggaagtaggctagacatattcactatattattagtccttcattctctgttacttcttccatgtttggtgtctactcttttcggctaaatacagagttcattctgttggcacatgggttagtgcatttgtgctgctataagaaaatacctgagtgggtaatttataaacaacaggtttttttttttctctctctctctcagagttttggaggctggaaagtccaagatcaaggtgccggcaggtttgtctgatgagggctgccctctgctcccaagatggtaccttgatgctgcaacttccagaggggaggaagamtgtgtcctcacatggcaggagccagaaggataagcaagctgtgcaaagccttttttataagggccttaatcctgttcaagggggaggagcacttatgatctaatcgcctcctcaaggtcccacctcttaatgcctcacactggccattacatttcaacacctgaattttggaggggacatattcaaaccatagcacattcctc

SEQ ID NO: 453418 - DNA, 586 bp, Homo sapiens
gttcagtaagctgtagtagggggatggctctgatgtcacataataaaaacatggctaggctgggcackgtggctcacgcctgtaatcccagcactttgggaggctgaggcgagtggatcacgaagtcaggagatcgagaacatcctggttaacctggtgaaaccccatctgtactaaaaatacaaaaaattagccaggcatggtggcaggcgcctgtagtcccagctactcgggaggctgaggcaggagaatggcatgaatccaggaggtggagcttgcagtgagccgagatcttgccattgcactccagcctggacaacagagcaagactctgtcacaaacaaaaaaacaaacaacccaaccaaccaaacaaccaatcaaccaaacaaaaaaacatggctgcctgggagctgtggatagagcagtgtctatcacaggtggctgtaggtatggtggagagattccttgaagaactcagaagattctttagttccagggtatagtagatgactccccagattcccatcctctggttgctcaaccaaacactaatccaggtactgctgagaaggcatttaagccaatt

SEQ ID NO: 453419 - DNA, 597 bp, Homo sapiens
tacaacatggactgctacacagccataaaaatgaacaaaatcatgtcctttgcagcaacacggatgcagctggaggccattatcctgagtgaattaatgcagaaacagaaaaccaaataccacatgttctcacttacgggtgggagctaagcattggcataaagcatgagcataaagatggaaacaatagatactgggaactactagaggggagggcaagggctgaaacactacctattgggcattatgctcactacctattcccgtgggattatttgtacctcaaaccgcagcatcacacaatatacccaggttacaaacctgcacatgtaccctctgaatctaaaakaaatattgaaattatataaaacaagaggatgctactgaggattacacataaagaatctgccccaatcccaaagaatacggcagggtttgaatgtgagtcggacaccagtgcctgtatctttttcaccacatctcaaggttaatatccatttcactgaatatggatcagaaacgactttagaacacaggcagacatagatctccagtgtgtggaagacaaaacttacttttgtctcctgggacaatttg

SEQ ID NO: 453420 - DNA, 511 bp, Homo sapiens
gcaaataatccataggctcccttgtatcattctcaagtatgcattaaaactggttttgattatctattttttatttacaaaacttgtttttctcaaccatattgcaagacaaggtctcttacacatttccatcagctttttttaaaaaaaccttttcttttctgggttatgttaattatcttagttattcaccaaaatacctccaaattgcctaagtgcattgtagtttgagtacatacttacatgttcatttaacaaataatgttcaagtgcctacttcgtgctatgtatagtcctgagtttatgcatttmaattagacattaatggtaaatatcaagaaaagttgtggtgaagatttaaatgttaataaaagagatgcaatatatcaggtcatacatagctgagggtcctggagggaagcattttcactgggcagagactttcttgggaaatacacaagggaaaatcaatcacattatagaataaaaattggaaaatgactaatttgga

SEQ ID NO: 453421 - DNA, 567 bp, Homo sapiens
tgcaggtccttagcccttgtggctgctgctcctggtgttccgtgttcaggcctgtgtctttttttaagatgattctacctttccccagggccatgcaaaacagccaaagaggaaagccaccaccaactgggawcacctgctttggacctttatattagcacgaacaaacttccagtgaattcctgtgatcatataatcttaaatttgttttgctgtcattgtaacaatagtttagtctaccctaactagcatattttcttatgctactctatagttcaaattctgtctatatgataaatacttccagaagaaaagatggagaacacggagattcatatgtatattttgtaaagctaatcactagaaaatagttgtaaaaaataattccacatgtactaccagagccataaaacacagaagagggattataacagagaatgtggatttagggttaatgtctggggtagagaaacagctgcagaggccagcagatccatagcagtctttctggattactaggaagagtggacagctggtgctttacacctctccacagaaatctgtgga

SEQ ID NO: 453422 - DNA, 567 bp, Homo sapiens
tgcaggtccttagcccttgtggctgctgctcctggtgttccgtgttcaggcctgtgtctttttttaagatgattctacctttccccagggccatgcaaaacagccaaagaggaaagccaccaccaactgggatcacctgctttggacctttatattagcacgaacaaacttccagtgaattcctgtgatcatataatcttaaatttgttttgctgtcattgtaacaatagtttagtctaccctaactagcatattttcttatgctactctatagttcaaattctgtctatatgataaatacttccagaagaaaagatggagaacacggagattcatatgtatattttgtaaagctaatcactagaaaatagttgtaaaaaataattccacatgtactaccagagccataaaacacagaagagggattataacagagaatgtggatttagggttaatgtctggggtrgagaaacagctgcagaggccagcagatccatagcagtctttctggattactaggaagagtggacagctggtgctttacacctctccacagaaatctgtgga

SEQ ID NO: 453423 - DNA, 551 bp, Homo sapiens
tctttgctcatatgtcaccttttcagcaagaccttcagggatcacactatttaaaactgtctacccttaccatctgccccctcctccaacatattctaatccatgatgctggcttttattttttttaaataaaatattagttaacagcatctgacatactatatagttcactcatttacctgtttattttctgcctgctatagaatgtaaactccacggggcagagattttagtcagctttgttctctgctacagattcagtaacttgaaaagtgcctggcatagataaagtattcaatacacatttgttgaacaaatgagtcaatgaatgaactgatccctaattgcttctgttctttcagtcactagtcctcaattcaaactctcyggtgagtgacatctgttggttgagtccaggtcacatgtttatgtcccaacttcaagaaagctggaaatattaaaatattattttctataatgatatttgtttttgcttcatctcttacccgggctaataccaacatttcttaaccatcctctctgtcacaatt

SEQ ID NO: 453424 - DNA, 582 bp, Homo sapiens
ctcactgctctgactctatggtacctactagaaccacctgtttctgattgtctctttaggctggtgactaacgcctccaaaaagattgtctcagtctgtttcrcactgctataacaaaataccacagacgggtcagttataatgaacagaaacttgttttcttatagttctggaggttgagaagtccaagatcaaggtgccagcatcttgtgagggctttgttgctgcatcctcccatggtggaaggcagaagggcaaaggggccaaaggagactgaacttgccctttcataaaagcattaatctcacccatgagaaaggtgccttcatggcctaatcacctcccaaaggtcccacctcctaaaactgttaccatggcagttacatttcaacgtaagttttggagggaatgaacattcaaacaagagtcatgactgcttatagatttaacaagaatagcagatagtggtatgcctgccaaaatgcctcctctctattaagacagcagcactcaatcaaggcacacattctggctgaacccagattcagcctcaaaatctaactcagcacatcaagcagttct

SEQ ID NO: 453425 - DNA, 598 bp, Homo sapiens
cctattttctcatcataagcactcagtgtatgttaacaactactattctgttgtttcatacattgacttactactcattaagtgtattttagtccacatttcaataactgagaatcttcaggatttatccaacattctcagctttaaagttacataattctatgttgatcaagaaaatagacaatgaaattaattaatgtgtaggcaatatgtagaactttttaagcaatgaagatatttgccaaaataaaccaagtttttaaggcttctttcgtagtatattctatacttcaactygtaggacaattttaaaaaatctagtatgaacaaaaaggcattatacctaattattaattttattttttgaatagcctcaactaatacaatgcataaatcttaagtgttcagtacaatgacttttgataattttttgatcccctgtaactaccatcaaaaggaagatatagagcatttccattaccgcaagaagtttcctcctgcctccaccaagctgatcttaacagccactttttagagctaatcattgactggcttatttcaacaaagattacttttgactgttttgcatttgatataa

SEQ ID NO: 453426 - DNA, 582 bp, Homo sapiens
atatatgtcatatttttaaaaggtattttatatttactgacatatatacggtttatattgctgctgcttcttatcccagaactagaattccatgtaaaattattttctttaacttgrgaattataatttagcatttattaaggtgctggtctgctgaagacaaattatctgagaatttgaaattctgaaaatatcttccctttaccttcagttattaagcatgtttttactggagatagattctaggttcatttccccccatacttcaaatatagcttcccgtattggaggcctctgccctccattatttacattgaaaaggcaactgttatttgtagccctgcttccatgtttatattgtacctgtattctcttgctgtttttaacagttgctgtttgctgctcattttcagtcctctctcctttgaagaaagttttgcccatatcaataaggataagaaaggaaagataagattgaattaactatcattctctaagtgataattaactaccacagcagtaaacgatcatactctaaactctcccaattatagtggggactttgcacctatgtaatgacag

SEQ ID NO: 453427 - DNA, 582 bp, Homo sapiens
atatatgtcatatttttaaaaggtattttatatttactgacatatatacggtttatattgctgctgcttcttatcccagaactagaattccatgtaaaattattttctttaacttgggaattataatttagcatttattaaggtgctggtctgctgaagacaaattatctgagaatttgaaattctgaaaatatcttccctttaccttcagttattaagcatgtttttactggagatagattctaggttcatttccccccatacttcaaatatagcttcccrtattggaggcctctgccctccattatttacattgaaaaggcaactgttatttgtagccctgcttccatgtttatattgtacctgtattctcttgctgtttttaacagttgctgtttgctgctcattttcagtcctctctcctttgaagaaagttttgcccatatcaataaggataagaaaggaaagataagattgaattaactatcattctctaagtgataattaactaccacagcagtaaacgatcatactctaaactctcccaattatagtggggactttgcacctatgtaatgacag

SEQ ID NO: 453428 - DNA, 582 bp, Homo sapiens
atatatgtcatatttttaaaaggtattttatatttactgacatatatacggtttatattgctgctgcttcttatcccagaactagaattccatgtaaaattattttctttaacttgggaattataatttagcatttattaaggtgctggtctgctgaagacaaattatctgagaatttgaaattctgaaaatatcttccctttaccttcagttattaagcatgtttttactggagatagattctaggttcatttccccccatacttcaaatatagcttcccgtattggaggcctctgccctccattatttacattgaaaaggcaactgttatttgtagccctgcttccatgtttatattgtacctgtattctctkgctgtttttaacagttgctgtttgctgctcattttcagtcctctctcctttgaagaaagttttgcccatatcaataaggataagaaaggaaagataagattgaattaactatcattctctaagtgataattaactaccacagcagtaaacgatcatactctaaactctcccaattatagtggggactttgcacctatgtaatgacag

SEQ ID NO: 453429 - DNA, 582 bp, Homo sapiens
atatatgtcatatttttaaaaggtattttatatttactgacatatatacggtttatattgctgctgcttcttatcccagaactagaattccatgtaaaattattttctttaacttgggaattataatttagcatttattaaggtgctggtctgctgaagacaaattatctgagaatttgaaattctgaaaatatcttccctttaccttcagttattaagcatgtttttactggagatagattctaggttcatttccccccatacttcaaatatagcttcccgtattggaggcctctgccctccattatttacattgaaaaggcaactgttatttgtagccctgcttccatgtttatattgtacctgtattctcttgctgtttttaacagttgctgtttgctgctcattttcagtcctctctcctttgaagaaagttttgcccatatcaataaggataagaaaggaaagataagattgaattaactatcattctctaagtgataattaactaccacagcartaaacgatcatactctaaactctcccaattatagtggggactttgcacctatgtaatgacag

SEQ ID NO: 453430 - DNA, 338 bp, Homo sapiens
aggaggaagtagacaagaattagggtccttagcacattttaaatatgtcagcagccatcccctacctatggttcagcctgggaaagaaagaaaccaagacatttaaaaagagtttatgagaaatcttttcatcatccctcttggagattgtcttcaaatgggtcttctttaaatctgtgataagacaagatgcttttttgtayttaatgtaggcatgactgaaattaagagcaggagaagtacgtccagtttcaagtatacaggaaggcaacaggatcaggcttttagtacatgcttaaaagcgttgtctttctatgagagttttcatgtaagtagaa

SEQ ID NO: 453431 - DNA, 338 bp, Homo sapiens
aggaggaagtagacaagaattagggtccttagcacattttaaatatgtcagcagccatcccctacctatggttcagcctgggaaagaaagaaaccaagacatttaaaaagagtttatgagaaatcttttcatcatccctcttggagattgtcttcaaatgggtcttctttaaatctgtgataagacaagatgcttttttgtacttaatgtaggcatgactgaaattaagagcaggagaagtacgtccrgtttcaagtatacaggaaggcaacaggatcaggcttttagtacatgcttaaaagcgttgtctttctatgagagttttcatgtaagtagaa

SEQ ID NO: 453432 - DNA, 584 bp, Homo sapiens
tgtcagtagtacacacttcccattgaaaaaaatggcttgaaactagatttttggtaaaaacagcagaaatggaaaagtgtactgtacatgtgtaaatttaaaattgtccaggtgctggtgattatcaattaatttttgcttagatatgcaattatagtccttccaattagagttaacattaaaatattataatyctgccttctatgtatattatagaagctggttttataaacctatataaatgggaaattattactaaaacaaaagtaaataaaacgaagataaaataattttgggaaattcttttgagtttagaatttcaagtatatagaaaacggacagcaaaagctggaaaaatatttcagaaaaagataaaggtacttttagctgacctttatcttaattaaatatgattcattgctataaagagagaattgaacatttttaagtctccttcaaagtagaaatttgtaaatcaatatttagtaaggttattttaaaagtttaaaaattctgatctgtattatgaacctcaaatacctgagacaggtcccagtcaatttagaaagtttattttgctgagg

SEQ ID NO: 453433 - DNA, 622 bp, Homo sapiens
tctcaaaattggctctcacactctcacatgcccacttcttccatgatagtcctaggtcttgaggagttttaatttctggccctgtgtctcataaacacagtttattgtgattggtatcttctaccaggtctgaaaatgaggctgtaactgtggtcagtgtttaagatttagcaggatttagtgtccttttgagacccaggggtcaaagccctgtaacttaatgacacaaaaactttaaaagcacatataggaagttatccagakataataaccttaatttattatttttttaatctacagtttttttaagcaaaccaaacttactaataataacacaggaattttttcaataaataataagatttgtttattaggtcaattactcaaaggaaaacaaaagacctactgcagtgcaaccgctcttccctatggggaatattatgttggaaagaaatatgtcctttggacctctaagataaatgtttttctttttgttttttaatcagttagaacccaaaggaagaaaaaaaagaaaagaaaaaaatttttacaggagctgaaaatgatctgaaggatacagttattttttcaggcctttgaaaaagggagagaaagctgaaaa

SEQ ID NO: 453434 - DNA, 622 bp, Homo sapiens
tctcaaaattggctctcacactctcacatgcccacttcttccatgatagtcctaggtcttgaggagttttaatttctggccctgtgtctcataaacacagtttattgtgattggtatcttctaccaggtctgaaaatgaggctgtaactgtggtcagtgtttaagatttagcaggatttagtgtccttttgagacccaggggtcaaagccctgtaacttaatgacacaaaaactttaaaagcacatataggaagttatccagagataataaccttaatttattatttttttaatctacagtttttttaagcaaaccaaacttactaataataacacaggaattttttcaataaataataagatttgtttattaggtcaattactcaaaggaaaacaaaagacctactgcagtgcraccgctcttccctatggggaatattatgttggaaagaaatatgtcctttggacctctaagataaatgtttttctttttgttttttaatcagttagaacccaaaggaagaaaaaaaagaaaagaaaaaaatttttacaggagctgaaaatgatctgaaggatacagttattttttcaggcctttgaaaaagggagagaaagctgaaaa

SEQ ID NO: 453435 - DNA, 622 bp, Homo sapiens
tctcaaaattggctctcacactctcacatgcccacttcttccatgatagtcctaggtcttgaggagttttaatttctggccctgtgtctcataaacacagtttattgtgattggtatcttctaccaggtctgaaaatgaggctgtaactgtggtcagtgtttaagatttagcaggatttagtgtccttttgagacccaggggtcaaagccctgtaacttaatgacacaaaaactttaaaagcacatataggaagttatccagagataataaccttaatttattatttttttaatctacagtttttttaagcaaaccaaacttactaataataacacaggaattttttcaataaataataagatttgtttattaggtcaattactcaaaggaaaacaaaagacctactgcagtgcaaccgctcttccctatggggaatattatgttggaaagaaatatgtcctttggacctctaagataaatgtttttctttttkttttttaatcagttagaacccaaaggaagaaaaaaaagaaaagaaaaaaatttttacaggagctgaaaatgatctgaaggatacagttattttttcaggcctttgaaaaagggagagaaagctgaaaa

SEQ ID NO: 453436 - DNA, 605 bp, Homo sapiens
tttgactttctctctttctattggggtgccttttatttctttttcttgcctgattgctctggctaagagttccagtacaattttgaataggagtaatgagagtgggcattcttgtcttgttctggttctcaaagggaatgcttccagcttttgcccattcagtataattttgggtgtgggtctgtcatagatggttggtattattttgaggtatgtacctttgattcttggtttgttgagggtttttaacataaagggatattgaattttatcaaaaacattttctgcgtctattgagatgactatttggtttttggctttagtcctgtttatgtgatgaatcacatatattattttgtgtatgttgagccaactttatagcccaggaataaagcatacttgctcatgatggattatgttttttatgtactaatggattcaatttgctgtattttgttgaggatttttgcatctatgttaatcagaaaattggtctgaagttttcttctttcattgtgtctctgccaagatttggtatcagaatgatgctgaactcatakaatgaattagggtgaagtccctcctctgttatgttttgaaacagt

SEQ ID NO: 453437 - DNA, 563 bp, Homo sapiens
cctttgcaacccctgccccctattttctgcgtggtggatgaaaaactgaaagtacttatggttggtcccctcccataactcaatcaggctggccatgggccaagtctttatttgcataggagtataactttgtaacttcacttcagcctctggttggtcactttctgcaaccaatgagactgatcrtgggccgctacctcatttacacagggtgtacatcaggtaaccaacgggaaacttctagagcgtatttaaaccccaaaaaattctgtaaccaggctcttgagcccctatgctcaggcccattcccacccagtggagtgtactttcgttttcagtaaatctctgcttctgttgcttcatgctttccatgatttgtttgtgtgttttctccgattctttgttcaagatgccaagaacctggacaccctccaccagtaacagaagagctgagtatagcatttccaggttgatcagttttcaaggtcttcattttgaaagggcttgttgaagtaaaaccatccaaagtgtttcctctggagccacctggaattgatttttca

SEQ ID NO: 453438 - DNA, 635 bp, Homo sapiens
gaattatcattcatacaaataagaagatagattgttttatccatgggcaacatcatgctaagttttcttagatatgcaaaattctctcagagttctgagkggggcagagtttttgggtcaattttgatttcaaattgctcctttttttctagactattaatatttaaggaaggcctaactactacattggcaaagctaggaaacacctctcttcattattggtactcctgctggtgccacaaaggaagcaacagtttgttaatcaattcaacaaatctttatcaaataccaacaatgaacaaaacaaagagagaggtagttatgtcaatatagatcatagaggacttgaaagcagagggacaaacagaaaataaaaaataataatgtatatccaacacaacacaacaataagcatattacattttaatggaatactcccataaatttaaagacagagattttcagaattattcaaatagtagaaagcacctttaatctgtctacaagggacatactttaaatagaaagttatgggaaagttgaaaaattggatgtaaaggaccagatggattcacagctgaattctaccagaggtacaaggaggaactggtaccattccttctgaaactattcca

SEQ ID NO: 453439 - DNA, 606 bp, Homo sapiens
accttctttgccaggcattttcttttattccaaaagaaatctttcatctgactaattagtgtttaaaaattattgcctcccttgtacccctcctaaaacccaaggagctaaatatctacagtgaaccttagaatcagtacccattccaaagacaggatgacctgtatatattctgaataattctgcacattaaatgtggaattgtgtcaytttgtttcatttcaattcacttctttttatttcgttttttaatctgtctctacctgatcaaaataaatcaatatccaggcaatgggttaaatttagaagtttatgcttgaaaaaatattcaatatgtcagtaggtgagttttcttgcctgagcttgaaacaatgctgtgaactcatccttccatcttttctaaatatcttattgcaaaggaactcttgccaaaacacacaaccaccaactttcctctaattagcccttaaggaattgtttttaaagtcttaattttcaggaaacagatgtaaacctaacttctaattatgaaagacataggcttctttttccatttttttttctttttatttcatttgctgacaagtgagacaacccactgtgttt

SEQ ID NO: 453440 - DNA, 506 bp, Homo sapiens
acctttaattaatgatggaattactttacacagaactccccattcaggcaaaaactatggcttaatgaagttccatgacctctaacgaataaagataagatagcagacactctagtatggacatatacaaggcattgcaatgctgatataaattttagtttgcctcgggaaagaatgagaaagatatttttggaagactattttggagcygtgtggatgaatcacacatacgtcacatctaccagaaaaagtcaagctgcagaagaactcatacaattggatactgtttatatgatgtttaatcaatatattgattacaaatacccaaatatgtagtaagtgtataaaaagtaacaagagaataataaacaccaaaattagtataatagtcacttctataaaaggtggaggtaattggtgcaaggaacttaattgaattaagtttttttttttttccccctgaactggttttggatacacaggtatttgttgtgttcatagctata

SEQ ID NO: 453441 - DNA, 537 bp, Homo sapiens
tcttgttcatgtcagttggcagcagtaaatcagtaccattgcttactcctttgatggggaacagagatttctgctttaagagagctagaaatagaattatgtaaataccgttagcttacagcacttctcattatcctccatactaggattggcatacatctcaaattctacattaatttccccccacaatttatctatatatctatatttccttgaaaagtttttgcaaacataggagatatatatatatgtacatatatgtgtgtgtatatatatatgtgtgtgtgtrtatatatgaatcagaaacatttagaaaatgtcaaattagaaaataatatgctaaaggagagctttagttgtggcatttacaaggcttttcttttaaatcaatattagtacctcaatcataggcaatagaaggtgctattatttttatcttaaattgcccataaacgaaggactttcaaatcttagaacagtattgcacgaatgtgttttttctttattaattttattgggggtgtaattggaataaaa

SEQ ID NO: 453442 - DNA, 510 bp, Homo sapiens
ccagctagaaaattaagagaccatcaggaaaaaagtcgcaaaaaagagtcctcctagacttgtaggaggtctcaaagactacccatgaaaaggggactgggctgtaattaaattaaattatggaacagtttatgctccagatgttgtcaaaaatattagaggaatcagctaacaattagtaaaggctaagaactggtgtaatactaataaakgcagatcagccagacgcttaacagggagatcagggagagaaacaaacaatgcaaacctagctaacatcacaggaatatggggagggttggtcaggaatattgtatacatgcccaaggttgccccatatgagtttctgttacaagctacatgcagaggggaaaatcaacttctctgaaatagtctaaacaaatcattaaacaagtaaacaaggaagcaaagaacaaaccctggggatggaggggaaggaattagaatccagagtttctatgatacactatgaaaaaatgtcccagtttc

SEQ ID NO: 453443 - DNA, 576 bp, Homo sapiens
aaagaaaacatgaaaatggtacaaaagatttgcaaattctatatctgataaggagctcaataaaaggatgagctaactgaaaatgaacatttctccaaaaaagatatacataggaaaggatacttgaagcattagccatttagaaaacacgaatcaaaaccacaataagataccacttccagcctctagaaatgctatagtaaaaaagacaaataatcacaaatttgcgaggatgtgaagaaattggaacactcatatattgytggagggaatgtaaaatgttgcaaccattttggaaaacaatttgggagtgcttcaaaacattaaacatagccttgtcagacgacccagaaattttcttctatttatctattcaagaaaaataaaaacaaatccataaaaaaacttgcatacaaatgtgcacactagaagtattcataacagcaaaaatggggaaataatccaaatgtacatcaactgatgaaggaataaataaaacatgatatatccatacaatggaatattattcagcaataaaaggaatgaattactgacacataatacaatatggatgaa

SEQ ID NO: 453444 - DNA, 500 bp, Homo sapiens
ttacaagcttactttgattttatcctctttaatgtttctgttgagatatcaccacattttgtaataacccaatttagctacaggaggaaatagaagatgcaaagtgtttgaataactgacatgctaatcattcaactcagatggattgtaagttgcctatgtagctgaagctcagtctctctatatactgcaaagaaaagtttatatgsttctaaaaactggggggtaaaacttagactgtctacaatatataactttaaagaattataccataaataagtgattcaaaataaaacatgcaatcatttctccctgagtccaaaatcttaacaccttgaggaaagatttgtgaaccagcaatgcatccagaatgataataagctatttgagttttacggccagcacttttcctgcaatttgccaaactgctgtattcagaaggacatcatgagtttattttaaattgatatattcctacatcttctgttctcctaggttct

SEQ ID NO: 453445 - DNA, 500 bp, Homo sapiens
ttacaagcttactttgattttatcctctttaatgtttctgttgagatatcaccacattttgtaataacccaatttagctacaggaggaaatagaagatgcaaagtgtttgaataactgacatgctaatcattcaactcagatggattgtaagttgcctatgtagctgaagctcagtctctctatatactgcaaagaaaagtttatatggttctaaaaactggggggtaaaacttagactgtctacaatatataactttaaagaattataccataaataagtgattcaaaataaaacaygcaatcatttctccctgagtccaaaatcttaacaccttgaggaaagatttgtgaaccagcaatgcatccagaatgataataagctatttgagttttacggccagcacttttcctgcaatttgccaaactgctgtattcagaaggacatcatgagtttattttaaattgatatattcctacatcttctgttctcctaggttct

SEQ ID NO: 453446 - DNA, 513 bp, Homo sapiens
ttggttttcattttacctcctcccagatagaagactttgagggatcgagaacttttggtgcttagcatgatgtttcaagtattcatgaaatatttcgggaatggaactgatagttactgaaaagagatgtcagcggaaggggagtaagctgaagtcaaaggaccaaggctctaattctacccctgccaaaacccaaggtaccttagtcaagctccctaaggcckgtaattcaacttctgtgacatgaagagtccttttcaaactctaggattatattatttgtgggtggaggtggtcatgtgtgaaacatctgccaagactataaatttcaactcacattcatgatgttagaaaactgaagtccatcctatatatttactctcaaaaatatacacaaaaatatgaaaaatgaaagcaacactctgaaaccaaattccatggagttaccaggtttccaattacatgtcattttttttaaaaaaatcttgaagtcagtttatttattcagctaaa

SEQ ID NO: 453447 - DNA, 513 bp, Homo sapiens
ttggttttcattttacctcctcccagatagaagactttgagggatcgagaacttttggtgcttagcatgatgtttcaagtattcatgaaatatttcgggaatggaactgatagttactgaaaagagatgtcagcggaaggggagtaagctgaagtcaaaggaccaaggctctaattctacccctgccaaaacccaaggtaccttagtcaagctccctaaggcctgtaattcaacttctgtgacatgaagagtccttttcaaactctaggattatattatttgtgggtggaggtggtcatgtgtgaaacatctgccaagactataaatttcaactcacattcatgatgttagaaaactgaagtccatcctatatatttactctcaaaaatatacacaaaaatatgaaaaatgaaagcaacactctgaaaccaaattccatggagttaycaggtttccaattacatgtcattttttttaaaaaaatcttgaagtcagtttatttattcagctaaa

SEQ ID NO: 453448 - DNA, 513 bp, Homo sapiens
ttggttttcattttacctcctcccagatagaagactttgagggatcgagaacttttggtgcttagcatgatgtttcaagtattcatgaaatatttcgggaatggaactgatagttactgaaaagagatgtcagcggaaggggagtaagctgaagtcaaaggaccaaggctctaattctacccctgccaaaacccaaggtaccttagtcaagctccctaaggcctgtaattcaacttctgtgacatgaagagtccttttcaaactctaggattatattatttgtgggtggaggtggtcatgtgtgaaacatctgccaagactataaatttcaactcacattcatgatgttagaaaactgaagtccatcctatatatttactctcaaaaatatacacaaaaatatgaaaaatgaaagcaacactctgaaaccaaattccatggagttaccaggtttccaattacatgtcatttttttwaaaaaaatcttgaagtcagtttatttattcagctaaa

SEQ ID NO: 453449 - DNA, 554 bp, Homo sapiens
catggaacagataaccacaagctctctaatgatctgacatggttcaaggccatattttagaatatcgtgcacataaaacaggctctgtcatctttacaatcaagatttgatgaatattggagacaaaagctaaaaacatccagtaagtatttggaaggtacacatttagcattgagagttgaatgaggacttgtgaatgaagacactggagctggattggggttggctgcccttaggaaagccaagaagcttgtggagacatagttacctgcccraagataatgccacatttcaataggaaaatggctttgcatattttcccatgcacaaatggacaacggaacccccgaagttattgcctgtgtgactccagtgattttaaccttcaaaaatttaaggcaggtagagatagagaaccatggagtgcaaagggaaatagaaatgttttaatgcacacgggacacaaaggagttttactgtacctggatttaactttaacaaatgattttttgctttctccaaaatgacactggtcatttggcaagatggaatgc

SEQ ID NO: 453450 - DNA, 505 bp, Homo sapiens
tacacatagcattagaaatcaaaatagtggttccttttgagtaagaaagggggagtcatgtctgggagggagcataggtggatttccccaaatacttggaacatttctrtttttcgggatggatgttacatatgtggacattcacaatgtgataacccatcaaattgtatatttatacttggtgctgttttctgtattttattttgttttaaaataaaatgctatttaatttccaaatctaccttcctacaggtttttcaatcaagagaaaataatcttacaacaagatattgctataatagagatgaaataagtttattttgcctatgtaaatgtattatttacattttaattgctaatacccattagtatttaaaatgtatttttatattttagctattttataaaattcttaaaataagtagttaaaagtggaaggtaaaatctaagtaaatttaatctttattttcagaagtaaaaactaggaaagaaactctccatatgt

SEQ ID NO: 453451 - DNA, 620 bp, Homo sapiens
gcatcagttgttacaatgtcctaaatattatattcaacagatgtctttcctggaaattgtgaaaatttatcttacatcaagttttaattctaagagtagaattggatttgtgagatactagtaatttgggctctttctaaccccagctgggcagataaaaccaggctcagccttatctgaattcagatttattctcttkgtcaacattttgctctagtcttctctcttttaaatttttaatattctttggtgtccttatgcgttcatcttgtgatgttttactggctttctcgtctaatgttatctgggcatttttgaatatatcatttgtagttagttttactgttttctacagtgaaacattaaagtatgatgaggtgttgcaatgacagtacatgtaaaataataaagatgccattgctacactgttgaggatctgagcagagaaagccatgccaaactttgttaatttgaaaaattatggttttccctatattctgactaacaactgaatgcatgatagaaaagcaattacactgagtttgggtaaataattatatggtagttgttacaagttcaaaactatgcagatctctacaaatgctcaaagccctatttaa

SEQ ID NO: 453452 - DNA, 620 bp, Homo sapiens
gcatcagttgttacaatgtcctaaatattatattcaacagatgtctttcctggaaattgtgaaaatttatcttacatcaagttttaattctaagagtagaattggatttgtgagatactagtaatttgggctctttctaaccccagctgggcagataaaaccaggctcagccttatctgaattcagatttattctcttggtcaacattttgctctagtcttctctcttttaaatttttaatattctttggtgtccttatgcgttcatcttgtgrtgttttactggctttctcgtctaatgttatctgggcatttttgaatatatcatttgtagttagttttactgttttctacagtgaaacattaaagtatgatgaggtgttgcaatgacagtacatgtaaaataataaagatgccattgctacactgttgaggatctgagcagagaaagccatgccaaactttgttaatttgaaaaattatggttttccctatattctgactaacaactgaatgcatgatagaaaagcaattacactgagtttgggtaaataattatatggtagttgttacaagttcaaaactatgcagatctctacaaatgctcaaagccctatttaa

SEQ ID NO: 453453 - DNA, 476 bp, Homo sapiens
ggaaaaagggaaagtagtactcatttgtattcctccccttcctgaacaaactgccaaaatgcacaaaaagcagtcaaaagtagggaagaaaagtttatctatactgaaaatagggtctgtcacagctccacagtgcaaaatcggagaacatttgccaaattctgcacactttgggtgagatggaaagaaggagcttaaaaccaacatatgctccctttacgtgtaagcacaaaagtacagagaggggaaagttytagataaaagaaagaaggaagtttcttttctctcttctagccatttagactttcgttttgttgaacaaactttacgactatgacttatataacatgaatggacccattgcaagtgaatagcttggtgcaatatgacaaattcatgcacctatgtgaataccaagacatcaagttatggccatttttatcatccacaaaactcccatggactcatttgcatta

SEQ ID NO: 453454 - DNA, 565 bp, Homo sapiens
ttccaaatataagattatatctacaaacaaggaaaatgtggcttcttcttctcttcctatttgggtgccctttacttctttctcttgtctgattgctctagctaagacttccaataatacgttgtataacagcagtgacagtgggtatccttcaggagttccagatcttagaggaaaagctttcagtttttccccattcagtatgatactggctatgagtctgtaatatatggcttttattttgttgatgtatgtccctttgatccccagttttttgagttattattattaatgggttttgaactttatcaaatgcyttttcagcatcaattaaaatgatcatatggtctttatccttcattttgtaaatatgatgtatcatattaattgatttgcttatgttgaaccatccttgcatccctgggataaattctgcttggtcttgatgatctttttaatgtgttgttgaattcagtttgctagaatgttgctgaggatttttgcaccaatatttatcattaatatttgtctatagttttcttttttcgaagtgtctttgtctgat

SEQ ID NO: 453455 - DNA, 574 bp, Homo sapiens
actatccaataagatcagaggccctactatgattgttcttttttgattattctctctgaactctgggatatcayagtttccttataccttgtagttaatcttttatcaaagttaataatacatattaaaattattctgcttaacgtactatgtagcttctatctcctgattagacccagacaactataccctactcatgataagattcaggtctttcctgtctgcattatataatggtatctatacatcatattgacaataaaaatccactgtttcacctactacaagacaagacttctaaatagagttcaaagttacaaaaatgagcagtagaaatcctttaaattggtcactgagactgatagtaagttaggccactcttccttatattgcttaggttctaagctccatgtattctacttttgtggaaaaaagagcatagtattgtcattgatgtaaaatgtgtgctacatcctaaatgatgggggcccattcatgaagcctaaaacctctgacttggcacatcaactgtttctgctataggcatgcagtttaaatagaaataaaatgaata

SEQ ID NO: 453456 - DNA, 628 bp, Homo sapiens
caccttgtgcaggagtcaggaaggctgacgggaaattcagtagaatatagaatatggagcagttatagccttgaccaatgccccataccaaaatgaggtgacccagcagataagccacaagttgtgagccacaaaatggttgctgtcttgcttctccctttaaagtctcacacaaaaatcttctgtagttcactgtacttagaaacatacatggaagggaattcagtgaaatgtagttcaacccagtcaaattgacatattacacggccaccacactagtaaatattamagtaaaaaagataagacattctttagactgttagaaaaaactaaatttccttttccaaaaatcaaaagtgacattttgccttatacaaagtagatggagcagtcagagatcaattaattccatgagtcaccaaacctagctcatgtttgtttgtttgctttttttccaaaagaagtgagataaaagggagaaagcaaaagacagtcttaatattccagagtatgattttgaattctttatgatttcagatttttaaattagtattaaaataattctattaccatcaaattcgtgaataagcagcagtttgacaaagttcttcatgaataccaactaaat

SEQ ID NO: 453457 - DNA, 602 bp, Homo sapiens
aaggaattctctatcaaagatttattattttggtcccctacttatcttacacacagaatggtttaagtgataggctactgttaacagaaatagatttgtgaaacccaatttacaagtcctgaatsgatcatctggaatgtaggatgcagttgttggcaactattatccccacttttggtgcctcaaagctttaaaaaagtaaagttttatttaacaaactatttcattaacatgcctgattttcctttttcaccatatacactaaaagttatagctaaatatcattcttcagaatatagcaccttgtccagaaggagagattagaaatttgctatcttatacactgcattacatacagtttgttcaatgtttaaaaaatatttctctcttactgattttctccttatataattgattggtaaaatgttattttgttcatatttacctttggttaagttataatctaaaataaaaaattgtatatatgttttgtcatgctgacgatgctactaaaaactcacaaatggattagtgataaaattgacttaatttccatacacaaaaaggtaaaattgatataatcattatttacatatatgtgt

SEQ ID NO: 453458 - DNA, 561 bp, Homo sapiens
  misc_feature (1)...(561): n = A,T,C or G
atgtccatgtctaatcttaggatttttaaaatatgttaatttccatgataaaaatgactttgcagatgtgactcaaatcagttttgagaagtggagattatcctggactatatgggtaggactaatgtaatcacatgartcctttcgagagggatgcaggagggtcagagtcaaaggtgtgacaatggtagtagaggccagggtgatgcagggccatgagccaattaaancagaaagcctctagaaactgagaaagatcaagagacagattttcccctagaaccttcagatggaatgcagccttgctaaactattttcgacttctgaactncagaaatgtaataaaaacacttctttaagccactgacttcttgaagccagtgactttaagccgctacattggtagcaatatgttacaacaccagtaggaaactaatgcagctactatgtcatccaatattctgatttttcttcttatcacaatggctaatctttttagcccttcttaaccagctgtttcctccccagggctggtcttgagccttcatctattcaccatct

SEQ ID NO: 453459 - DNA, 604 bp, Homo sapiens
gtctgtgttcaaagctcaagatcatgtgtcattcctagcatacccaagcctctttcttactttttgtatttttcattttatgtttctatgcctggaaaaatatgtatctgcytacttatatgatttttctccttcttaatgtttcaactcatgcatcacgtttctgatcaatccaacactgaagagaactgcttttactcttcaccatagtaccctgctattttcatgattagcatcacttaccacttgtagttatggcattatatatctgtttatttgattaatgcccatttattccactgccatacaacaaagagcaacaaaaccagacatttattaaagatggcaagacagattttattttgactgcttcaggagaggagagagacttccatataaactcccatataaagctcaactccacaaaaacaaaggccagaaagctttgtaaacattaaggtgtgtgaaagttaaggtattgaaagacattagggaggagggagattgatcagtctgattaggccatctgtgtttgctaattgttccttactgaagactggcctctagagtctcacagagactagaagacaggaggggcctaacc

SEQ ID NO: 453460 - DNA, 390 bp, Homo sapiens
acagtcatgagtcactgcagtcagccaagaatttggtttgtatgtatgcagtaagatagctttaaatccacatgaaacaaatgcagataaaccagatggggtaaatgaacaaatccacaatcatggtcagattttttacactactctttcagtagttatctttttacccaaaaatgattattaagaatatagaatatttgaaaaatattataaaacactttgagtttattgacatagatctaacttataacacacatatttgtcaggtgtgtacrcttaagatatatcatacagtaggcaacaaaatacatttttatacagttcaaattacagacatattattaactatattatctgaatacaaagaactaaataagaagttagtaataa

SEQ ID NO: 453461 - DNA, 630 bp, Homo sapiens
tttatatttcacagaaaaaaatacatagacaaggatgtaaatgattttgaatctttgttccacagagattttaattacgaattaccttcatttttagagacaacctcaggcttaatgcttatttctttttgttccatccaaatagagaatgtcagatattgtgtcattggaaatggggttgagataaagtggaatttttggtaagtagggtagggaaggargagcttgaggagggaggcactatgacatatattaatatatattaagtagttaccgtgggccaagcactgtatggtataccattaaaattatttctcagaatgctgattgacttcaagcattttatgtcttccctcactgatgcggtatcataaaccttgataattatgccctgattatcacaatatttggattgtcctaaagcaatagtatggaaaattgagactcaatctggaataaacagaagtatgggtttggtagcccccagagatccctatctcctgatatttacactaatgttgtgtctcctcacccaatgtaccagtgacaaatgttggccagagtaaccatagaatatctcaaaactgatgccaagtcctgagattggggtataaaaggcaaagatgactt

SEQ ID NO: 453462 - DNA, 431 bp, Homo sapiens
aattatattaaaagactctgatatattcttcagaatgtcaattccattttttcaactccagaattcatgctttttaataattatttcaatctctcttcattacatttatcagayagaattctgaattccttctatttaatttatttgagtttttctcaaacagctattctgaattatctgtctgaaaggtcacatatctctatgtctccagaattgagacctggtgacttatttagttcatttggtgaggtcatattttcttggggtaatcttgatgcttacggatgttcttctatgtctgagcattaaagagttaggcatttgctctagtcttcacactctgtgcttgtttttccccattcttcttggaaaggctttctaggtatttgaaaagacttgggtgaggtgatcaaaatttgtgatcactgcag

SEQ ID NO: 453463 - DNA, 431 bp, Homo sapiens
aattatattaaaagactctgatatattcttcagaatgtcaattccattttttcaactccagaattcatgctttttaataattatttcaatctctcttcattacatttatcagatagaattctgaattccttctatttaatttatttgagtttttctcaaacagctattctgaattatctgtctgaaaggtcacatatctctatgtctccagaattgagacctggtgacttatttagttcatttggtgaggtcatattttcttggggtaatcttgatgcttayggatgttcttctatgtctgagcattaaagagttaggcatttgctctagtcttcacactctgtgcttgtttttccccattcttcttggaaaggctttctaggtatttgaaaagacttgggtgaggtgatcaaaatttgtgatcactgcag

SEQ ID NO: 453464 - DNA, 431 bp, Homo sapiens
aattatattaaaagactctgatatattcttcagaatgtcaattccattttttcaactccagaattcatgctttttaataattatttcaatctctcttcattacatttatcagatagaattctgaattccttctatttaatttatttgagtttttctcaaacagctattctgaattatctgtctgaaaggtcacatatctctatgtctccagaattgagacctggtgacttatttagttcatttggtgaggtcatattttcttggggtaatcttgatgcttacggatgttcttctatgtctgagcattaaagagttaggcatttrctctagtcttcacactctgtgcttgtttttccccattcttcttggaaaggctttctaggtatttgaaaagacttgggtgaggtgatcaaaatttgtgatcactgcag

SEQ ID NO: 453465 - DNA, 554 bp, Homo sapiens
tacatcactttggaaacatttggttgaagttagagaaatcccacattaagtagctttaaacaataaggagaatcaactgaaaaaaaaatktagaattctgaaaagtaatgtgcattagtgttattggatgtaattattcaagataaaatatattagccaatatttttgtaaggtttcattgatttgaattgagtcacatttcagtccttgtttccaggagccatataaagcgataattggcttaggcctggtttatcaacaaagggcttaaaagggagattggcttacaatcatgagtgacaaactttgcacctgaattctgatccctgatggttctaaggtaattcctttattttaaaccaatgggagaagttgaggatgttattaaagaggtaaaacaatgtttacagcacctgtgactctttacttacatctaaatacttaaaagtatacattagggcatgtgtatttgggtttttaaacacatacttaaaacttatcaaagattattatgtgtctgggttgttaaaaacaatgctactttgaacacaatt

SEQ ID NO: 453466 - DNA, 554 bp, Homo sapiens
tacatcactttggaaacatttggttgaagttagagaaatcccacattaagtagctttaaacaataaggagaatcaactgaaaaaaaaatgtagaattctgaaaagtaatgtgcattagtgttattggatgtaattattcaagataaaatatattagccaatatttttgtaaggtttcattgatttgaattgagtcacatttcagtccttgtttccaggagccatataaagcgataattggcttaggcctggtttatcaacaaagggcttaaaagggagattggcttacaatcatgagtgacaaactttgcacctgaattctgatccctgatggttctaaggtaattcctttattttaaaccaatgggagaagttgaggatgttattaaagaggtaaaacaatgtttacagcacctgtgactctttacttayatctaaatacttaaaagtatacattagggcatgtgtatttgggtttttaaacacatacttaaaacttatcaaagattattatgtgtctgggttgttaaaaacaatgctactttgaacacaatt

SEQ ID NO: 453467 - DNA, 445 bp, Homo sapiens
ctatggctgttaggatcttaaatacttcccagtcctatgtctcacaattctttcttccccctatgcttagcattacaaattttgcccatatatttatgtattagtattcagcagagagcagcacctcattatgctgatttctgggccgttttttactatttatgtccagacttttcacaagcttggaaatttctagccccttcagacttcctgatctttgatgtctgtctcaactcagkcagaaaaactaccatcatcttcttgggatttattttttaccctgctcctttatctgcatctggaatgtgcctggaagcagaaagtgtcactaattgtttcccttttaacatggcagctaattattagaagtagatggaaaaaattaaggcagaataaaacattattctaactgtggaccagtaaaagagtgattcaatttttaaat

SEQ ID NO: 453468 - DNA, 608 bp, Homo sapiens
attgtttcccttttaacatggcagctaattattagaagtagatggaaaaaattaaggcagaataaaacattattctaactgtggaccagtaaaagagtgattcaatttttaaataagttcagcttattataacataaaaatctaaaataaaaatttttgaacaagagaatggtatatttttctaacacaacamataaattaggaggtaggcagtccaaaactgatatggcagttctatagtatcataagcaaactagagttttcatctttctattccaccatcttagtataatgcttccatctttaagcatctgcttcatagttcaaggagatgattcaagaatttcatttatagcatctccattgctataaatgaagcagtagcaggaatgcagactgagttggttcacttcaagcaggctggtccatattacactgttgcttacatctaattcactaaaattgacttacactgccaagctagctgaaaaaaaagcctaggaaaatgtaaacttttactgagaacaagaatgagctctgcttaaatctgggttctggttttaaaggggatcaggagaatagatgttggaatagaagaccagaatgtt

SEQ ID NO: 453469 - DNA, 608 bp, Homo sapiens
attgtttcccttttaacatggcagctaattattagaagtagatggaaaaaattaaggcagaataaaacattattctaactgtggaccagtaaaagagtgattcaatttttaaataagttcagcttattataacataaaaatctaaaataaaaatttttgaacaagagaatggtatatttttctaacacaacaaataaattaggaggtaggcagtccaaaactgatatggcagttctatagtatcataagcaaactagagttttcatctttctattccaccatcttagtataatgcttccatctttaagcrtctgcttcatagttcaaggagatgattcaagaatttcatttatagcatctccattgctataaatgaagcagtagcaggaatgcagactgagttggttcacttcaagcaggctggtccatattacactgttgcttacatctaattcactaaaattgacttacactgccaagctagctgaaaaaaaagcctaggaaaatgtaaacttttactgagaacaagaatgagctctgcttaaatctgggttctggttttaaaggggatcaggagaatagatgttggaatagaagaccagaatgtt

SEQ ID NO: 453470 - DNA, 608 bp, Homo sapiens
attgtttcccttttaacatggcagctaattattagaagtagatggaaaaaattaaggcagaataaaacattattctaactgtggaccagtaaaagagtgattcaatttttaaataagttcagcttattataacataaaaatctaaaataaaaatttttgaacaagagaatggtatatttttctaacacaacaaataaattaggaggtaggcagtccaaaactgatatggcagttctatagtatcataagcaaactagagttttcatctttctattccaccatcttagtataatgcttccatctttaagcatctgcttcatagttcaaggagatgaytcaagaatttcatttatagcatctccattgctataaatgaagcagtagcaggaatgcagactgagttggttcacttcaagcaggctggtccatattacactgttgcttacatctaattcactaaaattgacttacactgccaagctagctgaaaaaaaagcctaggaaaatgtaaacttttactgagaacaagaatgagctctgcttaaatctgggttctggttttaaaggggatcaggagaatagatgttggaatagaagaccagaatgtt

SEQ ID NO: 453471 - DNA, 608 bp, Homo sapiens
attgtttcccttttaacatggcagctaattattagaagtagatggaaaaaattaaggcagaataaaacattattctaactgtggaccagtaaaagagtgattcaatttttaaataagttcagcttattataacataaaaatctaaaataaaaatttttgaacaagagaatggtatatttttctaacacaacaaataaattaggaggtaggcagtccaaaactgatatggcagttctatagtatcataagcaaactagagttttcatctttctattccaccatcttagtataatgcttccatctttaagcatctgcttcatagttcaaggagatgattcaagaatttcatttatagcatctccattgctataaatgaagcagtagcaggaatgcagactgagttggttcacttyaagcaggctggtccatattacactgttgcttacatctaattcactaaaattgacttacactgccaagctagctgaaaaaaaagcctaggaaaatgtaaacttttactgagaacaagaatgagctctgcttaaatctgggttctggttttaaaggggatcaggagaatagatgttggaatagaagaccagaatgtt

SEQ ID NO: 453472 - DNA, 567 bp, Homo sapiens
gtcacaacatatggaacttcccaattactcctgcagataacatcactattgaaaaacctaagattgggcttttgacatatatattcaggtttttttgtatgcatgtctgacctggacccaatgtctctacctggacccatgaaccactcctgtggccccacctagaagcagctcagtgcacttgaggaccatttgccacacccctgtgatttcacccccaaacaatcagccacaagcatccattgcctagccacccccaacatccccccaactatccttgaaaaatcttagcatctgaattttccaaaaggctaatttgaggaataataaaactctggttttccatttaacagactctgtatgtgtaaaactctttctctattgcaaattttaaccacccagtggktttaccttgcccacttcataaacagagttgatttacgaagacaggggaattgcaatagatagagtaattccatgcagagctgactgtgtgggagaccggagtgtaagtattactcaaatcaaagtattcggggagcagagctttgaaggacagcttggtgg

SEQ ID NO: 453473 - DNA, 540 bp, Homo sapiens
ccagccattattctggaggtcacaacatatggaacttcccaattactcctgcagataacatcactattgaaaaacctaagattgggcttttgacatatatattcaggtttttttgtatgcatgtctgacctggacccaatgtctctacctggacccatgaaccactcctgtggccccacctagaagcagctcagtgcacttgaggaccatttgccacacccctgtgatttcacccccaaacaatcagccacaagcatccattgcctagccacccccaacatccccccaactatccttgaaaaatcttagcatctgaattttccaaaaggctaatttgaggaataataaaactctggttttccatttaacagactctgtatgtgtaaaactctttctctattgcaaattttaaccacccagtggttttaccttgcccacttcataaamagagttgatttacgaagacaggggaattgcaatagatagagtaattccatgcagagctgactgtgtgggagaccggagtgtaagtattactca

SEQ ID NO: 453474 - DNA, 551 bp, Homo sapiens
attcttaatgatatactaatttaatctatttgtaagaagttagctttatagaaagagctctcaattattcagagaccaaaacaattttttctttcaaaaagaactgattggaaacttacaaaatattcacagtagagtttagacaatgaatacagagtaggcagtttcactttaatttcttctggtcagttttgatttttagctctcaggcaaaggtacctaaggtaccaacagaatattaattcttaatgatatactaatttaatctatttgtaagaagttagctttatagaaagagctctcaattattcagagaccaaaacaattttttctttcaaaaagaactgaytggaaacttacaaaatattcacagtagagtttagacaatgaatacagagtaggcagtttcactttaatttcttctggtcagttttgatttttagctctcaggcaaaggtacctaaggtaccaacagaatatttaaacaccacagagaaccattttcacttgtttaaggtcctaatatgatttatattagtttcgtattttat

SEQ ID NO: 453475 - DNA, 607 bp, Homo sapiens
gctaaagcaattgtaaaggtgagctagtccattattaaaagtatttacactgggtgcactggttcacacctgtaattccagcactttgggaggctgaggcaggtggttcacttgagatcaggagttcgagaccagcctatccagcatggtgagatgtccccgacccctgtctctactaaatatacaaaaattagccaggcraggtggtgggtgcctgtaatccccgctgctcatgaggttgaggaaggagaatcgcttgaacccgggaaatggaggttgaagtgagccaagatcgcgacactgcactccaccctgggcaacagagtgagaccccgtctcaaaaaaacaaaacaaaacaaaacaaaagaaagtacttcaattgatcataaatcaagggcatttctgctatccaacatctctgtttctcagccctttgctaccctctctcacaatcaaaatcattgtatacaatcagctttatattctgctgaacaaggagatgcttatttgtgtttcaggcaaagttctattggattgatatttaaatgcagtgcagtgaatggaaaacttgttagttgtggtcatgcttgtgattgtggtttgccat

SEQ ID NO: 453476 - DNA, 607 bp, Homo sapiens
gctaaagcaattgtaaaggtgagctagtccattattaaaagtatttacactgggtgcactggttcacacctgtaattccagcactttgggaggctgaggcaggtggttcacttgagatcaggagttcgagaccagcctatccagcatggtgagatgtccccgacccctgtctctactaaatatacaaaaattagccaggcaaggtggtgggtgcctgtaatccccgctgctcatgaggttgaggaaggagaatcgcttgaacccgggaaatggaggttgaagtgagccaagatcgcgacactgcactccaccctgggcaacagagtgagaccccgtctcaaaaaaacaaaacaaaacaaaacaaaagaaagtacttcaattgatcataaatcaagggcattyctgctatccaacatctctgtttctcagccctttgctaccctctctcacaatcaaaatcattgtatacaatcagctttatattctgctgaacaaggagatgcttatttgtgtttcaggcaaagttctattggattgatatttaaatgcagtgcagtgaatggaaaacttgttagttgtggtcatgcttgtgattgtggtttgccat

SEQ ID NO: 453477 - DNA, 573 bp, Homo sapiens
tgctgaacaaggagatgcttatttgtgtttcaggcaaagttctattggattgwtatttaaatgcagtgcagtgaatggaaaacttgttagttgtggtcatgcttgtgattgtggtttgccattatgtcataaatccataattctaattttgttctgctcaaaggagtcagttaacaaataaatttcaaaagaatacagactagatgggcaaaataaaattataaagtactagttctaattaagttgattattccttagcatttgttatttagatgttagtatttgttaacatttcattatttttgaagtattcaacttaatccccataactctatgaagcaattcaattactttttgaatcaaagtcattaatgttctcccatcactgtatatttaagaagaagaaaagtagcattagtacaaagtattcacgtaaagccaagcccatagcatttacttagggtatttccgaataataataatattgctaccactaatgataatttattactttttatcataaacattatgaattagaactttgcacattttttcttacataatgaccatatg

SEQ ID NO: 453478 - DNA, 403 bp, Homo sapiens
cttggatactgttcttctccaatacctgttttcgagcatttactctgtgccaggcgctgcacattgtccttgaggtcatggggcactatggtactgtaactgcccaatgggtacaccttgctcactgcctagacagagtagatatatcaagacaggggattgcaatagagaaagagtaattcaggcagagatggctgtgcaggagaccggtttttttattattcaaatcagtctccctgagcatttgacctcaagtgatctgcccatttaggcctctcaaagtgctgggattactggcatgagccacagcactcggctgtaaattgtaatttctaatcttstagctagtttgttagtcctgcaaaggcagaccggagcccaggaaagaagggggtcttttcgg

SEQ ID NO: 453479 - DNA, 615 bp, Homo sapiens
agtgtattgattttcataagtgaaagttccaggggtatgtatgatttgagttgcacactkggatcaagtgtgcagaatgattttcttaaattattatttttatctatccccccccaccccattttattctgaagcaagcatggtcctgaggtttacatttcccccggtttaactctgacttgcttgggctcacctagagccaataaaaatctcccatctcagttagttaaacaaaattcttatagtttgtctttaatgtggacaaaagcttataatgagcactcagtgtgcccaaggccatgagagacactgaatggtttttagcacagttccaatgatctctcttggaacatctagttgagtcacttgagctctattagacttcttaattgtggttcaaataatctattcctgctacattaagcagttaggagtttatttgacattagtgagaagattataaaattttgataaagctctagggtgagcttcccagaatgattcaagaattttactacaacagcattctagcaagagtgctgacactgctggcaatactgaaactaagttccctctgcttcagtcaggagctgccacctcccatccatcccagaa

SEQ ID NO: 453480 - DNA, 615 bp, Homo sapiens
agtgtattgattttcataagtgaaagttccaggggtatgtatgatttgagttgcacactgggatcaagtgtgcagaatgattttcttaaattattatttttatctatccccccccaccccattttattctgaagcaagcatggtcctgaggtttacatttcccccggtttaactctgacttgcttgggctcacctagagccaataaaaatctcccatctcagttagttaaacaaaattcttatagtttgtctttaatrtggacaaaagcttataatgagcactcagtgtgcccaaggccatgagagacactgaatggtttttagcacagttccaatgatctctcttggaacatctagttgagtcacttgagctctattagacttcttaattgtggttcaaataatctattcctgctacattaagcagttaggagtttatttgacattagtgagaagattataaaattttgataaagctctagggtgagcttcccagaatgattcaagaattttactacaacagcattctagcaagagtgctgacactgctggcaatactgaaactaagttccctctgcttcagtcaggagctgccacctcccatccatcccagaa

SEQ ID NO: 453481 - DNA, 563 bp, Homo sapiens
tgaggaggcaatctgtcccttagcagagctcaagtgctgtgcttggagatccacttctctcctcagagccagcagtcaggaatgtttaagtctgctgaagctgtgcccacagccaaccttcccccaggtgctctgttccagggagatgagagttttatctataagcccctgacaggggctgctgcctttctttcagagatgtcctgcccagagaagaagaatctagagaagcagtctggctacagcggctttgtggagctgcagtgggctctgcccagtttgaaatttcaggccsctttctttatactgtgaggggaaaaccgtctactcaagcctcagtaatggtggatgcccttctctgcaccaagctcgagcatcccaggatgacttccgactgctgtgctggcagcgagaatttcaagccagtggatcttagcttgctgggctccatggagatgggatccactgagctagaccacttggctccctggcatcagccccatttccaggcaagtgaatggttctctctccctggcattccaggtgccactgggttatgaaca

SEQ ID NO: 453482 - DNA, 473 bp, Homo sapiens
ctttttctggctctttcatagtgcttcttgaattggatgattcttgtcttttttaaattctggaaaattctcacacattctatgtttagtttgacctccttattcttcacagtctgttattatggaagtactatgcttaacacgttgcgtctctctgttttcttcgatgttaccaacaagatgtcttaaactatcaccacctgcccctacaaatgtacacaggttaggatgtttcatttatcgttttctgcttgtgatacaacttggctgtaacagaagttctttcagtgttgaggctcagaaactctcaaagttgatatttagtccctgactataataagatgtgggaagaggggacayttcaaactctccatgttggtcccttgccccactcattgaggaaagtgaagtctattttgcaaaattaaggctgagtcagtgaaagagatctaacataactgcctccgtcttgc

SEQ ID NO: 453483 - DNA, 592 bp, Homo sapiens
atgaataaacaaactatgataagtccatacaatgaactattactcagtgatagaaagaaatgagttatgaagccattaaaagacatgtaggaagattaaatacatattactaagtgaaataagtcagtttgaaaagggcacagactgtatgaatccaaccgtatgaaattctgagtcagacctatagagacagtaaaaagagcagtaattggccaggcttcaggggaagggagggatgaacaggtgaagcacaggacatttttatgatggtgaaattatatcctatgatactataacagtggatacatagcataatacatttatataatgaatttgagaatttcagaggcttatcaaggaaaaagataagcccacaggtggcagtagcacacaaagcttctacttggacgctacttggacagggttgcaaaaagaacagtcctcacagcataaggccttatagaagcacaggggaccaccatccagaacgcaggaggacaaaggagctcccaaggatgggaagggagatgctgcatgtytagataacatcacttcacagcatggtaggaagctgctgggtcagagggctctg

SEQ ID NO: 453484 - DNA, 579 bp, Homo sapiens
gaagcctgaaaatattagatggttaaggagttgggactgatctcaagactyaaggtctaaaaaaaggtatctttcatatcttaactcaaatattcattcatgaagcacttatctatggagtgttattgtatgcaaggcacattccagtgcagttctatccaatagaaatctaaagtacacaacaaagataggagcagaattcaatgaaagtgaaaaaccatattaaagagaaactaaaacaagtctcttgtaaaagatcaataaaattaatagatctctactgagactgatgaagaaaaatggagtaaaaacacaaattacaaatattagaaagaaaagatggaacattatgagagaccccacagacttttcacaggaagataagggaatcctacaaacaactctatgcccatagctttaacaacttatatggcatagaacaattctttccaagacacaaactaacaagccccacttaaaagaaaagagataatgtgaatagtcatatatagctactaaacaaaataatctgtagctaaaaactttccaggaaataaaaataggccacggtccaaatgg

SEQ ID NO: 453485 - DNA, 579 bp, Homo sapiens
gaagcctgaaaatattagatggttaaggagttgggactgatctcaagacttaaggtctaaaaaaaggtatctttcatatcttaactcaaatattcattcatgaagcacttatctrtggagtgttattgtatgcaaggcacattccagtgcagttctatccaatagaaatctaaagtacacaacaaagataggagcagaattcaatgaaagtgaaaaaccatattaaagagaaactaaaacaagtctcttgtaaaagatcaataaaattaatagatctctactgagactgatgaagaaaaatggagtaaaaacacaaattacaaatattagaaagaaaagatggaacattatgagagaccccacagacttttcacaggaagataagggaatcctacaaacaactctatgcccatagctttaacaacttatatggcatagaacaattctttccaagacacaaactaacaagccccacttaaaagaaaagagataatgtgaatagtcatatatagctactaaacaaaataatctgtagctaaaaactttccaggaaataaaaataggccacggtccaaatgg

SEQ ID NO: 453486 - DNA, 579 bp, Homo sapiens
gaagcctgaaaatattagatggttaaggagttgggactgatctcaagacttaaggtctaaaaaaaggtatctttcatatcttaactcaaatattcattcatgaagcacttatctatggagtgttattgtatgcaaggcacattccagtgcagttctatccaatagaaatctaaagtacacaacaaagataggagcagaattcaatgaaagtgaaaaaccatattaaagagaaactaaaacaagtctcttgtaaaagatcaataaaattaatagatctctactgagactgatgaagaaaaatggagtaaaaacacaaattacaaatattagaaagaaaagatggaacattatgagagaccccacagacttttcacaggaagataagggaatcctacaaacaactctatgcccatagctttaacaacttatatggcatagaacaattctttccaagacacaaactaacaagccccacttaaaagaaaagagataatgtgartagtcatatatagctactaaacaaaataatctgtagctaaaaactttccaggaaataaaaataggccacggtccaaatgg

SEQ ID NO: 453487 - DNA, 641 bp, Homo sapiens
aaatagccaagtgtgtgtgacactccacttcactattttacatttttgaggctcacccagtccgattgtcccaagtcagaactggtttatggagtctgtcctcctgctggaatttggtctgcttgctgtctttgtatctttctggtgtctcatgtgtggccactgcttctgccatggtctctcctcctaaattcctaagaatgactcctcagcactactccttgccttgacccaatgcaacttggttccaaatagcctttcctgtagcgccataataaagcacactcaaagccctttctgaaaatatttctgacaataggtttatcaaggctcatacataacaaaacaaaaacaaaacaaataacaataacaaagcctatctgcccaatctactctgaggggcaattttagctgattctgagctcctatgtcctgaacccrgacagactgctaaataagagtaactgcccaaacaatttgtttcattctaccagatcctagattcatatcttactgacttccaaaatcccctactagaaggctccaaaaaaaaaaaagaagtagaagaagggctccaaatttgatatcatcatggtccacgtgacaacccagacgcaccctgagaaagtagtgacgtaatg

SEQ ID NO: 453488 - DNA, 293 bp, Homo sapiens
ctttttttttctttttctctctttttatttttttgggatggagtctctctctttcgcccaggctggactgcagtggcgctatctcggctcactgcaagctccgcctcccrgggtgaagaactcttgttggagacctggtgttggagggcatacaacactctggccatttgagttactggagttcttgtgttggttctttctcactctgcgtgtgggtgttcctttgactgcaatatagattgagtacagtcaagacttcttttctggatgttttcactggaccaggtcttttt

SEQ ID NO: 453489 - DNA, 567 bp, Homo sapiens
caagacactagacctaagacaacaaaggatagttactccctaagagacaagaaacaaactaggtaagccctatgactgccccagcttgctgccttcagagactatgcaggctacgggacagagaagaaagtctgagaggagcccagtaggatccttgaactgaggtaataaggctgcgagttagggaaaccaagtggactagagttcatggatggacaaagtaataaaaggaaagagatgtgcagagaaagagccctgactatctgcagagcatccccctctgatattcaacagagtcctgattagcacatgcatgtgaagtaacacttcaggatggaggaaaaataatttgaaaagattaaagaacattgtctgatgctcacacggggctgggaatattgcatattcccccctctgacagctgaaygaaatcatactttatgagcattgggtagagtaccccagaaaatcttgcttagtagtggggcataattagccctagactgctcagatatgccaaataaatcataaaagcaagacccaagaagatcaaacaatttccaggca

SEQ ID NO: 453490 - DNA, 547 bp, Homo sapiens
tgtctggctaataattattttgcatctttttctgtggagacagatttatttcagcctgacatcaggagaagatcgttggagagacttggaaccaggtctgagaagatgaactgggtcagttggattcttctgggaaattgaacaggttgagttgaggaggtgaaattgaggaggtgggacaggacaggttatactaagaaatgtcttggagtggagaaagaccacgatggaccatatgcaggctaaggaaagccaaagaagctgcagatagatgagaygggggaggaaccagcagccagcatgaatcatagacagaacacaaagaccctaagagagatggagagatgcattgtttcccagaggactcggaaggtagaattgctgaatcctgtttcagttatctaattcctttaatgtcactatcttttttttattactccaatgtatctttgcattaacttaattgtcacttgcctaacattttcttgagtcagtttgagtgaggttctgctcgttgcaatcaaatcaaccagacataaacaccttt

SEQ ID NO: 453491 - DNA, 618 bp, Homo sapiens
cagctgtaaacaagctaatccttttatttattagagcaataggacatgcataatacattggactcttgttacctgtagagaattgctcagtgatagcaagatagaggcagtactagtggaagaacatttacatgacagaaaatctatatgtgtaggaaagaagacattaatctagtagaaaattaggaatgatcctgaggaaactcttggcctgagcccgccgaattattcaccattaagtaattacttcagatgcaacaggtggccttgtaaccaactcaactcctccaacatagggaacttcctaattataatcatttggattagtagtttaataaaatgcccaaggaagagagtgaagtcataattaagggatccttaagggaaaactttataacagaagccrtttgacagaattagatcagatcactggaggtgataattttgtggaagtatatgtcttttagtaagaaggcggatgtaaatataggtatgtctttcagaaatagccatataatgaatttgatcctaaatgcttctttcaaatgcagatgaaaaatcaggattcagatcacctaagggggaaatatcctcatgagttaatatcataaagtgggc

SEQ ID NO: 453492 - DNA, 540 bp, Homo sapiens
ttaacaaggaaaattcctttaaaatggcttttttcttactcggtgtttttagcatcaagtatagttatttacatattttcatttgctactcgatttattttggagactgacacttttayaagctgacatctcagcatacagacacttctactttgctgaatgcagccaatagtacttacttgatgccacgctgagcaaaacctagttaaaggtttctctttgtgcagcaatccatcactccttttacagttcttcatctggatgagtgtaaagtgcctcctaattttggcatctgctacctgcctttctggctgctgcctgtcgcttcctgatatcactctgtcaggtagactcttgaggatttcattgctactcagttgtagcaaattcaaaattgtttaatagtttttttaaactcctattagaataattatgatggacgagtgattaataggcaattaggtatttaagtagaaaactgatcagttactgtcagttggttattcatttatttattctatttgaaaaacatttatcatt

SEQ ID NO: 453493 - DNA, 561 bp, Homo sapiens
tttggatcctctctatcatgctgtgtctctgtcctcaaaggtgttgacctcatctcaatggctgctgtcataccagggtttcatcccacaaggagtggaaaagaagacatggacagtaagcagtttccatyaagggcatgacctggaagttgtacaaatcacttttgcttaaatcttattggccagaataaacaccaaggtcacaggtgttttattcaaatactggaaaatatagtccctagctgggcaattatatgcctagctaaaactccagagagaactttcattaacaaaaagaagacgagagtgaatattagggaaaattagcacctctgcctcaatgtatgtgtagaatctttcagaagggaaggggtatatggactatctgaactcagaggtgattaaaacagaaacaatgaccctgtaatgcaatatttcattgtaagtggttaaaaaccgattatgtttcaattggctgccaatatattacttccattcaatgttttctgaggaatacctggtcactaaaaacatcaattccagctgaaatttggcacatta

SEQ ID NO: 453494 - DNA, 564 bp, Homo sapiens
gctgctgcactaagtagtcaaatactagttaccattattcaaagttaaaagtcgataactgaggataaatgttttggaactgttgaaaacaaatatatgatctattaatatttagtatctaacctagagaaccattgtctgataaaaccagtctatgagatcatgcaaagtcaaagcttttaaaaattactctgtgtctgcacamggtgctgatacttaattacatgaatttgggccttgactagcaagatcgctaagtaaaatttgaactgaaaaaattaataatgcaccttagattctttgagttttcaagactttccatatgaaattcttatttaagaattacttatgcattccccttgctgttttcttattgctagatttggggaataatggttgaaataatgttttgttttgttctgttattatttaatatgacttgtaattttttttaacacaacaagtgaattgttgaatgccaaacatcaaaaccactatactcacacccctaaattaaagattagaagcttcattttgtaagtatttggaagcaagagtttgcac

SEQ ID NO: 453495 - DNA, 576 bp, Homo sapiens
gtttagtcctttgtcatcatttcatctttcaccaaaatctcaagagaaaatgtttagaatttacctagggttgagagtttttaaaaaattttctttttgtttataatgtgattacaaagaaagatgtattataattacatatggaatttgtaaatttctaaaattcaaagtgcagttcaccagaaacttcaacattttgatggragagaattctgtatattccttgtagtctttccttttttatttttttcacctacttttcctgcaaaaccttggaataggaagccatgatggcattgtacagtgatccctgtttgttatagagggtaatgcataaaccaaaaacaggaaaagcccattttaaaaatatagaacatctggcctcaccagtgtatgtcccacatctgagcctgttgcatggaccaagagcaagccctctggcactgacttaggactgtcgctgcaggaaggggcacatccatgtttacccaatgcccgtaaggtgtgtagttgctgtcataaagcaggctcattcagtggagcaggacgaacaaggagagtggcacattttagctt

SEQ ID NO: 453496 - DNA, 431 bp, Homo sapiens
tatacctttcccttagaaaagagttttattgcttgtgctatggtagtcctggaatgttcccactctgtcttggctgkgtcatgccatcaacctaaaaatagatgttaattaacaaggttatttctaacttgcattgttaaaagagagaaaaacagtgatgaaacacagaaagagtatcaaattaaccaaggctggaaccaaattctaattcaaaattcccacctcaaagatattcaattcactaaatagtctctttttttctgaatcagatagtcattatccaaatttcctatccccaatgtgataatatagtgtgatgagacatgccccaacagaacataaattgacttttggagcatagatgctacatagagtgtgtgggtggtaacgcaaatatctcactctattatctgttgtctctgaaccaacag

SEQ ID NO: 453497 - DNA, 455 bp, Homo sapiens
tacttctagaccttccattttcttaataccttcagtagttctctgcttccattatttaggcattagcccaggagagacagaaaatccgatactatcattagctcccactttttctggtgcccctaaatgtgaagattaagcaattttttttttttttgcatatggctcatttgttttactgtatgaccttgaggctaaggcttatgaaagcataatgtgtaggtgtataactgacccaaaaaaactagtcttctgcttctgcagaaagaatcatgtttgattctttttccattttaatttccaaatcatctaaatcctactaatatttggaatcaacarccttcttccataactttcagaactttcttggtaccaatccctccctgggagcactgaaagccaaatcacttctctcattgtatgttggatccaatctcccttatcagaaagcaacc

SEQ ID NO: 453498 - DNA, 624 bp, Homo sapiens
tactttcccaaataaagaaggacttcactgccaccaactgaatctttgaactagagaagatatgagtagaaaacaaaggatgacactgaggtgcatgacctcttctgcctgtgaggcacctcagcgtacagcttggtggatggtcttgctggggagagtagactttggataggcagggcaaggcagtgtggaagacgggagataatcagtcaaaatggctcctgtcatacaactgggagagttcaggagtccatgccaagttcaaagttgtactgctctctggagctagtttcataaataaggtttaatctgcaaccattcaagtatgtagaaatttttgttgatatgtgtcctaaaacygtaggacctttttcctttattaacatacttgccttgtatgttaatacattaatcctgccttgatcaccactcagctctgaatagccagggttagagaaatctacatcatacttctaattattgagtgttagattttttcttcttcttctcctctggttttaattgtgcagaagtaaagccaacataagcaatgtaaaaatcaagtcttgctagttaaatataagaacacagagcaaaatatctgagaaaggttacacctcttta

SEQ ID NO: 453499 - DNA, 499 bp, Homo sapiens
tgagagggaaggattgaatgagaagaaccagaaaagatcatagaagtaacagacagaaagagtttggataggcaagaagaaaaaaaaaaaagcaagatgagagttatgacagtaaaggatggcttggacaccaagagaaggagagagatggaaagcactyttcatagagaaaacagagcaaggaagaagaagaaagctaaggaaactaagaagaaccaattccaaggaaagcaaaaaagacttattcaaggagtatggtgttaaaaagtaaatgaagtgaaaatttttaagtgctaaactctaccaaaaaaaaaaaagtatgacggctaatttttacaaagtaaaacttaagacaagtgaagaaaaagcataacaagtcttttgctcgtgtttacatgtcataaaatattgaacaagaattaaaacagtttaccaataactctgtctctgtgcaatacaatctacactgtccttttctggagaaatgtactcactgtgt

SEQ ID NO: 453500 - DNA, 614 bp, Homo sapiens
tttgtcttcagctaccagggtgggtagggaaggtccatcaggtggcagcaggtctaggcatgtctgagctcctactctccttgggagggtcttgctgcagctgctggggggatggaggtgaggttcccaggtcaatgatgttgtgtacctaggaggattatggctgcctctgctgagtcatgcaggttgtcagggaagtgggggaaagctggtggtcccaggcctcacccagctctcacacaatccaaagggccggtctcactcccaccgtgcccccctaacagccccaagtctgtttccaagcagtgagtgagcggggcttgagaacttgccccaggccacctgcctcccagctgcaaaagaaaagggcttggttcttcccccacctgtggagtctgcacactggatttgcgccctcccccgagttctggccaggaggcttctcaccggttccaactgttataaagttcagctggagacttccttctccctgtggtgtttcccctctccccgatacccgcasctctgaccaccctcctgatggatccctgtggtgctaggcaggaatggcctgcctggggacagagcgagctcccagggcctttcccactgct

SEQ ID NO: 453501 - DNA, 546 bp, Homo sapiens
acttctttcttgagttaaactgtgagccccttcaggggagagatttttgcttacttaaacttttaaccaaatctcagtgtgtatttcattaaactgacatttaaaatttcacatctatgttctatctgccctcctggaataactttttttgagatcagtgattgtgccttacccgactttttgtccccatcacttactacaaygtctgattctgagaagatgaataaatacttttgaatgaataaatgagtgaatgaacgaatggagtgaaatttacaatctagtgcagtagcttctcacttcactatgcttgtgaaggatagttcagtagatagacacacaaataaatctaatataaagaagactacaacaataccactatattgttaataaagggaaccattgaatgtgataatagaaagaaaaagtgctaaacaaaaagcaagtattaggacaggtgagatttaattagatcaggcagatctcagaagacttcatggagaaggtaacaagacctttgggaagagtcaaatttcaacaagcaaa

SEQ ID NO: 453502 - DNA, 598 bp, Homo sapiens
cacagctactgaccccttgtgtgatcttatacaagtcacttaacctctctgcccttctgcttcctcattcattccacagagacaatgctacctgcccctccctacctctgtggagctgtgagagtgaatgagctgtgtctgcaaagcatttgaaaatgccattggttagcgctaggctcaaatggtgtaaaatgttgtaaaagacctgcagtgagataacacacacaatgaaaataaggatagattataagacagggaaacatggaggtcaggagcatttgccactaaaaatttagtcaacatgagctttgaaagtgattctcagtgacaggttatttactttatttgctctttatgaatcaccrggctgatctaattaatttaagtgagggtttgggcaggaggagtgaagtttaaaaggggataaataaaattgtgatatcctgtgaatctcagattgttgcttattaactcccaattaggaataattcattcaaggttatctactattttcattctcagaaatgttttctcctttttttcacattccaattaaagtctcacccacctgccctttcaaggaatctataacaatctc

SEQ ID NO: 453503 - DNA, 547 bp, Homo sapiens
acacctggtgttattattatttatatttttctgatgatgaaactgaggcagcaaagtcccacaagttaagtagtagaagccatggagcaccgtgtagtggttacagtcctgccaacagtggctctcagaaacatcaggacttggagctgcatgctcagactaatgagaacctggagcattagatggggactggtttccaaagcctgggaaagagctggcytgagggttccagaccagatactctagggagatttgacacagggataagaagcccaactaaaatccaggcagaaggtgaatacagctgtcattctgagaaagccgcatgactaagcagagcaggggaggaggttacaggacaaaacctgtgcccccacaccaggatgcaagggtttagattaaagataaggagttggagcttggtgggaatctcttagtcattgagaaatagctgcaggtgctttgtgtagagtattgtagccttgaccatgggtagggtggagcagcctcagatgtcagatcatgaatttgggaacactgagttaag

SEQ ID NO: 453504 - DNA, 219 bp, Homo sapiens
ttttgatatttcagcacaatgcaagttgcatttccttgaaaagaaaaaggattttgttgaatgtgcattccaacttcagaaataatttccaaattcaaatatataaatatgatacawctcaccatttacttaaatctttttaaaatgcatcaataacacctcaaaatattacccaaaacatgttaatcacggttaattcaaaattttgaggactacttc

SEQ ID NO: 453505 - DNA, 608 bp, Homo sapiens
actgggtaatcccatattcaagctggactctgataatctgaactacaccttactcttcactttgacactgttttgctattccactgtttttattaatatttcttttctcttctaagaatgtcctgccctagcagtgattctacggctccttacaggaacttcttgagaaaccatcaactttttaatgtaaagtgtcaataaatggattacaccctaagattattttaatacttctctcaaagtcctcctcttgctgtttctatcacttctgaagtattgtattcaattcttacctaatcctgatcrccacattgaaaaacctgccttaaaccaaacttaaaattcttaattaattctgatatttttcctatagacaccaccaaagctttgtgaggttgtattttcccttaagcaaaaatctcagctttatcctattaacaggttgtgttgctatttgattagccagatttccacactgtacatgaaaaaagaaattcttatattattttctcccagcttttgattttgattgaacgatatttttgaagtcacacttattcctttctactcttagtaattacatatggaaatgcatagaacctaccaag

SEQ ID NO: 453506 - DNA, 545 bp, Homo sapiens
tttcccttaagcaaaaatctcagctttatcctattaacaggttgtgttgctatttgattagccagatttccacactgtacatgaaaaaagaaattcttatattattttctcccagcttttgattttgattgaacgatatttttgaagtcacacttattcctttctactcttagtaattacatatggaaatgcatagaacctaccaagttcattcatgtaaacccccactgaaataaaaataaaatgaaacaaactaatattcgtagcattgtaactgagtgcagkcttggctgctcactgcttgcaaagccaataaaaagtacaaagtgcagtgaagggacagtgactttatttccacagcgagcagtggggaaatacttgaggcttgtgccctaatggaactatttcagctatttgggtcaaggacaagggtttaagaaagggagcatcgtctgataaccatgcaggagtgataaaggggtgccaatctatatgacttgttccaatgactatcttgagctgttgccccatctgatgaatcggct

SEQ ID NO: 453507 - DNA, 545 bp, Homo sapiens
tttcccttaagcaaaaatctcagctttatcctattaacaggttgtgttgctatttgattagccagatttccacactgtacatgaaaaaagaaattcttatattattttctcccagcttttgattttgattgaacgatatttttgaagtcacacttattcctttctactcttagtaattacatatggaaatgcatagaacctaccaagttcattcatgtaaacccccactgaaataaaaataaaatgaaacaaactaatattcgtagcattgtaactgagtgcaggcttggctgctcactgcttgcaaagccaataaaaagtacaaagtgcagtgaagggacagtgactttatttccacagcgagcagtggggaaatacttgaggcttgtgccctaatggaactatttcagctatttgggtcaaggacaagggtttaagaaagggagcatcrtctgataaccatgcaggagtgataaaggggtgccaatctatatgacttgttccaatgactatcttgagctgttgccccatctgatgaatcggct

SEQ ID NO: 453508 - DNA, 574 bp, Homo sapiens
ctaacataccaaccatcatagcttagcctagcctaacttaaatatactcagaacacttacattagcctacaattaaacaaaatcatatagcacaaatcttattgtataataaattatttactatctcatgtaattaattgcatactgtactgaaagtcaaaaacagaatggttttatgggtacttgaagtacgatttctactttacatgtgacttttgcaccttaacttttgaaaaatctttaagtcaaaccattgtacctcagagatcatctggggcgaaaaagagagcatgagattgactgatcaattgattgatttgaaatggagataattatgttaatattaataattatattgatatgcaaattatcatgagtgcataatgatatagccagtgagttttactaaagatgtatttctaatcatcaaaaattataattatatttatgcctagaaatgggcatgcctcatctatcaggtcattacattggggtgttgaatcartctagtttgtagtaaagccgggcatagggttttctgctaattgagcacaccaaaggcttcattacctag

SEQ ID NO: 453509 - DNA, 641 bp, Homo sapiens
actccacaaattgcattatctgaatcacagttctgaaccattccagacaccttattttacctttaaaaatcatatatctcagtgctattcttctcactgcaaagtctgaaacgtactgctcagataccatatccaactgcgataatcataacagctttctaacagtagcataactctttccttacagctttctaacagtagcataactctttccttacagctttctaacagtagcataactctttccttacaagtcctatgctaaactatgttcctttgcaagggattcaagtcaatttgctcttctctacaaatgtgcataattatccaacctctttaaagtaacttagaattatgggtgttagtaaagtcctagataaaacactacattacacagtaaaatatttaacctaagtttttgtacaaggatgtcacataaattattttcacacaacaatattaattttagaaaataaaatcatgatactgttacgggatagatatacaagtcgattagtatactccgtaaacataatattaccttaagaaatacaggcattttmgaattcttttgttcctggacacaaatctttatatatttcatgactagtcactcattcgatatgatttcagttaaactg

SEQ ID NO: 453510 - DNA, 614 bp, Homo sapiens
tgatgctgtgtgcattgtaggctcagtacatatttttaaaatgaactaatttattttattcagccattaatttgtatctctatcttgctgcagtttaggtataatctcatacttatcttgttaagaacacattagcctcagacaatagacacaaaaatcataaccacaaatatgtaattgtaatactgataactgcattttaccaagtgctccaggtttcaggccctaggttgattgttttagatattttatctcatttaattatcatacttattctatgatatacatcatcgtcatttaaaaattagaaatttgtttaataagccaaaataacttgtcctcatttatattactattgtaataagtatcaaagctaattccgcctttagctttgtaaagctgtgtaatctccaaacccattccttttaatcattmcttgggaactatcacttgcagtctctctctctctctctatttctctctcaatggccacactttagctatctttcctcttttcttttacaacattaaaaaaatccttgtattgttgtcaatgattaataaaatacagacatgtaaaacattcagattctcaataagccatagtccaacat

SEQ ID NO: 453511 - DNA, 615 bp, Homo sapiens
gtgtgcaccttaaatatatacaattaaaaatccaaattgaaaatctgctttcccagaaaagttctctatatacatatatttatataatatatacataatatattatatgtaatttctcatgaaacttacaatctagtagggaagataattacttcaaattttaacaaaatcaatgtcatcaagatatagtgtgctctgagcagagcagtgtgaggtaatataggcaaacatactagaagcaacaaacacagaagtggtgagtcaagaggattaataatatctaaattgagacgtgtgattggaatagtttatcttgcgaatgagtaggcgacttcagatttttctaaacagttaaaggctccaaagccagaattagcatgatccactatttgggacaacagtgggtctggaaaaactgctttgtgaaagtgcaaattatcratgtgcctgttttgatggaaaaaagagcagttaacttagtggagaaaaacaagtttctccacttgttcctattcacaggagaataaaatgtctctaccagaatatctgcatggtctgctctggcatgctatgatttggggaatgtgcagcttcatgcttctttgtagctgttgt

SEQ ID NO: 453512 - DNA, 616 bp, Homo sapiens
ctgctttgtgaaagtgcaaattatcgatgtgcctgttttgatggaaaaaagagcagttaacttagtggagaaaaacaagtttctccacttgttcctattcacaggagaataaaatgtctctaccagaatatctgcatggtctgctctggcatgctatgatttggggaatgtgcagcttcatgcttctttgtagctgttgttacagctgtgaattgtattttaaggatggacttgcaaggttttgagcagtacaaaaaaatataaagaaaaaaactaaaatcacctgtcatttcaccagtttcctacccttagcatattaataaatttccttctactrattttctatgcatctgaggaaatatttaaataatgaggatcacatctacagatatactcattagcccctaggaatttttgtatttcagttttaccaaatatagtgaataataacaagccatagtcttctttttatttttggtttgcatatgtgcaaattgtacgcaataatagaagagactattttaagtatgtacttgcctacttatgcttcctaacctggtaaagcttatttcagcatatttccacctagaaattatcttttaatgcaatttcctca

SEQ ID NO: 453513 - DNA, 612 bp, Homo sapiens
taatgactattagaaagatacagaatgtagaattaagcartttttgtggctaactggatttggggactggaaagaaggattttcacattatttttaagtttataatcggtaaaattggatggatagtaatgttcctgcgtcttctgtaatatttattccatgtaatattattaggtagaatcaattagcaacatgtagaattatttgtccagaatcaataacaaaacgtaaaattatttggccctaacacacaaactatgaatgaagatctaagacttatgtaagtaatcaacacaactatgttctgcttcaattaattaacaataacaaaaaagttgaaacaacaaggaaacagcgtctttgtttaaaagcacttctaggacaattcagttcagagttctaatacttttattgtaatataatatagggttaactgacactgtagttaaaagtattttccaaagatttagttgctgtatgaagtaagggaataaaaattaagttttgagagaactcaacacgagggagacttcctaggatatagaggtttttggtgaagattcagagaaattgggtaaattaaaagaatattgaaaaagatgaaagaaaact

SEQ ID NO: 453514 - DNA, 612 bp, Homo sapiens
taatgactattagaaagatacagaatgtagaattaagcaatttttgtggctaactggatttggggactggaaagaaggattttcacattatttttaagtttataatyggtaaaattggatggatagtaatgttcctgcgtcttctgtaatatttattccatgtaatattattaggtagaatcaattagcaacatgtagaattatttgtccagaatcaataacaaaacgtaaaattatttggccctaacacacaaactatgaatgaagatctaagacttatgtaagtaatcaacacaactatgttctgcttcaattaattaacaataacaaaaaagttgaaacaacaaggaaacagcgtctttgtttaaaagcacttctaggacaattcagttcagagttctaatacttttattgtaatataatatagggttaactgacactgtagttaaaagtattttccaaagatttagttgctgtatgaagtaagggaataaaaattaagttttgagagaactcaacacgagggagacttcctaggatatagaggtttttggtgaagattcagagaaattgggtaaattaaaagaatattgaaaaagatgaaagaaaact

SEQ ID NO: 453515 - DNA, 612 bp, Homo sapiens
taatgactattagaaagatacagaatgtagaattaagcaatttttgtggctaactggatttggggactggaaagaaggattttcacattatttttaagtttataatcggtaaaattggatggatagtaatgttcctgcgtcttctgtaatatttattccatgtaatattattaggyagaatcaattagcaacatgtagaattatttgtccagaatcaataacaaaacgtaaaattatttggccctaacacacaaactatgaatgaagatctaagacttatgtaagtaatcaacacaactatgttctgcttcaattaattaacaataacaaaaaagttgaaacaacaaggaaacagcgtctttgtttaaaagcacttctaggacaattcagttcagagttctaatacttttattgtaatataatatagggttaactgacactgtagttaaaagtattttccaaagatttagttgctgtatgaagtaagggaataaaaattaagttttgagagaactcaacacgagggagacttcctaggatatagaggtttttggtgaagattcagagaaattgggtaaattaaaagaatattgaaaaagatgaaagaaaact

SEQ ID NO: 453516 - DNA, 555 bp, Homo sapiens
tttcctaaaatcatttattatataaaccacttccacccttcctttgaactaaacctttatcttataagaactgtcattttatatatttgccattctgttccttttacctgcttatgttattcagtgtcaagataattcaaaatttcggttttataatgttttaatatgttatacctagtccactattattactcttactcatgtatacatgcattcttccatattaatttaagaactacattaagtttccaaactacttctctcagaaaatcaaattaaatcatattaaacaaaaataatttagagggtaattacatctgtatattattkaattttttctttccaagaatgaaatatttgattcaatataggtattctgtctttgtcctcccatgaagtctacagtcttttctgctcattccacccatttttttccttaaatgcatttctgttttctatttatttactatatggctttactattgtacagagaatttccatctgtaatggatatttcatctgtaagaaaagtcacattttattttatctgttaac

SEQ ID NO: 453517 - DNA, 573 bp, Homo sapiens
ttaatcatttcataaatgccacacctcctaatactattatcaccttgagggttaggatttcaacagatgaattttgagggtaatacaaatatttaaattaaagcaaatcttggtcagattagcaatcaaatcccatgacattgttttttttttttttaattatgttagtttctggggcatgtgcaggtttattacatacgtaaattgcatgtcactggggtttggtgtaaagactatttttaacacccaggtaataagcatactaccatacaggcagtttttctgtcctcaccttcctcccaacctataccctcaagcaggctctgaagtctgttgttccgttttttgtgtycatatgaatggatgtttagctcccatctataagtaagaacatgtggtatttatttttctgtctctgcattagttcacttaggataatggtgtatagatccatccatgttgctgcaaaagacatgacctcattattttgtatgcctgcatagtatcccatggtgtatatgaacaacattttctttatccagtctaccattgatgagcatctagattgatcac

SEQ ID NO: 453518 - DNA, 573 bp, Homo sapiens
ttaatcatttcataaatgccacacctcctaatactattatcaccttgagggttaggatttcaacagatgaattttgagggtaatacaaatatttaaattaaagcaaatcttggtcagattagcaatcaaatcccatgacattgttttttttttttttaattatgttagtttctggggcatgtgcaggtttattacatacgtaaattgcatgtcactggggtttggtgtaaagactatttttaacacccaggtaataagcatactaccatacaggcagtttttctgtcctcaccttcctcccaacctataccctcaagcaggctctgaagtctgttgttccgttttttgtgtccatatgaatggatgtttagctcccatctataagtaagaacatgtggtatttatttttctgtctctgcattagttcacttaggataatggtgtataratccatccatgttgctgcaaaagacatgacctcattattttgtatgcctgcatagtatcccatggtgtatatgaacaacattttctttatccagtctaccattgatgagcatctagattgatcac

SEQ ID NO: 453519 - DNA, 545 bp, Homo sapiens
taaatattccctcttccaatcttgcttccaaagatactaatacatatatactaccaaattcctactatccaacctcctcctctaaattcatatatgatgcatgatatgcaagcaagtttcagttattggttagttgttacataacatagatcaatgtatttccagcctttctaatatcacttttgcctargaacaagtgatttcttgttcatgtaatataccatgtatcatcagaagaagttctgctccatagtcacttgtcagccctgcctgaaaaaagatatagctaacatattaagtctccttagtaatcaaggaaggaaagagagcaactggaatatgaaaaaatttcgaagctatgaacttgggtattttaaagggtgctctgaggtgatcatcttaaatttaaaaaaaagtttccccaagtatttacatggagaaccttgtatgaaataggcacccaagtttttcattgtgttaaaattattaacttgatgcttaaaataaaagactatcctcactgatttcatataactaatatctaa

SEQ ID NO: 453520 - DNA, 613 bp, Homo sapiens
aaatgaatctattgatagtttgagagataagaaaaaaataagtacagttgggaatcaatttaatatttttagagatagttatgtaactggccttttgtaactactactatttaaataaatcacaaagtttgacctcttctattcatttacacctaaggatttattgtcttttattcttcctgagccaaatgaaagctaaatatttgttaactatcctcaaaaataaaattagagcaattcaaaaggtggttaattgttatgtgctattatttattattttttgaggccttgctctgttgttcaggctggagtgcagtgacacaatcctggttcactgaagcctcgacctccgaggcttaagccatcctcttgactcagcctcctgagtagctaggactacaggcatgtgccaccatgtccagctaatttttttgttttaaattttttrtagagatggtgtctcaccatgttgcccaggctggtcttgaactcctgggcccaagcaatcctcttaccttggcctcccaagtgttaggattacaggaattagccattgcatccagccatctgcttattttgtacagtatctcaccaatatgttaagtactcacca

SEQ ID NO: 453521 - DNA, 604 bp, Homo sapiens
cctatctggcactgtgaatagggactatttcctaaaccaatccaagaaactttaaaccttcgcggggcagggggggagggggagagggggcggtttctttgagaaattagtttcatctgcacatttactagttaaaaatcctacttgaaagaaaacaaatggcccaaatgaatacaaacctttccctcccataaaataataattttaaaaaatagaggktttttttggtggggggaagggacgttaggaaatgtaattttctcgttgcttacctgatgttactcctgggttatggctggacgcaggctgtagcttgtgctgtattttagaaggacacctgttctccccaccccacccccgtcctagtaggtgaaaaacttagccacgcagagagcacaaacttcctgatccttcgatgcagagaaggaataacacatcagcttcctcaggatcactaggcaacctaccttggtgtttcttcattgcgccaatcagaaatcaccaaggttgagtcccgccaatcggagctcacagggggaggctctcccccagctattctgttgcgatccagacaaacaccaccaaaaggaggcaggtttgcgtt

SEQ ID NO: 453522 - DNA, 594 bp, Homo sapiens
atccattcactcgactaatacttaggacgcactaactagaaatccaagtgctaggcacaggatgattaaaaagttgaatgagacacttttcctgacttccaggaacttccaggctgcttcagaacagtgactttccaggccctagagaaattcaagcacaggctacctgaacacttagtagggatgttgtagaaaagattccatcattagccgggagttagactagtgcaatgcttttcaaattatgccctagagtcctaggggtttcctcagagtccactaagaaggtaagtgacatagggagtggcagagcctccaggaacattccctacttcaaccagaatagttgtgcttttaagttctagtacaatgttgtttgggctaagtaaaaagttttaaaaccataggcctagactttaaggtccctttcaaccytgagtttatgattataatacagaatttacacaaatgttaatgggagctatgaaaaatcttcagaattgagtcaaacatttgttattattgttctttataactcttgaaatacacttacacttgtataatgctcctgttcatcttctacatctttgtccc

SEQ ID NO: 453523 - DNA, 594 bp, Homo sapiens
atccattcactcgactaatacttaggacgcactaactagaaatccaagtgctaggcacaggatgattaaaaagttgaatgagacacttttcctgacttccaggaacttccaggctgcttcagaacagtgactttccaggccctagagaaattcaagcacaggctacctgaacacttagtagggatgttgtagaaaagattccatcattagccgggagttagactagtgcaatgcttttcaaattatgccctagagtcctaggggtttcctcagagtccactaagaaggtaagtgacatagggagtggcagagcctccaggaacattccctacttcaaccagaatagttgtgcttttaagttctagtacaatgttgtttgggctaagtaaaaagttttaaaaccataggcctagactttaaggtccctttcaaccttgagtttatgattataatacagaatttacacaaatgttaatgggagctatgaaaaatcttcagaattgagtcaaacatttgttattattgttctttataactcttgaaatacacttacacttrtataatgctcctgttcatcttctacatctttgtccc

SEQ ID NO: 453524 - DNA, 365 bp, Homo sapiens
tcctacctttataattgatctcaaagtgcacttctttttttttttttcctttcttgcacttagttagatttgtttgcctttayaccattgcttctcatcttgtggtttggaagtaagcccatcatgcatgcccattatgtccattactggggtaacagtaaaaccttgctccaagggaaagaaacctgcatccagacttgctacccagtgcctctgggactgggctcacccgctcaatgaaatgaggcagaacacagttgttgctgactgctccctggggttccagcttattggaaactctggcttcagctactgtaggaggcaccatccaccttgccttctacatcattgtattctatgtaaat

SEQ ID NO: 453525 - DNA, 511 bp, Homo sapiens
tatcatagggttatcatgtggcataatttcaatatcattgtgtctcagggaacagggaggcctgaggagagagatgggggtgtggccagtccgtggatcagtcagaacacacacaacatttgtgggttaagtctgctatcttatataggtgtggtttgtagctcaccctcaaaattatgaagtaacatcaaagatcattgatcacagatgaccataacagatataataatgatgagaaagtttgaaatattgtgagaattaccaaaatgtggtacaaggacacaatgtgagcacatgcttttgggaaaatggtaccaatagacttgctgaatgtagagttgccacaaaccttcaatttgtaaaaaatgcaatatctagctgggtgcagtggctcatgcctataattccagcgctttgggaggcmaaatcaggaggatgactggagcctaggagattgaggttacaattagctatgatcataccacctgtattacagcctagacaacagagc

SEQ ID NO: 453526 - DNA, 508 bp, Homo sapiens
ctacggtagtaaaaggaaacatcttcttataaaatctagacagaatcattcacagaaacttcttttygatgtgtgtgttcagctcacagagtttaacctttcttttgatggagcagtttggaaacactctgtttgtaatgtctgcaagtggatatttggacctctttgaggccttcgttggaaacgggatttcttcctgtaatgttcgacagaagaattctcagtaacttatttgtggtgtgtgtattcaactcacagagttgaaccttcctttagacagagcagatttgaaacaccctatttgtgcagtttccagttggagatttcaatcgctttgagaccaaatgtagaaaaggaaacatcttcgtataaaaactagacagaatcattctcagaaactactttgtgatgtgtgcgttcaactcaaggagtttaagctttcttttcatagagtagtttggaaacactctgcctgtaaagtgtgcaagcagatatttggacctctttg

SEQ ID NO: 453527 - DNA, 467 bp, Homo sapiens
agaatcattcacagaaacttctttttgatgtgtgtgttcagctcacagagtttaacctttctwttgatggagcagtttggaaacactctgtttgtaatgtctgcaagtggatatttggacctctttgaggccttcgttggaaacgggatttcttcctgtaatgttcgacagaagaattctcagtaacttatttgtggtgtgtgtattcaactcacagagttgaaccttcctttagacagagcagatttgaaacaccctatttgtgcagtttccagttggagatttcaatcgctttgagaccaaatgtagaaaaggaaacatcttcgtataaaaactagacagaatcattctcagaaactactttgtgatgtgtgcgttcaactcaaggagtttaagctttcttttcatagagtagtttggaaacactctgcctgtaaagtgtgcaagcagatatttggacctctttg

SEQ ID NO: 453528 - DNA, 384 bp, Homo sapiens
cagaaacttctttttgatgtgtgtgttcagctcacagagtttaacctttcttttgatggagcagtttggaaacactctgtttgtaatgtctgcaagtggatatttggacctctttgaggccttcgttggaaacgggatttcttcmtgtaatgttcgacagaagaattctcagtaacttatttgtggtgtgtgtattcaactcacagagttgaaccttcctttagacagagcagatttgaaacaccctatttgtgcagtttccagttggagatttcaatcgctttgagaccaaatgtagaaaaggaaacatcttcgtataaaaactagacagaatcattctcagaaactactttgtgatgtgtgcgttcaactcaaggagtttaa

SEQ ID NO: 453529 - DNA, 384 bp, Homo sapiens
cagaaacttctttttgatgtgtgtgttcagctcacagagtttaacctttcttttgatggagcagtttggaaacactctgtttgtaatgtctgcaagtggatatttggacctctttgaggccttcgttggaaacgggatttcttccwgtaatgttcgacagaagaattctcagtaacttatttgtggtgtgtgtattcaactcacagagttgaaccttcctttagacagagcagatttgaaacaccctatttgtgcagtttccagttggagatttcaatcgctttgagaccaaatgtagaaaaggaaacatcttcgtataaaaactagacagaatcattctcagaaactactttgtgatgtgtgcgttcaactcaaggagtttaa

SEQ ID NO: 453530 - DNA, 384 bp, Homo sapiens
cagaaacttctttttgatgtgtgtgttcagctcacagagtttaacctttcttttgatggagcagtttggaaacactctgtttgtaatgtctgcaagtggatatttggacctctttgaggccttcgttggaaacgggatttcttcctgtaatgktcgacagaagaattctcagtaacttatttgtggtgtgtgtattcaactcacagagttgaaccttcctttagacagagcagatttgaaacaccctatttgtgcagtttccagttggagatttcaatcgctttgagaccaaatgtagaaaaggaaacatcttcgtataaaaactagacagaatcattctcagaaactactttgtgatgtgtgcgttcaactcaaggagtttaa

SEQ ID NO: 453531 - DNA, 448 bp, Homo sapiens
actctgtttgtaatgtctgcaagtggatatttggacctctttgaggccttcgttggaaacgggatttcttcctgtaatgttcgacagaagaattctcagtaacttatttgtggtgtgtgtattcaactcacagagttgaaccttcmtttagacagagcagatttgaaacaccctatttgtgcagtttccagttggagatttcaatcgctttgagaccaaatgtagaaaaggaaacatcttcgtataaaaactagacagaatcattctcagaaactactttgtgatgtgtgcgttcaactcaaggagtttaagctttcttttcatagagtagtttggaaacactctgcctgtaaagtgtgcaagcagatatttggacctctttggggccttcgttggaaacgggatttcttcatagaatgctagaaagaagaatactgagtaagttctt

SEQ ID NO: 453532 - DNA, 555 bp, Homo sapiens
tcagctcacagagtttaacctttcttttgatggagcagtttggaaacactctgtttgtaatgtctgcaagtggatatttggacctctttgaggccttcgttggaaacgggatttcttcctgtaatgttcgacagaagaattctcagtaacttatttgtggtgtgtgtattcaactcacagagttgaaccttcctttagacagagcagatttgaaacaccstatttgtgcagtttccagttggagatttcaatcgctttgagaccaaatgtagaaaaggaaacatcttcgtataaaaactagacagaatcattctcagaaactactttgtgatgtgtgcgttcaactcaaggagtttaagctttcttttcatagagtagtttggaaacactctgcctgtaaagtgtgcaagcagatatttggacctctttggggccttcgttggaaacgggatttcttcatagaatgctagaaagaagaatactgagtaagttctttgtgttgcctctattcaactcacagaggtgaactgtcctttagacagagcacatgtgaaa

SEQ ID NO: 453533 - DNA, 553 bp, Homo sapiens
gcaagtggatatttggacctctttgaggccttcgttggaaacgggatttcttcctgtaatgttcgacagaagaattctcagtaacttatttgtggtgtgtgtattcaactcacagagttgaaccttcctttagacagagcagatttgaaacaccctatttgtgcagtttccagttggagatttsaatcgctttgagaccaaatgtagaaaaggaaacatcttcgtataaaaactagacagaatcattctcagaaactactttgtgatgtgtgcgttcaactcaaggagtttaagctttcttttcatagagtagtttggaaacactctgcctgtaaagtgtgcaagcagatatttggacctctttggggccttcgttggaaacgggatttcttcatagaatgctagaaagaagaatactgagtaagttctttgtgttgcctctattcaactcacagaggtgaactgtcctttagacagagcacatgtgaaaccctctttttgtgatatttgcaggtggagatttcaagcgcttttaggccaaatgtagaaaagg

SEQ ID NO: 453534 - DNA, 555 bp, Homo sapiens
tcagctcacagagtttaacctttcttttgatggagcagtttggaaacactctgtttgtaatgtctgcaagtggatatttggacctctttgaggccttcgttggaaacgggatttcttcctgtaatgttcgacagaagaattctcagtaacttatttgtggtgtgtgtattcaactcacagagttgaaccttcctttagacagagcagatttgaaacaccctatttgtgcagtttccagttggagatttcaatcgctttgagaccaaatgtagaaaaggaaacatcttcgtataaaaactrgacagaatcattctcagaaactactttgtgatgtgtgcgttcaactcaaggagtttaagctttcttttcatagagtagtttggaaacactctgcctgtaaagtgtgcaagcagatatttggacctctttggggccttcgttggaaacgggatttcttcatagaatgctagaaagaagaatactgagtaagttctttgtgttgcctctattcaactcacagaggtgaactgtcctttagacagagcacatgtgaaa

SEQ ID NO: 453535 - DNA, 533 bp, Homo sapiens
tgaaccttcctttagacagagcagatttgaaacaccctatttgtgcagtttccagttggagatttcaatcgctttgagaccaaatgtagaaaaggaaacatcttcgtataaaaactagacagaatcattctcagaaactactttgtgatgkgtgcgttcaactcaaggagtttaagctttcttttcatagagtagtttggaaacactctgcctgtaaagtgtgcaagcagatatttggacctctttggggccttcgttggaaacgggatttcttcatagaatgctagaaagaagaatactgagtaagttctttgtgttgcctctattcaactcacagaggtgaactgtcctttagacagagcacatgtgaaaccctctttttgtgatatttgcaggtggagatttcaagcgcttttaggccaaatgtagaaaaggaaatatcttcgtataaaactagacagaatcattctcagaaactactttgtgatgtgtgcgtcaattcacagagtataacctttcttttgatggaggag

SEQ ID NO: 453536 - DNA, 493 bp, Homo sapiens
tttcaatcgctttgagaccaaatgtagaaaaggaaacatcttcgtataaaaactagacagaatcattctcagaaactactttgtgatgtgtgcgttcaactcaaggagtttaagctttcttttcatagagtagtttggaaacactctgcctgtaaastgtgcaagcagatatttggacctctttggggccttcgttggaaacgggatttcttcatagaatgctagaaagaagaatactgagtaagttctttgtgttgcctctattcaactcacagaggtgaactgtcctttagacagagcacatgtgaaaccctctttttgtgatatttgcaggtggagatttcaagcgcttttaggccaaatgtagaaaaggaaatatcttcgtataaaactagacagaatcattctcagaaactactttgtgatgtgtgcgtcaattcacagagtataacctttcttttgatggaggagtttggagacactgtctttgtgt

SEQ ID NO: 453537 - DNA, 576 bp, Homo sapiens
gcaagtggatatttggacctctttgaggccttcgttggaaacgggatttcttcctgtaatgttcgacagaagaattctcagtaacttatttgtggtgtgtgtattcaactcacagagttgaaccttcctttagacagagcagatttgaaacaccctatttgtgcagtttccagttggagatttcaatcgctttgagaccaaatgtagaaaaggaaacatcttcgtataaaaactagacagaatcattctcagaaactactttgtgatgtgtgcgttcaactcaaggagtttaagctttcttttcatagagtagtttggaaacactctgcctgtaaagtstgcaagcagatatttggacctctttggggccttcgttggaaacgggatttcttcatagaatgctagaaagaagaatactgagtaagttctttgtgttgcctctattcaactcacagaggtgaactgtcctttagacagagcacatgtgaaaccctctttttgtgatatttgcaggtggagatttcaagcgcttttaggccaaatgtagaaaaggaaatatcttcgtataaaactaga

SEQ ID NO: 453538 - DNA, 517 bp, Homo sapiens
tgggggtgatgtctggaatgaagctatggtggtagctaagagtcttcattgagaaaacaatcaagaggtagagtggccaggcacagtggcttatgcctgtaataccagtactttgggaggctgaggcaggaaatttgcttgagcccaggagttcaagacaagcctgggcaacacagggagaacccatctttactaaaaatttaaaaattatccaggcgtggtcgtagacacctgtagtcccagctactctgggggctgaggcrgaaggatcactgagctggggaggtccaaatggccgtgaatcatgattgcatcattgcactccagcctaggtgacagggcaagaccctgtctcaaaaaaaaaaaaaaaaaaaaaaaaaaaaaaaaaaaaaaaaagaaagaaaaaagaaaaaagaaaaagaaaaatgttgggagctagtggtgctgagtaaatctagggaggtacctattatagatagaatataatgatattattcatgagcagactttcggtgat

SEQ ID NO: 453539 - DNA, 533 bp, Homo sapiens
tgaaccttcctttagacagagcagatttgaaacaccctatttgtgcagtttccagttggagatttcaatcgctttgagaccaaatgtagaaaaggaaacatcttcgtataaaaactagacagaatcattctcagaaactactttgtgatgtgtgcgttcaactcaaggagtttaagctttcttttcatagagtagtttggaaacactctgcctgtaaagtgtgcaagcagatatttggacctctttggggccttckttggaaacgggatttcttcatagaatgctagaaagaagaatactgagtaagttctttgtgttgcctctattcaactcacagaggtgaactgtcctttagacagagcacatgtgaaaccctctttttgtgatatttgcaggtggagatttcaagcgcttttaggccaaatgtagaaaaggaaatatcttcgtataaaactagacagaatcattctcagaaactactttgtgatgtgtgcgtcaattcacagagtataacctttcttttgatggaggag

SEQ ID NO: 453540 - DNA, 532 bp, Homo sapiens
tcttttcatagagtagtttggaaacactctgcctgtaaagtgtgcaagcagatatttggacctctttggggccttcgttggaaacgggatttcttcatagaatgctagaaagaagaatactgagtaasttctttgtgttgcctctattcaactcacagaggtgaactgtcctttagacagagcacatgtgaaaccctctttttgtgatatttgcaggtggagatttcaagcgcttttaggccaaatgtagaaaaggaaatatcttcgtataaaactagacagaatcattctcagaaactactttgtgatgtgtgcgtcaattcacagagtataacctttcttttgatggaggagtttggagacactgtctttgtgtagtctgcaagtggatatttggacctctttgaggccttcgttggaaacgggatttcctcatataatgttacacagaagaattctcagtaacttatttgtggtgtgtttattcaactcacagagttgaaccttccttcagaaagagcaaatttgaaac

SEQ ID NO: 453541 - DNA, 609 bp, Homo sapiens
ttgaaacaccctatttgtgcagtttccagttggagatttcaatcgctttgagaccaaatgtagaaaaggaaacatcttcgtataaaaactagacagaatcattctcagaaactactttgtgatgtgtgcgttcaactcaaggagtttaagctttcttttcatagagtagtttggaaacactctgcctgtaaagtgtgcaagcagatatttggacctctttggggccttcgttggaaacgggatttcttcatagaatgctagaaagaagaatactgagtaagttctttgtgttgcctctattcaactcacagaggtgaactgtcctttagacagagcacatgtgaaaccctctttttgtgatatttgcaggtggagatttcaagcgcttttaggccaaatgtagaaaaggaaatatcttcgtataaaactagacagaatcattctsagaaactactttgtgatgtgtgcgtcaattcacagagtataacctttcttttgatggaggagtttggagacactgtctttgtgtagtctgcaagtggatatttggacctctttgaggccttcgttggaaacgggatttcctcatataatgttacacagaagaat

SEQ ID NO: 453542 - DNA, 532 bp, Homo sapiens
tcttttcatagagtagtttggaaacactctgcctgtaaagtgtgcaagcagatatttggacctctttggggccttcgttggaaacgggatttcttcatagaatgctagaaagaagaatactgagtaagttctttgtgttgcctctattcaactcacagaggtgaactgtcctttagacagagcacatgtgaaaccctctttttgtgatatttgcaggtggagatttcaagcgcttttaggccaaatgtagaaaaggaaatatcttcgtataaaactagacagaatcattctcagaaactactttgtgatgtgtgcgtcaattcacagagtataacctttcttttgatggaggagtttggagacactgtctttgtgtagtctgcaagtggatatttggacctctttgaggccttcgttggaaacgggawttcctcatataatgttacacagaagaattctcagtaacttatttgtggtgtgtttattcaactcacagagttgaaccttccttcagaaagagcaaatttgaaac

SEQ ID NO: 453543 - DNA, 364 bp, Homo sapiens
ctttgtgttgcctctattcaactcacagaggtgaactgtcctttagacagagcacatgtgaaaccctctttttgtgatatttgcaggtggagatttcaagcgcttttaggccaaatgtagaaaaggaaatatcttcgtataaaactagacagaatcattctcagaaactactttgtgatgtgtgcgtcaattcacagagtataacctttcttttgatggaggagtttggagacactgtctttgtgtagtctgcaagtggatatttggacctctttgaggccttcgttggaaacgggatttcctcatataatrttacacagaagaattctcagtaacttatttgtggtgtgtttattcaactcac

SEQ ID NO: 453544 - DNA, 589 bp, Homo sapiens
aaaggaaacatcttcgtataaaaactagacagaatcattctcagaaactactttgtgatgtgtgcgttcaactcaaggagtttaagctttcttttcatagagtagtttggaaacactctgcctgtaaagtgtgcaagcagatatttggacctctttggggccttcgttggaaacgggatttcttcatagaatgctagaaagaagaatactgagtaagttctttgtgttgcctctattcaactcacagaggtgaactgtcctttagacagagcacatgtgaaaccctctttttgtgatatttgcaggtggagatttcaagcgcttttaggccaaatgtagaaaaggaaatatcttcgtataaaactagacagaatcattctcagaaactactttgtgatgtgtgcgtcaattcacagagtataacctttcttttgatggaggagtttggagacactgtctttgtgtagtctgcaagtggatatttggacctctttgaggccttcgttggaaacgggatttcctcatataatgttacacagaagaattctcrgtaacttatttgtggtgtgtttattcaactcacagagtt

SEQ ID NO: 453545 - DNA, 551 bp, Homo sapiens
tactttgtgatgtgtgcgttcaactcaaggagtttaagctttcttttcatagagtagtttggaaacactctgcctgtaaagtgtgcaagcagatatttggacctctttggggccttcgttggaaacgggatttcttcatagaatgctagaaagaagaatactgagtaagttctttgtgttgcctctattcaactcacagaggtgaactgtcctttagacagagcacatgtgaaaccctctttttgtgatatttgcaggtggagatttcaagcgcttttaggccaaatgtagaaaaggaaatatcttcgtataaaactagacagaatcattctcagaaactactttgtgatgtgtgcgtcaattcacagagtataacctttcttttgatggaggagtttggagacactgtctttgtgtagtctgcaagtggatatttggacctctttgaggccttcgttggaaacgggatttcctcatataatgttacacagaagaattctcagtaactyatttgtggtgtgtttattcaactcacagagttgaaccttcct

SEQ ID NO: 453546 - DNA, 534 bp, Homo sapiens
tcctttagacagagcacatgtgaaaccctctttttgtgatatttgcaggtggagatttcaagcgcttttaggccaaatgtagaaaaggaaatatcttcgtataaaactagacagaatcattctcagaaactactttgtgatgtgtgcgtcaattcacagagtataacctttcttttgatggaggagtttggagacactgtctttgtgtagtctgcaagtggatatttggacctctttgaggccttcgttggaaacgggatttcctcatataatgttacacagaagaattctcagtaacttatttgtggtgtgwttattcaactcacagagttgaaccttccttcagaaagagcaaatttgaaacactctttttgtggagtttccatgtggagatttcaatcgctttgagaccaagggtagaaaaggaaacatcttcgtataaaaactagacagaatcattcacagaaactactttgtgatgtgtgtgttcaactcaaggagtttaacctttcttttgatggagcagtttggaaa

SEQ ID NO: 453547 - DNA, 592 bp, Homo sapiens
tggaaacgggatttcttcatagaatgctagaaagaagaatactgagtaagttctttgtgttgcctctattcaactcacagaggtgaactgtcctttagacagagcacatgtgaaaccctctttttgtgatatttgcaggtggagatttcaagcgcttttaggccaaatgtagaaaaggaaatatcttcgtataaaactagacagaatcattctcagaaactactttgtgatgtgtgcgtcaattcacagagtataacctttcttttgatggaggagtttggagacactgtctttgtgtagtctgcaagtggatatttggacctctttgaggccttcgttggaaacgggatttcctcatataatgttacacagaagaattctcagtaacttatttgtggtgtgtktattcaactcacagagttgaaccttccttcagaaagagcaaatttgaaacactctttttgtggagtttccatgtggagatttcaatcgctttgagaccaagggtagaaaaggaaacatcttcgtataaaaactagacagaatcattcacagaaactactttgtgatgtgtgtgttcaactcaaggagt

SEQ ID NO: 453548 - DNA, 561 bp, Homo sapiens
tggggccttcgttggaaacgggatttcttcatagaatgctagaaagaagaatactgagtaagttctttgtgttgcctctattcaactcacagaggtgaactgtcctttagacagagcacatgtgaaaccctctttttgtgatatttgcaggtggagatttcaagcgcttttaggccaaatgtagaaaaggaaatatcttcgtataaaactagacagaatcattctcagaaactactttgtgatgtgtgcgtcaattcacagagtataacctttcttttgatggaggagtttggagacactgtctttgtgtagtctgcaagtggatatttggacctctttgaggccttcgttggaaacgggatttcctcatataatgttacacagaagaattctcagtaacttatttgtggtgtgtttattcamctcacagagttgaaccttccttcagaaagagcaaatttgaaacactctttttgtggagtttccatgtggagatttcaatcgctttgagaccaagggtagaaaaggaaacatcttcgtataaaaactagacagaatcat

SEQ ID NO: 453549 - DNA, 453 bp, Homo sapiens
ctttgtgttgcctctattcaactcacagaggtgaactgtcctttagacagagcacatgtgaaaccctctttttgtgatatttgcaggtggagatttcaagcgcttttaggccaaatgtagaaaaggaaatatcttcgtataaaactagacagaatcattctcagaaactactttgtgatgtgtgcgtcaattcacagagtataacctttcttttgatggaggagtttggagacactgtctttgtgtagtctgcaagtggatatttggacctctttgaggccttcgttggaaacgggatttcctcatataatgttacacagaagaattctcagtaacttatttgtggtgtgtttattcaactcacagagwtgaaccttccttcagaaagagcaaatttgaaacactctttttgtggagtttccatgtggagatttcaatcgctttgagaccaag

SEQ ID NO: 453550 - DNA, 530 bp, Homo sapiens
tttaggccaaatgtagaaaaggaaatatcttcgtataaaactagacagaatcattctcagaaactactttgtgatgtgtgcgtcaattcacagagtataacctttcttttgatggaggagtttggagacactgtctttgtgtagtctgcaagtggatatttggacctctttgaggccttcgttggaaacgggatttcctcatataatgttacacagaagaattctcagtaacttatttgtggtgtgtttattcaactcacagagttgaaccttccttcagaaagagcaratttgaaacactctttttgtggagtttccatgtggagatttcaatcgctttgagaccaagggtagaaaaggaaacatcttcgtataaaaactagacagaatcattcacagaaactactttgtgatgtgtgtgttcaactcaaggagtttaacctttcttttgatggagcagtttggaaaaactctgtctgtaaagtctgcaagcagatatttgggcctctttgaggccttcgttggaaacg

SEQ ID NO: 453551 - DNA, 518 bp, Homo sapiens
gccttcgttggaaacgggatttcttcatagaatgctagaaagaagaatactgagtaagttctttgtgttgcctctattcaactcacagaggtgaactgtcctttagacagagcacatgtgaaaccctctttttgtgatatttgcaggtggagatttcaagcgcttttaggccaaatgtagaaaaggaaatatcttcgtataaaactagacagaatcattctcagaaactactttgtgatgtgtgcgtcaattcacagagtataacctttcttttgatggaggagtttggagacactgtctttgtgtagtctgcaagtggatatttggacctctttgaggccttcgttggaaacgggatttcctcatataatgttacacagaagaattctcagtaacttatttgtggtgtgtttattcaactcacagagttgaaccttccttcagaaagagcaaatttgaaacactctttttgtggagtttccatgtggasatttcaatcgctttgagaccaagggtag

SEQ ID NO: 453552 - DNA, 556 bp, Homo sapiens
gggccttcgttggaaacgggatttcttcatagaatgctagaaagaagaatactgagtaagttctttgtgttgcctctattcaactcacagaggtgaactgtcctttagacagagcacatgtgaaaccctctttttgtgatatttgcaggtggagatttcaagcgcttttaggccaaatgtagaaaaggaaatatcttcgtataaaactagacagaatcattctcagaaactactttgtgatgtgtgcgtcaattcacagagtataacctttcttttgatggaggagtttggagacactgtctttgtgtagtctgcaagtggatatttggacctctttgaggccttcgttggaaacgggatttcctcatataatgttacacagaagaattctcagtaacttatttgtggtgtgtttattcaactcacagagttgaaccttccttcagaaagagcaaatttgaaacactctttttgtggagtttccatgtggagatttcaatsgctttgagaccaagggtagaaaaggaaacatcttcgtataaaaactagacagaat

SEQ ID NO: 453553 - DNA, 592 bp, Homo sapiens
tggaaacgggatttcttcatagaatgctagaaagaagaatactgagtaagttctttgtgttgcctctattcaactcacagaggtgaactgtcctttagacagagcacatgtgaaaccctctttttgtgatatttgcaggtggagatttcaagcgcttttaggccaaatgtagaaaaggaaatatcttcgtataaaactagacagaatcattctcagaaactactttgtgatgtgtgcgtcaattcacagagtataacctttcttttgatggaggagtttggagacactgtctttgtgtagtctgcaagtggatatttggacctctttgaggccttcgttggaaacgggatttcctcatataatgttacacagaagaattctcagtaacttatttgtggtgtgtttattcaactcacagagttgaaccttccttcagaaagagcaaatttgaaacactctttttgtggagtttccatgtggagatttcaatcgcwttgagaccaagggtagaaaaggaaacatcttcgtataaaaactagacagaatcattcacagaaactactttgtgatgtgtgtgttcaactcaaggagt

SEQ ID NO: 453554 - DNA, 548 bp, Homo sapiens
actgagtaagttctttgtgttgcctctattcaactcacagaggtgaactgtcctttagacagagcacatgtgaaaccctctttttgtgatatttgcaggtggagatttcaagcgcttttaggccaaatgtagaaaaggaaatatcttcgtataaaactagacagaatcattctcagaaactactttgtgatgtgtgcgtcaattcacagagtataacctttcttttgatggaggagtttggagacactgtctttgtgtagtctgcaagtggatatttggacctctttgaggccttcgttggaaacgggatttcctcatataatgttacacagaagaattctcagtaacttatttgtggtgtgtttattcaactcacagagttgaaccttccttcagaaagagcaaatttgaaacactctttttgtggagtttccatgtggagatttcaatcgctttsagaccaagggtagaaaaggaaacatcttcgtataaaaactagacagaatcattcacagaaactactttgtgatgtgtgtgttcaactcaag

SEQ ID NO: 453555 - DNA, 516 bp, Homo sapiens
ctattcaactcacagaggtgaactgtcctttagacagagcacatgtgaaaccctctttttgtgatatttgcaggtggagatttcaagcgcttttaggccaaatgtagaaaaggaaatatcttcgtataaaactagacagaatcattctcagaaactactttgtgatgtgtgcgtcaattcacagagtataacctttcttttgatggaggagtttggagacactgtctttgtgtagtctgcaagtggatatttggacctctttgaggccttcgttggaaacgggatttcctcatataatgttacacagaagaattctcagtaacttatttgtggtgtgtttattcaactcacagagttgaaccttccttcagaaagagcaaatttgaaacactctttttgtggagtttccatgtggagatttcaatcgctttgagaccaarggtagaaaaggaaacatcttcgtataaaaactagacagaatcattcacagaaactactttgtgatgtgtgtgttca

SEQ ID NO: 453556 - DNA, 532 bp, Homo sapiens
atttgcaggtggagatttcaagcgcttttaggccaaatgtagaaaaggaaatatcttcgtataaaactagacagaatcattctcagaaactactttgtgatgtgtgcgtcaattcacagagtataacctttcttttgatggaggagtttggagacactgtctttgtgtagtctgcaagtggatatttggacctctttgaggccttcgttggaaacgggatttcctcatataatgttacacagaagaattctcagtaacttatttgtggtgtgtttattcaactcacagagttgaaccttccttcagaaagagcaaatttgaaacactctttttgtggagtttccatgtggagatttcaatcgctttgagaccaagggtagaaaaggaaacatcttcgtataaaaastagacagaatcattcacagaaactactttgtgatgtgtgtgttcaactcaaggagtttaacctttcttttgatggagcagtttggaaaaactctgtctgtaaagtctgcaagcagatatttgggcc

SEQ ID NO: 453557 - DNA, 591 bp, Homo sapiens
gttctttgtgttgcctctattcaactcacagaggtgaactgtcctttagacagagcacatgtgaaaccctctttttgtgatatttgcaggtggagatttcaagcgcttttaggccaaatgtagaaaaggaaatatcttcgtataaaactagacagaatcattctcagaaactactttgtgatgtgtgcgtcaattcacagagtataacctttcttttgatggaggagtttggagacactgtctttgtgtagtctgcaagtggatatttggacctctttgaggccttcgttggaaacgggatttcctcatataatgttacacagaagaattctcagtaacttatttgtggtgtgtttattcaactcacagagttgaaccttccttcagaaagagcaaatttgaaacactctttttgtggagtttccatgtggagatttcaatcgctttgagaccaagggtagaaaaggaaacatcttcgtataaaaactagacagaatcattcrcagaaactactttgtgatgtgtgtgttcaactcaaggagtttaacctttcttttgatggagcagtttggaaaaactctgtctgtaaag

SEQ ID NO: 453558 - DNA, 532 bp, Homo sapiens
atttgcaggtggagatttcaagcgcttttaggccaaatgtagaaaaggaaatatcttcgtataaaactagacagaatcattctcagaaactactttgtgatgtgtgcgtcaattcacagagtataacctttcttttgatggaggagtttggagacactgtctttgtgtagtctgcaagtggatatttggacctctttgaggccttcgttggaaacgggatttcctcatataatgttacacagaagaattctcagtaacttatttgtggtgtgtttattcaactcacagagttgaaccttccttcagaaagagcaaatttgaaacactctttttgtggagtttccatgtggagatttcaatcgctttgagaccaagggtagaaaaggaaacatcttcgtataaaaactagacagaatcattcacagaaactactttgtgatgtgtgtgttcaactcaaggagtttaacctttcttttgatggagcagtttggaaamactctgtctgtaaagtctgcaagcagatatttgggcc

SEQ ID NO: 453559 - DNA, 282 bp, Homo sapiens
gaaacactctttttgtggagtttccatgtggagatttcaatcgctttgagaccaagggtagaaaaggaaacatcttcgtataaaaactagacagaatcattcacagaaactactttgtgatgtgtgtgttcaactcaaggagtttaacctttcttttgatggagcagtttggaaaaactctgtctgtaaagtctgcaagcagatatttggrcctctttgaggccttcgttggaaacgggatgtcttcatataatgtttgataggagaagtctcagtaacttc

SEQ ID NO: 453560 - DNA, 282 bp, Homo sapiens
gaaacactctttttgtggagtttccatgtggagatttcaatcgctttgagaccaagggtagaaaaggaaacatcttcgtataaaaactagacagaatcattcacagaaactactttgtgatgtgtgtgttcaactcaaggagtttaacctttcttttgatggagcagtttggaaaaactctgtctgtaaagtctgcaagcagatatttgggcctctttgaggccttcgttggaaacgggatktcttcatataatgtttgataggagaagtctcagtaacttc

SEQ ID NO: 453561 - DNA, 625 bp, Homo sapiens
tatttaaaaagaaacatttacttgatttgttacaaaaacttgtagcctacaaggaaaaatttgacaggtaaatttaaaaacagaaagaaacatgctctgtcaaccttaacaaaatttttaatttataaataatcagtaaacaacgaaactagaaatcactgatatacctaagaaaagcattctrtatgtaaataatattgctaataatgaaaataagaacaatgagttattttcagtagagaatgaggtagaaataaaatactgtgtaacaatatatgccaattgagatggaagattttggttttgcaacttctaaattctttatgtttggggaagaagaaaggtatagtgaccaacttaatacatttttatggaatatttattacataataaaataggtactgaggaaatgccacatgaaatgccacataaaataagttatagttttccaaagccatatgaagataaaaggactaattgtgcctcaaaaattcaaaacagggtttacaaatagggaagatgacatagaaaacattatagtaaatagtatataatagtaaaaatagatcataatatgttaaaagccataataaagagttagttggacaaagttatccagtttaat

SEQ ID NO: 453562 - DNA, 528 bp, Homo sapiens
gtctttttgtattagctggtagcagtctttctgtatttagcattcaagatctcttgtaaggcaggtctggtggtaatgaactctgtcaatatttgcttatgttaaaagaatcatatttttcytttgcttggaaagcttagttaggctggatataaaattcttggttgaagattttttttctttaagaatgttgaatatagacctgcaatctcttctggcctgtagggtttccactgggagttctgttcttagtctgatggggtttcctttttaggtgaaacttcctgtctctttagctgcatttaacattctttcttttattttgaccttgaagaatctgttggtcatgtgtcttgggataatcttcttgtgtagaatcttgcaggcattctctgtatttcctgaatttgacacttggcctctctagcaaggtgggggacattttcatgacaatatcctaaaatatgttttccaagtttttgcttttttcccttctctttcagggatgccagtgattaatgattcttt

SEQ ID NO: 453563 - DNA, 512 bp, Homo sapiens
ggcctaggaggtaaaaatggttttgtgggctgaaaccagggccccactgctatgttcagcctcatgacttagggccctgtgtccccgctgctccagctgtggctaaaaggggccaaagtacagcttgggccattgctttagaggctgaaagcctcaagctttggtggcttccacatgttgttgggcatgtgggtgtgcacaaggcaagagttgaggttttggaaacctctgcctaaatttcagagsatgtagggaaatacctgggtgtcaaggaagaaatctgctgcagaggtggagccctcatgcagaacctctgttagggcagtgcagagggaaatgtgagattggagaccccacacagagtctccactggggcactgcctagtggaactgtgagaagagggccaccatcctctagagccaagaaaagtagagccaccgacagcttgtaccatgttcctggaaaaaccataggcactcaacactagcccatgagagcagacagaggggct

SEQ ID NO: 453564 - DNA, 512 bp, Homo sapiens
ggcctaggaggtaaaaatggttttgtgggctgaaaccagggccccactgctatgttcagcctcatgacttagggccctgtgtccccgctgctccagctgtggctaaaaggggccaaagtacagcttgggccattgctttagaggctgaaagcctcaagctttggtggcttccacatgttgttgggcatgtgggtgtgcacaaggcaagagttgaggttttggaaacctctgcctaaatttcagaggatgtakggaaatacctgggtgtcaaggaagaaatctgctgcagaggtggagccctcatgcagaacctctgttagggcagtgcagagggaaatgtgagattggagaccccacacagagtctccactggggcactgcctagtggaactgtgagaagagggccaccatcctctagagccaagaaaagtagagccaccgacagcttgtaccatgttcctggaaaaaccataggcactcaacactagcccatgagagcagacagaggggct

SEQ ID NO: 453565 - DNA, 524 bp, Homo sapiens
tgtctcccatcatccccagatgggaccatctagttgcagaaaaactagttcaggcttccactgattctacactatgatgaycatataactccttcattatatattacaacgtaataataatagaaataaagtgcgtgatacatttaatgtgcttaaatcatcctgacaccatcccccctccatccaaggaaaaattgtcttccacaaaaccaatccgtggtgccaaaaatgttgaggaccactgttttagggtacagggaggggcagaatggaggaagaataaagagggggttgacagagagtaatcagcatatatatgtttttcagtttattatttttctttacagtgattgaaaacctatgtgtttaatttattttctccgtaagctctagatccccaggcaaaattcatcagcaggtgataacatgagatggaaataatgccaaggctgtcactctactagatgatgctcttgtagataattttagaaaaatgcaggtaacagagttcattcaagagatct

SEQ ID NO: 453566 - DNA, 650 bp, Homo sapiens
tgagtgtcataaaatatttatgagtcagattcaaaaggcatgcagattaagactagaggtcacaaaagccaattaagtaattaagaaatatcgctgcacaatacattatataatgtatcaaatggtgctatcatcaaaatgggcctcataaaaagtatgtgatttgggttataaatattaattacttttatacaaatatgataaaaatttaaaagtaggagaaaagtctgcctacttttaaaatagaaacaaatatttgatttgcaagaaattcagagagtttaaaaaataaacagctaggacataccaggaaatgaataaatgccagtacctaattcaaatatgaatagaaaattaatataaaaataagcttattgagtcagaaagatggccttctttcctgtccttaattttctcttttagaatataaatttcctttttggaatataaatcacagctttatattctgtgattttgccctatgcccacagcacgttcaagaattgccaggccctyccaatgtcaatgaaaaaatacgtgcaaaatcacatttgttgttctcatagtgttatttctcatacccccaaaaggaatgtattagtcattgggaatgctatacatataaagtaaataaaataatgaataaattt

SEQ ID NO: 453567 - DNA, 580 bp, Homo sapiens
tacgtgtcataaagtggaaaataaatctcaaaaaatgtaggagcttcctacccccatgcaaattccatgtatgaggagtctgtggcatattaaaacattgcatcagaagaggacaaattcacactgctgtstctggcactacccaccactaagacagaggaaaactatccagtaaacacttttgtttttgaaggtccatacgtacctcactgaaaggcttccagttttgagtggaatgcgagagcaagagaacaatatgcattatgtctgtgatgtcatatacgcttttctgacaattggaccagatgactgaggagacacaatagtgcttgagatgtaagagtcagataagttttatatatggagcctttagcaggtcactgtgggtgaatccagtatagacctttcgggttttgaagtaaacatatgccatccttagccaatacaagatagctctttcaaaaacatcttttgagccataatagaaacataatatgagaccatgggccacaatatgtcctaggagtttttctaatattctacaccttcaggttggatatatagagcactagtctatcaa

SEQ ID NO: 453568 - DNA, 580 bp, Homo sapiens
tacgtgtcataaagtggaaaataaatctcaaaaaatgtaggagcttcctacccccatgcaaattccatgtatgaggagtctgtggcatattaaaacattgcatcagaagaggacaaattcacactgctgtgtctggcactacccaccactaagacagaggaaaactatccagtaaacacttttgtttttgaaggtccataygtacctcactgaaaggcttccagttttgagtggaatgcgagagcaagagaacaatatgcattatgtctgtgatgtcatatacgcttttctgacaattggaccagatgactgaggagacacaatagtgcttgagatgtaagagtcagataagttttatatatggagcctttagcaggtcactgtgggtgaatccagtatagacctttcgggttttgaagtaaacatatgccatccttagccaatacaagatagctctttcaaaaacatcttttgagccataatagaaacataatatgagaccatgggccacaatatgtcctaggagtttttctaatattctacaccttcaggttggatatatagagcactagtctatcaa

SEQ ID NO: 453569 - DNA, 580 bp, Homo sapiens
tacgtgtcataaagtggaaaataaatctcaaaaaatgtaggagcttcctacccccatgcaaattccatgtatgaggagtctgtggcatattaaaacattgcatcagaagaggacaaattcacactgctgtgtctggcactacccaccactaagacagaggaaaactatccagtaaacacttttgtttttgaaggtccatacgtacctcactgaaaggcttccagttttgagtggaatgcgagagcaagagaacaatatgcattatgtctgtgatgtcatatacgcttttctgacaattggaccagatgactgaggagacacaatagtgcttgaratgtaagagtcagataagttttatatatggagcctttagcaggtcactgtgggtgaatccagtatagacctttcgggttttgaagtaaacatatgccatccttagccaatacaagatagctctttcaaaaacatcttttgagccataatagaaacataatatgagaccatgggccacaatatgtcctaggagtttttctaatattctacaccttcaggttggatatatagagcactagtctatcaa

SEQ ID NO: 453570 - DNA, 533 bp, Homo sapiens
catgggccacaatatgtcctaggagtttttctaatattctacaccttcaggttggatatatagagcactagtctatcaacaagtgaaaatgatacacacatactaaatatggcttacaaatgttctgaagggataagtaatttgcataaacaagtggttaagaatgcatgtttcctgcttctcactccacactggtaacctcttgaggagattatgacaaccagaggaataaaataattcgatgctgttttaaatataaatatagttctacataatttacgaacaacagaaaatggacagctgttacatttcatcccccactcatgggaaaccttatgwacaggagtgagtggaaatcacctcagaggctgaagacctgcctgttatttggcctgaaaaacagaagactgagatatggatctacactgatttatagacaatggctaatgatttggatggttggccaagaccttagaaaaatttgattagaaaagtgctggcaaggaggctgtggaaagaattgtgtggattaa

SEQ ID NO: 453571 - DNA, 470 bp, Homo sapiens
gatcaaccttcccccaacatcctctagtacttttccagtacctcaccccagtactaataaacttttttgcctttgtttcagtggagctgagttcagaatgagttacagtcttttgtccatgctacaataggcttgaataaatcttcctttcctgtttaattttttcaggtataatttttgcttttataccacaaattgagctgacatagtagaactaatcccataagcaggggatggacatcccacacaagaacctttgtcatgcattgttcatgctcagtgcagtggtcatcaattttaccacctgtagcccccacagcattgcagtcatcaagaatagtggtgaaagttctgagttgagtaaakgaaacatctcaacatgagggcagcacattttccagaaacccatcaccgtggcatagagtgatagctatccctgcaaacttggagagaatgaagggatgggaaaa

SEQ ID NO: 453572 - DNA, 575 bp, Homo sapiens
gtttatgctcaattaattgagtctacattttaaagtttttgtcaagactttacattggaatggttagaattttacttttaagtattaagcttgatgtaaataaatagttaaaaagatcagccataatattttaggaaacatttcggaaaatggagccagaaaaatttgagctgtttctcataaataaaaatatgtctttatttgtgcgtgtttaattaccattattccatatatattacaacaaaagagaaagtaattttcctaatagctaaggtatacatgttacattagtttgtattaaggaggagcatactatcaatgatttaaagrtacacacaccactaccaattttgtagatattatagaatgatattttctataaaattaaactttatcattcttgttagattagaatacatattgtcatatcatttttttattgttaaaaataacatgattctaaaaccatacaaatgatctgaaatccattgagtttactcagaagcattactgctacttacatgaaaagttttcttaaattaaaattcccacagccaaaaagtcatttaaatgag

SEQ ID NO: 453573 - DNA, 575 bp, Homo sapiens
gtttatgctcaattaattgagtctacattttaaagtttttgtcaagactttacattggaatggttagaattttacttttaagtattaagcttgatgtaaataaatagttaaaaagatcagccataatattttaggaaacatttcggaaaatggagccagaaaaatttgagctgtttctcataaataaaaatatgtctttatttgtgcgtgtttaattaccattattccatatatattacaacaaaagagaaagtaattttcctaatagctaaggtatacatgttacattagtttgtattaaggaggagcatactatcaatgatttaaagatacacacaccactaccaattttgtagatattatagaatgatattttctataaaattaaactttatcattcttgttagrttagaatacatattgtcatatcatttttttattgttaaaaataacatgattctaaaaccatacaaatgatctgaaatccattgagtttactcagaagcattactgctacttacatgaaaagttttcttaaattaaaattcccacagccaaaaagtcatttaaatgag

SEQ ID NO: 453574 - DNA, 575 bp, Homo sapiens
gtttatgctcaattaattgagtctacattttaaagtttttgtcaagactttacattggaatggttagaattttacttttaagtattaagcttgatgtaaataaatagttaaaaagatcagccataatattttaggaaacatttcggaaaatggagccagaaaaatttgagctgtttctcataaataaaaatatgtctttatttgtgcgtgtttaattaccattattccatatatattacaacaaaagagaaagtaattttcctaatagctaaggtatacatgttacattagtttgtattaaggaggagcatactatcaatgatttaaagatacacacaccactaccaattttgtagatattatagaatgatattttctataaaattaaactttatcattcttgttagattagaatacatattgtcatatcatttttttattgttaaaaataacatgattctaaaaccatacaaatgatctgaaatccattgagkttactcagaagcattactgctacttacatgaaaagttttcttaaattaaaattcccacagccaaaaagtcatttaaatgag

SEQ ID NO: 453575 - DNA, 575 bp, Homo sapiens
  misc_feature (1)...(575): n = A,T,C or G
ggcttaatagaagaagtctcaagataggtatattttgaggggtcaacactggcttgatnnagagtctgtgatatccagatggttaacctatttagcyatttgcaactaaatcagctgaaacaaaattttacttgcattactaaaactcagtgacaccaaatacatgtattaagtctagtttgtcagctgagagtagaatatgtatctaatgcaacatctgggagctggcaaatgcacaaagtgctcccctctggcatatgcatgactgataagtaaatatacagcctgagtacaatttattaatatagagtcagattataatacgtagatgtgtgtaaaaatatgaaatttcatcaaattatctcagcctaataagtttctctacatttaaagttatatttcagtgtgaaaaaccagaaacctctattgggaaataaaatatctttttctatgattttatgccatacaaattgcatagaaattgagatgtgtttcaacagctttataacatattgtcagtatgtattaactgcctagttaagaaagtgaattttaaaatcaaatacaaataccct

SEQ ID NO: 453576 - DNA, 575 bp, Homo sapiens
  misc_feature (1)...(575): n = A,T,C or G
ggcttaatagaagaagtctcaagataggtatattttgaggggtcaacactggcttgatnnagagtctgtgatatccagatggttaacctatttagctatttgcaactaaatcagctgaaacaaaattttacttgcattactaaaactcagtgacaccaaatacatgtattaagtctagtttgtcagctgagagtagaatatgtatctaatgcaacatctgggagctggcaaatgcacaaagtgctcccctctggcatatgcatgactgataagtaaatatacagcctgagtacaatttattaayatagagtcagattataatacgtagatgtgtgtaaaaatatgaaatttcatcaaattatctcagcctaataagtttctctacatttaaagttatatttcagtgtgaaaaaccagaaacctctattgggaaataaaatatctttttctatgattttatgccatacaaattgcatagaaattgagatgtgtttcaacagctttataacatattgtcagtatgtattaactgcctagttaagaaagtgaattttaaaatcaaatacaaataccct

SEQ ID NO: 453577 - DNA, 575 bp, Homo sapiens
  misc_feature (1)...(575): n = A,T,C or G
ggcttaatagaagaagtctcaagataggtatattttgaggggtcaacactggcttgatnnagagtctgtgatatccagatggttaacctatttagctatttgcaactaaatcagctgaaacaaaattttacttgcattactaaaactcagtgacaccaaatacatgtattaagtctagtttgtcagctgagagtagaatatgtatctaatgcaacatctgggagctggcaaatgcacaaagtgctcccctctggcatatgcatgactgataagtaaatatacagcctgagtacaatttattaatatagagtcagattataatacgtagatgtgtgtaaaaatatgaaatttcatcaaattatctcagcctaataartttctctacatttaaagttatatttcagtgtgaaaaaccagaaacctctattgggaaataaaatatctttttctatgattttatgccatacaaattgcatagaaattgagatgtgtttcaacagctttataacatattgtcagtatgtattaactgcctagttaagaaagtgaattttaaaatcaaatacaaataccct

SEQ ID NO: 453578 - DNA, 442 bp, Homo sapiens
ttaatattctaattgtggtgtgcaatatgctgaaaaaaaatctatcaaaaacaacaatggctacagaaatctgtaagagagacaacataaaaatatgtaaattttgacaagaagaagtcaaaaygttggggggtagagttcaaagtgtagagtgttttgtttgcttgtattttctttgtttcttttgttctatttgtgtgtgtgtgtaatttaagatgagttgtgatctatttataagaactttcataagattttttttgtaagcctcatggtaatcacaatacaaaaatctatacaaaacacagtaaaactaaaaagcaacaaattaaaacgtactccccccaaaaaatcacttaaccaccagggaatacggtaagaaaagaagaaaacacttacaaaagaaccagaaaacaacaaaatggcagcaaatccttaattagca

SEQ ID NO: 453579 - DNA, 554 bp, Homo sapiens
ttacatagatcaggatttctatccatgaattcctaacataaaatccatataatttctgctactttgtgctgggattgcccaaaatgttcatggaatatgtttgacttgtcttatttttctgaagttaaatattctagcttatatactatcacataaaaatgtgataagatcttatccaaaattcacacttttagtagtctctraggtcaaaagtaaatatcacccctagtacagttgatatagctaatgattgctcttgttaatgggcaatgtagtaaatataaatgtaataaaaagattaaaatattgtctgtatttttccaagtttttccaaaaacattcagacccaaggctcaatttgggatgcaatttttgtgctttgtttttctctagaataaatttaaatccaggaaaaaagatcactttttcttctttgtcttttactttcttttgcactgggcacatctcatttagaatgcattttcatcttgtgtactgtcaatacccttacttttgaaaaagtatttttatttttgttttgcctctagcccctg

SEQ ID NO: 453580 - DNA, 576 bp, Homo sapiens
tagtctctaaggtcaaaagtaaatatcacccctagtacagttgatatagctaatgattgctcttgttaatgggcaatgtagtaaatataaatgtaataaaaagattaaaatattgtctgtatttttccaagtttttccaaaaacattcagacccaaggctcaatttgggatgcaatttttgtgctttgtttttctctagaataaatttaaatccaggaaaaaagatcactttttcttctttgtcttttactttcttttgcactggrcacatctcatttagaatgcattttcatcttgtgtactgtcaatacccttacttttgaaaaagtatttttatttttgttttgcctctagcccctgcaatatgatttctagtttctctctttgctgttcattattttccagaacactgatcagttgtcaagtattgattcctgacctctgtctggctgatggataaaggagatgtgcattggcaaatcttcagaatatcctggctctctattacaaagcaaatttttagtccttgtgtatttctttagttagcaaagtataatgttctgactttgagggaaa

SEQ ID NO: 453581 - DNA, 576 bp, Homo sapiens
tagtctctaaggtcaaaagtaaatatcacccctagtacagttgatatagctaatgattgctcttgttaatgggcaatgtagtaaatataaatgtaataaaaagattaaaatattgtctgtatttttccaagtttttccaaaaacattcagacccaaggctcaatttgggatgcaatttttgtgctttgtttttctctagaataaatttaaatccaggaaaaaagatcactttttcttctttgtcttttactttcttttgcactgggcacatctcatttagaatgcattttcatcttgtgtactgtcaatacccttacttttgaaaaagtatttttatttttgttttgcctctagcccctgcaatatgatttctagtttctctctttgctgttcattattttccagaacactgatcagttgtcaagtattgattcctgacctctgtytggctgatggataaaggagatgtgcattggcaaatcttcagaatatcctggctctctattacaaagcaaatttttagtccttgtgtatttctttagttagcaaagtataatgttctgactttgagggaaa

SEQ ID NO: 453582 - DNA, 580 bp, Homo sapiens
acattatataatggtaaaggattcaattctaacagaagcactaactatcctaaatatatatgtattcaatacaggagcacccagattcataaagcaagtttgtagagacctttaaagagacattgattcccacacaataatagtgggtgactttaacatcctactgacaatattagacagatcattgagatagaaaattaacaaagatattttggacctgaactcagctctggatcaagtacatctgagagatatccacagactctcaacccaaaaacaacagaatatacattattctcattgccacatgacacttactttaaaattgatcacacaatcagaagtaaaatgctcctcagccaatgcaaaaaaactgaaatcataacagtctctcataccccagtacaatcaaattcaaactcaggattaagaaattaagtcacaattacacagctacatggaaattgaatgaactgctcctgaatgacttaggtaaataatgagattaagatatagatcaagaagttctgygaaactaataaaaacagagatacaatgtaccagtatctcttggatgcag

SEQ ID NO: 453583 - DNA, 567 bp, Homo sapiens
ggagggtagcaagcagacaatacgttctttcctactttcctcacccctggtcactttctctagaccagaatactcgtctagttacccagctttctaaatcatcacattrtatactaacagaaaagggatgtggtccagaggctgggaagggtatcagggaggatgggataagatgggaatgattggtaagtacaaaaatccatttagatataatgaataagatctagtgcatggtggaataataacttattatatatttttaaataactgaaagagaggaattgaaatgtttctaatacaaataaatgataaacgcttgaggggatggattctccaattaccctgatttgatcattgcacattgtattcctgcatcaaaacatcacatttaccccataaatatatacaactattatttacccataaggattaatttttaaaagaaagaaaaaatagaaaatggtcttggtacctgcgaaaaaaacaaaaagaaagatatttcctgtaagcttttgttccacaagaatacaaaagattgactcatcaaggttaatcatattctatgga

SEQ ID NO: 453584 - DNA, 568 bp, Homo sapiens
tgactcctgagtcccttgtgtgtaactagaatctacactcctaggtctcagccacaagataatataaatctggtcaaatcccagattattctctcttttgcttccaatgttgcccaagaggaatagagagagcaagagcatagagaaagggatgtctagatagacccacctgtaaaaggatcataagccaccaaggcttgcacagagtttgcaagytacccaagggttctcatgtgcatggctttgagaatagagtagggggtttagggaggtttcaagaggaccagggaccagcagagagcctaagtggcacatgtgtgagactgtgggccttagcagcaggtcaagcaaagtgcctaccaagactaggtaagattaattgctatgtgggctgatatcaggacagggaaggcagggttcatactggatctatacattagtaggcatcagtgcaagcttctcacaataaaagtggaccaaactcatggtaggggagaatagtcaagactcaaaccaaagctacatcactatgaggtgtcacaatttccccagtaccaatgttatgggt

SEQ ID NO: 453585 - DNA, 535 bp, Homo sapiens
tgcctatgtaaggctttaatgctgttatcatacattcttcaagcagaattcataaaactagctgcaacacataagatatattaagaacctttggataggccaggggcggtggttcatgcctgtaatcccagcactttgggaggctgaggtgggcagagcacctgaggtcaggagttccagaccagcctggccaacatggcgaaaccccatctctaccaaaaatacaaaaattagctgggcatggtggtgggcacctgtaatcccagctactcaggaggctgaggaaggagatgcttgaaacctggaggaggaggttgcagtgagtaagaygagatcgcgccactgcacaccagcctgggcaacagagtgagactctgtctcaaaaaataaaaaataaaatagaaaagtgaaaaaaaaaacctttgggaacatggcttttacttttcaactttttttatcatgaataatacatggctttaatggttttctcttagtaggatggtaattccactgttatatacaacagtttcaatgt

SEQ ID NO: 453586 - DNA, 637 bp, Homo sapiens
aaataatttaggtagaatatttgaaagtgataacatgttttccacatccccatgctccagcgaatagttaaatgagggggtcagaaaactatgtctcataagccagctatttttttaatgaagagttattgaaaaatacatatactcagttgtctgtaagttgtgtatggctgcatttgagctaccatggcagaactgagtagttgtaacagagaccatatgtcctgcaagcctaaatatttaatatctagctctttaagaaaaagtttgcagagccctaaactatgtgcaaatatcaagttattatggaggtgttccatcacagctaaaacacattttaaaagatgtgaaagagttatgtttgacatgattaggattaatcgaaaactcttctctagctttgagggacaattcaaggggtgtagagagcgtaggcacagcacaagcatttatcgaattrcccaaaatgaaaatttgtctttaaaatgccaagtggcctgtttttcttcattagaaaacagtcgcagatacatgtacagtatggattcatcacagcagcaacattctaattgcaggttgtgaagagttctaattgaaataagattaataaagagccatgccaacctcctacaaaatc

SEQ ID NO: 453587 - DNA, 628 bp, Homo sapiens
tttttgcagctagattttaatacatcctggagtgctggaaatcaatatcaaatcccagggtccttctgctgagatattcaaaatgttatctctaatgggagtcgtatcagaaaaacaggcagatataacctagggctgagcagttcacacaagagctggaaagagtttttgctgaaaatctaaacataccttgtatccccttttctttatcatcatcattttagcaaacaatgtaaccgtttttcagaactgaaagctggatataaaggtaggtaattttrgagaaattattttctcttgtttagtaattatcattaatgaaagaaagatttcttaaatactaataaatcagagctgaattgactgaccatgcatccaaattgctgcattattcacactggaattactccaaagattagctgcaaattgccctctaaattgaatttatggtttcatttttcataactactgtgttgtgacagatgaaaggaatctgagaggaaaatgacagcgatggacccaatttcttagtgctctatctgtaatataggagtcaaactgtctctataatttattttggcaagcacaaaaaccttgtaggttgaaatccaaaattttgtaccttaag

SEQ ID NO: 453588 - DNA, 628 bp, Homo sapiens
tttttgcagctagattttaatacatcctggagtgctggaaatcaatatcaaatcccagggtccttctgctgagatattcaaaatgttatctctaatgggagtcgtatcagaaaaacaggcagatataacctagggctgagcagttcacacaagagctggaaagagtttttgctgaaaatctaaacataccttgtatccccttttctttatcatcatcattttagcaaacaatgtaaccgtttttcagaactgaaagctggatataaaggtaggtaattttggagaaattattttctcttgtttagtaattatcattaatgaaagaaagatttcttaaatactaataaatcagagctgaattgactgaccatgcatccaaattgctgcattattcacactgraattactccaaagattagctgcaaattgccctctaaattgaatttatggtttcatttttcataactactgtgttgtgacagatgaaaggaatctgagaggaaaatgacagcgatggacccaatttcttagtgctctatctgtaatataggagtcaaactgtctctataatttattttggcaagcacaaaaaccttgtaggttgaaatccaaaattttgtaccttaag

SEQ ID NO: 453589 - DNA, 526 bp, Homo sapiens
agcccttttgcatgattcaacttaatattcactctcaagatagttttaagacaatattgcacatttatttctcacaaaataaatgtatttctcwctttacaaacctagacttgagtgtacattcaaattctcagaatatttttccagacaatgtttgataatctgcatcaataggtaggagcagcaacacatatataagccaaatttactgatagtcaaaaaattcttcacatatggctttcagatattcaccagaaagtacaagtatagatgccttagtgaatgaaattaacaaaaggctctccaacctgttctgttagactatatcaataactcaaaagcaggatgtacagaatggagaagcctccactcctccagtgaaatacttcaatgattttgttgtgcaaatgattgaggcagagcaaagtttagcagagtaagtcacagtctaacagagaaaatcttccttaccctgtacagcatcagtgcctcttcatcatcaataccttaactgaaagaagctatg

SEQ ID NO: 453590 - DNA, 532 bp, Homo sapiens
ggtacttaacacttaagtagaaatttaaaacacaataaataacagtagaatgttatttatggataaatgtacatataataaattattaaaatatgcatttgagtctaatacactatggattagtgcttatgtataaagagaatttgagaggcaaaaggtgatagagtgggtcttaaactgaaaggttttatatatttcctaaatcataatttgaataaattattaaaaatattaacacctgtgcaattgagtattgagaacctgttttgatgtttagaatgtttcattttgtttttaaaaataataaattgatgtaaactctagatcagaaagaggagtcrtaatattggcagtttctaaagcgtcaaaaagaaggctttttttcccctgacttctaaacctcttctttatgaatatggttttggctattctgaagacttataataagctatcaggttatttataatcatttgtgaataggttttattgtttttaaaattttatacagtgcctagattaagtgcctccacaa

SEQ ID NO: 453591 - DNA, 532 bp, Homo sapiens
ggtacttaacacttaagtagaaatttaaaacacaataaataacagtagaatgttatttatggataaatgtacatataataaattattaaaatatgcatttgagtctaatacactatggattagtgcttatgtataaagagaatttgagaggcaaaaggtgatagagtgggtcttaaactgaaaggttttatatatttcctaaatcataatttgaataaattattaaaaatattaacacctgtgcaattgagtattgagaacctgttttgatgtttagaatgtttcattttgtttttaaaaataataaattgatgtaaactctagatcagaaagaggagtcgtaatattggcagtttctaaagcgtcaaaaagaaggctttttttcccctgacttctaaasctcttctttatgaatatggttttggctattctgaagacttataataagctatcaggttatttataatcatttgtgaataggttttattgtttttaaaattttatacagtgcctagattaagtgcctccacaa

SEQ ID NO: 453592 - DNA, 579 bp, Homo sapiens
attttcctcagtggttttattttagttagacacacctacttgagaagagtttgtyggttcctacatacagcagcttgttccacagaagtctgtgtttgctggggcagattactgtctctaggatttatacagacttaagtgtcaacaacagcaacacccagaaaaaccagcaacatcattgcatgttggagtcctgttatctgacactaccaaagttagaattaacttctgtagctaatttaggttcttccttaaactagtctccagcaatgaaccacatatgatattttcctcactgcgtttgccaacactcaagaataaaaagacaaacaactatactattatttctaaattgtacatccaaaatgaactttaaaaaatatctataaggaatatattatttgtacaatcaaatttgaagagaagtaatttatgacttcaaaaacttgctgaatcctttaggactaagtaaacacaccctaagtaagatatttattatgctctgaaggcacatctcaaactccctcgagcttctctgcctataatacctgcattcagtttggagccaacttaaaggta

SEQ ID NO: 453593 - DNA, 521 bp, Homo sapiens
  misc_feature (1)...(521): n = A,T,C or G
aagataggtccacaattgttcacattgttaacaggaaattacaacctcagaagtgattttctaaaaactctaggatatcaacaaatgaagtaaaacaaatgaaggtttgtagaagtagcaaaactaaatacctagataatgttacggaagtcaccmaaagcaaattaagaggctaaaagccatttcatacatctgattgttttcctcttaaaaaaagaaacaaaatcaacatgtgttcnnnnnnnnnnnnnnnnnnnnnnnnnnnnnnnnnnnnnnnnnnnnnnnnnnnnnnnnnnnnnnnnnnnnnnnnnnnnnnnnnnnnnnnnnnnnnnnnnnnncatttagacaaagcacatcaattgtgcccaaatcagtgtgcacccatcactgccaatgatttatgtccctgaatgtttaactcttcaaaacaggttgagtggatgaatatttgtgtttaactttgaggtttacgccacagggttcctaaagggaaatgggacagtggaaatgaaaactgatta

SEQ ID NO: 453594 - DNA, 601 bp, Homo sapiens
  misc_feature (1)...(601): n = A,T,C or G
agaggctaaaagccatttcatacatctgattgttttcctcttaaaaaaagaaacaaaatcaacatgtgttcnnnnnnnnnnnnnnnnnnnnnnnnnnnnnnnnnnnnnnnnnnnnnnnnnnnnnnnnnnnnnnnnnnnnnnnnnnnnnnnnnnnnnnnnnnnnnnnnnnnncatttagacaaagcacatcaattgtgcccaaatcagtgtgcacccatcactgccaatgatttatgtccctgaatgtttaactcttcaaaacaggttgagtggatgaatatttgtgtttaactttgaggtttacgccacagggttcctaaagggaaatgggacagtggaaatgaaaactgattaattctgatgtgaggggcatcctatgcaatggaaattaaatcttggagccttggagactgctagtttctttagctcttgaataaaatcggaggttgcacaggcttttgtgagaagcacactctggcttctayagggaaaaaggtgaaatgttttgtttctttttgcctcaacagtttttcttttaataatcttagacttttcacaggaattttcttgcaaagctttcattttcttgataagtatggaa

SEQ ID NO: 453595 - DNA, 479 bp, Homo sapiens
gaacagtaattcctgaaaagtcaggctaaaatcaatacactcagctcctattgtgtactacagacatggaatcacactccacactgccttttcttacttcttccagctcaaacgcactaaattacatgatgtcactgcaagtcttcaaaagtgccaatggctacccattacctgaatgacaaccttttaattcctgatccagcatgttagatgcttcgaaatataccataattctgtgccattgcatatttcaattcaattcaataaatttgacaaatattagttgaggattaataaattctgtgttaattgggaagataataacaacaaaaaagatatgatcttgagaagcttttaccttaataggatagcctaacaggtacacaaaaactgatatataccatgacayatgcaataatagatataacacaagggacagagaaaggaatgataaagttagagactttccaaaatagcaa

SEQ ID NO: 453596 - DNA, 583 bp, Homo sapiens
aaggttctatattttttgtttgtttgttcattgttgttgttgttttgtttgttttttagaggtggtcttgctctgctgcccaggctggagtgcagtggtgcaatcatagcacactgcagcctctaccaccaaggcttaagcaatcctcccaccwaaccctttctagtagctagaactacaggtgcatgccaccacacccagctaatttttaaattatttttagaaatgaggtctccctgtgttgcccagggtggtctcaaactcgtgggctcaagcaatctgcctgtctcactctcccaaactgctgggattataggcataagccagtgagactgacctatacttttcttcataaacttccttaatctgagcacttgctttagctctattttcctatagactttggaggtcaaatcagagttatctgcaaacagttttcattttgaatgaggtcataaagtttgaaatgcacagaaaatcatgtattgactatatacagcatttgggactattagagctaaagcaaatagactcttcttttgctatgggacaattttgtcagtaagctccagcaagaaaagat

SEQ ID NO: 453597 - DNA, 583 bp, Homo sapiens
aaggttctatattttttgtttgtttgttcattgttgttgttgttttgtttgttttttagaggtggtcttgctctgctgcccaggctggagtgcagtggtgcaatcatagcacactgcagcctctaccaccaaggcttaagcaatcctcccaccaaaccctttctagtagctagaactacaggtgcatgccaccacacccagctaatttttaaattatttttagaaatgaggtctccctgtgttgcccagggtggtctcaaactcgtgggctcaagcaatctgcctgtctcactctcccaaactgctgggattataggcataagccagtgagactgacctatacttttcttcataaacttccttaatctgagcacttgctttagctctattttcctatagmctttggaggtcaaatcagagttatctgcaaacagttttcattttgaatgaggtcataaagtttgaaatgcacagaaaatcatgtattgactatatacagcatttgggactattagagctaaagcaaatagactcttcttttgctatgggacaattttgtcagtaagctccagcaagaaaagat

SEQ ID NO: 453598 - DNA, 613 bp, Homo sapiens
attctgttctccaaattatgaatttatggctctgcaagagatgttgagctctttttaatcctataaaaacactatcccattcagagatgcaactcggttcacacacaaacacaattttcaaaattccttctaagggttttaggtttgtttttgkttttttcttttttaaaatcttttccatttgactactgagatttgggccttacttcctaaccccatactcaaaaaagtgaaggaaaaagcacttctctcttttaagcgggaaaaaggcctctgtggctgaggcttcctggtgcaaggtcaccccagaatgttccgctgtctcccctagaatgttgatgggtgtctctgaagctccagaacgctgacattggaggtgttgccgaagaaatattcttaacgactaaagagttatgtcccttatcaatgttgcattgtgagcattctggaagattgccaaagctttgtaaaacacccgtattattttaaatctcagacacattgagatcaaaagttaatagaaagtcttcagttaaaaaaaaaagaaattaaataagtatataaatgaataaaccagaaaatcatagtgaaagggagttttataagctttaca

SEQ ID NO: 453599 - DNA, 596 bp, Homo sapiens
tttctgtcttaggtcaataggatgaatacatatggaaagtctacatgtatgactcaatttttaaatccctctcacactttacagaatggtttaaaggggagcagtgattattttcctgattatgttcttttgatgaggttgttattcaaagcattcattcaacaacttgaccagttgtatggtagttctctgaatgtcaaagaaatctgaggaagaagaattagtatattttttaaaaagaatactttaatcaatttaaatgagaaagagacattttggcaacttcatctgcttctgaaatttacatttaaagggtgtactgtgtaatcagaattctaacaaggagtccacatcattttcccagtgaaaaaatgactttaaaaatttgtttgctgaagctgaacagctttcaaagaagatgaaaagatatccaataaattcagtgtctcactgagagactcagcaaatactgaatatcactawcctaacaaatcttaatgaaaagccaaatctacctgtgaacagagggaattgattgggaataaatttacttcataaagactaaaatcaagtggtcatacagtactgttttgtca

SEQ ID NO: 453600 - DNA, 612 bp, Homo sapiens
ttcccttcccctgatcctaaactaagccaaccagtttaatgattgagaaagtaactctagtttggaggatacatttgaggggagtgtctaatagtatgaagacacaattacctatcagtgaagagaggacagaagaagagagaaaacaaaaaagggtttttttttttttggagtcccagggcttcaggatgcattggaaagtggtagagactgaaaatgaatggctacccatttagaaagagggaagcaggcatccgtggtctcctcttcctagcagatacccaaggtacacgaggtagtgaagacagagcatcctctttctttcttccatctttgcatccccaagtcccratgaccttggcagatcctgccatgagtgccaaagtggtttgtacctatgaagcagggagggcctagagaataggaattatcatgagctctcacctatgcctctatctcccttattgtcagtagccttggagttccctagagctcatttatgccatggatattaatgtggcatttatccatgaaacaggaagcttgggggtggcttaattggcaggaatcagccacactaacctgtgctgtgccttttaacttccattattg

SEQ ID NO: 453601 - DNA, 340 bp, Homo sapiens
aattcctgttgtttaggccacccagtctatgatattttatcaagactactggaacagactaatacagattttagcaccaagaaatggattgctgctgtaacaaatatctaaacatatggaggttactttgaatctggactgaagctagaaaggttttgaggtgcaattttgaaatgtgaatgttaaggataattctgctgagggctgagatgtaaatgaggaacatggtattgggaactggaggaaagttaatccttgttatagagtagcaaataacttggctgaacaatggtctaatgcactgtagtgttaaagtrcactaaatatggtaggagaagaa

SEQ ID NO: 453602 - DNA, 580 bp, Homo sapiens
tgttcctccaaggactctacccctagagccagaattccacttaaaaaacataaaaactggcaaacgaaaaatgttacaactactggagcttcttctgtctgtctgtgtagttatatgtgtgttgtgtgtgtgatgtttatataaaagaggtctaattaattggcttaaaaaataagcatttaaatcaaatactttcaaagaaaactaaaaactgtaatgtcttttagtttatgtaactttagtaatctttgggaaataaaaacagctttagagattattgataaasacatttggtctaaattgggtggatcagatattatgtctgctaaattatgctttaaggtcataaactgcttctttggcttctgaaagttttttgacttgcctgctttacagtttggtaaggcctggggagctgtggatttcgccacacccctagctatgttggagagagttgggccttaactgcacctagtacataactaaaatagcttaccaggatttccaccaacattaaaaattgctaaaagctaccattagcacatgtaagggagactactgaaaaaaaaattttttttat

SEQ ID NO: 453603 - DNA, 534 bp, Homo sapiens
tatttgaaaagacagttgaagggaatgtttcaaactctaatgcaatgaagtatatatgcatttaatcaatacttattgygtacttactaggctctaggtattatctggttatatatcagagaacaacaataataacaaaattatctcttctcagtagaggcagacaagcaaaactaactaaataagtcatgtagtaggttatccagtaagtgcagtgagaaaaaataaagtaaggaagataggattgtgttggagagagcactacaagtaatatatgtggtcaggtgatgtctcaataagaggatgatagctaaataaatgctggagagcttgaggaagtgagtcaccctgaaagtataagaatgcagtggtagagaagatgatggtgacagatttgaaatttatttggaagaatctcctgaatgattgagtatatgttttaagaaaaaaatatttgatctcaaagataataactgagtttaagagactgatagaaacaggtttgaatcagaagaattgtggtttggctatgtt

SEQ ID NO: 453604 - DNA, 565 bp, Homo sapiens
accttgattttatgctttgggttttttcttaatttgatatatgatattaacctgtaaaatctgttttcaactcccatayagaaaaaaaaatcaagcattaaaggagcaaggttggtctagaagcctttgaacaagcaagaatccaggaagcctttgaacttttgtatcaaagctagagtcagaaaaataatataattttgttgggggaaatccttaattctagaaaaaaattgcctcaattaccatagtgtacagcttggcactttcatagaagaatgatcctagagggtaattcaaaaagagtagtagcagcaaaagcaaacagtatcaggatgctacaggatgttaacatttgtaaaatttacccaaccaaggaaatttttattttattttattttgttttaagttctgggatacatgtgcaggacatgcaggatttgttacataggtaaacatatgccatgttggtttgctgcacatatcaactgaacttattaagccctgcatgcattacttatttatcctgatgctctccctccctccaccacatcccccaacaggcccc

SEQ ID NO: 453605 - DNA, 565 bp, Homo sapiens
accttgattttatgctttgggttttttcttaatttgatatatgatattaacctgtaaaatctgttttcaactcccatacagaaaaaaaaatcaagcattaaaggagcaaggttggtctagaagcctttgaacaagcaagaatccaggaagcctttgaacttttgtatcaaagctagagtcagaaaaatartataattttgttgggggaaatccttaattctagaaaaaaattgcctcaattaccatagtgtacagcttggcactttcatagaagaatgatcctagagggtaattcaaaaagagtagtagcagcaaaagcaaacagtatcaggatgctacaggatgttaacatttgtaaaatttacccaaccaaggaaatttttattttattttattttgttttaagttctgggatacatgtgcaggacatgcaggatttgttacataggtaaacatatgccatgttggtttgctgcacatatcaactgaacttattaagccctgcatgcattacttatttatcctgatgctctccctccctccaccacatcccccaacaggcccc

SEQ ID NO: 453606 - DNA, 565 bp, Homo sapiens
ctaactcttttacagaatattagttgtattgagagtaagtatttacttaccttatctctaattcctaataaatgctcacaattgactttaaaaatatgtacaatataagtgaataaattgacaaaatctttgcatatggactgtagcaaatttaatttaagctaacccaaataaggacatttcatgccttgccattaataatacgttacatagaaaatgatctaacaagtagaaattaatggcagaccaagtataaatttcatatctgaagtccttaagataaaaattttacaagatgcattttgggacatgaaaaaagaacatgaacagactgcaaactgttacacaatcagtgggtttatgtaacagtggaaggaccctgaggttaagaaacgtgtaaacttataagaaaaataccaggaaactttctcatcatttgctccattgagggacaytatctttattatcttagacaaaaaatagatctacctttgctcaggagagagacacaatctctgtcttccaaggctgttcactatacaaatatccttgaaaagatagactg

SEQ ID NO: 453607 - DNA, 556 bp, Homo sapiens
tggggctcgagtagaggaaatagttaacattttggtatgagtcaacattattcttgtaatattttctaagtcagacaatagagcctgaattcaattttgattattaatatagcaggacaactctttgtgctgcagttttccccaatatttcagtggtaataataacacctcccaagaaaaggtggaggattgggtgcagtgttaaggcaaattatcccacaggctagtagtaaattaggtgcttctgaaactagattatctctcctaatactggtgcattaatttctgtgggctgcacaagactgtgagaaagaataaagagggaatgattagcacatttttggtaattgttctatgccagcctgttataatctgcttatctacactgcctgctgctttctcttgccarctctcatcagtgtctcatcagggcacagctctatggaacagacaacatgctgctgaaataggcttctcagttttcaggccgcaaacgctgtctgtttgctactccgtagggatgtcaaggctttgttagcactttgttaaaggccat

SEQ ID NO: 453608 - DNA, 555 bp, Homo sapiens
attttttccttactgtataggcagctcccatttttactgttcttttacttatcagacgcaattaagtaagtttttggctcattattatcctgagggcaaaatagagaaataatgagaaggttagaaaggatgacaaaatgagtacctgaagtgaatttattcaactgtcagagacggatgcaatcatgttgaagacaaattttccttgggaagtttgtaaagggagcaaatgagcaaagaatgtttagctgtggtccatctttgccctrcttctctggcatatcgtttatcagaatgttattgtgtttgttcagggcaaagttgcttttagatgggcaggatagtgttgaatttggtagaggaaaaggaaaataatctctcacatataagtaaatattatcagataagtgttcataactcatagcattatgtcttcaaaatgcaatgaagtcttgcctttgcagcttcttttttaattgtataatgctgatcatgacccatcaaatagttcatcattatcagtttgaagaaaacttttcacaccacttgtgtaaa

SEQ ID NO: 453609 - DNA, 558 bp, Homo sapiens
tttcttacaatccttcgtattcctgtggtattagttgtaatatctccctttttatctcagattttattcattcgagatctctcttttgcttgtttcttagtttagcaataggtttttcagttttggttatcttttcaaaaaaatcactcagccttagctgacatagatagaggtagagytacatttttattatagggtgtttggttgtttttttctaaatactttctgtcattctaagctggctttttcctgatttgtttgtttgttgtttgtttgttgtttgttgttgttgttattgtttttcactacagagggctagcttctgttagggcatttgctatttacatatatgggcatttcaagttgctggatacttcaggacctattttgggaaacgtgaaacaataagaaaactctgaaactcaccaccatgttgttttcaggtcacgcaggccttacccagtctgaccattctctccaatgttcagttttcatatgtcagttttatatataatgtccaagttcattgtacttaggggagaaataaaaatagtacta

SEQ ID NO: 453610 - DNA, 529 bp, Homo sapiens
ctttcttataaatttgaattaactctgtctataagctctttgtctccacttccctaaccatcactggattactagaattttatctttggaactgaccataaaatgcaaaaataaatggaaaaacatctcacataagaaatcttcaacataaaccagagataaaaagtgttgttacactaaattcatgtaatatacgttttccagaaaaacagcctaaacatgtggtttattattcccaggtggctgaccttaaatttctgacagaaacaaatataaataatttctggaggaaattattcttaaaccagccttttttaaaaaaagagattgaatacrtacctaaatacacaaacctaaagaattcctatatgaatagtaatttacacaagaaaaataattatagctaaaagcctagtcttattttatacataaaatcatagaccaattgatcatcaaaatgaaacatctgatatgtcttagtagtcagttcaacctaatttaaacaacagcaacaacaaaaagctacaga

SEQ ID NO: 453611 - DNA, 548 bp, Homo sapiens
cagctatagccttaccgaatatatttctcaaataataagacttaatagtcgaaattgctcctcgattcatgggctccacgttgtgttatcaggcatgaaaacaacattaatatccttgtcatctctatcagagctatagggcgactaggagaattgtcaatgagcagtaatgttttgaaataaatattttactctttttttctgagtaataggtctcaacacagggtttaaatattcaggaatctgtactgtaaatagatatactgtcatcagtctatttttactctgtttatacagcacaggcagagtagatttagcrtaattcttaagggccttgtattttcagcatggtaaataagcattggcatcaatttactttcactggttttattaacctctaacaagaatcaacttgtcttttgaagcttcgaggccagtcattgacttctcctctatatctatgatgccctaaatgacatcttcttccaatagaaggctgtttcatctacatcaaaaatatattgtttagtgtaaccactttcattaat

SEQ ID NO: 453612 - DNA, 564 bp, Homo sapiens
ttttttctgagtaataggtctcaacacagggtttaaatattcaggaatctgtactgtaaatagatatactgtcatcagtctatttttactctgtttatacagcacaggcagagtagatttagcataattcttaagggccttgtattttcagcatggtaaataagcattggcatcaatttactttcactggttttattaacctctaacaagaatcaacttgtcttttgaagcttcgaggccagtcattgacttctcctctatatctatgatgccctaaatgacatcttcttccaatagaaggctgtttcatctacatcaaaaatmtattgtttagtgtaaccactttcattaattatcttagctcaaccttctggactaattgctgctactattactaaaactcctgtttcttcatcttgcactaaggcttctttccttagacctcatgaaccaacctccactatcttcaaacttttcttctgcagctttatcatctctcttggctttcatagagttgaagatacttaggccttgctctggattaggttttggcttaagaaaatg

SEQ ID NO: 453613 - DNA, 512 bp, Homo sapiens
gtgtgtatttaaatttatttgtaaacttaccttattataagaaatctagagatcatttgaatgaaagaatgtgcataggttatatgtaagtgctaagcmattttatattaagtacttgagcatccatggattttggtattcctagggagtcttggaaccaatctttcatggatactaagggatgattttatgtgtgtgtgtgtgtgtgtgtgtgtgtaattgtgtaatttttaaatgatacaataatgtaaatatctggagggagagattatatagagttcaaatattctaaaagtctttattatatgggaataggaccaagatccaccttaagtcagcattgaaactcttcctctcccaatatcttctattagattaagccttcaaaacctattgatatggttaagctttgtggccccacccaaatctcatcttgaattgtaatccccataatccttctaatccccacatgttaagggagatacaaggtggacgtaattgaatcattaggg

SEQ ID NO: 453614 - DNA, 560 bp, Homo sapiens
agtaatgtttaaaaattgcaatttaaccttgaatatatcagccttttcctagcagacatagctcagtcttaatactgagcttttaccctatggcgtcttccttggggaaaagatagtggagtaatcttccagtattcctcgcctttgggtgccttgctaaaagaactggtttctgtcttgcctcaccctggggtgctgacagacctggcatagtccaaatgcctgggacatctaagaacaaaataaaaatagatgagaggtttctgcagccagtacggttctgcaagttgagaggaggtgcagaacctgaggcttctctcacaaagggaagtgagtggaatggagcatgacacaaatatatcagccttttaatgtgctgcccaagggcccaggttctgtcttgcctcatccaaagtgctgatgagactggcatagtttagttgaggcaactaaaaacaaataaaagggtgagtagcttgctctttgagagaccctgagtctctagccatrctaatcagcaaaggattttgcctattaaagccagtctgtaaagattggga

SEQ ID NO: 453615 - DNA, 607 bp, Homo sapiens
aatgcaatgtgagttttctttgaacagggagtcagcgaagagttggtgattgccgtgtcaaattcttttcacaaatgcaatagaatcaaacatttaatcatctgagaagtggcctgctggagatccaggaaccaaggattaagtgaactctgcttcactcaactattatttgtagcaattttcaaattatctttaatactctcatacttataatcacttaaaaaaatttttaaagtgtatcttggcaatggcttaagaaagcctatcatttttatttcttcttcacaatgttaaactcactttctcttgtctgaattggttcttttgtctcacagtgggtccttttcatttcattrtacatcctgcaaatttctactaaaataatctactctgaaaaattgccacttgcattttaaacacataaaacaagttatatttatgccatttatttccatgcatgcatccaatattatttttaacttttcactttgcattctacttgattatgaattgagatcaattatgtagaacagtgttctgctgtagggaatgttatatgctacaaggtgatttggtgaacattttgtttgctaaggttgttagatgt

SEQ ID NO: 453616 - DNA, 627 bp, Homo sapiens
tgttaccaataaataaaacttacataaaatctaaattttcactgtcatttttctaaaagctacttccatgtgtctattttaaaaatgctaaacattatcttacatgtttcagatgtggtataatttttcctctgttactcttttttaaaaattatttaatgctcatgagtataactagaaaagctgacattatagattggggattggggatggttatctgaatgtattggagaactataaatgtaagcaacacatttgggggtgagatttatgacagaagagaggcagcaaactgcctgacattcaacactgattttctatgtatttactgatttgcaagaagcaactgaaagttcaagactgatcagaactttgagaatccctaagatacacttaggaaataaaaataacatttgggggttcatcacaatggaaaggactttggtaatatttcrgaattttagtgtggatcctttagtgtggtagtcagtacgttaaaactacaaatgtaactgcactcacatagcctagaaataagataacctggtcaatgtcttatatttttgtgctcttcctctagtttaatcgcatactgaaactaaagtttatcttctctggaggagagca

SEQ ID NO: 453617 - DNA, 616 bp, Homo sapiens
gatttcctgtttcctcccatccttactaactattgctgttgttcatgttttggatttaaggcattctaataggtgtatagtagaatcttattgttttgttcaccattttctaatgacatatattgttaagcatctacttatatgctatttgccatctgtgtatcttctttgctaaaatgtctgttcatatttttaaattttcttaccttgaggttttataaaaatatattttattttgttttattgcaaattgacaaattataattgtatatatttatggggtacaaagtgattttataatttatgaatacaatgtgcgatgactaaatcaagccaattaaaacatccatcacctcatatatttwtttttttgtgatcaggtcattcaaaatgtgctcagcaattttgaaatgaacaatacattattgttaactatattcacccttctgtgcaatatatctcaaaaaaactcttatttctcctgtataattgacacgttgtatcctttgaccaacatctttccattcttccaactccttagcctctgctacccatcattttactctcttcttctataagtttggttattttagatttcacctatacgtgagaacat

SEQ ID NO: 453618 - DNA, 616 bp, Homo sapiens
gatttcctgtttcctcccatccttactaactattgctgttgttcatgttttggatttaaggcattctaataggtgtatagtagaatcttattgttttgttcaccattttctaatgacatatattgttaagcatctacttatatgctatttgccatctgtgtatcttctttgctaaaatgtctgttcatatttttaaattttcttaccttgaggttttataaaaatatattttattttgttttattgcaaattgacaaattataattgtatatatttatggggtacaaagtgattttataatttatgaatacaatgtgcgatgactaaatcaagccaattaaaacatccatcacctcatatatttttttttttgtgatcaggtcattcaaaatgtgctcagcaattttgaaatgaacaatacattattgttaactatattcacccttctgtgcaatatatctcaaaaaaactcttatttctcctgtataattgacacgttgtatcctttgaccaacatctttccattcttccaactccttagcctctkctacccatcattttactctcttcttctataagtttggttattttagatttcacctatacgtgagaacat

SEQ ID NO: 453619 - DNA, 616 bp, Homo sapiens
gatttcctgtttcctcccatccttactaactattgctgttgttcatgttttggatttaaggcattctaataggtgtatagtagaatcttattgttttgttcaccattttctaatgacatatattgttaagcatctacttatatgctatttgccatctgtgtatcttctttgctaaaatgtctgttcatatttttaaattttcttaccttgaggttttataaaaatatattttattttgttttattgcaaattgacaaattataattgtatatatttatggggtacaaagtgattttataatttatgaatacaatgtgcgatgactaaatcaagccaattaaaacatccatcacctcatatatttttttttttgtgatcaggtcattcaaaatgtgctcagcaattttgaaatgaacaatacattattgttaactatattcacccttctgtgcaatatatctcaaaaaaactcttatttctcctgtataattgacacgttgtatcctttgaccaacatctttccattcttccaactccttagcctctgytacccatcattttactctcttcttctataagtttggttattttagatttcacctatacgtgagaacat

SEQ ID NO: 453620 - DNA, 602 bp, Homo sapiens
tgtcattttttacaacttagttttatgatatatttyaggttattttgtgtgacagaggtaaggtcagcgtctaaataaactttttttcatattctataaacacctactgataatatattacatattgcatattcagatactttttttccttcttggatttccagttgttccaacatttattgagaaacatatttttctccattgaattgccttgttatttttcaaaatttacttgaccttatttgcatagatctctttctcagctctctattcttgtcaatggatcaatttgtctattctttttttttttttttgagacgaagcctcactctgttgcccaaactggagtgcagtggctcgatgtcagctcaatgcaacctctaccttccaggttcaagtgattctcctgcctcagcctcctgagtagctgggactacaggcacttgccaccatgcccggctaatttttgtatttttagtagagacggggtttcactatgttggccaggctggacttgaactcctgacctcatgatccaccctcctcggcctcccaaagtgttgggattacaggcgtgaaccactgtgcccagccaatttgtc

SEQ ID NO: 453621 - DNA, 471 bp, Homo sapiens
taacttgtactgagaagtaacaagacaatgttgacattgttaaagaggaagcccacattggtcacaacaatttatgagaaaaaaaattaatcttgttcttgccctaattgaaaaggactaacaatttaacagcagaaacaatagccaacaccataggcatctcaatcggttcagcttgcacaatactgactaaaaaactaaagttgagcgaacttttcactcagtaagtggcaaaactaaaaaattaaagttgagcgaacttttcactcagtaagtggcaaaacccttgtgccaaggtcagcggtagacaagggcagagctttraacggaaattttcaaaaagtgaaatcaagatcctgaaacataatcttgaagaattatgatgggagataatacatggcttcactggtgcaattctggagacaaagcacaatcaaagcaacggctaccaaaatgtggaagttgttctgt

SEQ ID NO: 453622 - DNA, 573 bp, Homo sapiens
tattattattattattattgagtctcrctttgtcgcccaagctctggagtgcagtggctcaatcttggctcactgcaacctctgcctcctgggttcaagcaattctcctgcctcagcctcccatgtagctgggattacaggcatgtgccaccacgccaaactgattttatatttttaatagagatggggtttcaccatgttggtcagtctgctatcgaactcctgacctcaggttatccacctgcctcggcctcccaaagtgctgggattacagatgtgagccaccacactcggcctagttattcttaataatttttttcgtttaattttaatgctaatgtcctggcaaggacttcctctactatgttgaataaaaatggcaagagttgacatcctctgtgattcctggtctcagagtaaaaacattcacttttctaccattgagtgtgttagctatggtcatttgtacatggcctttattatcttgagttttttttgatatctaattcattgagggatttttcatgaaacaatattaaattttgtcaaattatttttctccatctattgaga

SEQ ID NO: 453623 - DNA, 573 bp, Homo sapiens
tattattattattattattgagtctcactttgtcgcccaagctctggagtgcagtggctcaatcttggctcactgcaacctctgcctcctgggttcaagcaattctcctgcctcagcctcccatgtagctgggattacaggcatgtgccaccacgccaaactgattttatatttttaatagagatggggtttcaccatgttggtcagtctgctatcgaactcctgacctcaggttatccacctgcctcggcctcccaaagtgctgggattacagaygtgagccaccacactcggcctagttattcttaataatttttttcgtttaattttaatgctaatgtcctggcaaggacttcctctactatgttgaataaaaatggcaagagttgacatcctctgtgattcctggtctcagagtaaaaacattcacttttctaccattgagtgtgttagctatggtcatttgtacatggcctttattatcttgagttttttttgatatctaattcattgagggatttttcatgaaacaatattaaattttgtcaaattatttttctccatctattgaga

SEQ ID NO: 453624 - DNA, 621 bp, Homo sapiens
gctgttttcaaaaatttttctttgtagttcacttttgataatttaattacatggtttgagtatccctaatctgaatatccaaaatttgaaatgcttcaaaatccaaaacattttgggtgccaacctgaggctcaaagaaaatgctcatttgagtatttcagatttcaaattccatattaggaaagctcaaccagtaagtataatgtaaatattccaaaatctgaaaagaaaatccagatctgaaacacttctggttctaactgtttggggtaaagaatattcatcctgtattgtgtcttggcaaagacctctttatgttcaatatatttgaatttttttggactacatgaatctggacatctatttccctccctagattcagaaagttttagccattagctctttaagtttgttgttcttttctgtctttctgactctctragatttcatagtaaatatataaattggcttgacagtgtctcataagtgccttagcgttttgctttgttttgttttactatttttttattcctttctctttaggttcctatgactccttctgcctgatcaagtctcctattaatgtactctattaagtttttcagttaagttatttcattc

SEQ ID NO: 453625 - DNA, 577 bp, Homo sapiens
attagtgcgttctcacattgctgtgaagaatacctcagactgggtaatttataaagaaaagtcatttaattggcttacggtttcacaggttatacaggaagcatgaggttggcatcagctcagcttctagggaggcctcagaaacttacaatcatggagcaaggcaaaaggaaagcagtcatcttacatgacaggagccaggagcaaaggtgggggaggtgctacgcacttttaaacaaccagatctaagaactcactcagtatcatgagaacagaaccaagagaatagtgctaaactatttatgagaaatctagccccatgatccaacacctcccaccagctcccacctctagcattagtgactacaatttgacataagatttggtagggacatagatccgaaccacrtcattctgccccatacctcaaatcttatgttattctcacattgcaaaataaatcataccttccctacagatgcccaaagttttaatgtatgccaccattaactcaaatgtccaaagtccaaaatatcatgtgagacaaggctagtctcttcagtctatgagcctgtaa

SEQ ID NO: 453626 - DNA, 619 bp, Homo sapiens
tagcattagtgactacaatttgacataagatttggtagggacatagatccgaaccacgtcattctgccccatacctcaaatcttatgttattctcacattgcaaaataaatcataccttccctacagatgcccaaagttttaatgtatgccaccattaactcaaatgtccaaagtccaaaatatcatgtgagacaaggctagtctcttcagtctatgagcctgtaaaatcaaaaacaagttattactcccaagatacaatgaagatatatgcattgggtaaatactgtcattccaaaggggaaaaatcagcctaaagaaagggcctacaacctccacacaagtccaaaaaccagcagggaagtcattaaattttaaagctccaacataatctcctttgactccatatcccacatccagtgtacattggtgtgaagagtggactccccaagctttggacagctccactcatgtgactttgtagggttcagcacccatcrctgctctgagaggctatcattgagtgcctgtggtttttctggctgagggtgcaagctgccagtggatctacaattcttgggtctaaaggatagtggccctcttttcacagttccactaggc

SEQ ID NO: 453627 - DNA, 566 bp, Homo sapiens
ccactcatgtgactttgtagggttcagcacccatcactgctctgagaggctatcattgagtgcctgtggtttttctggctgagggtgcaagctgccagtggatctacaattcttgggtctaaaggatagtggccctcttttcacagttccactaggcaattccccagkgtagaatctgtgtaagagtttcaaccttacatttcccctctgcactgccctagtagaggttccccatgagggctctgcctctacattcagcttctacctggacatccaggcttttccatacatcttctgaaatctaggtggagatgccccagcctcaactcctatactttgtgcacctgtaggcttaacaccacatggaagccaccaaagcttatggcttatgccttctgatgcagcagcccaagctgtacctgggcccctatgagccatggctggaactcaagtgaccatgatgaagggagcagtgctctgaggctgcacaagctgggggaccctgtgcctggcccacaaaactattctttccttcccaggtgtctgggcctgtgaagggagaatct

SEQ ID NO: 453628 - DNA, 566 bp, Homo sapiens
ccactcatgtgactttgtagggttcagcacccatcactgctctgagaggctatcattgagtgcctgtggtttttctggctgagggtgcaagctgccagtggatctacaattcttgggtctaaaggatagtggccctcttttcacagttccactaggcaattccccagggtagaatctgtgtaagagtttcaaccttacatttcccctctgcactgccctagtagaggttcyccatgagggctctgcctctacattcagcttctacctggacatccaggcttttccatacatcttctgaaatctaggtggagatgccccagcctcaactcctatactttgtgcacctgtaggcttaacaccacatggaagccaccaaagcttatggcttatgccttctgatgcagcagcccaagctgtacctgggcccctatgagccatggctggaactcaagtgaccatgatgaagggagcagtgctctgaggctgcacaagctgggggaccctgtgcctggcccacaaaactattctttccttcccaggtgtctgggcctgtgaagggagaatct

SEQ ID NO: 453629 - DNA, 507 bp, Homo sapiens
cttctattttgtttcactacatgctcatcacaagttagtgaaatattctactcytagggctactcaagcaccaggagcaactccaggtagttcctcagggacccaggttgaaggtgactacaccatctggtcatgtccctactgtacaaaacaaagaggatctcatagcattcttctatgcctaggcccagaatgaacatcaccccacttcagtttatagcccattaactagtgaaagtcacaagtccgctaagtaccaggaaatgtggtcttttctgtgtgcagaaataagaacaaaaaaagtatgcaaacacatgcacatcaccattgactacactaagatttgatgcttcaagaagagtgaagccaagagaaaaggctgaacataaaggaaatctctaagcctggacacccagtggatccagaataaccaaagcagaattaaaatactgagtacttactgagtacttttgtcaagattaatgcaaatttctattctgcctttga

SEQ ID NO: 453630 - DNA, 560 bp, Homo sapiens
aaaaatgtctgactaatttttattttagttgagtttttgtggagatgggggtttcagtatattgcccaaactgatctcaaactcctgggctcgggctatctttctgcttctgcctcacaaagttctgggattacaggcattagacagtgyacccagccccaaatttgaaatttttgagcactgacatgacaccacatgtggaaaaccctacacccgggtttaggtggtggattgtagtcaaaatgcaagtgcacaacacgcagtttattcagtaaccccaagagaaaaataaagttatcttcaggctatgtgcagaagatgtgtatgaaacataaatgaatttcatgtttagatttgggtcccatccccaaaatagatcattatgtatatgcagatattccaaaatttgaaaaaatttgagatctgaaatacttctagtcccacacatttcagataagggatactcaacttgtgtatacacaatatatagacagtccccaaattatggtggttcagttcacaattttttgcctttacagtgggtttattgagacagcaaa

SEQ ID NO: 453631 - DNA, 559 bp, Homo sapiens
cgcacagctcagcaggacttgacaatgattgcactgtgtggctttcatccttctgggcaattggcaaatccaaaatttctaggtagaggggtttagggtggcattctggagaggaagaaggatcaagggcattgtcttgaagctgctttgcctaacaagcaccatttttaaacttagctttaatgcttattttgacatatcttggagttaagtacatggaaattttggagaggaaccctaaggaaactccawgtcacccctgggtattgccaatagaacccaagtgtggtaaacacttcaaagcctccatagtgttgtatgaagcatggaatccctcttttgagggtctgaattcaccctccagggaaatgtttttcaaagcgttgtcctactgaaccatgcaatcaagagtcaggatggggaggacttctagtgaaggagagccttcacctgtaataagcatcttggacagaactaatgcatagtaaaatctgaaaccactatcctttgaaagaacctcaagagctcttatccttctgatgtatggaatttcttaatt

SEQ ID NO: 453632 - DNA, 542 bp, Homo sapiens
atatcaaatcttacaagatggaactaaaactattcagtagaaaaagcagatttatgtgcttgctttattagagcaggagtaacayaaaataattaagctgaattaaatttaagaagtcaaaagatgaagttagcttttgaaggcaaaaaaatccagcaaaaataaaagcaaagattcatgaaagcagacactaaaaattataacattctggcaaattctggaaagtccaggaaaaagagagagagaggcagaaagagagagagagagttcacaacaacaaataaatgagaaatgagatataactatagatatgagagacttttaaaatgataaaacaatattatatacagttaaattttttaaattcacttatgttctgagaaaatataaatagctaaaattaacttgataagtagtaaatctggataggcttttgtgaatagaaaaaagttgaaaaaataattaattccaataaagtttctaagccaaaaccattttactagtctttgcaatttttttttttttttttttgagacagggtc

SEQ ID NO: 453633 - DNA, 651 bp, Homo sapiens
acatattctagtatgatgtgaaaagcagacatccctcaaaagaactgatgtttatatttgttgttttaagatgggaaagctctgagacattcaaagagaacaaattatacctttacttatacaccaacaattatcagattattttaaaatttttgttggctatactttcttttttcccattaattgctagggtctaaaaagatacataaaattgtaaataaattacttgaacataccattaaatccaagctgcttttattacaaagggaaaaatggttaaagaaaaatatctactccaatttaatgaaacattctttgatgttgatagaaaatggtgaaacaaagcaaaaaagacttctttttttgtgtgtatttttgcgtagattcttgactgcagtggatttgggtgccaaagtaccagttcttaaagcccataatttctatatgttaaatcatggggtatctcacaaataycaccttaggttataaggacctggaaaaatatgtatagatcaacacacctatagattcaaaatacagaatatcaatagaaaagggcaaggtgctttgtagatatgtgtacattatggcctaaggtcataaaattagtaagttaagtctggtaacaacacggggggtaggcaagatttg

SEQ ID NO: 453634 - DNA, 560 bp, Homo sapiens
ttgcaaactagttcaagtcttactcaaactcaggaggtagattttaggatagaaaactagattccagtgtagcggtcttcaacacatggrttctacagcaatggaatttgtgagctctttccctaacactagtgctgctgcctctgggaagtcttcttagattttccaaccacatttgagagtcctctactggatttaaataatttgctttccaaacagaatgcgagctcctggaaggcaagaatatgtctcatttatttccatatccctgttctccagaagagtgcctggcatcagtgaatctttgtcgaatgtctgaacaagtgaatgaacaaatgaataaaaatacatattacctgcaggattctaggttgacttaattctgagctgctgttatctctttctaggcagtgctgcagtactcctgccttatgtgaaggtgtggaattacagtctgctcttagacatctttgacttctgttgattacagccatggccttaaaatgatttttaccccagtgatccctgggtggatcatcctttattcctaagaatgttag

SEQ ID NO: 453635 - DNA, 560 bp, Homo sapiens
ttgcaaactagttcaagtcttactcaaactcaggaggtagattttaggatagaaaactagattccagtgtagcggtcttcaacacatggattctacagcaatggaatttgtgagctctttccctaacactagtgctgctgcctctgggaagtcttcttagattttccaaccacatttgagagtcctctactggatttaaataatttgctttccaaacagaatgcgagctcctggaaggcaagaatatgtctcatttatttccatatccctgttctccagaagagtgcctggcatcagtgaatctttgtcgaatgtctgaacaagtgaatgaacaaatgaataaaaatayatattacctgcaggattctaggttgacttaattctgagctgctgttatctctttctaggcagtgctgcagtactcctgccttatgtgaaggtgtggaattacagtctgctcttagacatctttgacttctgttgattacagccatggccttaaaatgatttttaccccagtgatccctgggtggatcatcctttattcctaagaatgttag

SEQ ID NO: 453636 - DNA, 560 bp, Homo sapiens
gaaccagaaaaggtcttgctctagccagcccggtctccccagtgccaagcacaaacccgtttcctgcacctccactttccaccccatgcctggtagatgagttgctgaatgaatatagatttaattaattaattagttcatctcctctacccaaacaccctcccagagcaagctcctgaagcccctggccacccagctctctctcttacaggacaccccttacgctgaccacttcctgccatcagcccccaccccaccccactgccatcaccatgctgttcacagttcccatggcacattgcatgggtcctcctcctccttcagcctgccctccctcacttccctccccggktagtgaccctttgtcctcaaaatggctgttttggggtcaaggaccctcctccaggtccagaggtgtacatttcccctgggttaaggaaaaaccctccaatgtgagaggcaacaaagtaaaccgtcctcatcccccatcctgggggagacaaatgggggcctggtactgccacgatgggtgtaggggtaatccagcggctttctgggac

SEQ ID NO: 453637 - DNA, 533 bp, Homo sapiens
attgcattaagcacaagatttacagctgtgatggtttagcatatgctctgctacttgagataatggagagcaggttcttttaactgaagatacaatcaatcctgggagagcaaggagcaaggagccagcaagtctagrcacattccagaggcccctggggggttttgtgccctgagccctggattctatccaagccacgaggggttttatgccctgggctgagattatggtgcatcagggtagccttccaccctttagcacagagcttggtgttccaaaggccacgaggggttttagaccctggaccccggacatgttccaagactctgttacattatgtcagacatgcaagccctgcctcagcttctctcccaacactcagcttttcccaacaaaaactacatttactgaaatccctttatttgtatggtttcatattagaagaaactgtgtgattaggaggtaaaagtaaaacaatggctataattcttggagggtcttcatggtcagatactgctgattatccattgtta

SEQ ID NO: 453638 - DNA, 533 bp, Homo sapiens
attgcattaagcacaagatttacagctgtgatggtttagcatatgctctgctacttgagataatggagagcaggttcttttaactgaagatacaatcaatcctgggagagcaaggagcaaggagccagcaagtctaggcacattccagaggcccctggggggttttgtgccctgagccctggattctatccaagccacgaggggttttatgccctgggctkagattatggtgcatcagggtagccttccaccctttagcacagagcttggtgttccaaaggccacgaggggttttagaccctggaccccggacatgttccaagactctgttacattatgtcagacatgcaagccctgcctcagcttctctcccaacactcagcttttcccaacaaaaactacatttactgaaatccctttatttgtatggtttcatattagaagaaactgtgtgattaggaggtaaaagtaaaacaatggctataattcttggagggtcttcatggtcagatactgctgattatccattgtta

SEQ ID NO: 453639 - DNA, 570 bp, Homo sapiens
cttgttttatccttacaacaactctgagaaattcgcagaatagccattcatttttctcatttcattgatgaagaagttgagatacagaagcataagaaacaagcctgagattacacagttaatgagtgctgagaccagaaaaagaacatcaactgcaactttggaactcttcccacaccaattaaagtcttgttaattaattgtttatgtgtacaagactcttagtcaatgtacatgtcttctagtcctattttcttcttttagcaattaggaagaattggaggtacctggtggctactcaygaaacactctgtgatagatgccctacgtcagtgaggacaaaggtttccccttgagtgattaccacagttgattggtaatggctgcccaggggactatgagaatgattctgaggttgtgtctgggctcagtgggaaagaatgtgatgattggatgagtgacatttgcatttaggcacgggaaggccacatatttatgctaacgaagaggataatcatgtgcacaatttattttttgcttttgaattccttatctgattttttaaaagca

SEQ ID NO: 453640 - DNA, 648 bp, Homo sapiens
tccatggtagtgtcctcttgttgccatatggtactcaatgaagaattaacaaaccttatattactgcttttggtcctaaggcttttgagcatagggcaagacaaaagagaaagtctctcttccacacactaaatgggggcagagaccgggccattctggtttctgagttttatcccacttcttggagaggagtgtcacttactttgtacttcagcatcccttgccccttgtttatactccttacaaaacaataccaatacatgacagagccagtgggcatataagytaccggtataggaaagaatttcaatggatgtagactgttttccacatttaaggattgttttcctttccagaaaggaaaatggccaatctaataattttgatgatgataatcataatgacagtgaaatggtggaaattaattccatgttctatggtttgggctttgcatataattgtattagtgagcaaaaaataaaaaaagatcttgacagacccattgaaatggaataaattacaaaattaatcaaatctatttgtcattattcctggcatattttatttttagattttatttataaaaagatgaataattaactttacttataacaaagtaagctattcatgggaactccaagtcccata

SEQ ID NO: 453641 - DNA, 593 bp, Homo sapiens
atggacaagagactgaagaaggtcagggagtgacacatgacracacccagagaaagtaagtgttccagatggaaggaaagaagagcttgtgcaaaggccctgaggtgtgagcatgcctgaactgtcagggaatggccaggaggccagcatggctggagtggagtgacacacggggagggtaggagaaggtcagggaggccatggacagccagatcacagaaatgccatgggctgttttaacgtctcttgctgttactttgagtcagacagaaaggaagactcaactcttgaagagtttggagcacagaaatggagcagaggactgacaagatctgacctatatcttaataatatcttcaacttgttaggaatacactgaatggaccaggactggagcaggtagaacaattagaaaactgcaataatccaggcgggaaatgacagtgacttggaccagggtggtagtggtaaagctgcttatacggggtcagattcaggattttctttttgtagacatagccaataagacttattatggatcagatgtggaatacgagtaaaagagaagaattaaatatagtttcaagacggtt

SEQ ID NO: 453642 - DNA, 593 bp, Homo sapiens
atggacaagagactgaagaaggtcagggagtgacacatgacgayacccagagaaagtaagtgttccagatggaaggaaagaagagcttgtgcaaaggccctgaggtgtgagcatgcctgaactgtcagggaatggccaggaggccagcatggctggagtggagtgacacacggggagggtaggagaaggtcagggaggccatggacagccagatcacagaaatgccatgggctgttttaacgtctcttgctgttactttgagtcagacagaaaggaagactcaactcttgaagagtttggagcacagaaatggagcagaggactgacaagatctgacctatatcttaataatatcttcaacttgttaggaatacactgaatggaccaggactggagcaggtagaacaattagaaaactgcaataatccaggcgggaaatgacagtgacttggaccagggtggtagtggtaaagctgcttatacggggtcagattcaggattttctttttgtagacatagccaataagacttattatggatcagatgtggaatacgagtaaaagagaagaattaaatatagtttcaagacggtt

SEQ ID NO: 453643 - DNA, 593 bp, Homo sapiens
atggacaagagactgaagaaggtcagggagtgacacatgacgacacccagagaaagtaagtgttccagatggaaggaaagaagagcttgtgcaaaggccctgaggtgtgagcatgcctgaactgtcagggaatggccaggaggccagcatggctggagtggagtgacacacggggagggtaggagaaggtcagggaggccatggacagccagatcacagaaatgccatgggctgttttaacgtctcttgctgttactttgagtcagacagaaaggaagactcaactcttgaagagtttggagcacagaaatggagcagaggactgacaagatctgacctatatcttaataatatcttcaacttgttaggaatacactgaatggamcaggactggagcaggtagaacaattagaaaactgcaataatccaggcgggaaatgacagtgacttggaccagggtggtagtggtaaagctgcttatacggggtcagattcaggattttctttttgtagacatagccaataagacttattatggatcagatgtggaatacgagtaaaagagaagaattaaatatagtttcaagacggtt

SEQ ID NO: 453644 - DNA, 469 bp, Homo sapiens
gggagatctcttctttacaaaagaattccaattcataaatgtaaaagaagagggggaaataaaacttgctgttaagtaagcactacagtaatagctgttacagaaaaatctatgaatggatgctaaaattagtgggcacaagctcaagggaaaataagatactcatgtacttttaaagcatcttcccctctattcatttcwtatgtaaaaataactttacagttgaaatgcagcaggtaacatctaaaccaagtaatctaaattaacatcaccaataataggacatctcactccctgatatgatgcactgaagaggacacagcatcacctatggtattctcaccagcattcccataaaaaatgcacaacctcaatctaatcatgggaaaacgccagacaagcccaaattttgagatagtctataaaaataactaagtggtactcatcaaaagtatcaagatcatgagac

SEQ ID NO: 453645 - DNA, 539 bp, Homo sapiens
gaaaagacaattattgcaagggaccctcttgacttttgacctctgtggatttcatttattattgtctgttgggttatttattgagaagctggctatgattccccaaaaattactctgataaccagccatttcaaacatcacagaaatgagcagttagattagataaacaggaaatcaaaaactaactttaattctacacaactatatcatttagcaattaaatatatacatagtcatagtcyactatcattttcagttgtttcagggtattattcctctttcctctattaaactataaattgttgaagtgagaggatctatattttgtatctcaaaaatgcagaataattaactatatacctaatatgtatgtattgacccattgcctattggaagttttgacaaaataatcttgtttctgagaaagaggatcaaaattctcatagcataatccaagaccatctctatttcctttctaccatgaaatgctatcccccttgacccctcttcatgaaggaatcttcttctaaatgtttcag

SEQ ID NO: 453646 - DNA, 539 bp, Homo sapiens
gaaaagacaattattgcaagggaccctcttgacttttgacctctgtggatttcatttattattgtctgttgggttatttattgagaagctggctatgattccccaaaaattactctgataaccagccatttcaaacatcacagaaatgagcagttagattagataaacaggaaatcaaaaactaactttaattctacacaactatatcatttagcaattaaatatatacatagtcatagtccactatcattttcagttgtttcagggtattattcctctttcctctattaaactataaattgttgaagtgagaggatctatattttgtatctcaaaaatgcagaataattaactatatacctaatatgtatgtattgacccattgcctattggaagttttgacaaaataatsttgtttctgagaaagaggatcaaaattctcatagcataatccaagaccatctctatttcctttctaccatgaaatgctatcccccttgacccctcttcatgaaggaatcttcttctaaatgtttcag

SEQ ID NO: 453647 - DNA, 524 bp, Homo sapiens
atatttggcaggtttctccagatgccaggtcaggtctcgtaccaacatgttggcastggggacatggaaggccatgccagtgagcttcttgttcagctcagggatgaccttgcccacagccttagcagcacccgtagatatagggatgatttctggagagccccatggccatcacaccgcagtttcccagagggggcatccatggtcttctgggtgaagtgacagtgatcatgagtgtggtcatgagtccctccatgatttccaaggttgtcttggatgaccttggctagggggctactcagttggtggtacaggtggcattgctgatttataattctcatgctttatgaccatcatgaacagggggaatcagcaaagggagcagagatgatgactcttttgacttcccaccccatgagccccatctttctccacagtagtgaaaatgctggtggattccacaacataatcagcaccagtatcatcccatttgattgtgatgggctctcactcctggaagataa

SEQ ID NO: 453648 - DNA, 561 bp, Homo sapiens
accagagacctttgttcacttgtttatctgctgaccttccctccactattgtcccatgaccctgccaaatccccctctgtgagaaacacccaaaaattatcaataaaaaaataaatttaaaaaaaaaaaaaaaaaaaaaaaaggaggagcagagaaccaccgctcgtatttaaaacaaaaaagtagatgattatcatgaaraatgtaaatcgtggaactataagggagctaaggagggagccctgggatgccatcatttgtgggacaggtaggaaaagaacaaaatgggaaattgtgggaatggagggaaaggcaaaatgaaatgagggaaagaagctgagaaggatttgtcttagaagttaaaaaggaaatcagaagaagccagaggcagagagaatttcatagagtgatcaataatgcaaatactacaggtaactcaagttaactgaaaactcaaaatgaatttaggagtaatcttttcaagaacaattttagtgcagcagtttgagaagtcagtaagaagaaagcatgtaggcatgacaaatgtaaaccacttttttc

SEQ ID NO: 453649 - DNA, 551 bp, Homo sapiens
tattgtgaactacgcatgtgagggaactaggttgtgctctcctaagagaatctaatgcctgatgatctgaggtggaacagtttcatcccaaaaccatcccccctgccccacccccaccccacccaacagcccaatgtccgtggaaaaattgtcttccacaaaaccatttcctggtgccaaaagttggaaactactgttatagactatatgcaaagtagtactgtcctaaaacctgaaatattcacaattccaagaaacacctgactgcaaggatttcagagaagagatcatggacccgtagatacaacttattttaatcttctaaaagtattttagaaatcactggatccaacattgaaagacaaacatttacaggcatagaaaataaaaaggattggccaaaatattgattaatctatgtgatatagctagaaattcactactyaaaacagaaagagcttttatcaactgtctggttttcatttacctctttctcataaaacttgatctatgagtgtattgggggaaaagattttttttaagtttggact

SEQ ID NO: 453650 - DNA, 622 bp, Homo sapiens
aactttctacattagagattcatatgacttaacattgctaacaacagataatcttaagtgtgtgagtatacctgtgtgtgttgtagacccctttagaaaaactaagcattctaattggcttagtttatattacttttatgattacytttacattgactcttcacaacatttaataaacaatcatttatctgccattagtaatcctagttataggcatttttagctatttgagaatttgttattaatggggttttgtaaactattacagaggaattctttggagaatgagattacttttctgtttttttttcttgtatgacgaaaaataattagcaacttttcacagtcaaatagctagctttttaaaagcgtttaagtcattacagtttgtgcacagcttaaaataccatctaaacaacattataattaacagtggaacattttaaaaaatcactctatttacttgcaatcttctctttcaacaagctttttatttttctgaactttcttctaatcctgtctatatttttataacgttttaagcagtttgaattataaaacatgaatttgtaaggtatataaatatatatacctgttatacataatatatatgtatacacat

SEQ ID NO: 453651 - DNA, 622 bp, Homo sapiens
aactttctacattagagattcatatgacttaacattgctaacaacagataatcttaagtgtgtgagtatacctgtgtgtgttgtagacccctttagaaaaactaagcattctaattggcttagtttatattacttttatgattacctttacattgactcttcacaacatttaataaacaatcatttatctgccattagtaatcctagttayaggcatttttagctatttgagaatttgttattaatggggttttgtaaactattacagaggaattctttggagaatgagattacttttctgtttttttttcttgtatgacgaaaaataattagcaacttttcacagtcaaatagctagctttttaaaagcgtttaagtcattacagtttgtgcacagcttaaaataccatctaaacaacattataattaacagtggaacattttaaaaaatcactctatttacttgcaatcttctctttcaacaagctttttatttttctgaactttcttctaatcctgtctatatttttataacgttttaagcagtttgaattataaaacatgaatttgtaaggtatataaatatatatacctgttatacataatatatatgtatacacat

SEQ ID NO: 453652 - DNA, 565 bp, Homo sapiens
tgcatgactctgcataaaacatactgatatatcttgtatatcaggcctatgatatggtccttcaccatctgcttaagagattagatttctttcttgcaggaccctgggtatatttggaggaaactgaattcaaatattgctcagttttctctgtgtagatgactcaaagatttatgaaacaaaagagaagataacacagatgctgctcatgttatgttattaccacagcactatggctamgtacttagcatttgctacaaatgatggagctggctcaatatagtggaggtctcagggcctgtgttatatggcatgtccagcaccaggagtgacagcaaggtacatgtagaccattcctcccagggtgagctgataatagttaaatcattatttgcagctaatctagagtctacagccatctaaggaaacattatctgagtctctcatggcatcagtgaaaaacaaagcaataatttatctctgactactgagaaggtggaaatgcaatataacaataactagtcctacataggacatagttacatattacaaaagagtttactct

SEQ ID NO: 453653 - DNA, 637 bp, Homo sapiens
aacttgtgaacaatttcttccttggtatctcttatgactagtagcagggatgtgtgaaaccacatcaaggtaagatactaaagttgtcttggtaaagtcttcagctttaggtagctcttgaactggcttaggttgactgggaagcaatcaaataggtgagtaagtrgtttaatttactagacagtgtgactgaaacaaggactatatttctctctcttctctctctttctctctctcacttcccccaatgattattattgagccatccatattttgttgtatagaaatatattttatctagatcaacatggattcaatacagatatatccattgtcaacatttcctttctcttcattttctctctaatttagacctaaaactttggcttagctataggaaaatgggtttggctatagaaaagaaagtgttttcatattccctccatgtccatgtttgaaaatgaagtctagtatataatagagtgaaaaataccctagattgcatattggtggtataggttctcatttcaggtttccttacaagtagccactaattagcagggtgactatggaaaagttgcataaccactttttggtgtgggtttgtagaatcgaggaggtttaatcaggtaacttc

SEQ ID NO: 453654 - DNA, 637 bp, Homo sapiens
aacttgtgaacaatttcttccttggtatctcttatgactagtagcagggatgtgtgaaaccacatcaaggtaagatactaaagttgtcttggtaaagtcttcagctttaggtagctcttgaactggcttaggttgactgggaagcaatcaaataggtgagtaagtggtttaatttactagacagtgtgactgaaacaaggactatatttctctctcttctctctctttctctctctcacttcccccaatgattattattgagccatccatattttgttgtatagaaatatattttatctagatcaacatggattcaatacagatatatccattgtcaacatttcctttctcttcattttcyctctaatttagacctaaaactttggcttagctataggaaaatgggtttggctatagaaaagaaagtgttttcatattccctccatgtccatgtttgaaaatgaagtctagtatataatagagtgaaaaataccctagattgcatattggtggtataggttctcatttcaggtttccttacaagtagccactaattagcagggtgactatggaaaagttgcataaccactttttggtgtgggtttgtagaatcgaggaggtttaatcaggtaacttc

SEQ ID NO: 453655 - DNA, 593 bp, Homo sapiens
atctaattctgaagtctttgtaggaccattaaaaatgattaattcaggtgttggcacaacctgaataaagtaggtgtaagagttctcttggttgatcatggatgactatcgtgagtccttcactgtaagtctgatatgtggtgttatctttcaagtaatcagaggtttgcagaattaacaagggagaggaagccacagaatacaaggaaatttgttatctattaaaaccagagcatcacagttgggcagtagctttgaaatttgacaggactgttttccatgcttgacggcagtttggtttaaattagagagaaagtagaccttaagtctctgtcaaacttagtgtctgaagacagtggccacactggcagcaaaacgtgaacctggtcatggttgagtcaacagtggtggatggcactctaggtttaatagaaggagctgatatcctattgatgatatttgcctctgcaaaatattccagttgtcctcagattgctgaagacccttgcaattacttccagcccagtcatgccatcaccattcagatactccaggcaatctaataagccyggtcccatgtttaacaatgcagt

SEQ ID NO: 453656 - DNA, 645 bp, Homo sapiens
gattctgtttgtgcacaggacaagacacattctggacaagttggaggctggtggaggagactccttttctcccagtgctctttcctcgcctagcaaagctgggggcactgaggagggtggactattgtagattttaaggtgatctgaccatatcactgtcatgtcagaatatcaagttgagtcacttgaatttaaaaagctattaataaacagggctctatgtttctccttctcctcttaaaacaccagtttctaaacactctgctttatttgctccaattttgtcttaactacttatttgtagaaaaataaattttactgaccaagtgaacttgctcaattctactgttggcttctaatctgtttcattccaatcactttaaactcaaaatcaattgtagtgctatataaacgacaacttcaaagtaaygatgacattttacactgaaaggacaaaacagatcaacacctacatttctcttttagattcttcatacacaggcttcaaacaagtccttgttgaaatctcatccgagttgctgttggaggtacaataaagtcatattagcaggatcagaaccagaaataatatgtctggttctgtttagttcttcatgtctctttgctaaaataatgcaaattcat

SEQ ID NO: 453657 - DNA, 589 bp, Homo sapiens
tgtaaactatacacagaactaaaattttaaagttctattcgatttgatttactctgagtgttaagacaaaattaatgcaaacagaaagtttaatgggccttgaggagggacagttaaaaattctcttcaaaatacaacarcaattgctgatatatttcacatacatacacataaaatttctactactgctgctgaaatttctttagactggctgcctatacccagcctcatttactcagactcaggactttcttctacgcatctagaattgcttcaggattatctaaaatctttaaaacaaaaatggacttctattattaattcatattctcaagggatcatttactgatgttatatcatacaaatttaacataatattggaaaattttcacaaagttctgtaaaagttgtatgctgtgggaagctaataaattttttttgcatgtgttcttattttgattaatctttcctttgcacatcattacttttccacagactgaatgaatttggaatttatttagtttagccattttacttttaagtcagaaaaattaaaataaagataagaaattattcttactggctaatc

SEQ ID NO: 453658 - DNA, 589 bp, Homo sapiens
tgtaaactatacacagaactaaaattttaaagttctattcgatttgatttactctgagtgttaagacaaaattaatgcaaacagaaagtttaatgggccttgaggagggacagttaaaaattctcttcaaaatacaacagcaattgctgatatatttcacatacatacacataaaatttctactactgctgctgaaatttctttagactggctgcctatacccagcctcatttactcagactcaggactttcttctacgcatctagaattgcttcaggattatctaaaatctttaaaacaaaaatggacttctattattaattcatattctcaagggatcatttactgatgttatatcatacaaatttaacataatattggaaaattttcacaaagttctgtaaaagttgtatgctgtgggaagctaataaattttttttgcatstgttcttattttgattaatctttcctttgcacatcattacttttccacagactgaatgaatttggaatttatttagtttagccattttacttttaagtcagaaaaattaaaataaagataagaaattattcttactggctaatc

SEQ ID NO: 453659 - DNA, 510 bp, Homo sapiens
accaatgagaatatccttaggaaaaaaaaattgaacagcagctcagcagaacctgaatcctgtcctcttgctttcctcccccgagacatgagattcatcacccactccaccaccttctccactaactgcctgcccatgggktccatccggttgcttgccagcagtctgtctatcctttatgcaaacaccacgggctctagctcctggatcttttctttcagctccaccagcttctgggtagactgggggactggggatctggtagaaatagtggggcatacaaagtaagaatgaggccatgacaggcctgaataactgcctagcctcctacctgaacagagtgggtggcctggagactgagaatcggaggctagaaatcaaaatctgggaacatctggagaagaaggggccccaggtcagagactggggacattatgttaagaccacagaggacttcagggctcagacttttgcaaattctgtggacaatgcctgcattgttctgcagat

SEQ ID NO: 453660 - DNA, 543 bp, Homo sapiens
gaataaataggaagaaagttgtttctgaaatcaccaatgagaatatccttaggaaaaaaaaattgaacagcagctcagcagaacctgaatcctgtcctcttgctttcctcccccgagacatgagattcatcacccactccaccaccttctccactaactgcctgcccatgggttccatccrgttgcttgccagcagtctgtctatcctttatgcaaacaccacgggctctagctcctggatcttttctttcagctccaccagcttctgggtagactgggggactggggatctggtagaaatagtggggcatacaaagtaagaatgaggccatgacaggcctgaataactgcctagcctcctacctgaacagagtgggtggcctggagactgagaatcggaggctagaaatcaaaatctgggaacatctggagaagaaggggccccaggtcagagactggggacattatgttaagaccacagaggacttcagggctcagacttttgcaaattctgtggacaatgcctgcattgttctgcagatt

SEQ ID NO: 453661 - DNA, 543 bp, Homo sapiens
gaataaataggaagaaagttgtttctgaaatcaccaatgagaatatccttaggaaaaaaaaattgaacagcagctcagcagaacctgaatcctgtcctcttgctttcctcccccgagacatgagattcatcacccactccaccaccttctccactaactgcctgcccatgggttccatccggttgcttgccagcagtctgtctatcctttatgcaaacaccacgggctctagctcctggatcttttctttcagctccaccagcttctgggtagactgggggactggggatctggtagaaatagtggggcatacaaagtaagaatgaggccatgacaggcctgaataactgcctagcctcctacctgracagagtgggtggcctggagactgagaatcggaggctagaaatcaaaatctgggaacatctggagaagaaggggccccaggtcagagactggggacattatgttaagaccacagaggacttcagggctcagacttttgcaaattctgtggacaatgcctgcattgttctgcagatt

SEQ ID NO: 453662 - DNA, 514 bp, Homo sapiens
tatggagattccttaaaaaactaagactagatctacctttgatccagcaatcccactgttgggtatctacccatagggaaagaagtcattatatgaaaaagacacttgcacatgcatgtttatagcagcacaatttgcaatcgcaaaaatgtggaatcagcccaaatgtccattaatcaactagtaggtaaagaaaacattatacgtacatatatctatatatatatagagagagatawgatatacacatatacatatataatacacatcatgtatatcatattccatatataccatgcacacacacacacacacacacacacaccatgggataatactaagccataaaaaggaatgaaataatgccatttgcagcaacctggatggtgttggagaccattattctcagtgaattaagtcgggaatggaaaatcaaacattgttctcacttataagtgggagctaagctatgaggatgcagaggcataaaaattatataatggactcagggaga

SEQ ID NO: 453663 - DNA, 398 bp, Homo sapiens
gttcaacatatgcaaatcaaaagatgtgatttatcacataaacaaaacaaaaaacatccacatgatcatctcaatagatgcagaaaagactgtcaataaaatgcaacatccctttgatrtgggatttttgcaatgttgctttttctgtccagaaacctctgtggcctgtggtgccttggcccaagttcttctcctgcatccgggacgaatgaagtatgcagaaaagtggaggatgagcaagacaaagaggagctttattaagtgttagaacagctcagaggagacccacagagggtagctcttctctgtaggccagtcgtctcattgtctttttgtcctcttctctgatctgatgaacccagggcttttgtgggcctcagaggggaggaaatgcatgc

SEQ ID NO: 453664 - DNA, 398 bp, Homo sapiens
gttcaacatatgcaaatcaaaagatgtgatttatcacataaacaaaacaaaaaacatccacatgatcatctcaatagatgcagaaaagactgtcaataaaatgcaacatccctttgatatgggatttttgcaatgttgctttttctgtccagaaacctctgtggcctgtggtgccttggcccaagttcttctcctgcatccrggacgaatgaagtatgcagaaaagtggaggatgagcaagacaaagaggagctttattaagtgttagaacagctcagaggagacccacagagggtagctcttctctgtaggccagtcgtctcattgtctttttgtcctcttctctgatctgatgaacccagggcttttgtgggcctcagaggggaggaaatgcatgc

SEQ ID NO: 453665 - DNA, 398 bp, Homo sapiens
gttcaacatatgcaaatcaaaagatgtgatttatcacataaacaaaacaaaaaacatccacatgatcatctcaatagatgcagaaaagactgtcaataaaatgcaacatccctttgatatgggatttttgcaatgttgctttttctgtccagaaacctctgtggcctgtggtgccttggcccaagttcttctcctgcatccgggacgaatgargtatgcagaaaagtggaggatgagcaagacaaagaggagctttattaagtgttagaacagctcagaggagacccacagagggtagctcttctctgtaggccagtcgtctcattgtctttttgtcctcttctctgatctgatgaacccagggcttttgtgggcctcagaggggaggaaatgcatgc

SEQ ID NO: 453666 - DNA, 622 bp, Homo sapiens
acatttaatctgcttaaagattttcttacgtttacaacgatggaataaatatggttcgctgatataagctctttccatttttctcctttgcatcttagcaagatgtttgcttcttaaggcatatctagattttaaattatcgattctctaaaggtaagaaataggaagtcattgagctctgggccatccaaaaagcatacattgttcaaacaaatatcatccatctatactttatttaattgattaataaataaatccactcagtagatggactctgatcaaaccaacatctcaaccagctagattttgccctattattgtaccccaggttccctcttaacatgacttatatttgctatgtttyttcagagtttaaatatggtaaatttctcaaatagtagtagtgctctccaaatatctataataccttgaaacacacccagtaattcattacatattttattctgatcttcctcaacttttcggctcatgtcttttgaaatttaatttaaccatattatttagctgttctaatttctaagtgacagcatttatacagctcttattagggactgtcacagtcttttgagagtatcattccagtacactctctgtatccata

SEQ ID NO: 453667 - DNA, 622 bp, Homo sapiens
acatttaatctgcttaaagattttcttacgtttacaacgatggaataaatatggttcgctgatataagctctttccatttttctcctttgcatcttagcaagatgtttgcttcttaaggcatatctagattttaaattatcgattctctaaaggtaagaaataggaagtcattgagctctgggccatccaaaaagcatacattgttcaaacaaatatcatccatctatactttatttaattgattaataaataaatccactcagtagatggactctgatcaaaccaacatctcaaccagctagattttgccctattattgtaccccaggttccctcttaacatgacttatatttgctatgttttttcagagtttaaatatggtaaatttctcaaatagtagtagtgctctccaaatatctataataccttgaaacacacccagtaattcattacatattttattctgatcttcctcaactyttcggctcatgtcttttgaaatttaatttaaccatattatttagctgttctaatttctaagtgacagcatttatacagctcttattagggactgtcacagtcttttgagagtatcattccagtacactctctgtatccata

SEQ ID NO: 453668 - DNA, 608 bp, Homo sapiens
cacttggcaaatatttcagagtgaagatgccaaaaacaattaccacaaaaataaaaattgacaaatgagacctaattaaactaaaaagttactgcacattaaaagaaactatcaatacagtaaacagacaaaytacagaataagagaaaatatttgcaaagtatgcatctgaaaagggactaatatccagaatctataaggaacttaaagaaatttacaagcaaacacctcattaaaaagtggacaaaagacatgaacacacacttttcaaatgaagacatatgcatggtcaaggcgcatatgaaaaaaatgctcaacatcattaatcattagagaaatgcaaatcaaaactacaatgagataccacctcacaatcagtcagaatggctattaaaaagtcaaaaaataacagatactgatgaagctgtagagaaaagggaatgctgaaacactgctagtgggaatggaaatttgttcagccactgtggaaagcagtttggcaatttctcaaagaacttagaatgaccatttgacccagaaatcccaatattgggtacatacccagaggtatatgaattgttctaccataaggacacatacacttgtgt

SEQ ID NO: 453669 - DNA, 577 bp, Homo sapiens
ccctctgattaattgattatggttttcacatagcagtttcccttaatctgcaaaggtataaaagtttagctttcattgccctaaattatgctgtttaaaataatacaagacatcacacagctttcgcttctgggaaaagatggtgaagactcacattttctgctcctctcctcaaaatatgctaaaagaacctggaaataaataatgatgaagggaccctgaaatttaaaaagaagaaaagaggttgatttgaggccttggaacttgagaaacaaaatacagtgagttttctaggttttcttttttttttttcccctttaattttccttatactcagctaggtgccaaacaaacatgcaacccagaaccaccagccacctgtttatccttcctttcagctggtrattttgtctaaaaattcggtgagaaagatgaaactattagatataaatctcttatatttccactaccaactacaaatctactacactcacacccaccgtttcctccttccttcctgttacgatgtaggacatgattagcagagactgttccctctacctgagctgtacagcca

SEQ ID NO: 453670 - DNA, 428 bp, Homo sapiens
acatatacaagtgcaatttgtactgcaatcttttcaaagttctcttagtaaatgaatagtaccttagttacaaaaaggtgaataaaacatagcagtgcataatattttaagtttgtaggaattatttaatatttgaagaaattttgaacttgtcrttatatgaacataaagagtcatctgaaggcataaaaaaagactggaatatttctttttattttacccattggccattgctaaacatctttgttttaaccaggatatgaattttgttctgctctgtttacatcctggaaggttcatccctctggtgaatcgcattgcgatactggcacagaatgacaagggtatttgtgtgcacgtgtgtgtgtgtgtgtgtgtgtgtgtgtgtgtatttccataatatcaaaatgccagcattaataacagta

SEQ ID NO: 453671 - DNA, 553 bp, Homo sapiens
tctctttgaaaactgcttcttttgacttgttgtaaatatgtaatcagaccaatgacataacaatttcaattgggatgcatggaaagatacatataaagataattttgaaataaccaatctttactgagtaaaatattatyttttactttacattctaaaattactgtttcagagatattcacacacatcacagccaaatacatgcacagaaacagtaagaaagactaatgacaacagtgttgtcatttgcccaaggaaaatgtggaataaatattatctcaacctactactaatttaataaagattttctccccagagaagcagaagtcactttaaggtttcctaatttgtttttatattgctgttaagagaagcaataatagtccttatcacacatgcttctggagaaattaaaaaaggtaccttgccccaagccaaagttaattggtccgagaatcactggaaactctaactcccaatccagtgaatcactcccttcagctccctctctccaaataaaacctatttaagtttcctgaatgctttaattaag

SEQ ID NO: 453672 - DNA, 604 bp, Homo sapiens
aaaactgcttcttttgacttgttgtaaatatgtaatcagaccaatgacataacaatttcaattgggatgcatggaaagatacatataaagataattttgaaataaccaatctttactgagtaaaatattatcttttactttacattctaaaattactgtttcagagatattcacacacatcacagccaaatacatgcacagaaacagtaagaaagactaatgacaacagtgttgtcatttgcccaaggaaaatgtggaataaatattatctcaacctactactaatttaataaagattttctccccagagaagcagaagtcactttaaggtttcctaatttgtttttatattgctgttaagagaagcaataatagtccttatcacacatgcttctggagaaattaaaaaaggtaccttgccccaagccaaagttaattggtccgwgaatcactggaaactctaactcccaatccagtgaatcactcccttcagctccctctctccaaataaaacctatttaagtttcctgaatgctttaattaagcatcagatattaatatgaatgttccactttttaatattttctttttgttttagtctaca

SEQ ID NO: 453673 - DNA, 583 bp, Homo sapiens
tgttgtcatttgcccaaggaaaatgtggaataaatattatctcaacctactactaatttaataaagattttctccccagagaagcagaagtcactttaaggtttcctaatttgtttttatattgctgttaagagaagcaataatagtccttatcacacatgcttctggagaaattaaaaaaggtaccttgccccaagccaaagttaattggtccgagaatcactggaaactctaactcccaatccagtgaatcactcccttcagctccctctctccaaataaaacctatttaagtttcctgaatgctttaattaagcatcagatattaatatgaatgttccactttttaatattttctttttgttttagtctacatctaaaatcttgtgctaaaatttttcacagaagatgtgtcttatatatgaactagacatatgcactagaaaccagcttcctcaaatcttgtaggttctgtgctgctttctaaccccgtgccagtaatgctcactgatttctatamttttctagaaatttaaataaaataaaagacctacagactaaattctgcctcgagaacttttat

SEQ ID NO: 453674 - DNA, 567 bp, Homo sapiens
ttataatagaaaataaagcaacacttacgaacctcatctgtggagatgctgcattgacagcgctggaagcttgtttatcctcactggtgagtagatctcaccttggttgtgcagcaagcttcctatagagcagtacttctcagactttcctgtgcacatcaactcctgagttcttgtgaaagtgctaattacgattcagtaggtatgggaaagccaagattctgcatatctaaaaagctcccaggagatgctggtcaccagacaatattttgagagcatttttaaaaacaataaacctcacttttagagattctcatgctgaagatctctgagggcagccttataattgtattttttaggagttgcaaatgttgattttattgcccagctagggaaaaggatcacttctgtgggtgtatctcacctttgtgaaaatgtttgcaaagggtcttgtacarctcaattttgatatctaatttgcataatatatacagtattttatttactaaatttcatgttaaagtattggataatacaaaagatcctttttgaaattttatggaatat

SEQ ID NO: 453675 - DNA, 592 bp, Homo sapiens
acaattttttaaagacaaattatatcaactattaattcttagaaaaatgcaaccacatttttaatccctaacctacaactgcattgtctgaatccttttgtgagatatgttctttttttagcctttaagatcatccagtaggcttcatggaaataaaagactaaaaggattattacttgaccatctttaatcagatgttgcttgagagtcctagaaaaaatatgccattattttaggaggttgaagaactgaataatttttaaagtcatatgggcagtcagagaagamaatcttttagatgtctctaccgaataatattaaccactagaaaaaaagcgaccacactgacaattttctttaaggactgagaggagattatttcaattaccatgttgccctgtccttgtcaactttttctaggatggcagagctaagaaatacccttaagatacattaaaggagaggtggttgaaaaagagaactaaaattgtctgcaggctaagaatgtctagtttaaaaaataaaacctgaaaaattctccaactattattttccccagctttgttcactacttagtttatactctgcatgg

SEQ ID NO: 453676 - DNA, 632 bp, Homo sapiens
tctaattaaaaacaaattttatcctagtgatgttagacctaaaaatctgctgtctcatcacatgtatgaaaacaagtgatgtcaatagtctcagcacaatttaaatgtgtaattatgttatttgactacatagtctctggagtattcttaagaaaattttcccatgattgtgtgtgtgcatgtgtatgccccattcttttccaaaaaactgtcaacaccaagacatatcaaaaatttatctctatactaagcactatctttgtaaaatggccttagtgaagtcagcgcttytggaactgtattttctctctgcagaaagtacgctagacttttcatcttcctctctagagtacttcagagaactggactaaccagtgaggcagttaggaagactaagtaattaataaggaatggagccatcattccctgaaacagctgtgtgggattgcttccaaccacaccagcaaacaggctaatgcagacggagccacctgctcttcccagtggtgttgcttccaatgcactgggctaccccttagctttcaggtatgttcatattgacagtaatttgaaataggtcgaataaaatacccaagagaagaagtccagcaggctatcatagaaagcactgc

SEQ ID NO: 453677 - DNA, 422 bp, Homo sapiens
atttaaatataacaccttaaactataaacatcctagaagaaaacctagaaaacaccattctatacatgggccttgggaaaaaagttatgactaagtccttaaaaccaattgcaacaacaaaaattgacaagtgggatctaattaacctaaagagcttctgcacagcaaartaaactaccaagaataaacatacaacctagagaatgggagaaaatattcgcaaactatgcatctgacaaaggtctaatatccagaatctataaggaacttaaacaattgaacaagcaaaaaacaaataactcaattaaaaaaaatggtgaaaagacatagacacttctcaaaagaagatatacaagcaaccaacaaatatgaaaaaatgctcatcatcattaatcatcagagaaattaaaaccacaatgaga

SEQ ID NO: 453678 - DNA, 422 bp, Homo sapiens
atttaaatataacaccttaaactataaacatcctagaagaaaacctagaaaacaccattctatacatgggccttgggaaaaaagttatgactaagtccttaaaaccaattgcaacaacaaaaattgacaagtgggatctaattaacctaaagagcttctgcacagcaaaataaactaccaagaataaacatacaacctagagaatgggagaaaatattygcaaactatgcatctgacaaaggtctaatatccagaatctataaggaacttaaacaattgaacaagcaaaaaacaaataactcaattaaaaaaaatggtgaaaagacatagacacttctcaaaagaagatatacaagcaaccaacaaatatgaaaaaatgctcatcatcattaatcatcagagaaattaaaaccacaatgaga

SEQ ID NO: 453679 - DNA, 537 bp, Homo sapiens
ggggactaccagagtaaggaggaaaggatgggaacaagtaaccattgaatactatgctcactacctgggtgatgggattatttgtaccccaaacctcagtgtcatgcaatayacccatgtaacaagctgtgcatgtaccccggaacctaaaataaatgttgaaatttcacagaaaaataagaaaaaagaaaagaagccaattgctatattgatgtttgcaaactggtgattttgctaattctattattctcaacatttattatttgttaacattattgcctttacaaggtgtttcaggttcacatattatctccctgccccagacagaaaaaggaaatatacttggtcttggctattcataaatttttaaagaataaacaatatttttcagtacacataattttcctagtaaatatatacaaatagaaggtcactttgttaatagaaatatactagtagatggtattttaaaaaagcaatgaagctctttctcttccctgttcctttctgaacatttcagtcagccatagactgaat

SEQ ID NO: 453680 - DNA, 537 bp, Homo sapiens
ggggactaccagagtaaggaggaaaggatgggaacaagtaaccattgaatactatgctcactacctgggtgatgggattatttgtaccccaaacctcagtgtcatgcaatatacccatgtaacaagctgtgcatgtaccccggaacctaaaataaatgttgaaatttcacagaaaaataagaaaaaagaaaagaagccaattgctatattgatgtttgcaaactggtgattttgctaattctattattctcaacatttattatttgttaacattattgcctttacaaggtgtttcaggttcacatattatctccctgccccagacagaaaaaggaaatatacttggtcttggctattcataaatttttaaagaataaacmatatttttcagtacacataattttcctagtaaatatatacaaatagaaggtcactttgttaatagaaatatactagtagatggtattttaaaaaagcaatgaagctctttctcttccctgttcctttctgaacatttcagtcagccatagactgaat

SEQ ID NO: 453681 - DNA, 520 bp, Homo sapiens
taacttaacatgctcataagggaatttgagagagaacactctatgagacagaaaattctgtaagacagctagaaagtcctaactgatagattcaacaaagtaaaacaaattgacagaaaccatataagttctggaggcagaacttagtctacaggtgttttattttatttaaatttctagaaaattatataaatgagtaagcattactggaacagggttaaaaagcagcatagaacatacaagatttgaggaagttggtttctagtacataaaacagggaaccttccagctatawctggagaactgatcttccatgagtctctcttacaaaatttatggtattcccattgttggatctatttgagacactaaaaaatttgcactgatatttacatttgattttttaaaaatcttatctgactacttttaactttgattttgcatcttgccactataacttcttttttgtgtgtgtacatttaacattgtactaggcattgtttataaaatggcgaacaaa

SEQ ID NO: 453682 - DNA, 596 bp, Homo sapiens
atcaacaaatgctaaaaccattgtgtgggggattgttggaaaactggactttcctacctattcaagatatcacacaagtataatattaattactaatagaaaagaatttttctttataattcggagatttagcagccaaactttgaatcatcaatggtaggacaacttgatataatgttcttaatgtgaaacaacaagaaatatacatagcaactgtgtactattcttgccaaaattattaaacygaatttacataagaaaaaacaagaaaggaacacattgtaaaagaccagaggcctagaatggtcaacaattcaatataatgagaaaaaatataagggacagttcaacattaaaagaaactaaagagacataaccaaattcaatttacacaccacaattggatcctggagttttacaaaaagatcctaaaagacaattttagaacaattagggaattttgaagatggacagtatattaggtgatattttaaaattagagttaattttcttagatgcaacattggtatagaagttataaagaatgtttttattcttaggagagtcctgctaacatatttgtcaggtaagttatg

SEQ ID NO: 453683 - DNA, 596 bp, Homo sapiens
atcaacaaatgctaaaaccattgtgtgggggattgttggaaaactggactttcctacctattcaagatatcacacaagtataatattaattactaatagaaaagaatttttctttataattcggagatttagcagccaaactttgaatcatcaatggtaggacaacttgatataatgttcttaatgtgaaacaacaagaaatatacatagcaactgtgtactattcttgccaaaattattaaactgaatttacataagaaaaaacaagaaaggaacacattgtaaaagaccagaggcctagaatggtcaacaattcaatataaygagaaaaaatataagggacagttcaacattaaaagaaactaaagagacataaccaaattcaatttacacaccacaattggatcctggagttttacaaaaagatcctaaaagacaattttagaacaattagggaattttgaagatggacagtatattaggtgatattttaaaattagagttaattttcttagatgcaacattggtatagaagttataaagaatgtttttattcttaggagagtcctgctaacatatttgtcaggtaagttatg

SEQ ID NO: 453684 - DNA, 531 bp, Homo sapiens
tcattttcatgctgctgtgtaataaattattataaaccttgtggcttgacacagcactaatttatctcacagattatgcaggtcaaacatctgagcacagtgtggctggagtttttctccttagggtcttactaggctgacatcaaattgttggycagggttacagttctcacatggagcttggtgtcttgcaagctcactggttctggtacaatttattcccttgtgattgtaggactgaggtcctcagttccctatgagctattacctgggactactctcaactcctagaacccacctaaagttccttgccatgtggcaggaactttaataaactttataggctgtttataatatttgctttcattaaggctcaccaaagttcatctctctcacttcttcttctgtgacaagcaggtgaaaattctgcctttaaaggcattgtctggttaggtcagtccaaccaaaaataatttcccatttactaaataaattaacagactcatgggagtgatatctctttgtagtcat

SEQ ID NO: 453685 - DNA, 377 bp, Homo sapiens
tgtctttcatatttaagaatttttttttttctatttcaaccgayagctccctgttgttatttcttttctgtattggggttttctatctttcttttgatgagattagtttattatttttaataaacagaaatttgatttattaattaggtctacagctttcatattatattttatttatttcttcatgtttccttctatatggtttctttgatttactgtgttcctctctatttttattttgaaccatgtgtttattttattcttttatttctacagataaagcgtttattaggatgaatttttcttagatagctgtttaactacatctcaaattcttatatgtagtgttccatataagatggatgcttttttatttt

SEQ ID NO: 453686 - DNA, 377 bp, Homo sapiens
tgtctttcatatttaagaatttttttttttctatttcaaccgacagctccctgttgttatttcttttctgtattggggttttctatctttcttttgatgagattagtttattatttttaataaacagaaatttgatttattaattaggtctacagctttcatattatattttatttatttcttcatgtttccttctatatggtttctttgatttactgtgttcctctctatttttattttgaaccatgtgtttattttattcttttatttctacagataaagcgtttattaggatgaatttttcttagatagctgtttaactacatctyaaattcttatatgtagtgttccatataagatggatgcttttttatttt

SEQ ID NO: 453687 - DNA, 574 bp, Homo sapiens
gggaggaataaagctcatttttttcaaataaataaaagataattaaaaagtagagaaagcaagacagattaaacaatttaaagtaaaatggaagaaaaggtataaatatatcagttatcacaataggtattaaagaactaaccttgctagttaggagacagagattgtcatacatgattttttaaatatgctttttgcaagatattcactttaaaacagggcacaaaaacattgaaagtaaaaagacagaaaatggtctaagaaatggtcacgataaaaatataaaaattctgaaacagtatttccaaatgcaattcacccaaaatatataaagcaagaactgatagaaatgcatgaaggaaatgaaaaatatcacactatcatggaagatttcaatgtagctttctcaatttttggtagattgagcaaacataaagttaatgagtatacaaaacttgaaaagtatatttaacaaggtgaagtatgtrtagaatatttgtagcaaatgttgatatttattcaatatccctttgccacttacggatccagtttacaccaaaggtattttactgcg

SEQ ID NO: 453688 - DNA, 574 bp, Homo sapiens
gggaggaataaagctcatttttttcaaataaataaaagataattaaaaagtagagaaagcaagacagattaaacaatttaaagtaaaatggaagaaaaggtataaatatatcagttatcacaataggtattaaagaactaaccttgctagttaggagacagagattgtcatacatgattttttaaatatgctttttgcaagatattcactttaaaacagggcacaaaaacattgaaagtaaaaagacagaaaatggtctaagaaatggtcacgataaaaatataaaaattctgaaacagtatttccaaatgcaattcacccaaaatatataaagcaagaactgatagaaatgcatgaaggaaatgaaaaatatcacactatcatggaagatttcaatgtagctttctcaatttttggtagattgagcaaacataaagttaatgagtatacaaaacttgaaaagtatatttaacaaggtgaagtatgtatagaatatttgtagcaaatgttgatatttattcaatatccctttgccacttayggatccagtttacaccaaaggtattttactgcg

SEQ ID NO: 453689 - DNA, 631 bp, Homo sapiens
tatttatcgcaaactagatttaaaaaaaattaaaattaagatgtgtagtagcaagaagtattattgaaaatggggatcaagtagaatgatggtcatcaggagctgatgggaagggggaaygaaaagttagtgttttcttgaaattttttaagctgtattgagatattattgatatattttaaaaactggacatatttaatgcagacaatttaatgactttggagatatgcatatatctgcaatgccatcaccacaatcaaaagttccatatgaaaaatgtgaaaaatctctagagatgtatgatggtgatggttgcacaacaatgtgaatatgcttaatgtcacagaactatatacttaaaatggctaaaagggtaagttttatgctatgtgtattttaccacaataaaaaaaagtaaggaagaggaaggagaagaagaagaaggaggaggaggaggggaagttggaagaggggaatacagaggaggaggagaaaggaggaaggagaaaggaggggaaaaaaaggaagaacaatggaaattattgtcctctggtcaccaaagcataaattaaaaaaaaaattaaaaagctgagaaccagattgaggagctgaaatgtgatgtggaaacctt

SEQ ID NO: 453690 - DNA, 643 bp, Homo sapiens
tttaatcagccttctgtatttttatatttatgtcatcacttctgttgaactaaaaatgcaattcactagttattatcataaacatagtctgctgagtacaaggaattataataatgggctgtatttgttctactgttatactttgttcaaccaagtgacagcatgaacttgcatctaaaacacaagttattgtacactgcaggccaaaccataggctarttctgaagtatgagctaatagtgcagacatgggataacagtgaatggctctctgggttccaatgagtagggcaactttccagttcatctgagagaagcacagtccaacattagcacagcaatgtacccatctgtgagttttagtagctttgaatgagtgcattgcagacactgtggctagttagccagttttactgagtgttgcacactgctctgcctgtatgataataaaagacatcacagatgggactattgttttgggagggataccaacagtgagtatcttgatgtgctgtgtcatcaaagtatacaacgtcacagaaaaaataatggttgattatcaacacagagatattatgttgaggtattctaggttcttagagacattgggaaaaaaataagaataaatttgaattattcattat

SEQ ID NO: 453691 - DNA, 582 bp, Homo sapiens
gaatacttagacttcaaactttcaatattttaaataaatattcagcaaacagtcttctgtgtatttcttatataagtgtgtgaagtttctctaagtgtttctaaggtatataccttaaagtatgtcaatggtcagtgtccatgctgtccaataaattatttgaaatataatccctttgtgcatacaatgtacctttgtcaaatattataccaacataatattctatcagcactgtacaaataggcctatttttacattctgccaatactaaattattttgaaaaaagttaattgtttaatctcgcatatatatataaatctataatatatgcagattttgaaagaataagtgaatatcayagtctcaccaccatattaatgagttagaacactactggttcctaagaagttgtgagttcctacaaaattatagttatcctctagagtcaattttttgttcattattctctttttccatatatatttagctgtctgaatatgtatgtctagttttgaaaccctaagtagcaagaataaaactagatgaataataaaaatggaattttacactattagtggaaa

SEQ ID NO: 453692 - DNA, 639 bp, Homo sapiens
tttaagaacacacatagtttaaaatgaagggatggacaaagatatcccaagcaaaagtgagcaggagagaatatacttatatcagataaaatagtatttaagtgaaaaactggcacaagccaaaggttattatgtattaataaagggatcaatgtatcaagaggatatactaattatwaatgtgtttgcactcaacattgttgcactgaaatattttcaatataaatttaaatgtagtttatattttaaatataaaagaaaatattaacagaacttattatgggaggaaaaaatagctatatggtaatggtaagaaactttcttaccccactttcaacaattaatgggtcatccagacagaaaatcaaaagaaaacagtggacttgaagaacactatagaccagatgcacctaacaaatatatagagaacattccatcaacgtgcaacagagtaaaaacattattttcaaatatggatgaaacattctttaggatagattatatgttaggccacagaataaatcttaacaaatttaagaagaccaaaatcatatcaatcaaactataataatgtgaatctagaaatcaataataggaaaatctgtaaatatgtggaaattaagcaacacacttatagac

SEQ ID NO: 453693 - DNA, 490 bp, Homo sapiens
aaagttgtctttctaacgacagaacactgcttcattttcttacargtaatttcctgagagtgaggaggaattgatggtgggggcggggtggctttcagaaataataagaggttatgaaatttttgtctcaggaaacacttattgatgggactgttcaacagtattcactggcaaatgaaaaaccagttatactggttctgtaatttgccaatgatcctccaggacatcaacacttaaactaacagtatttaaaatcttgccaagactgaatattattaatacttgttatctatgccaatgtgatacgtgaatttttaaacttctttatattctatgtttattttattattaggtaaagtgagaatgttctattgtgtttgtttattgttatattgattggaaaagagtaaggctagaagaaaggacacttagaagattgttggcatagcgcaggttgagcatccctaatcgtaaaagtggaaatacaaaa

SEQ ID NO: 453694 - DNA, 490 bp, Homo sapiens
aaagttgtctttctaacgacagaacactgcttcattttcttacaggtaatttcctgagagtgaggaggaattgatggtgggggcggggtggctttcagaaataataagaggttatgaaatttttgtctcaggaaacacttattgatgggactgttcaacagtattcactggcaaatgaaaaaccagttatactggttctgtaatttgccaatgatcctccaggacatcaacacttaaactaacagtatttaaaatcttgccaagactgartattattaatacttgttatctatgccaatgtgatacgtgaatttttaaacttctttatattctatgtttattttattattaggtaaagtgagaatgttctattgtgtttgtttattgttatattgattggaaaagagtaaggctagaagaaaggacacttagaagattgttggcatagcgcaggttgagcatccctaatcgtaaaagtggaaatacaaaa

SEQ ID NO: 453695 - DNA, 490 bp, Homo sapiens
aaagttgtctttctaacgacagaacactgcttcattttcttacaggtaatttcctgagagtgaggaggaattgatggtgggggcggggtggctttcagaaataataagaggttatgaaatttttgtctcaggaaacacttattgatgggactgttcaacagtattcactggcaaatgaaaaaccagttatactggttctgtaatttgccaatgatcctccaggacatcaacacttaaactaacagtatttaaaatcttgccaagactgaatattattaatacttgttatctatgccaatgtgatacgtgaatttttaaacttctttatattctatgtttattttattattaggtaaagtgagaatgttctattgtgtttgtttattgttatwttgattggaaaagagtaaggctagaagaaaggacacttagaagattgttggcatagcgcaggttgagcatccctaatcgtaaaagtggaaatacaaaa

SEQ ID NO: 453696 - DNA, 599 bp, Homo sapiens
tgaatatagagaaagagggactattgatggagtatgttcctggaagagaagacaggaaatactacctcagagaatggccctgggaggaaagacacttcttgaattttattgagaggaaaaaaggaaggtgaggtaattcctacctatgattcccattttctctaaaatttatgaggtaaaatcatcatctgatgatgaacaaatacctggtttcatagaagatctgggagaagagaaaagattgaaataacttctgtagagaataagagagaaaactgaggacctacaagattggcagtctcaagtagaacattaataaatgaatgcatttgcagttctgtttgatatgtagaaaattaaacttatatttttattttctttatctgtcctactttgaaagactaatttaataataaatattataaatattataatttgaaaccaataatagttatttatacgttttgttgccccctcacatcatctgagaaaatcattcattcatttcatggcctgtattcatgctgttggtatccyagatttgcttacctaataagaaatgtgtaatcactgaattaaagcttgtggaagctacataa

SEQ ID NO: 453697 - DNA, 524 bp, Homo sapiens
gaaaacagtttgtgttcagaatgtgggaatatgagataattttatattacctataatgttatttaacaatatatattttcaaacccaatgsggtctattgaaatgcacataagacaagaataagatgttcctggtcaacttacagctgtattgccactaattacactagaaacgtaataaatgtgaactggatgtcctaaaagcacaatcactttctaataaatgaaatgccagttgccattgtctggaggctgagaaaaatcatgaaaaaacacatgcctgaaaccatgtatatttttagtgaaaagactatcgtagaatgttattagattaacttttgtgtgagtgactttaaactcttaattggattccaggcatgtcagacataggcaaaatggctctaattgcctcacttttccttctgacgcttgagaatagcccatatttaggctttttaacaaccaaaagataaagaaaaaggacagaaagaaaaatatatatatttgagctacagaatacagact

SEQ ID NO: 453698 - DNA, 531 bp, Homo sapiens
gatggagtggtcagggacgtcctctctgaggaggatgagaataagctagccatgrgaagaccgggggaaggaaagaacagcatgtgcaaagcttagaggtgagaaagggtctggtgtgttaagaaacaaaaaggagctagtgtggatggagtataatgagcaaagagaagatggtatgagacagggagagtccagatagtgtcaggcctatggatcactgcaaatagttcaggtttttaaaaatacattggggatccagtgtagagttttaagcaagatagtgacaagatttaaaaattttcactctcctctttattcaaaacccagtgaaaataaagatcaggccgggcgcggtggctcacgcctgtaatcccagcactttgggaggccgaggcgggcggatcacaaggtcaggaaatcgagatcatcctggctaacacggtgaagctccgtcactactaaaaaaaaaaatacaaaaaaattagccaggcgtggtggcgggcgcctgcagtcccagctactcgggaggct

SEQ ID NO: 453699 - DNA, 610 bp, Homo sapiens
tgtcattgctgtattctgttgtataaacataccacaatttattttgatatttggcacagtttctggccactacatataatgctaaaatgagcacattgtatatgtcattaaaatgaggttgaactaatcattaagggctcattaaaatcaaaactaattttcaaccaaaatttcactgtatttagcagctgggtagtacctctgattattctttttatagtttgtaactaggtgaaataggttgaattattaattctaaaacctattcctaaaatggtaaagtactaaaacagtaattgtaacagcaattttgaaaatgacaaaaatgttagagaaaaaaaatggtatacattaatgatcrtcaaacttgcttaagccctaaaataactttttaaaattacatatctcatccctgcacatttttaacttcacatttgttattttttaaccataaatgtaagtattataaaagatataacttctggcatattgtatagttcatgtgctttaagtgtattttccatcataaccttgaagccacataattagctcaatcagtttgtggaggatgtctgcctgtccattttgaggtacaaagccagttcttatt

SEQ ID NO: 453700 - DNA, 579 bp, Homo sapiens
aaccataaatgtaagtattataaaagatataacttctggcatattgtatagttcatgtgctttaagtgtattttccatcataaccttgaagccacataattagctcaatcagtttgtggaggatgtctgcctgtccattttgaggtacaaagccagttcttattgtcaaactaatgagccaaatmaaacttatacagtcacagatcatttaatgatggggatacattctgagaaatgcattgttaggtgattttatcattgtacaaacatgacagagtatacttacataaacctggatagtatatatatttttatttatatgtatttttcatatggaaaaccaaacgtcccagcaccattactgaattatcagtcatgtcccctatttgatctgcagtgccaataccaagtgccatatatcagacttctatgtatgctccctatgaccttggggaccactgttgtatatgtggttcattcatcttacaccaaaatgtcattatgtggcacgtaactatactttttgttagaaaaaggcttactttgatttgaaaatgaaaatgttaatatatattcctg

SEQ ID NO: 453701 - DNA, 579 bp, Homo sapiens
aaccataaatgtaagtattataaaagatataacttctggcatattgtatagttcatgtgctttaagtgtattttccatcataaccttgaagccacataattagctcaatcagtttgtggaggatgtctgcctgtccattttgaggtacaaagccagttcttattgtcaaactaatgagccaaatcaaacttatacagtcacagatcatttaatgatggggatacattctgagaaatgcattgttaggtgattttatcattgtacaaacatgacagagtatacttacataaacctrgatagtatatatatttttatttatatgtatttttcatatggaaaaccaaacgtcccagcaccattactgaattatcagtcatgtcccctatttgatctgcagtgccaataccaagtgccatatatcagacttctatgtatgctccctatgaccttggggaccactgttgtatatgtggttcattcatcttacaccaaaatgtcattatgtggcacgtaactatactttttgttagaaaaaggcttactttgatttgaaaatgaaaatgttaatatatattcctg

SEQ ID NO: 453702 - DNA, 579 bp, Homo sapiens
aaccataaatgtaagtattataaaagatataacttctggcatattgtatagttcatgtgctttaagtgtattttccatcataaccttgaagccacataattagctcaatcagtttgtggaggatgtctgcctgtccattttgaggtacaaagccagttcttattgtcaaactaatgagccaaatcaaacttatacagtcacagatcatttaatgatggggatacattctgagaaatgcattgttaggtgattttatcattgtacaaacatgacagagtatacttacataaacctggatagtatatatatttttatttatatgtatttttcatatggaaaaccaaacgtcccagcaccattactgaattatcagtcatgtcccctayttgatctgcagtgccaataccaagtgccatatatcagacttctatgtatgctccctatgaccttggggaccactgttgtatatgtggttcattcatcttacaccaaaatgtcattatgtggcacgtaactatactttttgttagaaaaaggcttactttgatttgaaaatgaaaatgttaatatatattcctg

SEQ ID NO: 453703 - DNA, 584 bp, Homo sapiens
aaattacccaattaaaaaatggacaaaggacctgatagacacttatccaaagaagacatacaaatggccaatagatatatgaaaaaaatgcttaaaatcattgatcatagggaaatacaaattaaaattataatgatacattacctcacatctgtcagaatggctattatcaaaaagatgaaagataagtattggtgaggatgtggagaaaaggcaccttttgtacactgttggtagaatgsaaatatagctattatagaaaaaagtacagacattcgtcaaaaaatttcaaatagaattaccatataatccagcaatcccacttctggatatatatcctaaggacttgaaatcagtatgtcaaagtgatatctgcacttgcatgttcattgcagcattattcacaatggccatgatatgaaagcaacctaattgcccatcaaggaggaatgaataaagaaaatgtggtaaaatggaatactattcatccaacaaaaagaggaaattctgccatttacaacatgactgaatctggaggacattatgctgggtgaaataagccaggaacaaaaagacaaaaactg

SEQ ID NO: 453704 - DNA, 584 bp, Homo sapiens
aaattacccaattaaaaaatggacaaaggacctgatagacacttatccaaagaagacatacaaatggccaatagatatatgaaaaaaatgcttaaaatcattgatcatagggaaatacaaattaaaattataatgatacattacctcacatctgtcagaatggctattatcaaaaagatgaaagataagtattggtgaggatgtggagaaaaggcaccttttgtacactgttggtagaatggaaatatagctattatagaaaaaagtacagacattcgtcaaaaaatttcaaatagaattaccatataatccagcaatcccacttctggatatatatcctaaggacttgaaatcagtatgtcaaagygatatctgcacttgcatgttcattgcagcattattcacaatggccatgatatgaaagcaacctaattgcccatcaaggaggaatgaataaagaaaatgtggtaaaatggaatactattcatccaacaaaaagaggaaattctgccatttacaacatgactgaatctggaggacattatgctgggtgaaataagccaggaacaaaaagacaaaaactg

SEQ ID NO: 453705 - DNA, 554 bp, Homo sapiens
acctaatttacagccaattagagggtgcaataatttttattaaaagctaaacactaaatctagtgactcttaaatggggcctaaacgggaacatttatttccattttcaattcattttgtaaaaccagcagactcaaggtaactttttgtctataaggaaaaataacattaaatatttaattcaaagaataggaagctgtgtattttaaatatcaatttaaacatgtttttatacagcatagactattaaaatgctcattataactaattagagaatattagttagcttccctattgaatagtttgctttatgtccaaaytgatctgttgcaatgttggtattagcaatgtccagctaggcatcttcgggtattcttttacatctgggtgttaatttcagtacttccttcaagccatcttacatgtcacatattagtgataaagacaagtgtggccttcttgaacatttctgttactgatccctcaacactgtagttttgtgggaggagtgtgagtcaataaatgagggagatagggcagcggtttttcaccca

SEQ ID NO: 453706 - DNA, 571 bp, Homo sapiens
aagcatcatgatcactttctattgccatttattcatgaaatatcttctacacttaaccctggagttgtcactgtactttgatccaagagcctctaatcccttcaggcagaaaactactctgtgagttgctaccatgttcattatccttcaattgytttacaaataaaaatgtttttgagtgaaatgggaatgtgttatgcaagccgaaaggaaatctagaaatattacttagtatctttagtcttccttttcaaatatggtatctatctgaaagtgaaaagccgccatctgctacaaggctctacaaacgagtctattgcactagacactggagactcaaggctagtgaggaatgaagtacaatgatcaagtcattgagttaattatcattaagctttgactctcatcttaagattcaaatgtatactttgttgtagtaatttaatcatttctattatttttttaacactgtccaaatccttttagtaaaaactcaaaatgggactgagttctctaaaaaaagattgagagctataaaaggagggagaataaatagtgtgttcccaaccat

SEQ ID NO: 453707 - DNA, 571 bp, Homo sapiens
aagcatcatgatcactttctattgccatttattcatgaaatatcttctacacttaaccctggagttgtcactgtactttgatccaagagcctctaatcccttcaggcagaaaactactctgtgagttgctaccatgttcattatccttcaattgttttacaaataaaaatgtttttgagtgaaatgggaatgtgttatgcaagccgaaaggaaatctagaaatattacttagtatctttagtcttccttttcaaatatggtatctatctgaaagtgaaaagccgccatctgctacaaggctctacaaacgagtctattgcactagacactggagactcaaggctagtgaggaatgaagtacaatgatcaagtcattgagttaattatcattaarctttgactctcatcttaagattcaaatgtatactttgttgtagtaatttaatcatttctattatttttttaacactgtccaaatccttttagtaaaaactcaaaatgggactgagttctctaaaaaaagattgagagctataaaaggagggagaataaatagtgtgttcccaaccat

SEQ ID NO: 453708 - DNA, 569 bp, Homo sapiens
aaattcctgccagtcagggaggtatcagtgctggcctagtgaagaaccagaactcctactccaatcagaagtattgaggaagacacccctgcctgtatcaaagagactgagagaggaacatggaattatttcctcttctgtcagtaatgaggcagcccacttcccacccctattctttcccttgttgggaaaaagtagctgaaayagaaggcttaaatacgaggccaagtttcaaccaggaatctctgagtataccaagaacctgaaagatctcaatctcaatgaaaaaatgacaagcaatcaatgtgtacaccaaggtgacagaaatgttagaattatctgaatacaattttaaggtggccattaaaaatatttcaatgaacaattatgatcaatcttgaatcatatgtaaaaacagaaagtctcaacaaatcaatagaaaggcacagcaaagaaagggaatatacaaagaactaaatggaaattttagagctgaaaaatgaaataactaaaacacaaaactcaatagatagactcaagaacagaatggagaggacagaagaagaaac

SEQ ID NO: 453709 - DNA, 569 bp, Homo sapiens
aaattcctgccagtcagggaggtatcagtgctggcctagtgaagaaccagaactcctactccaatcagaagtattgaggaagacacccctgcctgtatcaaagagactgagagaggaacatggaattatttcctcttctgtcagtaatgaggcagcccacttcccacccctattctttcccttgttgggaaaaagtagctgaaatagaaggcttaaatacgaggccaagtttcaaccaggaatctctgagtataccaagaacctgaaagatctcaatctcaatgaaaaaatgacaagcaatcaatgtgtacaccaaggtgacagaaatgttagaattatctgaatacaattttaaggtggccattaaaaatatttcaatgaacaattatgatcaatcttgaatcatatgtaaaracagaaagtctcaacaaatcaatagaaaggcacagcaaagaaagggaatatacaaagaactaaatggaaattttagagctgaaaaatgaaataactaaaacacaaaactcaatagatagactcaagaacagaatggagaggacagaagaagaaac

SEQ ID NO: 453710 - DNA, 569 bp, Homo sapiens
aaattcctgccagtcagggaggtatcagtgctggcctagtgaagaaccagaactcctactccaatcagaagtattgaggaagacacccctgcctgtatcaaagagactgagagaggaacatggaattatttcctcttctgtcagtaatgaggcagcccacttcccacccctattctttcccttgttgggaaaaagtagctgaaatagaaggcttaaatacgaggccaagtttcaaccaggaatctctgagtataccaagaacctgaaagatctcaatctcaatgaaaaaatgacaagcaatcaatgtgtacaccaaggtgacagaaatgttagaattatctgaatacaattttaaggtggccattaaaaatatttcaatgaacaattatgatcaatcttgaatcatatgtaaaaacasaaagtctcaacaaatcaatagaaaggcacagcaaagaaagggaatatacaaagaactaaatggaaattttagagctgaaaaatgaaataactaaaacacaaaactcaatagatagactcaagaacagaatggagaggacagaagaagaaac

SEQ ID NO: 453711 - DNA, 546 bp, Homo sapiens
ctccgaaagatatactatccccatattttagatggggagactcaggctcaaagaatttaagtgacttactcaaggcaacgtgctgatttagcaggacaactaagattcaaactcaaatctgtttgatttcwaacccattgccttccaaatcacaccacattagcattcatatagcattaagtactgagagaaggaattacgtggacttgctagagaaagctaaaatctttcatcattttactttttaaaaggtcagctcctccccaccgaaaaaaaaaaactgtatcaaaatgtatagccaagtcaagcattcacagccagtgtgtctataatatcagatttgccattaaattagaaaaggaatctattcctgaggaacaactgagctgaaagctgaatgatcgcaggttacctcttgctcactgaatcaccaggtgcagattccatgtctcactgaagatgaagaggtgggtggatgagagaacaaccaaagcactacttaaggtaaagggtgcaatgtgacaggcacatgttaatgtcctcgct

SEQ ID NO: 453712 - DNA, 617 bp, Homo sapiens
attggcagataaaagtttttcagggcagcttgatacaggatattttctttctctattaactacatagtayatgatatatctctctttatgttaactcaaatttaattctcagggactcttgattgagaagatttttgagtgtgagaccactagaaaatacaagaagtccacatgtccatctcttaatatgtgaccctttccatgagcatttccaaatactgacctaatcaacagttaaacaagattccctaaaggagtggtctatgtgctatgcatagacctttagcctttagccacatgtaactatgtaaatttaaattaagtcaaattaaaattaaattaaatttaaaattcagattctcagtcacactaatcacacttaatagtctattaatagtctcatgtggctagtggctacaatattgaacaaagcaggtattccatcactgaagaaatgtatattaaacaatgctggtatgcatttgaaatttgtttccttaaaactactgaaccaaggaaccataggttaaactaatacaaccataaagaatacaataaaatattataactaaaagtgatctagattcattctttcatttgttttgtatggtttagtg

SEQ ID NO: 453713 - DNA, 617 bp, Homo sapiens
attggcagataaaagtttttcagggcagcttgatacaggatattttctttctctattaactacatagtatatgatatatctctctttatgttaactcaaatttaattctcagggactcttgattgagaagatttttgagtgtgagaccactagaaaatacaagaagtcyacatgtccatctcttaatatgtgaccctttccatgagcatttccaaatactgacctaatcaacagttaaacaagattccctaaaggagtggtctatgtgctatgcatagacctttagcctttagccacatgtaactatgtaaatttaaattaagtcaaattaaaattaaattaaatttaaaattcagattctcagtcacactaatcacacttaatagtctattaatagtctcatgtggctagtggctacaatattgaacaaagcaggtattccatcactgaagaaatgtatattaaacaatgctggtatgcatttgaaatttgtttccttaaaactactgaaccaaggaaccataggttaaactaatacaaccataaagaatacaataaaatattataactaaaagtgatctagattcattctttcatttgttttgtatggtttagtg

SEQ ID NO: 453714 - DNA, 566 bp, Homo sapiens
ttgatattatgacatcttgacataaagtcacaatatggaacattctcatcaccgcaaagatctttatgctgtcctttaaaatatatatttttaattgacaaataataattgcatatatttataggatctgttgcacaatgtggtcattatagttaaaaataatgtacagtatatttcaaaattgctaaaakaattaatttttttactttaaaaagatttatttatatattgtgcctatttatggtagatgtgagattttgatacattcttacaatatgtaatgatcaaatcagcgcatttaaaatatccatcaccttgaatgtttatcatttctttgtgttgggaacattttgaatattctcttctagctattttgaaatttgcagcagatggtacatatacactgtggaatactatgcagtcataaaaagaaagaaaatcatttctttgcagggacatggatggagctgaaagccattattctcagcaaacagacataggaacagaaaaccaaataccacatgttctcacttataagtgggagctgaatgatgagaacacatgga

SEQ ID NO: 453715 - DNA, 564 bp, Homo sapiens
actttgggagtctgaggtaggtggatcacgaggtcaagagatcgagaccatactgaccaacgtgktgaaaccccgtctctactaaaatacaaaaaattagccaggtgtggtggtgtgctcctgtagtcccagctacttgggaggctgaggcaggggaatcacttgaacctgggaggcagagtttgcagtgagctgagatcttgccactgcactccagcctggcaacagggcaacagaacgagattccatctcaaaaaaaaaaatccattctcatatatatttcccaggtttctgctggtttaaattaacaaaatcttggaaactgtttagaatattagctattttcttctggattataatttgtgcttgttctcctaaaggattctaagatgtgactctagaattctaatttatgaccctagtggcaataagggtgtttatatggtgggaattagaagaataggcattctcctgtaagacaccctcttctccaggcagttattataatgtcttcaagaaagagatataaactcttcagacacaagaaaataggttgtttctatt

SEQ ID NO: 453716 - DNA, 604 bp, Homo sapiens
gccaacatttaaaaattacctagcctagttcttcattacacaaaggaggaaatgagacctaaagaatgtaggatttcctccagatcagtgccagtgagtgagagacctagtttttaaagaaaggaccagaaacaaaagcagaatctccatgtttattataccactttgcctctataaaattgtctcatatttttataaattgttttaaacataaaattcacagtcgacattcctttaagcatctgggcacgtgtccgcatgtggacttgacgtaggacaggcttcgcatgcagagaactggttcggctctgatgtttttagaattcctggactcgaatcaagttgtttaaggctcaatatgtgtgtaaccagtatgttgaacaagcacgactcctgacataatcaaaacacaactttatttttgtctctcgccattcttcagttctgatagtttttctgccccrgaagaaaacttcaagtccatgatatttttattcatttcttttggtaataaaatagcctggagctactttaaggaacaaactggtcccaattcagaaattagaatgtccagtccaaatcattaatgcagactttgaatttg

SEQ ID NO: 453717 - DNA, 514 bp, Homo sapiens
cttgcttttggacttcccagcctccagagccaagagaaataagtttctattgtttacaaactaccctactctctagtattttgttatagcagtggaaatagacaaagacaatacctttcaccagcccttggagaaataaatttgtgaggggacccccagtgtctttgaagggttctgtgatcactcttctttgcaggccacaccttacagtgggaaccacagccactcaattggaaaacctaatgcagtgggagcaactggatcatggggtggcaggggccgaatggcagcactcaactgccaaaggcaaggtgggcgtggttactgtgatgggcagcagagtcaaagcaactatyagaatagtctgactccacaggcctatggcattggctggttcatcatagtgctcctagaaatgaaatggataggaaacacactaaattcttactagattcatataagaagaaaagttctgggtcaagtgaacaaaagtcttactcacatcataaaaaca

SEQ ID NO: 453718 - DNA, 469 bp, Homo sapiens
tccgggatcggaaactgtactgcaaacaagactaccaacagtaagcscttctcgtcctccttccccgccaccgcccggcactcgagcccggtcagccccctgccgggcccggcccgcgcccgctctgccgccggctctgtgcgcggctgggccgggcagctccaagggttccgagagctgcgcgtcttggggctggggcggaccagcccagcccagcgggcactgatggggtcctgggagcctccggacggcccccagttgccatccgttgtcccggaatcctgcgctgggccggccgagggatttggtgcctgggtcctgggatatagggtctggcgctacagaggcctgaattgggaacccaaaattgatttccaaaggaaaataatgttttagggagccaggcctggcggactgcttcaagggcctggtgtgtgggggtttgggattcctggagcctggagccagg

SEQ ID NO: 453719 - DNA, 547 bp, Homo sapiens
cagcaagccagttcagacctttatttgcacagctctgcactagatggtagggaggcctcagggaggtgggcaacttccatgctaatcttcaactttgggccatgcccctactgcagtggggttagttctgcctcctgttcaatgcttatatcttgcctgtaattcgttccagctcctatcaatagcaatcatggtggggtgtgtgtgtgtgtgtgtgtgtgtgtgtgtgtgtgtgtgtgtgtgtgtgtgtktgtgtgtgtccatgtcctctgtctggccaggagcttcctaagagcaggggtcatgcctcccacagttaggctgagcatctctttaggggagaccatgcctctcctgggatcctccagtgggaaaaaagcattgttttttgtttgtttgtttttgagatagtcttactctgccacccagactggagtgcagtggtgtgatgtcagctcactgcaatctccacctcctaggttcaagcgattctcatgcctcagcctcctgagtagctgggactacaggtgtatatcaccgtgcccgg

SEQ ID NO: 453720 - DNA, 591 bp, Homo sapiens
ataatgatcagctagcatttattgagggcttactgttctagatggactgttttgcatcaactaattaatgtgatcactgcaacgttaaagggatatgttctattaatatcctattttacagatgaggaaaccaagccacagaaattgctcagggtcacagggctgaggagtagaaaagcagggatttgaacacctccccagtcaggcatgcaatgggaatatgcccaaaaacctgtgaatcttattctaagaaagagaagtgggtgaatctaaatttcctatgcaaatggttaggaataagaatgacagagcctagggtagtataggcctaaatcttcatttctattcatgattgtttctactattttaaagtattccatgagaatgattattattttctttagttaaatatctaatatatatgaaaaagaagtattaaaaaataaggctaaaacrtaaatattttaaataaacacctgccaaccaccaaggtattgctgttctagtttttttttttaatgctttgacctacatttccatgtgttgaataattagtagtgggaaaatggtattggatgagatattaagaaa

SEQ ID NO: 453721 - DNA, 624 bp, Homo sapiens
ggtgccattactttgaatggcaaaaaccgcagttacttttgcrccaacctaatacctgaaggatccaattctgatgatcagagaagcaaagctgtactttcctaagaaggacccctgaggaaggtctgttccttcttgggtatgccacctgatatacatccgcaaaaatatttgtaaaatgtaaccatagtgccatgtcattttatcaaaaatgaaaatgtgtccaagatttccatcatctaaatatcagccaccaactggtgttctgcagcgtcaaagctgcagggcatgctggggaaggctaaggagatactaaactagcttcaattatttgaacaccttaaatacagtaaagagcctctaattatttttcctgttattctttttttattattattattattatactttaagttttagggtacatgtgcacaatgtgcaggttagttacatatgtatacatgtgccatgctggtgcgctgcacccactaactcgtcatctagcattaagtatatctcccaatgaagagcctctaatttataaacataattttaatagatcagcaggaccatattgtcctatgtaatggaactcacaggaatattctggttttatgtttggtt

SEQ ID NO: 453722 - DNA, 624 bp, Homo sapiens
ggtgccattactttgaatggcaaaaaccgcagttacttttgcaccaacctaatacctgaaggatccaattctgatgatcagagaagcaaagctgtactttcctaagaaggacccctgaggaaggtctgttccttcttgggtatgccacctgatatacatccgcaaaaatatttgtaaaatgtaaccatagtgccatgtcattttatcaaaaatgaaaatgtgtccaagatttccatcatctaaatatcagccaccaactggtgttctgcagcgtcaaagctgcagggcatgctggggaaggctaaggagatactaamctagcttcaattatttgaacaccttaaatacagtaaagagcctctaattatttttcctgttattctttttttattattattattattatactttaagttttagggtacatgtgcacaatgtgcaggttagttacatatgtatacatgtgccatgctggtgcgctgcacccactaactcgtcatctagcattaagtatatctcccaatgaagagcctctaatttataaacataattttaatagatcagcaggaccatattgtcctatgtaatggaactcacaggaatattctggttttatgtttggtt

SEQ ID NO: 453723 - DNA, 633 bp, Homo sapiens
ttccaaccatgcaactggaaattttatgcaatcaacaattgtactgatatttgggattttatagctgtatcaacaatgctagaggttatgtgtaccactaacagcctgaattggtggcaactctctgatgaaccagagggaaaaagaaccctatgaagggaagatatgagggcttaaattaccttcagttatctaaacacttaacaaaaatcgaattatacaggctaactggcacaggtgtgtgtttgtgtccatgttttarattgcttcctaatgttatcttcatatctggtatcaaaaatctgcatcttcatacccttcaatctaccttctttgtatttattccatatcaaatgcaacggccagtcttgaaacttattttggaaagctgaggagtagaattgaaagctactgtgatctttctccccagcactccttttaccctctgcttctgaaatccaagaggcccaaggaaatgaagacttggaaatctagcagacctgggtttgaatagtgctcctcatggttagaacaacagcaaaaccttgaggcacatcactagtctcacttccctccatgtctccatcctgaagacttggaaatatcctccatctaaagtcataggaagagtaa

SEQ ID NO: 453724 - DNA, 622 bp, Homo sapiens
tccttgtgtttttactttcatatatacattgaaaatttcaaaatagaaatctccaaccaacctctctttcctgactaggaagtccactttgccaggtacctattagacatttttacttacatgttcattcattcaataaatatttattaagctcctcctatgtactagctacttgaagctcaacttgtccaaaagtaactcaagagccaaagaacttgaattactatcctcatttatcaagagtccccaccctccccaacaggtactatgctcctcccatactggatttcttttaagttcctcagtccctctggactttctctgggtctaaatattcacgtatgcaaattaccctacctgaaatcttcctcccatcccttttcatctgacatactcctactcatgcttcaagtctcccttgagacatcatagccaccaggaagccttccttgatttcctrttgagtgctactcctataaatgctcgtatctccctaaacattctcattatactacttatcatgctgttggatttcctatttgtctctctgcttccccaagttggcctgtaaattcaaaaagggcacacaaggactctgttttccaaagacactagtccaatg

SEQ ID NO: 453725 - DNA, 631 bp, Homo sapiens
tattaaccgtattttacagatgaaaaatctggtgctgtgagaagcttgcccagtggcactcatgcagctggcaatggccagagccaggattggtgccaaacacttgactccagaatccctgctcttgaccactattctacccactccatacctaaatcccagttcgttatayaaaagagttgtgacatagtatgttttctctcataatactttaaagttaaatcaaattcatattgtcaccctaattagtaccttttttcacctcaaatcagactcagttaagataatctttgtattacaaatagcatttcagtctcaactaccatatcacatgtaatcactatcatatcagctgttaagcagctttgattgatgccttttccctgtattttggtgtaaaatacacctgaggtattaaaaaggtttgacttttgtgttcagatgcatagggttggttataaaacacaaaaataatgatgactcatttaagacaatcactgaagcccatcatcattgttgcagggacaatttaaagttaccatcttcttcgtgagctatgtctaaaatgacacaaaccccacaaatttaatttagtgttctcattcgagaagataagttgaaaaattaaaac

SEQ ID NO: 453726 - DNA, 589 bp, Homo sapiens
aacagaaaatacctggtgctagaaaaattccccagaaaagaacctgtaccctgatataaatctgattgactgagattattacaatggttacaagacataacatcaagaaacaccatgtttatttagcccttacttgccagggaccttrctaaatgcttttcatgccttagctcgtttggtccttgcaactctgacataggtactccatgacattatccctattttaaagactagaaatctgacaattaccaagactaagaaacttaaccttgatcccctagtggtcaagacaagacagtcctacttagtgaagccccttcttatgaataagataaagcatgaaatattagaagggactcaagatagagaagtctctaccaatcatccatattccatggtttgaaaatggctgcaagtatcctgctgccttcagatactagaaattcttgctgggtgctgaatgcagtactaatattttaagctaacagaggtaggaatagaggtaatcagagtatcaacattgtcccaatgccttccttaggggacaactcccaagtcaatataaagctaattagtcatttcattttaa

SEQ ID NO: 453727 - DNA, 517 bp, Homo sapiens
aaacaaaattgaaaagacaacaatgaaatgtgaaataaaatttacatcatttaataccaatggtcggtcatcttatttcacagcaaagacttacaaatcatcatcaataacaaaacattaaaaccacaattctaagactgctcaragaacactggcaagtatttgcaaaagaagaaatatccaaagctaattaacagatgttaatatttgcaacccttcccttataattcccttataatgcaatagtaggtaggcatcaaaaataataatatcattatttgattattaatatggaataatttccaaaatatattgttaggtgaaaaacacaagggcaaaaacaatatatgtagtatgcttatttgtgtgtgtacccttatacccttctttgcttgtatatgcataattattctaggaaggctagtcaaggaaatggtaacagtggtcgcctcctgagagggttactgatggatgtctgggaggcaggtgctgaaggtgcactcattttccactgcac

SEQ ID NO: 453728 - DNA, 505 bp, Homo sapiens
ttgcttgctcataaacagaataacttcaattagcaacgatcactaagtccttagttctttggaattatattggcaaggttatgaaaccactttttaccttgcaagtaaaagggatcacatacagtatgtgaccacaagatactggttgcttttttagtttagttaaataactcatactttttttatataatgtaaattatccgcctratgagactcatgccctatgaacttgactggctatttatagtggcaattttataattgaaataaaaatgttctcatagaagagaaaagaagcatggctttcttaaactctattataaaaattatcatttctaacttgaagaaactgcattttcagattttatctctcaaaaatgacagaaagattttcagagtaaacagcaggcagttaataagggtgatctaaggtgcagggtgccaagagcaactctaggcaccttttctcattgctcccaattccacgtcctgctctgtttcttgt

SEQ ID NO: 453729 - DNA, 550 bp, Homo sapiens
ggtggggcctggtagaggtgaatgggccatgggggtagatttctcctgaatagtttagtaccatcctcttgataccatcctcacaatagtgagagatgtctagggaaatctgatcctttaaaagtttgtggcacctcactcctcactctcttgctcccacttttgccatgtcatgtrcctgttcccccttttccttccaccatgattggaagcttcctgaggccttcccagaagcagacttctatgcttcctgtacagcctgcagaatcataagccaattaaacctctcttctcatatattaccctttctcatgaacttctttatagcaatgtgagagcagactaatacagtgagtaaatttaacatctatgaagtgtgatctttctaagaaagcagaattattttgttgagctagaaaagcaggtagttttcagtgaggtttcctccctttaaatgctggccttaaactgtgagactgcatgctttttttcctaacttctctgcatctgttttcttgtcgcttaaatgggaatgataataataccttca

SEQ ID NO: 453730 - DNA, 550 bp, Homo sapiens
ggtggggcctggtagaggtgaatgggccatgggggtagatttctcctgaatagtttagtaccatcctcttgataccatcctcacaatagtgagagatgtctagggaaatctgatcctttaaaagtttgtggcacctcactcctcactctcttgctcccacttttgccatgtcatgtgcctgttcmcccttttccttccaccatgattggaagcttcctgaggccttcccagaagcagacttctatgcttcctgtacagcctgcagaatcataagccaattaaacctctcttctcatatattaccctttctcatgaacttctttatagcaatgtgagagcagactaatacagtgagtaaatttaacatctatgaagtgtgatctttctaagaaagcagaattattttgttgagctagaaaagcaggtagttttcagtgaggtttcctccctttaaatgctggccttaaactgtgagactgcatgctttttttcctaacttctctgcatctgttttcttgtcgcttaaatgggaatgataataataccttca

SEQ ID NO: 453731 - DNA, 590 bp, Homo sapiens
gctatattaacctccaataaaatattttaatatttctaatatttttagggtcaagtccaatgcccttaatttagcatgcaaggcccttgatgagtctcgtctattgctttaagttaactttaattaaatattcaatttaattaaatacttctaaacacagaagagcaaataaataaacaaaatctatgcccaagtcagtatgccatctccttcccagattcctccacacatattattcctctgcacttaaggtgaggaaacctttttcagactcttctcctggagttaatttctatttgytgtttagtaataccattgttgaaggtgttgctctcacacttccaatctcatctggggtcccttatgttcactgctatgtcttcagcacctagaaaagtaccgagtacttgatggggctcaatgaaatatttgaataaatgaactacattgagtgaatgaatgaatgaatgaactgcagcatgctcacatgtttatttcccacatttaactgtatgttcttcggttgaacaggctcaatcttacttactttgaatacctagggtttgctaaaccttactatacactataaa

SEQ ID NO: 453732 - DNA, 590 bp, Homo sapiens
gctatattaacctccaataaaatattttaatatttctaatatttttagggtcaagtccaatgcccttaatttagcatgcaaggcccttgatgagtctcgtctattgctttaagttaactttaattaaatattcaatttaattaaatacttctaaacacagaagagcaaataaataaacaaaatctatgcccaagtcagtatgccatctccttcccagattcctccacacatattattcctctgcacttaaggtgaggaaacctttttcagactcttctcctggagttaatttctatttgctgtttagtaataccattgttgaaggtgttgctctcacacttccaatctcatctggggtcccttatgttcactgctatgtctycagcacctagaaaagtaccgagtacttgatggggctcaatgaaatatttgaataaatgaactacattgagtgaatgaatgaatgaatgaactgcagcatgctcacatgtttatttcccacatttaactgtatgttcttcggttgaacaggctcaatcttacttactttgaatacctagggtttgctaaaccttactatacactataaa

SEQ ID NO: 453733 - DNA, 508 bp, Homo sapiens
agtggggctatgatgccttctaggagaatctatttatttctgttttctaccttctagaaagaagccacccacattccttggcttccagcactcattctccatctgcaaatacagcaagagagggtagataagttcattctggccatgtgtcatagtcacatctcccagtcattacagccaggaaaggttatctgctttcaaaggcccatatgattagattgggcccacctgggtaatgcaggctataatttccttatcacctcttagtcacatctgcaaagtcccttttgtcagagaaggcatcatattgatagtatctgaggataagaaactgtgcatctggctgggcgcggtggctcacrcctgtaatcccagcactttgggaggccgaagcgggtggatcatgaggtcaggaggtcgagaccatcctggctaacacggtgaaaccctgtctctactaaaaaatacaaaaaattagctgggcgtggtggcgggcacctgtactccc

SEQ ID NO: 453734 - DNA, 605 bp, Homo sapiens
gtgatggggttcaggtcatgctacactgaaatatggcagcttggcatttggaaaaatagcagaagctaggaggtcactctcaccttccccttgcccttctcccctcaagctggttataagaccttatgtaagaggtaccctccttatacccagaagaaaggcacattctcatctcaagacaaagagccacacagaaaaatctgaacaaacaggccttgctgtttccccagtttatttccataacttttgtccaatcatatttctccatgactgtctactcttcatcaatccaggcataagcatacacaagtttaactgttttttctggtctccattttcttgtgaggggttctgtgwtcataaaacttatttaaagaaatttgtatgtttatctacctttggttataggtgtctcagctaagaacctcggataggcagatgggttaggaaaagatatttttcccttccctacaaaagaaagaaagtcactgtagctgatttagatcttcaagaaaagttttaagatggatatattctttcatcaggatctatttttgtgctctccatggaaatattactcaagatacaaatgtgaaccacttgtg

SEQ ID NO: 453735 - DNA, 483 bp, Homo sapiens
ggtttttcagggccattttgaaatatgtcaaaaaatatattttgtggtaaaatatttagatttccatcagggagctctatttgtcatgtgaggccataccagagtcaggtaggactttgatatctgattgccaaagagtctgttttgtcggtcttatggtctctgtgttaatgttaatgctggtcagttgtgcctaaactccaaaaagcaggggatatagcaaggcatgtctgacctcccttcctggcatagtagggaaytcagatgttcaggtttcccttggcccagagtcagttgagggagcctaggatgttttgttgttgttgttgttgttgttttttggtttacaattcacacagacaggcgcacacacacacacacacacgtgtttaaagtagaggagaaattggaacattcccactcccactgtgtgtgtgtgtttgtgcagagaggtttagaaatataagagaaaaaagggaacaa

SEQ ID NO: 453736 - DNA, 554 bp, Homo sapiens
tggtgtgttgtgtgtggttttgatgcatatgcgtgcatgtgctgtgcggtggttatccatgcatgagtctgtgcgtatatgtatgtttggtgtgtacatagcgatacagctgtgtgtgtgtgatgtgggtgagtgtttgtgtgtgttttcttcatatttttattgaagattttggccagtctttacctgcagcactcrcaggtggaataacatgttgtctccggtgtcctttttgatattaataggattccccagggtctgaaaaaatgttcacctgtctccttggaagagataaaaatttctgatttttttttgtcttttttattgtttagtagctggattctttttgagaataaatggaattaggggaaatgatgtaaagatagatagtgggataaatcaaatagcctttataaaactaaaggtccgaaaaactccttgaaagtttaattttagcctattctcatgcttcaaactacggtatgtttctaaatttttagtctgaagactttccttccccattgttttaggggcattaaaatgtttacttactt

SEQ ID NO: 453737 - DNA, 554 bp, Homo sapiens
tggtgtgttgtgtgtggttttgatgcatatgcgtgcatgtgctgtgcggtggttatccatgcatgagtctgtgcgtatatgtatgtttggtgtgtacatagcgatacagctgtgtgtgtgtgatgtgggtgagtgtttgtgtgtgttttcttcatatttttattgaagattttggccagtctttacctgcagcactcacaggtggaataacatgttgtctccggtgtcctttttgatattaataggattccccagggtctgaaaaaatgttcacctgtctccttggaagagataaaaatttctgatttttttttgtcttttttattgtttagtagctggattctttttgagaataaatggaattaggggaaatgatgtaaagatagatagtgggataaatcaaatagcctttataaaactaaaggtccraaaaactccttgaaagtttaattttagcctattctcatgcttcaaactacggtatgtttctaaatttttagtctgaagactttccttccccattgttttaggggcattaaaatgtttacttactt

SEQ ID NO: 453738 - DNA, 481 bp, Homo sapiens
aaggggaaaaaatcgaagattcagtatttaaaatcatgagttagttaaattcactagaacaagcctaaaatagtgacacaatcacatagatttttcagtctgaataatgtctaaatggtaaatagaaaataaaaatcaatttcagctgaaaactttaactgagttcaagcatacgtaataagttgtaccttccgtgtaacatttggttagctgggccaatagaaaactagccttgctgggagacagggtggccctttgaaagtttcagttatatccatcctgtgcagaagaccctaaaattctgagcactccacttctagtctctcctatcttattctccaaaacacatattacaaaggagcttgggaacctggagggactgagagtcaatgccattttcattaaatttgtaatatragacagcattcctaaatggagactgttcagaaatagaagggggctactctagaaatgaaaagta

SEQ ID NO: 453739 - DNA, 558 bp, Homo sapiens
ctaaatcatcctgtatgcctttgcatacccatggcttagctcctacttgtaaatgagaacatacagtatttggttttcggttacttcacttaaaattcctgagttacttcacttaaaataatggcctgcagcttcatccaagttgatgcaaaacacattatttcaatctttttaatagctgagtagtattccataaagtgtgtgtatgtatattatatatatatmtctctcacattttctttatccactagttgtttgatgagcatttaggttggttgtatatctttgcaattgtaaattgtgctgctatacacatatgtgtgccggtgtctctttgatataatgacttcttttcctttggatagatagccagtactgaaattgctgcattgaatcgtaggtcaacttttagtgctttaggaaatctccatactgttttccatacaggttgtacaaatttatattcccaccagcagtgtataagtgttcccttttcaccacatccatgctgacatatattgtttttataacattatctttttaataatggccattctt

SEQ ID NO: 453740 - DNA, 617 bp, Homo sapiens
tcgtctagtcctcttctattgctgattcttatttattgtcctattcctcccaatgtaaaacaggacccactgccaacatatactaagtctttaagcgcattgccgaaagccatcttatccgggtagttcaaatagaagtcatctctcctcccagaagaggcagctcactctagagtgtaaagctgattgaggttagtgagggagaaacttctgcccccacctgtaggctctcagccaggcatctttgtgcagggcacaattggcacagccgtacctgtcagccttaatgggaagcctacgcttggccacattrcttatgtagaataacttgtaatcgcttaaactaacttaattttcttagacccctgctgtaattcttaacacactagtctatgtcattttgggaactagccaaaatcatggagggctccctccttttcacaaatctccccattaattaattgcttagttcttcaaagcagtgagatgaaatttcagaacactattagatagaaataatttgaaaaaatttttttcaagtgacttttttcggaattcttccaaaacaaaagagattggcaaagagttttgccaaagtcaagcttaatggttactat

SEQ ID NO: 453741 - DNA, 601 bp, Homo sapiens
atcagatttttacacactgccctgttcccaaacaaagccacacagtttagattttttaatggtagcacctcactacaaggtactaaattatgtttatctattcgtgcattttttaaaaacctacccaaaactgaactgcctaaaacaacaatgaatttattttatcttataatattgtgaatcaataattcagcagcatccaaacggttaattgctctmtttcatgtagtgttgactgatcattcaagggtattcggctgacagatgggttggaatgaaaagcccaaaactatttcagtcacatgatgcttcattgggaatggctggaaggccagcctcaccttgaatcatcaagaagaatctctgcaggtaacctctccagcatggcaaagtaacaggtccctgagagcagggggactctcactgggtgcctcagagctttaagagcagtgacttcagctatcacctcttggatgggagggatgaaaaatatttttggtcctggtttaaaaatgccaaaattgggctggatgataagtaacataaattttgttttgaaaaatctgtttcaaaaacacaataaagatttagcatgactatg

SEQ ID NO: 453742 - DNA, 588 bp, Homo sapiens
ctgttgcatggcagatcgtggtacttaggaatataccactgatgctgcctttttcctttctacccttcagaaagacaatagtgaatgataaaagctttttctatgactactatatgcataactttaagaactagaatcagcataaccaaaaatatgagcaagtcattcctcctctcatggaatggatatcaaatgagacctgattgtttggcagtgctcccacccaaatctcatcttgaattatagttcccataatccccatgtgtcatgggagggacccggtaggaggtaattcaatcatgggtggttaccctcatgctgttttcataatagtgagttctcatgcggtctgatgcttggcacttctgcttggcacttctttctcttgccaccatrtgaagaaagatgtgtctgcttctccttctgccatgatttaagtttcctgaggcctcctcagccatgcagaactgtgagtcaattaaacctctttcctttataaatttcccagtctcaggtatgtctttattagcagcgtgagaacggactaatacagtaaattggtaccacagagagtggggtactgctata

SEQ ID NO: 453743 - DNA, 618 bp, Homo sapiens
acacaattatatgcacaaaatggtttggggctttgggcttcattaacatatcttttcttttgcatgctaaatataatttggcatacactttaacatttattattctagtatcatttgatgttctaatttactctctgtgccagcatctactttaccactaattttttttaagagttgagtaaagatcctggaaacgttgctttttttaaacactgctacagatttgggaactcccagaatcaaagaacaacttagtgtggcagctcattactgaactgtgagctctggatatatagagttactgccaagaaatatttgcactttatagtcatagactttattcttccatcaatgagatctaaaatggactacctgaatgtggcttacgcttcttgatgatcttcctttgtacagaggaatctttgtcaatctcactgtaactctgccctttaggagtggtatgctggggccaataagcaggcaggtattgcttctgaataaacagctcatcaaaagtctgagaacagaaggtttcaaatgtatcaaagcaattggcayagttgttcacttgttaattaggaacacaaaggcactttcatcaagctgcccagaccaggg

SEQ ID NO: 453744 - DNA, 572 bp, Homo sapiens
  misc_feature (1)...(572): n = A,T,C or G
tatcagtttaagaattcctattttctaactcctgtattacaggttccattttagggtattgtgtattctgtttcatgcctttcttgnaaaataaatcttccaaaggtttgctctnaaaggatctgtttaattaattttatgtgatcatgtataaaaagcctttattccactgggcgcagtggctcacacctgtaatcccagcactttgggaggccaaggcgggtggatcacgaggtcaggagatggagaccatcytggctaacacggtgaaaccccgtctctactaaaaatacaaaaaattagatgggtgtggtggtgggcgcctgtagtcccagctactcgggaggctgaggcaggggaatggcgtgaacccgggaggtggagcttgcagtgagccgagatcacaccactgcactccagcctgggcaacagagcgagactctgtctcaaaaaaaaagtaataataataataaaaagcctttattctacactctcagctgattaattgatagtacagatgagtttaaaataataaattgtaaagaatttcacttcagaaatttttatttgct

SEQ ID NO: 453745 - DNA, 572 bp, Homo sapiens
  misc_feature (1)...(572): n = A,T,C or G
tatcagtttaagaattcctattttctaactcctgtattacaggttccattttagggtattgtgtattctgtttcatgcctttcttgnaaaataaatcttccaaaggtttgctctnaaaggatctgtttaattaattttatgtgatcatgtataaaaagcctttattccactgggcgcagtggctcacacctgtaatcccagcactttgggaggccaaggcgggtggatcacgaggtcaggagatggagaccatcctggctaacacggtgaaaccccgtctctactaaaaatacaaaaaattagatgggtgtggtggtgggcgcctgtagtcccagctactcgggaggctgaggcaggggaatggcgtgaacccgggaggtggagcttgcagtgagcygagatcacaccactgcactccagcctgggcaacagagcgagactctgtctcaaaaaaaaagtaataataataataaaaagcctttattctacactctcagctgattaattgatagtacagatgagtttaaaataataaattgtaaagaatttcacttcagaaatttttatttgct

SEQ ID NO: 453746 - DNA, 572 bp, Homo sapiens
  misc_feature (1)...(572): n = A,T,C or G
tatcagtttaagaattcctattttctaactcctgtattacaggttccattttagggtattgtgtattctgtttcatgcctttcttgnaaaataaatcttccaaaggtttgctctnaaaggatctgtttaattaattttatgtgatcatgtataaaaagcctttattccactgggcgcagtggctcacacctgtaatcccagcactttgggaggccaaggcgggtggatcacgaggtcaggagatggagaccatcctggctaacacggtgaaaccccgtctctactaaaaatacaaaaaattagatgggtgtggtggtgggcgcctgtagtcccagctactcgggaggctgaggcaggggaatggcgtgaacccgggaggtggagcttgcagtgagccgagatcacrccactgcactccagcctgggcaacagagcgagactctgtctcaaaaaaaaagtaataataataataaaaagcctttattctacactctcagctgattaattgatagtacagatgagtttaaaataataaattgtaaagaatttcacttcagaaatttttatttgct

SEQ ID NO: 453747 - DNA, 585 bp, Homo sapiens
agtacacaccaaaaaccaatttttatcccgttaaaaaagcttgcaaatattttaactctctgtgacattccagtccataaaattcttcaccatcttttgtgttctctgacaaatggcactctgtgctcrgggtcttccctaagtgacttgtgattatctatttttttctttggtattccacagcatgtgtctctcatgactattatcttattctgtgaaattatactttatatgttgtgtaaaaagcacatgtttactataaagaaagtaagcaatgcagaaaactacaaataaaaaataaaaaaaaagaaaaacacagctggggaggtgcctcacacctgtagtcccagcattttgggaggccagacaggaggatcgcttgaactcaaaagtaggaggccaacctgggcaacatagtggaatttcagaacatcccacagaataaaaaaatttgaaattatctgagctttattatttagtctcaattttaagtgaaacattttaatataatcaccattgtaaatgtttgtgtatgcatatctccatctgtctacctacctacctaccgacaggccagtcttgctt

SEQ ID NO: 453748 - DNA, 585 bp, Homo sapiens
agtacacaccaaaaaccaatttttatcccgttaaaaaagcttgcaaatattttaactctctgtgacattccagtccataaaattcttcaccatcttttgtgttctctgacaaatggcactctgtgctcagggtcttccctaagtgacttgtgattatctatttttttctttggtattccacagcatgtgtctctcatgactattatcttattctgtgaaattatactttatatgttgtgtaaaaagcacatgtttactataaagaaagtaagcaatgcagaaaactacaaataaaaaataaaaaaaaagaaaaacacagctgrggaggtgcctcacacctgtagtcccagcattttgggaggccagacaggaggatcgcttgaactcaaaagtaggaggccaacctgggcaacatagtggaatttcagaacatcccacagaataaaaaaatttgaaattatctgagctttattatttagtctcaattttaagtgaaacattttaatataatcaccattgtaaatgtttgtgtatgcatatctccatctgtctacctacctacctaccgacaggccagtcttgctt

SEQ ID NO: 453749 - DNA, 569 bp, Homo sapiens
ccattatgaacttacaggaccactatcataaatgcagtctgtcattgaatgttgtcatgctgtgcacgactgttttcatctggtcttggaattattggaggaaactttcagatattgtaaatagattcgccaaaaaacgtgaccttcagagaattgtcaatgatgcttttaaataatagattcttatcactaacataaaatagatgtttcaaatgcaaaatttaaatcagtattgttaagaataattcttcgttactagtgtttatttttctccacatgaatccatttattgcatttataaataaaagttgaatttaatgattgggaaagaggaaaatttatccgyccaacaataaaattttgattaagtagatttgacttttattattttaagtaatatgttttctggcttcattttgatgttataatgcacagtgataaggtattatatataagccattgtgaggaaacattaaagagaaaatgaaaaatgtacaactcttataatggaaatgatcaaatcaaaagttcatgtacaatgtttccaaactagttagaaatacacaaat

SEQ ID NO: 453750 - DNA, 569 bp, Homo sapiens
ccattatgaacttacaggaccactatcataaatgcagtctgtcattgaatgttgtcatgctgtgcacgactgttttcatctggtcttggaattattggaggaaactttcagatattgtaaatagattcgccaaaaaacgtgaccttcagagaattgtcaatgatgcttttaaataatagattcttatcactaacataaaatagatgtttcaaatgcaaaatttaaatcagtattgttaagaataattcttcgttactagtgtttatttttctccacatgaatccatttattgcatttataaataaaagttgaatttaatgattgggaaagaggaaaatttatccgtccaacaataaaattttgattaagtagatttgacttttattattttaagtaatatgttttctggcttcattttgatgttataatgcacagtgataaggtattatatataagccattgtgaggaaacattaaagagaaaatgaaaaaygtacaactcttataatggaaatgatcaaatcaaaagttcatgtacaatgtttccaaactagttagaaatacacaaat

SEQ ID NO: 453751 - DNA, 563 bp, Homo sapiens
gaaagtgagtacataagatataaagatgtaattttgacatgaataacataatatgtgggggtacagctgttaaagggaagagtttttgaatgttgttttcagtttaaaatatattggtataactttaagatattttatgtaattgctatggtaaccacaaagaaaatgtctttgaacatacagaagaggacatgaaaaggatatcaaagtacggcgctacaaaaaaatcaatgaatcataaaggatgacggtaagagataaaaggagatacaaaaagcttataagatctacagaaaacaatttacaaaatggcaagggtaagtctttctctaatagtaattaatttaaatttaagtggattaggcttcccaaacaaaaattgtggattggctgartggatttcaaaaaatgaaaacaaaaacagtatccaagtatatgttgtctacaagagactcattttagatctaaggacacacatagcttgaaagcaaaaagttgggaaaaatcgatctatttgtatgatagccaaaagataccaggagaagctacatcagacaaaaata

SEQ ID NO: 453752 - DNA, 563 bp, Homo sapiens
gaaagtgagtacataagatataaagatgtaattttgacatgaataacataatatgtgggggtacagctgttaaagggaagagtttttgaatgttgttttcagtttaaaatatattggtataactttaagatattttatgtaattgctatggtaaccacaaagaaaatgtctttgaacatacagaagaggacatgaaaaggatatcaaagtacggcgctacaaaaaaatcaatgaatcataaaggatgacggtaagagataaaaggagatacaaaaagcttataagatctacagaaaacaatttacaaaatggcaagggtaagtctttctctaatagtaattaatttaaatttaagtggattaggcttcccaaacaaaaattgtggattggctgagtggatttcaaaaaatgaaaacaaaaasagtatccaagtatatgttgtctacaagagactcattttagatctaaggacacacatagcttgaaagcaaaaagttgggaaaaatcgatctatttgtatgatagccaaaagataccaggagaagctacatcagacaaaaata

SEQ ID NO: 453753 - DNA, 533 bp, Homo sapiens
taaaagtcaatattataaagaaaatgggaaaatccacaaatacgtagaaattaaacaacatactcttcaatgaccaaaaagtcaaggaaaaagacacaaggaaagttgtaaaatacatcgattattctatcttcttggtgaattagccaaatgagaaggaaaatgcaacatagcaaattatggaatgaagtaaaaatagtactaagaggaaagtttataactgtgaatgtatacaaaaagggagctaatatcaataacctaaatttactccttaagaaactagaaraagaggaataaactgaacccaaaacttccaaaaatcagaaggaagggaacaataaagaacagagattaacaaaattgagagtagaaaaacaattaaaaattcaatgacactaagagtttttaaaaatataaacataattgacaaacccttaattatattaactaagaaaaaaagagagaagactcaaaaaaaaaaaaaacctcagaaatgaaagaggagataatataacagatgccaccaaaataaa

SEQ ID NO: 453754 - DNA, 574 bp, Homo sapiens
tacaagaagaacaaaaggtgtgacttatgatgatgaataatccattggtttatatttaattattggtgatctatgcatgtgcctaattagattactgattagtttgaactttgtttgaataccatgtggaaaaaaatatttagcaaatgtattatagaatcatatttatcaggtataattgttttcctttagttacactgaaatcttctctttgcctcccctggaaattgtgatgttctttttcaataaccagtagccacaacgagttagctagagctccatgttccttaatgtcatgtaattttactttataaatattaatttggacaatcttcactgcagtaaaatgagtgcttagcctaacagtatctacagaatgtttaaatggtcatttgtwaaacactttcttgcttaacaagcacatttatactttcattacctacggataagtatgatgtcatagagaaaatattggtcattataaatatcaaaagactgaggaaaagagagtgttcctgtattatcagagtaaggatttccatgagtaaaagcttcctgaggcctccctagaagc

SEQ ID NO: 453755 - DNA, 574 bp, Homo sapiens
tacaagaagaacaaaaggtgtgacttatgatgatgaataatccattggtttatatttaattattggtgatctatgcatgtgcctaattagattactgattagtttgaactttgtttgaataccatgtggaaaaaaatatttagcaaatgtattatagaatcatatttatcaggtataattgttttcctttagttacactgaaatcttctctttgcctcccctggaaattgtgatgttctttttcaataaccagtagccacaacgagttagctagagctccatgttccttaatgtcatgtaattttactttataaatattaatttggacaatcttcactgcagtaaaatgagtgcttagcctaacagtatctacagaatgtttaaatggtcatttgtaaaacactttcttgcttaacaagcacatttatactttcattacctacrgataagtatgatgtcatagagaaaatattggtcattataaatatcaaaagactgaggaaaagagagtgttcctgtattatcagagtaaggatttccatgagtaaaagcttcctgaggcctccctagaagc

SEQ ID NO: 453756 - DNA, 557 bp, Homo sapiens
cacctgttatttcctgtctgtttgataaaagtcattctaactggaatgagatgatatctaattgcagttttaatttgcatttctttcatgagtagtgatgttgagtactttttcatatagctgttaggcatttgcatgtcttcttttgagaaacatctttaatcaagttttgaaattaactgtgataggataaaagttttgagaaattgaaatagaatgatatcatcaatatatgctacactattgagcagaaaatattataattgtgattatataacctaggctatcagccaataagaaacagtctcttgaaataagagataatkaatttttacaaagaagatacagacatatagctgtggaaattccatatatccaaatcaggtaaaggttaaaagagatgttcaaatacaacatagagaagtgttattaaaagagaagtggattgttttcaccttattattgtatcataaatgaaccgcacttagagccaaactgtcatcagtgttctttcttttctttttattttttggatttctccgggccccactaaactc

SEQ ID NO: 453757 - DNA, 627 bp, Homo sapiens
gattaccacaaccaaattagttgacacatccatcaccacccacgcygtaccttagatactcagaacttgttcatcttataactgaaaggttataccgtttgactaatatctttctatttcccccatttcccagtgggggacatatcttgacaatgtcactatgtttccacatcttggcaacatcactattacttcaatgaaaatgagaggtgcagggggtgcagatatttctctgatacatttatttcgcttcccttgactgggtatccaaaagtgagactgctagaacatacggcacttctatttttaatgtaagaaaaatcttccttactgttttcataatggctatgccaatatacattctcaccaagggtgtacagggttccctattctctattcaagcctttgctcattttttaattggagtgtgtgtgtgtgtgtgtgtgtgtgtctgtgtgtttgctattgagttgtgggagttccttacatattttgaatattaacacattatcagatatacaatttgcaagttttttacccgttccataagctgcctttttattttgtgtattttttccctttgcttgcaaaagctttttagtttgatgtggtctcagttcatttttc

SEQ ID NO: 453758 - DNA, 627 bp, Homo sapiens
gattaccacaaccaaattagttgacacatccatcaccacccacgctgtaccttagatactcagaacttgttcatcttataactgaaaggttataccgtttgactaatatctttctatttcccccatttcccagtgggggacatatcttgacaatgtcactatgtttccacatcttggcaacatcactattacttcaatgaaaatgagaggtgcagggggtgcagatatttctctgatacatttatttcgcttcccttgactgggtatccaaaagtgagactgctagaacatayggcacttctatttttaatgtaagaaaaatcttccttactgttttcataatggctatgccaatatacattctcaccaagggtgtacagggttccctattctctattcaagcctttgctcattttttaattggagtgtgtgtgtgtgtgtgtgtgtgtgtctgtgtgtttgctattgagttgtgggagttccttacatattttgaatattaacacattatcagatatacaatttgcaagttttttacccgttccataagctgcctttttattttgtgtattttttccctttgcttgcaaaagctttttagtttgatgtggtctcagttcatttttc

SEQ ID NO: 453759 - DNA, 560 bp, Homo sapiens
gtgatcatgggacaagggacccttcccttttaggtagctgaagcagagagggaaggcaacatatgtgagcattttcttctatgcacttatcggaaagatcaaagactttaagacttttactatttattctacccctatcttctaagaactttmaagaggaaccaggagtatgggaggaacatgaaagtggacaaggagcatgaccattgaagcactgcaccacagagaggggtttaggcctctggatgactgcgggcaggcctggataatatccagcctcccacaagaagctgctggagcaaagtgttctctgactccaagggagactcccttttgctcccttttaacctgtctgttaagtaacaggtgccttcccaggcactggcgttaccgcttgaccaaggagccctcaagtggcccttatgcgggcatgacagagggcccacctcttgcctttttggtcactcttcacaatgtccctttagctcctcaccctatactcgccggttattccttggtaatatgagtaatacaacaaagagtaatattaaaggctaatg

SEQ ID NO: 453760 - DNA, 560 bp, Homo sapiens
gtgatcatgggacaagggacccttcccttttaggtagctgaagcagagagggaaggcaacatatgtgagcattttcttctatgcacttatcggaaagatcaaagactttaagacttttactatttattctacccctatcttctaagaactttcaagaggaaccaggagtatgggaggaacaygaaagtggacaaggagcatgaccattgaagcactgcaccacagagaggggtttaggcctctggatgactgcgggcaggcctggataatatccagcctcccacaagaagctgctggagcaaagtgttctctgactccaagggagactcccttttgctcccttttaacctgtctgttaagtaacaggtgccttcccaggcactggcgttaccgcttgaccaaggagccctcaagtggcccttatgcgggcatgacagagggcccacctcttgcctttttggtcactcttcacaatgtccctttagctcctcaccctatactcgccggttattccttggtaatatgagtaatacaacaaagagtaatattaaaggctaatg

SEQ ID NO: 453761 - DNA, 560 bp, Homo sapiens
gtgatcatgggacaagggacccttcccttttaggtagctgaagcagagagggaaggcaacatatgtgagcattttcttctatgcacttatcggaaagatcaaagactttaagacttttactatttattctacccctatcttctaagaactttcaagaggaaccaggagtatgggaggaacatgaaagtggacaaggagcatgaccattgaagcactgcaccacagagaggggtttaggcctctggatgactgcrggcaggcctggataatatccagcctcccacaagaagctgctggagcaaagtgttctctgactccaagggagactcccttttgctcccttttaacctgtctgttaagtaacaggtgccttcccaggcactggcgttaccgcttgaccaaggagccctcaagtggcccttatgcgggcatgacagagggcccacctcttgcctttttggtcactcttcacaatgtccctttagctcctcaccctatactcgccggttattccttggtaatatgagtaatacaacaaagagtaatattaaaggctaatg

SEQ ID NO: 453762 - DNA, 589 bp, Homo sapiens
taattgtcataattttacacttagtatttattacattttttacttaagtaatttgcaggacctatcaacatcataaaagaactttaaaattttagaatgcaatgtattcattttaaaaactgatttgttttaatattacatattgcttmtatcttataatgatgtaaaatgtattcacatgcaaaacagtgattgtgaacaatatgatatatgaaattaaataaggaagaaaagtaattgttactgggttcctattatatgtcaggcacttttcactgtaaggtagagtggatgaagtagtcattttataatctaatacacacacatatgcatatatattaaaagggagtatatataataaaaaaagcatatatatacacatacatatatataacacatacacacacacccatacatatgtgtgtacataaatgtttttagacatataaatacacatatacacatatatagacatatatatacatacatatacatatatatacacatatctatgtctaaacctgtagaaaaaacatatatatgggtgttttatatacaccatatatatatatatgttttttctactggt

SEQ ID NO: 453763 - DNA, 589 bp, Homo sapiens
taattgtcataattttacacttagtatttattacattttttacttaagtaatttgcaggacctatcaacatcataaaagaactttaaaattttagaatgcaatgtattcattttaaaaactgatttgttttaatattacatattgcttctatcttataatgatgtaaaatgtattcacatgcaaaacagtgattgtgaacaatatgatatatgaaattaaataaggaagaaaagtaattgttactgggttcctattatatgtcaggcacttttcactgtaaggtagagtggatgaagtagtcattttataatctaatacacacacatatgcatatatattaaaagggagtatatataataaaaaaagcatatatatacacatacatatatataacacatacacacacacccatacatatgtgtgtacataaatgtttttagacatataaatacacatatacacatatatagacatatatatacatacatatacatatatatayacatatctatgtctaaacctgtagaaaaaacatatatatgggtgttttatatacaccatatatatatatatgttttttctactggt

SEQ ID NO: 453764 - DNA, 459 bp, Homo sapiens
tccttttaattataaattccaactttaagtcattccttcgctcctgggtatctaatcatagattatkagtagctgcccaggtcaccccttgaagactttgctgcttagaaatttattcttccagataccctatgtcattactcttaagttcaactctacacagatccctaggatgtggacacaatgcagcaaagctctttactatggcatactacaggtgacttttactccagttcccaagaaattcttcattttcatctaagacctcattagcctggccatcactgtacatattactatcagcattttcttcacaatcattttaccagtctctaagaaattccaaactttctcttatcattctgtcttttcctgagtcctcaaaactcttctagcctctgctcattacccagttccaaagccagttccacattttcaggtatctttatagcaatgcct

SEQ ID NO: 453765 - DNA, 459 bp, Homo sapiens
tccttttaattataaattccaactttaagtcattccttcgctcctgggtatctaatcatagattatgagtagctgcccaggtcaccccttgaagactttgctgcttagaaatttattcttccagataccctatgtcattactcttaagttcaactctacacagatccctaggatgtggacacaatgcagcaaagctctttactatggcatactacaggtgacttttactccagttcccaagaaattcttcattttcatctaagacctcattagcctggccatcactgtacatattactatcagcattttcttcacaatcattttaccagtctctaagaaattccaaactttctcttatcrttctgtcttttcctgagtcctcaaaactcttctagcctctgctcattacccagttccaaagccagttccacattttcaggtatctttatagcaatgcct

SEQ ID NO: 453766 - DNA, 589 bp, Homo sapiens
aatttctacttgtgttatccaactagatcactgaatttccttcatattttcttgtatcaaaactgtcttgctacagatccagaagtyagttgtatctccaggtaagaagagagtgatagacttcagaactaaagtgaagtgatttatcattgagatcccatttatccgatattggaactccaggcttttaggaactgatctgtctggtaaccaagttgatatggtttggctgtgtccccacccaaatatcatcttgaattgtagctccgataattcccacatgttgtcggaggggcctggtgggagataattgaatcatagaggcagttcccccatactgttctcatggtagtgaataagtctcacaagatctgatggtttcataagggggaacccctttcacttggtcctcatttctctcttgccagccaccatgtaagacgtcccttttgccttctgccatgattgtgaggcctccccaggcatgggaaattgtgagtccattaaacctctttttctttataaattacccagtctcagttatgtctttaccagcagcatgaaaacggactaatacacaagtctcctc

SEQ ID NO: 453767 - DNA, 589 bp, Homo sapiens
aatttctacttgtgttatccaactagatcactgaatttccttcatattttcttgtatcaaaactgtcttgctacagatccagaagtcagttgtatctccaggtaagaagagagtgatagacttcagaactaaagtgaagtgatttatcattgagatcccatttatccgatattggaactccaggcttttaggaactgatctgtctggtaaccaagttgatatggtttggctgtgtccccacccaaatatcatcttgaattgtagctccgataattcccacatgttgtcggaggggcctggtgggagataattgaatcatagaggcagttcccccatactgttctcatggtagtgaataagtmtcacaagatctgatggtttcataagggggaacccctttcacttggtcctcatttctctcttgccagccaccatgtaagacgtcccttttgccttctgccatgattgtgaggcctccccaggcatgggaaattgtgagtccattaaacctctttttctttataaattacccagtctcagttatgtctttaccagcagcatgaaaacggactaatacacaagtctcctc

SEQ ID NO: 453768 - DNA, 500 bp, Homo sapiens
tgacaattatctattcaaataaaataaaagagagcacttttatattgtgttttttacacatagcaacatttaatattattcttgtatttttcattatctgtaatatatcaactgcattaatccctttccacaatattttatccagttaartttttttacacatagcaacatttaatattattcttgtatttttcattctctgtaatatatcaagtgcattaatccctttcaacagtattttatccagttaagtttttttattttttaaattgacacatcattgtttgtattagtccattctcacactgctataaagaactacctgagactgggtaacttatgaaggaaagaggtttgattgactcacagttcttcaggcttaacaagaaacatgactgggaggcctcaggaaacctacaatcatggccaaaggtgaaggggaaccaagaactttcttcacgtggcagcaggggaaagagaatgtgtggtggaggggaagt

SEQ ID NO: 453769 - DNA, 500 bp, Homo sapiens
tgacaattatctattcaaataaaataaaagagagcacttttatattgtgttttttacacatagcaacatttaatattattcttgtatttttcattatctgtaatatatcaactgcattaatccctttccacaatattttatccagttaaatttttttacacawagcaacatttaatattattcttgtatttttcattctctgtaatatatcaagtgcattaatccctttcaacagtattttatccagttaagtttttttattttttaaattgacacatcattgtttgtattagtccattctcacactgctataaagaactacctgagactgggtaacttatgaaggaaagaggtttgattgactcacagttcttcaggcttaacaagaaacatgactgggaggcctcaggaaacctacaatcatggccaaaggtgaaggggaaccaagaactttcttcacgtggcagcaggggaaagagaatgtgtggtggaggggaagt

SEQ ID NO: 453770 - DNA, 500 bp, Homo sapiens
tgacaattatctattcaaataaaataaaagagagcacttttatattgtgttttttacacatagcaacatttaatattattcttgtatttttcattatctgtaatatatcaactgcattaatccctttccacaatattttatccagttaaatttttttacacatagcaacatttaatattattcttgtatttttcattctctgtaatatatcaagtgcattaatccctttcaacagtattttatccagttaagtttttttattttttaaattgacacatcattgtttgyattagtccattctcacactgctataaagaactacctgagactgggtaacttatgaaggaaagaggtttgattgactcacagttcttcaggcttaacaagaaacatgactgggaggcctcaggaaacctacaatcatggccaaaggtgaaggggaaccaagaactttcttcacgtggcagcaggggaaagagaatgtgtggtggaggggaagt

SEQ ID NO: 453771 - DNA, 572 bp, Homo sapiens
ccggggactgtggctcaagcctgtaatcctagcactttgggaggcctggatggctgaggcgggcagattgcctgagctcaggagttcgagaccaccctggcggcaacatggtgaaacccccatctctactaaaatacaaaaaattaaccaggcatggtggtgggcttctgtcatcccagctctttgggaggctgaggcaggagaatcacttgagcctgggagatggaggttgcagtgagctgagatcatgctactgtactccagcctgggcgacagagcaagactctgtctcaaaataataataataataataaataatttaaaaatgtataatcagatgttaaatattttcttgcaaaaaacaagggagctggggaacagaacctttttaattcaatttcataattatttttgtccratcctgaccattcccaggtaatttacaggaagggcatagttggcaccttgaattagtccattgttaggctttctatgtaagggtactcgtgtttttttgtttgtttattttgtttcattctctttcttaaaataaaattccttcagtgaaaatt

SEQ ID NO: 453772 - DNA, 572 bp, Homo sapiens
ccggggactgtggctcaagcctgtaatcctagcactttgggaggcctggatggctgaggcgggcagattgcctgagctcaggagttcgagaccaccctggcggcaacatggtgaaacccccatctctactaaaatacaaaaaattaaccaggcatggtggtgggcttctgtcatcccagctctttgggaggctgaggcaggagaatcacttgagcctgggagatggaggttgcagtgagctgagatcatgctactgtactccagcctgggcgacagagcaagactctgtctcaaaataataataataataataaataatttaaaaatgtataatcagatgttaaatattttcttgcaaaaaacaagggagctggggaacagaacctttttaattcaatttcataattatttttgtccgatcctgaccattcccaggtaatttacaggaagggcatagttggcaccttgaattagtccattgttaggctttctatgtaagggtactygtgtttttttgtttgtttattttgtttcattctctttcttaaaataaaattccttcagtgaaaatt

SEQ ID NO: 453773 - DNA, 580 bp, Homo sapiens
gcctggtacctacagcctgctgtggctgagccccagaatgcactgtgtaatcaaattccatgttacttaaatctcagaaaattcctaatgggtttttgtatgggggtggtggtagggcggtcacattaattcatatcgtgcttttgtaatccgaagaaaattgacatttaggtgtaagtcaagcaagaatgtaatttaaaactgcttaaattcagccacctattatgataaaaagaaagtttaaagaatattttagtctctatatggtaagccagtaccctatgctaacaaagtcctcacatgatactcataaggaatccagggttagatctgattatatgaatgtatcaaattatcacatgtacctgaaaatatgtacatctaatatgtatcagttaaaaaaaatttaacaaaaacttgtaagtcattttaaaaaaagaatccaggattgtcatcatgtttrtcaatgctgaccatagtcccttgtgaagtaacaagagataggagtattctttatgtttgcaaaaggaaaaactgaagcaaaggaaaaatctgtcccagtcacagttgggaacacaag

SEQ ID NO: 453774 - DNA, 579 bp, Homo sapiens
ttctacaaggttacacagatttcaagatgaaggagaaagaaaaggagaaggagaagatgatgatcgctgaacctaagccagaagccagctttcattctgcgctctttccactgaaccgtacacaattgccatttcataacgtgaattgcatgaacatggatatgcacggactcacttgagtcagtcaagagttttggctttcacattctccagtacttggctaacatgtatagccctacctgcccctttccagcagatggtgctgtttttccaacatttaaatgctacacagcaaatgataacttttgattgatttgagccaggttgcttaagggcgttcaacgaagtctactttgcacattggtattattaaaattgctcaaacataaaaccaatctttgctcagtattgatggaaacaatgtgtgttcgagagtactgataacaaataaataatgaatcaccaccctacmgcaatgatgtattacactagacttttttcctggagacatagaagtaaatgttttagggaggctgtgggagtcagaggtgggtcttaaacaaggtagatataaaagat

SEQ ID NO: 453775 - DNA, 513 bp, Homo sapiens
acaagtaagactggagagaatcgggtaaaaaaatacataagcaatatttaaagactccgtatacatgtaactcagtgtttaaagtaattcagatgaagggttggagtagtatctagtgaagaaggaagttgaaaaagatgaactgttaaaatatttcttacattgagaatattatctacaatcaatttatttagtctcacagacccactacagcctactagctcagtgtatctttcaggtgtttccctgcccacccactcagctcccaccttctcatttcccccactttcctcctcttctccytttgtttctctagaaaactcaccctccacattataaaactttcttttccaaatcttccccactgatccctctatctttttacttaattctccttgctttgtctcttcctgagatactcatccgtaataacctcctattatcatatggttaagcttgacagttgaaaaaaaatattttctgactatataaaatatagttttctgactataa

SEQ ID NO: 453776 - DNA, 471 bp, Homo sapiens
atatttgtaaagtgcctagcatattgccttacactaagagcatgcagtaaatggtggctatttattattatctttttcacaatagtaattcaggaaattatcttgtcaacttaatgcagattacataataatctatgtgttggcaactgttagtaggattcagcatgtcataaaaattatttatctgggtgaagttttatacttcctttcatcacctttcattatctttttcttacaattgacttttgatcataaaaaatgtaatatgcatattattgacctactttgttttacttatttaaatcttaacatttaagtcacagaatcttagtatttgggctcacaataagtaaaatgttaaggatagagtastacactggatctgtggtcttattaatgatacattagcaggcattatggcataagatgtagggttatcaagaagcaatggatgtcttggaacatgactgc

SEQ ID NO: 453777 - DNA, 599 bp, Homo sapiens
gcagtgtattcagggtgcatttcaagaaaattatcttcaaaattaagaaataagaacggtcttacaaatgtgacctcttgatggctgaagttgattggagacagaacccagaaaatagagttgtatacaaagatatatacccaccagcttcctaataaaaacaataaaatgaagtttgaataaaatatttaatttaaagaagtaaaagttagaattgatcaccatttgactcttttttttttgtactataattcttttgcagcacagaaaaataatcagagaaagaaagaaaaaattggtctctggagagagatattttcyccaaatgacacatcttttagtattctactcatactttttggattagcgcaaaactttaaaatcaaagtttataatcaatcttgaagttttacttttacttgtgtttgggtgtttctagactatgagcatataattgataattggtgtttaaagactttctaaactcagtccttgaagttaaggaagtcacataactgcattctctggcatttgttgctttaccaatatgttgaatgctaaaggattttctcttggctgttcaaaacacatgtttatca

SEQ ID NO: 453778 - DNA, 496 bp, Homo sapiens
gcagacccatattaaggtctcagatctctattctaatggaaccacaggatgcctctgaagggctttttttgtggtggaaagtggaggtgttacactatggctgctgagtgtagaacatcytaggcaaaactatggtgaatgtaagaagaccataaaaggccatttttatactttaggctagaggtactttgatgacagaagagatggtgagaagtaggtgggtttgagatatattttagaggtaatttcagtaagatttgatgatgtgttgatgtatgaggtgcaaaagagaggatggtttcaaaaaggaccctgattctggtttctacatcaagataaaagatgaaaccatttaatgagatagacaagattagaagagatcaagattcagttgagaatatcatgcattcagtctgggtttgcaacgtttgtggttcctctgagatattaaggtagagatatctaggagacagttgggtgtgtgatacggacctag

SEQ ID NO: 453779 - DNA, 485 bp, Homo sapiens
gacctgcataattacctaacatgtttttctctcacagaatagtaccatctaaacaggaagctggtctcacactataggttgcctgcaaatttacctagccttttgtttgtacacacccaaaatgtacgatgttatctatgaccttttggtatctaccttgctctctttactcactgatgtgtgtcctatatacttgtctgggttgctgagcacctggaactctgacaaattagctggatctaataatttgattccaagagtaagtagacacctaaatttgttttctggataaggcttagacaaaatcttgttaatatttgtgaacatttaaaaaagaagtggcagatttttycccccaagcgcaatccgtaccccaaatcaaaatatccttcggtatgttgttcactccaatcagttaccaattcccaaatttgctctagtctgctttaaagcttcaaggcttaggaaaaggagtagtggtggtt

SEQ ID NO: 453780 - DNA, 485 bp, Homo sapiens
gacctgcataattacctaacatgtttttctctcacagaatagtaccatctaaacaggaagctggtctcacactataggttgcctgcaaatttacctagccttttgtttgtacacacccaaaatgtacgatgttatctatgaccttttggtatctaccttgctctctttactcactgatgtgtgtcctatatacttgtctgggttgctgagcacctggaactctgacaaattagctggatctaataatttgattccaagagtaagtagacacctaaatttgttttctggataaggcttagacaaaatcttgttaatatttgtgaacatttaaaaaagaagtggcagattttttcccccawgcgcaatccgtaccccaaatcaaaatatccttcggtatgttgttcactccaatcagttaccaattcccaaatttgctctagtctgctttaaagcttcaaggcttaggaaaaggagtagtggtggtt

SEQ ID NO: 453781 - DNA, 485 bp, Homo sapiens
gacctgcataattacctaacatgtttttctctcacagaatagtaccatctaaacaggaagctggtctcacactataggttgcctgcaaatttacctagccttttgtttgtacacacccaaaatgtacgatgttatctatgaccttttggtatctaccttgctctctttactcactgatgtgtgtcctatatacttgtctgggttgctgagcacctggaactctgacaaattagctggatctaataatttgattccaagagtaagtagacacctaaatttgttttctggataaggcttagacaaaatcttgttaatatttgtgaacatttaaaaaagaagtggcagattttttcccccaagygcaatccgtaccccaaatcaaaatatccttcggtatgttgttcactccaatcagttaccaattcccaaatttgctctagtctgctttaaagcttcaaggcttaggaaaaggagtagtggtggtt

SEQ ID NO: 453782 - DNA, 623 bp, Homo sapiens
cagtttgctaaccatttttcaggacttcgaaatctgttaggatgtggaataggacatgggtctgtatcactattactgtgcaagggagtgctaggtccttttgtctggggcagagggagctagagtgttcaggaatttttgacctgagtttggagttgttggataaagttgcttcaaaagctagagctctagacaggttccacataacagagtcaaaccaygtagaaaccatgtaatctctacttcttctattcccttctcagttccctgagtcctgagcctgctctctttaagatcaccaataagtcactgtcaccaacgccactggataacttgtggtcatcatcttctttgagccctttgtacatatgctaatgctaagccaccttcctcctagataccctctctacatttggtgaatatgtctctatttaatcctgtcttttttttctatctctccgcttattctttctcagtcctctttgcagatttcttgtcctccaacattctttaaatggtgatatccattgtcagcccccttctcggcgtgaaacattaccaattattagtagtgttatttatgtctcccttaccaaggtgtctcagtaactgaaattccatca

SEQ ID NO: 453783 - DNA, 572 bp, Homo sapiens
tagggaagttctgtactattcaggcagggcagccccaagttgtaagaactggctgtggggagagaaggggagaaggggatagaaamcctgcagggtgttgaggacattgggtttcattgggacctgaaaagggagaaggaagtatagtacatgaataacaaactctgttgaccctggactagggagatctacaagcagctttggtcagaaaagtgaagcagacatacttttagtcaacaatagttaagtatcctgtggatagtacaaatgatcaaatatatcttctgatcctatgtcaactcttgatgtgttattatgctgattttataaaagggaaaatggtactcaaagaggtggtatttttagagacagggtctagctatgtcatctaggctggggtacagtggcaccatcattgctcactgcagtcttgaactcctggactcaagtgatcctcccacctcagcctcccaaagtgctgggattaaagatgttgagtttttaaggaagcagcatgttatactggttaagaaccttgaatccttaggcaggctgagttaaaattccaactc

SEQ ID NO: 453784 - DNA, 543 bp, Homo sapiens
agtctctctggtctcagtacttcagctctgcaatggggatattataaatacctctttcaytcacctatggtaaggacggaatgagatgcagtagtttccccctatccatgaaagatatgttccaagactcccagtggatgcctgaaatcatggatagtaccaaatcctatgcaacataaactatgttttcttttattcatacatacctatgataaagtttaatttataaattacaaacagtaagagacaaacaacaatataatatactctaataaatgttatatgaatgtggtctctctctctctctcaaaatatcttactgtatggtaccttgcgtaactgaaagaatggaaagagaaactgcaaaaagtgattttgaataccaaatcaccggggggacaaggggactgtcatgtatgtagagtgctcagcggaatgtctggaacataatatgtccttatgaaagataaattgcagttactgttatctctgaaaatctttttgggtcatttttgtaatcttttgaaacacaaaccagttgag

SEQ ID NO: 453785 - DNA, 543 bp, Homo sapiens
agtctctctggtctcagtacttcagctctgcaatggggatattataaatacctctttcactcacctatggtaaggacggaatgagatgcagtagtttccccctatccatgaaagatatgttccaagactcccagtggatgcctgaaatcatggatagtaccaaatcctatgcaacataaactatgttttcttttattcatacatacctatgataaagtttaatttataaattacaaacagtaagagacaaacaacaatataatatactctaataaatgttatatgaatgtggtctctctctctctctcaaaatatcttactgtatggtaccttgcgtaactgaaagaatggaaagagaaactgcaaaaagtgattttgaataccaaatcaccggggggacaaggggactgtcatgtatgtagagtgctcagcggaatgtctggaacataatatgyccttatgaaagataaattgcagttactgttatctctgaaaatctttttgggtcatttttgtaatcttttgaaacacaaaccagttgag

SEQ ID NO: 453786 - DNA, 431 bp, Homo sapiens
caaacaatacataccattttattccatacaaatatagtttttaaagagggggtgcaacatcaaattttaatgttagaattcaagagagtggctaatctggagaggagagaggactagagattggaggggcccaagaggagattttgaggggctggcaattgtccatgtcttggcttgggtggtggcwacacagacttgtttggtgataacacttcgaggtatgcattgatattttgtgcgctttttgcaagtgtgctgtattttgactaaaatgtttacaaaaatgaggcttggaaggagtaaataacctgttcaagttcacgctggaaacctccagaagagtatgtattcatactcatgttcctcagactgggcaccaaaatctacagtctttgccaagctctgctatcttgaaagtgggtgaataaaca

SEQ ID NO: 453787 - DNA, 431 bp, Homo sapiens
caaacaatacataccattttattccatacaaatatagtttttaaagagggggtgcaacatcaaattttaatgttagaattcaagagagtggctaatctggagaggagagaggactagagattggaggggcccaagaggagattttgaggggctggcaattgtccatgtcttggcttgggtggtggcaacacagacttgtttggtgataacacttcgaggtatgcattgatattttgtgcgctttttscaagtgtgctgtattttgactaaaatgtttacaaaaatgaggcttggaaggagtaaataacctgttcaagttcacgctggaaacctccagaagagtatgtattcatactcatgttcctcagactgggcaccaaaatctacagtctttgccaagctctgctatcttgaaagtgggtgaataaaca

SEQ ID NO: 453788 - DNA, 559 bp, Homo sapiens
aacaaaatgaaaacctttataatgaaaataaatgatgccccttagggtcattctgacaaggaggttgggtaaatcaagaggattttccattagaccgcacctgcatcagagtccctttaaagtcattcaaaaacaaaaagcaaattaagactaattcctcaattaaatccgtacaaaggttgtcagtcactccttctggaaccctgtgctcatttattatcattcaagatattccaaggacagacttggtacagcgatgggccttccgtgggsagtagctattttcctaatgttgtttttatctactgtcttctttcctgctactctcctctctgtggtggtttctttttctttctggagcttcacatcaatgtcctgaataacatttgcccattatcttgtgtttcaactatatttactgcaataaactgtaaaagactgaagttgtaatgaaagctggtgatgaggccaaattgaatgcttctaagcagggaagcttctctgtgcgttgtgttgaccactgacctaataaccagctggaaagaagactggcacttgg

SEQ ID NO: 453789 - DNA, 548 bp, Homo sapiens
aatttttcatgtttagctgaaaggcaaaactgcaaatgttacctttgtggtgtgagaatgcagaggcccacctggacctgagggtctctgaggcacggtgggtgctcttttcatgtggacaatgcatgaacacccagaaatgattccatctgatattcaccattactgaaacaggatgcagtttctttgtgcccctcaaccatggctcatgttgctccttgtaaaatgtgcactgtcacgagtattaggcaattactgccttcggtgccacaygcttgcctaaacctcccttgtgagagaagagggaggtgcaagactgaagtactgaggaccaaccagaatttagcacagcttatagacatctgagtcattggcagagtcaagattaattatggttcaacacatgggggcttataacagttaacaccattgagacaggtcaaatcaacagctcagttgtgctttagccctgtatataagagtatgaatttagtactgatgctgcattagagagaagatgatgccatgtagaaataacattaaatgtt

SEQ ID NO: 453790 - DNA, 559 bp, Homo sapiens
taacttactgtaccggaaagagaggctttgcgattaagatgcatgatcttgaagtcagacagaactggatctcagccttcactctctcactgtttaactagaaagtcttgattaaaccatttaacttagctgagcctcaagttttcttatctataaagcaggcatagttgccttatttgatgtttatgaagattagagagaaaattaaaagtacctggtatacagctagtgctcaagatgtttatgaaaataatagctacttataaaagtaacaaagacagagtagtgaaacagcttcctttacttcccaggagtccaaagatgtgttagaatattyccataggggtgccaggctgcataagtccacaatcaactctgttccagtgaatggcattggtgacaggcactggcaggagggtgggtccaggacaccagcccatcactgacagaggtctgtggtctgtggatcaccacatcacgtacttagatttccactttcagtcaacctcctgtatccactcactccagcaaaacagtaagtgagacactgttacacctc

SEQ ID NO: 453791 - DNA, 535 bp, Homo sapiens
atatggaataaattacaataacacctccaattccagagttttgtgggtcatcaaactagggatttgatgacagttaatgtgattctaaatattttctaaggatatttttttatctattaaaccatcataagcattaaactcttgmtgcaaagcacaaggccccatggacttggaaagctggtattagcaaaattgccttagtagtctcaagcgacatattctcttcagccacagctttaattacaagtgcccattttaaaggtacctacaaagagttaggaaatgaaatggtgcttgttacatttctcaaaccgaaaggaaaatggggcagattttccactagaggcttggaagaaaggcattaaaaatattgttagaatagatttagcaatgatagttccatttttcagaacactacgtaacaaaaaccaggtgattacttccaagaattaaagatggccttacagtagaaggaggtggacctgtcatttaatatttccgagagagtagccagattcattgttctgcagttcct

SEQ ID NO: 453792 - DNA, 622 bp, Homo sapiens
atgaacacagctttgtatgggttargttacttcaaaaggaatttcaacatattcagtagttctattggtcttttccagtgagctgctcacctgatcaataagtagacccttttcatttcttactgttatattgtatgtataaccatagaagtcctaaagtaaattatctatcaagggaggcttattcctaaaaatgcatttatttattaccaattagtatgaataattgaactccataatatgtcacttagctagttaagcttgctgaaattattacacaatatctgtattaatttagtatgaattgtaatctcccttcacactatgtgagttaataatgtatgcatatctattcccaggtactaactatggctctggatctcacagcatgtatgtgcctggtgcacaataaatatacaaggttcttgtattctggttattttgttgttcttgtttttcgggattttcttttctgttttttggagacagagtctccctcttgttgcccaggctggagtgtagtggcgcaatggctagatgaaatgtataggtgcagatctacatggcagaattttggggtgccaaaacccacaatcataacaactcagaaatgtacagaatt

SEQ ID NO: 453793 - DNA, 583 bp, Homo sapiens
aggagaattgcttgaacctgggaggtggaggctgcagtgagccaagatcatgccaccacactccagcctgggcaacaagagcaaaactctgtctcaaaaaayaaaaataacacgttatcttaatgttgcttaattttgcattcgtagtttggatgctgtttgagtaagacctacactgagaattctcttaaatacctagaatttgtgaacattctgcacacagctacgtaaagatatttcagcgatgaagtctgcagactgctcatgttcaatgttattatgtgaaattctgactcagcccatacactgacatgatcttagaatgacctgcttagctctttactccttatcctgtagtaatcaaatatctacagagcaatttttctttcaatgactgttcaggttttgggctccatgtttccctctcaactaagcaggcctcattggcttgtgattattgtctattgcattcctgtcacatagagaccaactcaaagggttctacaggttcaaaagaaagtcttaccaatactctatttctaagaacttggaatattgtttattatttttgttcttttataaa

SEQ ID NO: 453794 - DNA, 583 bp, Homo sapiens
aggagaattgcttgaacctgggaggtggaggctgcagtgagccaagatcatgccaccacactccagcctgggcaacaagagcaaaactctgtctcaaaaaacaaaaataacacgttatcttaatgttgcttaattttgcattcgtagtttggatgctgtttgagtaagacctacacygagaattctcttaaatacctagaatttgtgaacattctgcacacagctacgtaaagatatttcagcgatgaagtctgcagactgctcatgttcaatgttattatgtgaaattctgactcagcccatacactgacatgatcttagaatgacctgcttagctctttactccttatcctgtagtaatcaaatatctacagagcaatttttctttcaatgactgttcaggttttgggctccatgtttccctctcaactaagcaggcctcattggcttgtgattattgtctattgcattcctgtcacatagagaccaactcaaagggttctacaggttcaaaagaaagtcttaccaatactctatttctaagaacttggaatattgtttattatttttgttcttttataaa

SEQ ID NO: 453795 - DNA, 583 bp, Homo sapiens
aggagaattgcttgaacctgggaggtggaggctgcagtgagccaagatcatgccaccacactccagcctgggcaacaagagcaaaactctgtctcaaaaaacaaaaataacacgttatcttaatgttgcttaattttgcattcgtagtttggatgctgtttgagtaagacctacactgagaattctcttaaatacctagaatttgtgaacattctgcacacagctacgtaaagatatttcagcgatgaagtctgcagactgctcatgttcaatgttattatgtgaaattctgactcagcccatacacygacatgatcttagaatgacctgcttagctctttactccttatcctgtagtaatcaaatatctacagagcaatttttctttcaatgactgttcaggttttgggctccatgtttccctctcaactaagcaggcctcattggcttgtgattattgtctattgcattcctgtcacatagagaccaactcaaagggttctacaggttcaaaagaaagtcttaccaatactctatttctaagaacttggaatattgtttattatttttgttcttttataaa

SEQ ID NO: 453796 - DNA, 528 bp, Homo sapiens
taccacagttttctttagaatgatgaaaaggtatttgctttaaaagaaaaaatcaatgcttctcttttttttttaggtgttattcgtcatgttggcgatgccttgaaggatcatgcctctaagtctcgaggaaagatatgcaccataggtattgccccctggggaattgtggaaaaccaggaggacctcattggaagagatgtaagtcctgagtgctgtcgctttccatgacttctcctagaggggatatcagaaaagyataataaaattagtattcaaaatgtgcacattatagtattctttgggtctctactcactaaaatgaaacatgttaaggaatggtatcttgggaaaatatttattttctaaaatctctaggcaaactccaggtcaattcttatgatcaagaaaggtccaaagtaagacttaccacctaccccctctctgcttaaatcaagcagtggtctttcttcacccatcaaatcctgcaattactcttggtatagtgatattaagattaattaacac

SEQ ID NO: 453797 - DNA, 528 bp, Homo sapiens
taccacagttttctttagaatgatgaaaaggtatttgctttaaaagaaaaaatcaatgcttctcttttttttttaggtgttattcgtcatgttggcgatgccttgaaggatcatgcctctaagtctcgaggaaagatatgcaccataggtattgccccctggggaattgtggaaaaccaggaggacctcattggaagagatgtaagtcctgagtgctgtcgctttccatgacttctcctagaggggatatcagaaaagtataataaaattagtattcaaaatgtgcayattatagtattctttgggtctctactcactaaaatgaaacatgttaaggaatggtatcttgggaaaatatttattttctaaaatctctaggcaaactccaggtcaattcttatgatcaagaaaggtccaaagtaagacttaccacctaccccctctctgcttaaatcaagcagtggtctttcttcacccatcaaatcctgcaattactcttggtatagtgatattaagattaattaacac

SEQ ID NO: 453798 - DNA, 596 bp, Homo sapiens
cttcttacacagtcgcaactcttttctcagctagcttaatgtactgccatctgtcctttttcttccattttatatrataaaaatcacatgtaataaacatcaaaaaataaaccttttagcattagacatcaggtagcagagaaaaacaaaacaatgtattattaaaaatctttaccacttcagaattctatcaaaatgccatcatttgaaaaaatagaatagctgcatctttggtcaagtctgtttatactccagaataatattgaagaggtacaaaataaatgtcaagggaaatctgggaaatgtattggaaataaatccaaggataaaagaaaggctccatttcttatgcctgatattttattgcagtaaatttatttccaaactgatggaaaatataaattatgttatttttgtggggctggctctcagatgagaagcttcacttttagaaactgaacattcaagtactactagaattattttatttattgatagaagtagtgagtgcagcaattgctattcatcttaacccctttaggatggcactagcgaggcaaatactagtcctaaaaataaagaagaaaacttacttg

SEQ ID NO: 453799 - DNA, 566 bp, Homo sapiens
aaatatttcagtacaaaagcattttttaaaccaatgttggccacacataggctagatcttaaaaatatttctttaactcagtagcagcatcatggcaaatattagtctaagaattttttaacaattctttcaaaaaataaaaattaagaaatacactattgyatgctgaaatttatcttaaagatttaacagtcatcttttctggttgcaaattcgactttcagctagccaaaaactatttaaaatgaatattacattgcaattcttagaattcaagattagaaagatcttcagcaattgtgactttcttttaagggtttaaagagaagagtataacttttgggagaagaggaagtctttggctgttgctagtgacataaagtaacagtggcaggtagcctgggagttgagattgtcagggctctgtgaccttgggcaagttaccgtatttgactttatttctccatctgtaagctagggataacaattccctagcttacagatggagttgtgattaaaggagtcgttgtgattaaaggagtcgagatatgattctgtcatgtggc

SEQ ID NO: 453800 - DNA, 566 bp, Homo sapiens
aaatatttcagtacaaaagcattttttaaaccaatgttggccacacataggctagatcttaaaaatatttctttaactcagtagcagcatcatggcaaatattagtctaagaattttttaacaattctttcaaaaaataaaaattaagaaatacactattgcatgctgaaatttatcttaaagatttaacagtcatcttttctggttgcaaattcgactttcagctagccaaaaactatttaaaatgaatattacattgcaattcttagaattcaagattagaaagatcttcagcaattgtgactttcttttaagggtttaaagagaagagtataacttttgggagaagaggaagtctttgkctgttgctagtgacataaagtaacagtggcaggtagcctgggagttgagattgtcagggctctgtgaccttgggcaagttaccgtatttgactttatttctccatctgtaagctagggataacaattccctagcttacagatggagttgtgattaaaggagtcgttgtgattaaaggagtcgagatatgattctgtcatgtggc

SEQ ID NO: 453801 - DNA, 596 bp, Homo sapiens
actcgacttgttggaggtgtaggaacttgagctgaatatgaattgaccgagactatatcttgaaatattagatttgagtcaatatcagattttttcttgtgatttaccattttattcaaaaaaattagaagaagaggacagaaatctagttgtcttcaggctccatttgattgaggtgttattcctttgtctttgaattatattttaggttaggccgaatggaaactttatttggattgcacatctgattatattgtgaacatcaaccttgggtataggaaatttcattatgaggctagaattttctgactttgttatctccctacttgaaagtgaaatctatgtcatatgtaatctagtctaagggattatttccccatggcagaccttacagrtatacctattttgcaatattaattgatggagtgtctgggtaggttttgatttccataaccagtgcttttgctactttcaaagtttgcttggagaagaatttgaagctctgtttttttctttaccctatagtaatatctgacatttgagtgtggtctcatctgttgaagccacctagagtacctttctctaaagcagcagat

SEQ ID NO: 453802 - DNA, 604 bp, Homo sapiens
cagttagactcagttggtaagtataattaatggaaaatgtgaatttcttcttaaactccaagaaattaaccacagaagtcttcatttcctttataatttcctaacagtatcactccctatgactgttgttttatctctatctcttctgacattcaaccacatcagaaattagttactccctattatttatcatcctaaagataccatataggacagcttgacggcactattgggatactactaggagggaatgagcatttatttaggttccaagmaccatgctaggcattttcatatatactatctcttttaatactcacaaaaacccttcaagatagggattattttcttccttttatacagttgatgaaatggcacctccaagaggttaagcctttgccttaaatccaattagtgggacagctgggtgcaaacctaggctgacataattccaaaatactttctcctttcatcctacacatggaagcattatctcatttttttaaaaaggctcccctaaagtttggttaccttggagagtttgagggtcattattccattcagcaactatttgagcaccaactctgtgccaaatataggttga

SEQ ID NO: 453803 - DNA, 512 bp, Homo sapiens
gtcatttttgtccccacatcccagataagaaaactgaggctcattgttctgaagatttgctgaagacctcagggctggcaaagtcagacccaaacttaagcctttctcaccttgtgccttaggcgcttaccatatcccagagtttcattttattatataagaaagtttacttcaaaacttacggactaccaagcttctcccagcctacagatccacagcagggtgaatacctggataataactagaattccgtggttggagcaggagggatttacgaggaaaaaaagggaaaaaggaaagagatactgagaggacttttaattctcagaatgaatcgcccrtgttattttaacattttgtgccttaacgttttggaagactatatagagaaattaattattcatggagtaagataatttacttcttttagccacaagtgaattatacagtaccaaaagtgaaatgagttaatatgtaatatcattcagaaaaagaggcctttatgagagtct

SEQ ID NO: 453804 - DNA, 499 bp, Homo sapiens
ttgtatatcactcttggatcgaattaggcagattttaattaaaagattactactaacaaataacaatgatgagatttgcaggggctaatgcttaaaccaggagatttatgccttattaaaatgaattcctctagtttacaatcattttytacaagtcagagcagcacaaagaactgcctaagatcacagaacattttggatctaagcagaccttatgaccaatcttttctttttattgacacataagagttatacatatttatggggcacatgtgatattttgatacatgtatatactgtgcaatgatcaaatgagaataattgggatattcatcacctcaaacatttatcatttctttgtgttgagaacattccagattttttcttttagctattttgaaatatacaataaattcttgttaactgtagttgccccactctgctacagaagactagaacttattccttctatctaactgtatttttgtaccaattaacc

SEQ ID NO: 453805 - DNA, 499 bp, Homo sapiens
ttgtatatcactcttggatcgaattaggcagattttaattaaaagattactactaacaaataacaatgatgagatttgcaggggctaatgcttaaaccaggagatttatgccttattaaaatgaattcctctagtttacaatcattttctacaagtcagagcagcacaaagaactgcctaagatcacagaacattttggatstaagcagaccttatgaccaatcttttctttttattgacacataagagttatacatatttatggggcacatgtgatattttgatacatgtatatactgtgcaatgatcaaatgagaataattgggatattcatcacctcaaacatttatcatttctttgtgttgagaacattccagattttttcttttagctattttgaaatatacaataaattcttgttaactgtagttgccccactctgctacagaagactagaacttattccttctatctaactgtatttttgtaccaattaacc

SEQ ID NO: 453806 - DNA, 537 bp, Homo sapiens
gtgtctcaatctgtgcatagttttgaagacagttttgtggccagtatagacaggagaagtcaaagaaaagaaagaaggggcaaataaatatttaaaaggataaatgtaatcttctccaagaatcataatattgatttttagtgttccaggcactttataattctcacttagtgttttttccccgcaaaggtatgaagttaagaatattggctaaaggctaaacaacttcccagttaaaaattgcagaacaaaacagcccttttatggatcaaacattatgtttgggaaaaataattttgacatctgataaagaagtaaaaacaactctcctaagatgatgttctgagtagctgcctcatggacttgttaaagtgaggtaagcataaccagttaaaacaaattagaattattcttagcctagcttctcagatagtgctgatagtagrtaaggaaagtgaggagagtaaggaaatgtgaaaacatgtttgggtagcttatcttaaaatcaaacatatttaggaaaggagcagcctatga

SEQ ID NO: 453807 - DNA, 615 bp, Homo sapiens
gggttagggagctgatctatccttcgaaaaaggagagtggagcagacatgctgagtgaagccaaggatttggtgtgagaaaaacagagggagaggttggcccttggaggtgctgaagcatagacagattgcttattgttaatctggcacacaagtatacataaataaacacacattttttactaagaaaattagtctctatgccttgcaaccagaaagatgtagctaacacaggtaggggtgggggcagtgtcaagagcagcyctgcagtcctagttcctcagagggggtgtgagtttgtttgcaggtttatggaaggttgaacaatcccttgaatagtggagcataagctacccatgtgcagccaagataaagtggatactgtcctggccaaaacagggctttggtgcttttgctttggagcaattccaaggaaatagaaaatgcaagtaaaattctccctccctctgtgtctttctccctgcactgcctcttctggaaggataggcaccaagttattaaaggggttgcttttgcttggtggaaatacaaaagacctttaagatcttaagatctttcaaattatttgtattttcttttctttcctccaaaaatg

SEQ ID NO: 453808 - DNA, 594 bp, Homo sapiens
ttggcagcaatattatactaagtttctcattattaattatttgtcattctggtacacataattcttatataacttagggtccacatgaacttattttcctttccaggcaaagtatgaactcagtaagtttttctagagtactcccctctcaaacattagcttttacccttttaccttcaggttcgtaccccaccrtatttgcataattgtattacttccctaagaaccaattttttgttgttgttgtttgctagtacttttgtgccacctgacaaacttacaagctatttttaaatgcttgcttttaaatagagggctcttaggctgggcaacacaaggtttctacataaacaataatttaaaaaatcagctgtgtgctgtggcttacacctgtaattgcagcattttaggaggctgaggtgggaggatcacttgagcccaggagttcaagacaagcctgggcaacatggtgaaaccctgtctctaaaaaaatacaaaaactagctgaggatagtggtgtgcacgtcagtagtcccagctacttaggaggctgaggtgggaggattgcttgagcccggggagtcgaggctgcag

SEQ ID NO: 453809 - DNA, 594 bp, Homo sapiens
ttggcagcaatattatactaagtttctcattattaattatttgtcattctggtacacataattcttatataacttagggtccacatgaacttattttcctttccaggcaaagtatgaactcagtaagtttttctagagtactcccctctcaaacattagcttttacccttttaccttcaggttcgtaccccaccatatttgcataattgtattacttccctaagaaccaattttttgttgttgttgtttgctagtacttttgtgccacctgacaaacttacaagctatttttaaatgcttgcttttaaatagagggctcttaggctgggcaacacaaggtttctacataaacaataatttaaaaaatcagctgtgtgctgtggcttacacctgtaattgcagcattttaggaggctgaggtgggaggatcmcttgagcccaggagttcaagacaagcctgggcaacatggtgaaaccctgtctctaaaaaaatacaaaaactagctgaggatagtggtgtgcacgtcagtagtcccagctacttaggaggctgaggtgggaggattgcttgagcccggggagtcgaggctgcag

SEQ ID NO: 453810 - DNA, 617 bp, Homo sapiens
cactcactctgtctttcaataaaatgatctataatttacttgctattataatatcatttccaaaaatattaatgccagcaaaattcccagacaaaatatgcatctgttttttaaaatatgcattcaattttgtagcactatatttttctttccttaattacayataattagtgatagattggccacaaaaagctcaaatccttgaagtaccatattgcagcattctgaatgcctgtgtttataagatcatgttacaaggtttgaaagtcagttccttattgagattgcaaagatataggttagacagatttcacagagaagagatcacctcttcaatgtgtttgattctaatagctgaactttgcaggttcacattattaatgtaaagatatgatctcaatgtttcataccttttgacctaaccaaaaagggtcttgaatgtgagcattcctaatgtcaaaaatagaattaacttctttgaacttaaacttattactgcattttttccttcattctgtaaattcttcatcctgtgtttttggtgcactggatttaagctttaaaaatgtctaattcaatgatgagtcaaaatctgtaaaatacatcttagaaaatac

SEQ ID NO: 453811 - DNA, 584 bp, Homo sapiens
ggatgcaactttgcagaatttatattgggatctgaatgtgcaatggtaaaaaaaatttatttttgtggcaggggctatggaagcaagattaatttcccaaagcagtactggtggcagtgacagtagcagcacccggggctccatgctkgtggcatctgcagtgtgagttgtagggtgctgtggttagtggcagtggaagctgtgttctcacccagccagttctgcaagtgatttgtgccattgttactgaccacatatcctctgatcgtggtttttcatctcatatgatttatatccaatatccttttagtaaattcaatttctccttaaatcaaatagatttggttccttattctagcaactaaaaaccctactgatgcagatgtttgaaccagaagtgagatgctgaaagtaacaaactaaaatgagcaaatgcgtaaatggaagaggtgctgtagaaagcactgagagacgtggctggaaagttgtgacttttttgaggttataaagcaatcagttaaaccatctgttgctcttgaacacagaccatgggcctagggagacatcgggcttaggggcagtgg

SEQ ID NO: 453812 - DNA, 584 bp, Homo sapiens
ggatgcaactttgcagaatttatattgggatctgaatgtgcaatggtaaaaaaaatttatttttgtggcaggggctatggaagcaagattaatttcccaaagcagtactggtggcagtgacagtagcagcacccggggctccatgcttgtggcatctgcagtgtgagttgtagggtgctgtggttagtggcagtggaagctgtgttctcacccagccagttctgcaagtgatttgtgccattgttactgaccacayatcctctgatcgtggtttttcatctcatatgatttatatccaatatccttttagtaaattcaatttctccttaaatcaaatagatttggttccttattctagcaactaaaaaccctactgatgcagatgtttgaaccagaagtgagatgctgaaagtaacaaactaaaatgagcaaatgcgtaaatggaagaggtgctgtagaaagcactgagagacgtggctggaaagttgtgacttttttgaggttataaagcaatcagttaaaccatctgttgctcttgaacacagaccatgggcctagggagacatcgggcttaggggcagtgg

SEQ ID NO: 453813 - DNA, 584 bp, Homo sapiens
ggatgcaactttgcagaatttatattgggatctgaatgtgcaatggtaaaaaaaatttatttttgtggcaggggctatggaagcaagattaatttcccaaagcagtactggtggcagtgacagtagcagcacccggggctccatgcttgtggcatctgcagtgtgagttgtagggtgctgtggttagtggcagtggaagctgtgttctcacccagccagttctgcaagtgatttgtgccattgttactgaccacatatcctctgatcgtggtttttcatctcatatgatttatatccaatatccttttagtaaattcaatttctccttaaatcaaatagatttggttccttattctagcaactaaaaaccctactgatgcagatgtttgaaccagaagtgrgatgctgaaagtaacaaactaaaatgagcaaatgcgtaaatggaagaggtgctgtagaaagcactgagagacgtggctggaaagttgtgacttttttgaggttataaagcaatcagttaaaccatctgttgctcttgaacacagaccatgggcctagggagacatcgggcttaggggcagtgg

SEQ ID NO: 453814 - DNA, 194 bp, Homo sapiens
atttgttacagcagccctaggaagctaatatataaccyatagtcctcaatttcagacccagcctcaggtggcctgtggaaatatgggctgcatgtttaattatttagcaattgagtagagattaattttcattccgcctcaattcttttcttcttgaatgctccatatacgtaagcaaatccacatggataagt

SEQ ID NO: 453815 - DNA, 596 bp, Homo sapiens
tgcccattttcttttgtctgtgtgtgtgtaaaataatatggctctgaaatagtaggatttaatgctacttattttctcttctcttgtatttctctccttcgttgctctcttacctcttgggattctgcctgtttattctcttccacctcctcagcatgtacatagtttttattttccacccctggcagaggtttgtgggtcaactgtgaaatgcagaggcattggttaaagtgcccagcccaggttcttatgattattactgctctgctaactttggaaaacagccggagatatggaataaaacaataaatgagaaggtagcatgtgcacttttaaaagtgtatgcaagaaaagggattamaaatgaaaataaattacatcaaagaaaaaacaagcaaaaacaacaataaaaagaacaaatgattggtactcaagtccagtgagtttatgttaagaagagaaagtggattatttggtagaagaatggagataaaagtgaaaggaattagtaaaataaaaacagggaatctgaaggagagaaaagggaaggtagaggctatagaaagagagaaaacaaatgaaatagtgagaaaagg

SEQ ID NO: 453816 - DNA, 570 bp, Homo sapiens
tggaagggaaagctatcagacactaacagaaacagatgatcaaaaattaacatcattggctgggcgcagtggctcatacctgtaatcccagcactttgggaggctgaggcgagcggatcacctgagggtaggagtttgtgaccagcctggccaacctggagaaaccctgtctctactaaaaatacaaaattagccaggcattttggcaggtgcctgtaatcccagctactcaggaggctgaggcaggagaatcgcttgcacctgggaggtggggggttgcagtgagctgagatcgcaccactgcactccagcctgggcaacatagtgaaactctgtctcaaaaaaaaaaaactccaacatcatcactggctgagggtcatcctacagcaggatctcagacctgcacacttaaaaactgtggaggacakgacagggaatgactgaggaaatgttccagattggtgagtatgaaaagacgtcaccactgactgtgatataattattgcatgagttcaccaccataagagcaaagagacagctttaggacagttgttgaaatctaagtaggtt

SEQ ID NO: 453817 - DNA, 582 bp, Homo sapiens
atactaataaaatatattaaaaagaaatccttttacttataaaggggtaaaaattttatccactcagctagttaaaccagataagctagataaactgttgtattcctctgctatcctggataaatgaggagtgtgttccatttccttagcttatgttgaatatcatacagtgagggacatrataggaggttttggctcaactgaccatggcaagtttcctgattccattggttatccatgagacatcactcataatttgtttgagcctctggctgcactgtatcatgcttgtgtatcttttttgtagatcattcagtttcccagccaatcatggtgcagagaagacctggtcagagtttccatgtgaacagtgaggtcaattctgtactgtccccacgatcggagagtgggggactaggcgttagcatggtggagtatgtgttgagctcatccccgggcgattcctgtctaagaaaaggaggatttgtaagttggcttgaggaacttgttcctatctctctctctctctctctctctctctctctctttttttcccctaaagcaaaacatgcctgtttagtt

SEQ ID NO: 453818 - DNA, 552 bp, Homo sapiens
aggtaagaagttcacaagggagaaaatgaggctagaacacagggtttgatctcatttgaccaactgtgcaagggagggaaggatatcctgagtctcaggaaagtagcatctcaatctccttggacttgattctaggagtgagagcaatacaaaaaagggaaaaaaaaaaaaaaaaaaaaaaaacaagaaacaaagggaaggagagaggagggaaggggaaaggagggggataaagggaaaggaacggaaaggaatggaaagacacaacaaaagcccagatagtataaaggggcaacagaagtaaaggggatctgttaccttcctatttcaaactggctagcaggcttgccccgggagctgacatgacaggtaaggcaraataaagtggtggtgtggcagagggaaggcaggagagcacctctacatccttttagcacaaatgtgacaggcccacttgccaggggttatggggaggtagctgacagttgaggtccaaactgttttgccaaagagccactgaggcgagggataagatgacctcctagcagagac

SEQ ID NO: 453819 - DNA, 544 bp, Homo sapiens
ctagtaatacactacattgataactacttatgttgcatggaaagtcacatatattttattttttaaaatatctacagatatatacagaccaaatttttagaagaatctctaagatctacccagctctcagataccacttttcagtcctttcttctttttatatgaatcactgtccccaaaccaagtgctcttgcaatctcatcctttttatcaaaatgtgccattaagagagaatctgacccaaataatttgtaataggcaacatgtttcctctcccagtagtagctgtgagttttgccttagctcaaagagtagaataaaaaratttaccctcaaatatcattttagtgagtgagagagattctttcccattcttgaatatctggaagcttatctccacttttctgatacataaagtacattcccacagaatgcagccttaagcatggccataaacatttatggttatcattcatctgtctgattcttcttccctttgccatctggggatttgactgcaaacttcagctgaaagaaaattgtc

SEQ ID NO: 453820 - DNA, 559 bp, Homo sapiens
aatctgaaacatcaaaaaattttacacccattcataatttaaataccaatttatttttttgaagtcaattctatagcaggaactaataatgaaaacgcagtttcggcaacataacaggctctgatgagataaatcttttatgttctttctaataaggtattaatggacaaatttatattatttataataccaaagtttttctgtagaatcaagcagaacaacaatattgggtgtttatgatgaaataagttgtgattttgaagcaataaattaaattttttagatmtaaaatatctcatgtaagaacgagcaatcaggaatttgagtaatatcaaaatatcagcagtccaaaggggcacatgtaggagttttggtgctttgctgcaccatgagaggcaaaagaattaaaatattttgaaatcagtaagtatatttttaaagctttatgtatagtgtcttgcacaaataagtgattgattcatgattactgaattggtttgaactgaactgaagaaaaaatttttttcttttctggttttgaatatatttataaccaaga

SEQ ID NO: 453821 - DNA, 559 bp, Homo sapiens
aatctgaaacatcaaaaaattttacacccattcataatttaaataccaatttatttttttgaagtcaattctatagcaggaactaataatgaaaacgcagtttcggcaacataacaggctctgatgagataaatcttttatgttctttctaataaggtattaatggacaaatttatattatttataataccaaagtttttctgtagaatcaagcagaacaacaatattgggtgtttatgatgaaataagttgtgattttgaagcaataaattaaattttttagatataaaatatctcatgtaagaamgagcaatcaggaatttgagtaatatcaaaatatcagcagtccaaaggggcacatgtaggagttttggtgctttgctgcaccatgagaggcaaaagaattaaaatattttgaaatcagtaagtatatttttaaagctttatgtatagtgtcttgcacaaataagtgattgattcatgattactgaattggtttgaactgaactgaagaaaaaatttttttcttttctggttttgaatatatttataaccaaga

SEQ ID NO: 453822 - DNA, 540 bp, Homo sapiens
cacagtggctcacacctgtaatcccagcactttgggaggctgaggcaggcrgatcatgaggtcaggagatagagaccatcatggctaacgcggtaaaactccatctctactgaaaatacaaaaaaaaattagccgggtatggtggtgggcatctgtagtcctagctacttggggggctgaggcaggagaatagcgtgaacccaggaggcggaggttgcagtgagctgagatcacgccactacgctccagcctgggtgacagagtgagactccatccaaaaaaaaaaaaaaaaaaaaaaacaagaaaagaaaaaagattttatttatgtttttaaaaatgatatattctttatttgtacaaatttatggagcacatgtaaaattttgttatatgcatataatacagagtgatcaaatcagaatattgacagtgtatatcacccaattaaaatacattttgatttgtattctccctcctctgctatcaaacattgaattcattcctaccatctaactatatgtttgtaccttttaatccact

SEQ ID NO: 453823 - DNA, 591 bp, Homo sapiens
cagaatattgacagtgtatatcacccaattaaaatacattttgatttgtattctccctcctctgctatcaaacattgaattcattcctaccatctaactatatgtttgtaccttttaatccacttctctttatcctcctttcttccctcactcatttttcccagtctctgtaatctatctttccccttttttctccaggtaatcaaaatttttagctcccataaaaatttaaaacaaaatgataaaaaggatttgcacaattgtggcaaatacagaagaaaarcaaagaagatccaaatacatataatagggtaccacaaattggggttggggtgaaataaaagtaagattacagaacaaatactaagactataattgaagaaaattattctgaaatataaaaatgatttgaaattacatattgaaagggcatggtacacactttacaaaactgaaacaaaataaccaaccctgagacattcctagaaaaaaaaattagcacaatttaaagattagaaaaagaaaaacttttggccaactgtttacaagaccaagccatttataagagaaagaaactttattgttaccaga

SEQ ID NO: 453824 - DNA, 623 bp, Homo sapiens
ttttgaagtacacaaaaaaaaccccacaaaaaatactgccaacttagaattttattcctggtttaagaaagtctttaaaaataagatggaattttaaaggaatgtgttcaggcaaataaaagtagaacaattttgtcatcagttgacatgcataataaaaaatagtgaaggaagtttttatgctaaagaaaaatgatcccaaatggaagcatggaataaattgaagaattaaaaagtactgaaaatggcacacatttggataaatataaaggaatattgagtgtttctaaattatgaataataaagttttatgcagtttatgacttatgttgaagtcaaaatatgtgacaacattagctcaaaggaaaatagggagctaaatggcattaaattgctgtattctattttaccattagaaagtggtaaaatcactaagctaaattaaccattacaaatctgctatgcagttgatrtctctgctatagtcactataaaattaatataataatagcaaactaaatagctaaagatgagaaaaatagaaacaaagaacaactaactcatccgatatagatcaaaagagaattaataaacaaagaacggagaagagaaacaaaaagtaa

SEQ ID NO: 453825 - DNA, 611 bp, Homo sapiens
ataatgaagcaacatcattgtctggggtaaataccagagattcgtcatctcatgctaaggaaatcaaggacacagacacacaagaagtgagtttaagagcagtggtttaataggcaagagaaaagagaaaatctcactccctcctaaagagagagaggggctcctgaggggtgtcttctgttccatggtaaaatgcacagggttttatagaccagytgaggaggcggtgtctgatttacatagggcatgagagattgggtggaccaagtgtgctgtttgcatagcacacgaagaagctggccatcccatcttagtcttttattatgcagatgaggtgtctacctggccggtgccaagttgcttgttcctgtactgcacacatggttgacaaagagaaaggaagatgaagcttccatgttgaacatgcctggcttccaggtatcccttttctattggcacagctgctggcatttacctatgcaagcttttagcttgcttatctgtgcacacagcttgatttttcaggctgctttttgtttgaaaagaaatgatttggggggctgctttttattaaaaggaaatcttactgaagactctcttaccatcactat

SEQ ID NO: 453826 - DNA, 567 bp, Homo sapiens
attttaaaagtctgacaaattaaggtatagttttattagctgtcagtcagtctttctttcctagaatgttccagtgagaaatgacattctttatgtctctgcacaacttaaattacaggyctgcttattttttattttcaacataaataaaatttattattatcagagcagtagtgaatcccagcttttagtacttatcagacttgtatagagagaaagaattttgttcttatgctttctgggagctttttgaaaccttttattccagctttgattttttttattacttttttatttccttctacgatttttctttcataagttgtgtgataatgtaacaaaattaccattaaactccaaattcctatattcatatccatatatgctccatatatgccccatattcattgctctactttgatagtttctttcagataaattacatgtcgatgagttttcaagggactgacttttaagtttcaaaggggatcccactcctgtcaaactaacaagttaaaataacattgttatgggcctctgatacccaaaagacttttctaggcatga

SEQ ID NO: 453827 - DNA, 570 bp, Homo sapiens
ggttgctgcaaatgacaatatgttgttcctttttatggccgagtagtattccattatatatatatatatatgtatatatatgaatactactgtatatatcactgtatatatgtgtgtgcatatatatgtatatatgtgtgtgtgtatgtaaatatatatatattttatatatatatatatatatatatatatatatatatatatatcacatttttatccaatcattggttgatgggcatgtaggttggttccatatttttgcaattatgaattgtgctgctattaacttgtgcgtgcgagtgtctttttcttattataacttcttttcctttgagtagatacccagtagtgggattgctgggtaaaatggcagttatatttacttctttaaggaatctccatactgttttccatagtggttgtactagtttacattcccagcagcagtgtaaaagtgtccccttttcactrcatccacagcaacatctggtttttttttatttttattttaaaattatggtcattcttgcgggagtaaggtgatatctcattgtggttttgatttgcatt

SEQ ID NO: 453828 - DNA, 638 bp, Homo sapiens
tgcatttctctgataattagtgatgttgcacattttttcatatgtttgttggccatttgtatatcttcttttgagaattgtctattcatgttcttagcccatttttttataggatttttttttcttgtttgataggattgtttttttcatgatttgtttaagttccttgtagattctggatattagtcctttgttagaggcatagtttgtgaagattttctcccactctgtgggttgtctgtttactctgcttagtatttcttttgctgtgcagaaactttttagtttaatcaggtccaatctatttgtctttgttttcattgcatttgcttttgggttcttagtcatgaactctttrcctaagccaatgtctagaagagtttttccaaagttatcctctagaaattttatggtttcacgtcttagatttaagtctttgatatcttgagttgatttttgtataaggtgagagatggggatccagctacattcttctacatgtggcttgccaattatcccagcaccatttgttaaataggatattctttctccacctcatgtttttgtttgctttgttgaagatcagttggctgtaagtatttggctatatttttgggtttctattctgttccattggt

SEQ ID NO: 453829 - DNA, 638 bp, Homo sapiens
tgcatttctctgataattagtgatgttgcacattttttcatatgtttgttggccatttgtatatcttcttttgagaattgtctattcatgttcttagcccatttttttataggatttttttttcttgtttgataggattgtttttttcatgatttgtttaagttccttgtagattctggatattagtcctttgttagaggcatagtttgtgaagattttctcccactctgtgggttgtctgtttactctgcttagtatttcttttgctgtgcagaaactttttagtttaatcaggtccaatctatttgtctttgttttcattgcatttgcttttgggttcttagtcatgaactctttacctaagccaatgtctagaagagtttttccaaagttatcctctagaaattttatggtttcasgtcttagatttaagtctttgatatcttgagttgatttttgtataaggtgagagatggggatccagctacattcttctacatgtggcttgccaattatcccagcaccatttgttaaataggatattctttctccacctcatgtttttgtttgctttgttgaagatcagttggctgtaagtatttggctatatttttgggtttctattctgttccattggt

SEQ ID NO: 453830 - DNA, 628 bp, Homo sapiens
ctactaaaacgtgagctaatttttttcccctgaactttatgctactcttgcacttgcaaagaatgtgcattacatttcagaaaacgattcctacatctctatcaaagtagagtagctatcatgcttgaccttagaaagatcatttacagagatggaaagcctgagaatatgtttgataatttaggaaatttggggaggaaaaatggattgagatatgaaaaagcattaaataataattacattatactaaaatactggaacacataagacatgcagctgaaagatatagatcagtgaggagatttgaaaagctgggacaaaaatctcagtttattaaatgaataactcattcctgtgtaaaagggaatttagaaaactggaagcagaaacaattctagttastattttcagagagacatcatagttattagtggattttcctctacttatttattatctcctggccttctaattttgagaagaaaaatattatcaacaacaaaaacaaatgatcttctctgtctcgtaaccctcccactctacattctttgccctttttccttccttcaaagaacttacttattcttctgctgagattcttattttttctccagcatataatgttata

SEQ ID NO: 453831 - DNA, 590 bp, Homo sapiens
gtgttacaagaaaaagaagggaaatctgaaagcaggagtgtcttagtcgatttgtgctgctataacgaaataccacatatctttattgtccagcctctactgattacccagtttcaaagtcagttctacatttttaggtatttgttatagcaacaccatgctttctgtactaatttctgtcttagcccagttgtgctgctacaayaaaatgcctgagactggctaatttataaagtatggaaatgtatgtctcacagtactggaggctggaagttcaagattatcgtgctggtggttttggtatctgttgagggcttggtctctaattccaagacggtgcattggggaaaaatacaatgtcctcacaaggaggaagggatagaaagacaaaaagagacccagagtgtctcctctagttttattcctaaggtcactaatcccattcatgagagctctaccctcaggacttaatcacctcctaaaggcaccccttcctaatactatcacatggctattaaattttaatgtataaattttatatgggacacaaacattcagactatagcagacctctagaaagagctgttgcc

SEQ ID NO: 453832 - DNA, 583 bp, Homo sapiens
gtgttgaatattgatcaaaagagaccaaacatcattataaccaacatgttaaatcggatgtttctcaaatgcctattaggaaatgttggatttaaaagataaagtcctgtcagttctcaattccacaagtgamttgtaaaaatacatggagataaaaaatctggaatacagcatttttgccagaaagcctataacactctaataaatgtgtcacctggattttatcttgaaaagatgagatcattgcaactcaaataaacagcatcactcttgagcagaatgggctgaaaaatgacttataggatcacatacacaaattgtatatattcttggcaaaaatgagagcattgcttagttaaatattcataaaataatgtattaaaatgttcatctttatatcctgcaaataaatgtgttatgagaatcatattttcatctctaggagacagctcaagtcctcttggatatagtaatggtgaaaacttaaatgaataataacatagttaaataatattattgtgatcttctatattttgacaattttgtccttagttttgacccaacttctgttaatgagtgaatt

SEQ ID NO: 453833 - DNA, 532 bp, Homo sapiens
tttaaaaagagagattcccgcttgaacccgggaggcagagtttgcagtgagccaagatcgtgccactgcactccagccaggagacagagtgagactccatctcaaaaataaataaataaataaataaataaataaataaataaataaataaawataaataaaaaaggatcttcctagcctgaaatcctagaacagtgtttttgaagagagagaagagaaaatagaatgaagagtggaatggaggaagagtagaatcactgaggtgggggagaatattaaatcttaatgaagaagatcgtgatccttccattatctcccaatatttcagtaaatgaaaacagagtgtctactacatgctagataatactgaaatatgtgactctcctatacagaaaaaccacatccctggttcaaattaaaaagtccaagcatcacaaatactctcaactccttaatggtccaaacttgtagcagcctggaatatgtttccaaatcagatggtcttagaaccaatcaagatataatctatctt

SEQ ID NO: 453834 - DNA, 583 bp, Homo sapiens
gagtctgcagatatgcaaagtgctaggactctgttattcatgttctcctcaccctgctctctgccttctgcctactatgttgtcaaaataacagtagttgaccatttgatgtggtcttttaaaaagagagattcccgcttgaacccgggaggcagagtttgcagtgagccaagatcgtgccactgcactccagccaggagacagagtgagactccatctcaaaaataaataaataaataaataaataaataaataaataaataaataaaaataaataaaaaaggatcttcctagcctgaaatcctagaacagtgtttttgaagagagagaagagaaaatagaatgaagagtggaatggaggaagagtagaatcactgaggtgggggagaatattaaatcttaatgaagaagatcgtgatccttccattatctcccartatttcagtaaatgaaaacagagtgtctactacatgctagataatactgaaatatgtgactctcctatacagaaaaaccacatccctggttcaaattaaaaagtccaagcatcacaaatactctcaactccttaatggtccaaact

SEQ ID NO: 453835 - DNA, 573 bp, Homo sapiens
ttacattgctctgaaagtttcactgttgtagcagcctcatcttttcaacataaattcattcatagatagatagaaaaaatcctgctgtctttaacattttttgcacatatctttttttatagctctaattttttaaaagatgatcttttagaaggataatcactggataataatcactggataagaagatataaattttcgtgttctacttgataaattctgggctaactacttttcagaaacgtgaactcccacaagtaccatttccttcttcactatgcccttgccagtactgagtgttaccttgtaacaatctttgtcaatttaakaaatgaaaaatttgattttacttcaatgcgaattgagcaacaattcacatttcacaagtgataagttacacacatttaaaaaggtttgggatcttttctaacctatctattataaccaggaggtcacttctgagttgctgacctttatctggtcttcatgttccattaaatactctgatttaaagcctcaggtcactttcagtcttaattgtattttattattctccattgttgcagaatgttt

SEQ ID NO: 453836 - DNA, 605 bp, Homo sapiens
tctcaggcaagcattctctcatctcagtgcagcaatttaatgaaatggtatttctcatttgcaccttatatttgatcagtctgtccctttccttcaattgtataaccttcttttatagttattaaaacctcagtctctatggggaaccctgcaagggccttccatctcctttgacccctttcctgaagacttataaaggtgaaagtttgaaagtttaaagcaactattaaacagcaatgaatgaaaagttatgtgagcccatttaaaatttttctttctttctttttttttttttttttgagacagaggttcactctgtcacccaggctggagtgcaatggcatcatctcggctcrctgcaacctctgactcccaggtccaagtgattcttatgcctcagcctcctgagtagctggaattacaggtgtgtgccaacatacccagctaattttttgtggagacggggtttcaccatgttggccaggctggtcttgaactcctggcctcaagtgatccacctgccttggcttcccaaagtgctggggttataggcataagccaccatggctggcctatgctaaaaattattaaacattgtatgtttt

SEQ ID NO: 453837 - DNA, 559 bp, Homo sapiens
tagctatttataaattgtcatgcattgttaatgtataagagatgtagatttcatttatctttggtggagcgagatgaagcagtgaatcattgaagactgaaagaaagaaaaaggtcttttcccttttctttaagaagcatcattagttaaaaayatgttagttaaaaccagagaactatatttaaagggacagcaataagcaaattgattactctggtgattattggagtgacattaccttttagttgtactttcacaaaaattcacaatatttgccaaagtcaagttatccattacactattaatttgtcattcttttgtttatatagtcaatatctctatctcaattggatctatctcaactgcttctaaacaagccaccatagtctctcccatttcaacaatctcttccaagtaccatttcatttcttcttttcatatttttgaaaacttttgaaaaactacctgttttcctcctccatttcttgttcattccattctagtggacatggaatctgttcctcctccaaaacagaatttggtaacccttaaattacta

SEQ ID NO: 453838 - DNA, 559 bp, Homo sapiens
tagctatttataaattgtcatgcattgttaatgtataagagatgtagatttcatttatctttggtggagcgagatgaagcagtgaatcattgaagactgaaagaaagaaaaaggtcttttcccttttctttaagaagcatcattagttaaaaatatgttagttaaaaccagagaactatatttaaagggacagcaataagcaaattgattactctggtgattattggagtgacattrccttttagttgtactttcacaaaaattcacaatatttgccaaagtcaagttatccattacactattaatttgtcattcttttgtttatatagtcaatatctctatctcaattggatctatctcaactgcttctaaacaagccaccatagtctctcccatttcaacaatctcttccaagtaccatttcatttcttcttttcatatttttgaaaacttttgaaaaactacctgttttcctcctccatttcttgttcattccattctagtggacatggaatctgttcctcctccaaaacagaatttggtaacccttaaattacta

SEQ ID NO: 453839 - DNA, 611 bp, Homo sapiens
gacaaatatttgaggtgatggatatgctaattatccttatttgatcattggrcattgtatacatgtatcaaaatatcactctgtatcccatgaatatgtacaattatttgtctcaaaaacaaacaaaaaaagataatgggagaatgttgaaaactcagagagaagagcaactctcacagatagggatccagataacattagcagctgatttctcggcagaaaccttgaaggccagtaggcagtggattatatatttaaaataatgaagaaacctgtcaattgagaaatctatagctggaaaacttatccttcaaaaatgagggagaaattaagacatttccggatttttttttaaaactgaaaaaaatccatttatccctgaatttgccattcaagaagtgttaagtccttcaggttgaaataaatgaactctaggcaataactatataagtaaataagcaagctgtatgaatatacaaagctctctggtaaaggtaaatacataaacaaacataaaaacagtcctattgtaattttggtttgtaactctgctttttattttctacataatttaaaaggcaaatgcataaaatgtaattgtaaatctgtta

SEQ ID NO: 453840 - DNA, 611 bp, Homo sapiens
gacaaatatttgaggtgatggatatgctaattatccttatttgatcattggacattgtatacatgtatcaaaatatcactctgtatcccatgaatatgtacaattatttgtctcaaaaacaaacaaaaaaagataatgggagaatgttgaaaactcagagagaagagcaactctcacagatagggatccagataacattagcagctgatttctcggcagaaaccttgaaggccagtaggcagtggattatatatttaaaataatgaagaaacctgtcaattgagaaatctatagctggaaaacttatccttcaaaaatgarggagaaattaagacatttccggatttttttttaaaactgaaaaaaatccatttatccctgaatttgccattcaagaagtgttaagtccttcaggttgaaataaatgaactctaggcaataactatataagtaaataagcaagctgtatgaatatacaaagctctctggtaaaggtaaatacataaacaaacataaaaacagtcctattgtaattttggtttgtaactctgctttttattttctacataatttaaaaggcaaatgcataaaatgtaattgtaaatctgtta

SEQ ID NO: 453841 - DNA, 579 bp, Homo sapiens
cggttctggtcggaacctgtgggtcagcgggctgtcctccacaacacgygctacggatctcaagaaccttttcagcaagtatgggaaggtatgccttcccttgcctcataccatccactgtgattcagagttaaaaaggaagctctgctgggcacggtggttcacgtctataatcccagcagtttgggaggctgaggcaggaggattgcttgagcccaggagttcaagaccagcctgggcaacatagcaagatgttgtgtttactaaaaaatggaacgacagcagcgaagctcgcccagtcttgtgcagtgcaccttgtttcctgactcacagtaactagggtgcggagcagggcaggtggttggtcatatcacaacagtgctcagaacagctgtataaacagcttctctctcaatgttcttggggttctttctaactggtctcaaagagactggtggtcttttgtcttgtgcaaaacttaaagcttacatgatgagatttttcccttaagaataatttgggaggccgaggcgggcgtatcacctaaagtcaggagttggagaccagcctggccaacat

SEQ ID NO: 453842 - DNA, 543 bp, Homo sapiens
ctctgctttctggagctccacttccatggccccccaactcccctgaccccaggcatgttcttgcacacaggtgccagtggatgggtgaggacgaactcatgggataaagcctgtgaccccagggaagaactaagccacattcgtggagctgcaggacccggccgcctggatggaggggaggggccagaaagcagctgctcactggcctcgtccagtccttcccctctaacagtgacggtaacaggtgtgaggctgcagaggcctcctggagcggacggacgccctctgrcccagccatggcatcacagcaccgagtgcaaacccctcctgtcctcacaggctggggctggggctggggctgggtgcctgggtgcgaggcgactagaaattctgcatcccctgcgagggtttgtggtgaacagcctgggctccggacaggctgggcagacagaactgtctgtctgtgcaagtttcttcgtctgtaaaatgggcctgcagtctgctccttcctgggccttcgggaaggacttggtggacagtgtc

SEQ ID NO: 453843 - DNA, 535 bp, Homo sapiens
cacactcagcctttttgtctatttgtgatgccgggacacatggccaacctacatttttaaattatatatatatacacacatatacatatatatacacacatattaaacgtgtacgtatgagtctacatatacttttttgttcaaataaatgaaagtcagttgaataacttttgacacttgttaatatcaaaaagttgaaaagtttacatttagacagagcatatagaacaattttaatgatagattgctctaaagtaaaaatattgttcccttataaatcacttactctatgcaaaagtgacagggggctgggcacagtggcccacacctgtaatcccagcacttttcgaggctgaggtgggaagatcgcttgagcccaagagtttgagagaccagcctaggcaacacggtgggaccccatctctacgaaaaaaaaaaaamcaaaaattagctgggtgtggtggtgcatacctgtagtcccagctactcaggaggctgaggcaggaggatcacttgaacctagaaagtggaggct

SEQ ID NO: 453844 - DNA, 601 bp, Homo sapiens
ttatcttatcttgtatctttctgtttggaaccttaagaaaaaaaagtgaactctttcggctgggcatagtggctcatgcctgtaatcccagcactttgcgaggccgaggcaggtggatcatttgaggtcaggggttcgagaccagcctggccaacatggcaaaaccccgtctctactaaaaacacaaaaatcagtcaggcgtggtgacgggcacctgtaatcccagctactggggaggctgaggtaggagaatcgtttgaaccygggaagcagaggttgcagtgagccaaaattgtgtcactgcactccagcctagatgacaagagcgaaactccatctcaaaaaaaaaccaaaaaccaaacaaacaaaaaaccctctttcttccctagcaggaagtcaaaagattaaattctataattgatgctcaacagccaggagtgtaaatgtactatttagatttcgggagtaaaagcggaaaaaaatacaaccagcaagagttaaaagtcgtttcctgagaagagtaggcctgggggtgggacagggcagtcttagttttcattattaccccttctgcagttgattaatttttaaccaccagcaa

SEQ ID NO: 453845 - DNA, 601 bp, Homo sapiens
ttatcttatcttgtatctttctgtttggaaccttaagaaaaaaaagtgaactctttcggctgggcatagtggctcatgcctgtaatcccagcactttgcgaggccgaggcaggtggatcatttgaggtcaggggttcgagaccagcctggccaacatggcaaaaccccgtctctactaaaaacacaaaaatcagtcaggcgtggtgacgggcacctgtaatcccagctactggggaggctgaggtaggagaatcgtttgaacctgggaagcagaggttgcagtgagccaaaattgtgtcactgcactccagcctagatgacaagagcgaaactccatctcaaaaaaaamccaaaaaccaaacaaacaaaaaaccctctttcttccctagcaggaagtcaaaagattaaattctataattgatgctcaacagccaggagtgtaaatgtactatttagatttcgggagtaaaagcggaaaaaaatacaaccagcaagagttaaaagtcgtttcctgagaagagtaggcctgggggtgggacagggcagtcttagttttcattattaccccttctgcagttgattaatttttaaccaccagcaa

SEQ ID NO: 453846 - DNA, 486 bp, Homo sapiens
acaatggctgctttcagatttggagcaggagatatacaagatgtgcctggttcatctttttacaacagcaagcagggaaactctggaggactcccagggtcatgttgtagaaggactcaggaaccaacrtgaagaggttcctactggtcaagtttgaacatcatattggataatacagcactggattgaaacatatcacacaggtttaaatacatgagtttgtagtgatactcaagaaaaaaaaatcagtcacttttgcaggatgctaggaaattaatgaattactttgaaaactggtaaataaagggaaagaaataagcattttacaaactatgccttaggatgaccaaactggtaatgaaggaaagtttctctttataaaagtagctacaggagagatgaagagggaatgatatcacatcattattattttgtaattcctagttcatggatctaggcaatgatcaacaatggctgctgacaaca

SEQ ID NO: 453847 - DNA, 398 bp, Homo sapiens
gggaagcctccaaaatcatgtgtaaaccccagccaggtcttcaggaccccaaytgtgcatgtgctcaggaaactccaaggaaaccagcagaaggggacagttggaaaaacaagaaaatcaagtggagattttaactgctccccacctcagaggaggcagatttaggatttatgaccagccaagttaactatcattaagaacaagaaaacatgcttcagaagaggctagcagaatcttctgctatgggtctgtaaaagccccagtgactagctagcgcaggcaaggccgcaggaaaggacagggcccccagaaataggcataacgtaaaggtccctgcctctgctgcactcccagctctcatctcctttctgaagctgctcagttctacagcctcagca

SEQ ID NO: 453848 - DNA, 398 bp, Homo sapiens
gggaagcctccaaaatcatgtgtaaaccccagccaggtcttcaggaccccaactgtgcatgtgctcaggaaactccaaggaaaccagcagaaggggacagttggaaaaacaagaaaatcaagtggagattttaactgctccccacctcagaggaggcagatttaggatttatgaccagccaagttaactatcrttaagaacaagaaaacatgcttcagaagaggctagcagaatcttctgctatgggtctgtaaaagccccagtgactagctagcgcaggcaaggccgcaggaaaggacagggcccccagaaataggcataacgtaaaggtccctgcctctgctgcactcccagctctcatctcctttctgaagctgctcagttctacagcctcagca

SEQ ID NO: 453849 - DNA, 566 bp, Homo sapiens
ggagtttactgagtctgactcagcacacaccaccaacatttcaatcagaccagagtctgaaaaacaagcaaatatcactctccctaccagtccatctgctgtcttgatgaaagatgaaagtaaatggaatgaagagcatagggaagagaaccaacctgtgtttatgatgccatgaagaccactccagcacacaacaaagttcactttcagagtgaggcaagagtgtgtaaaagccccctcctcctcccaagagggtaacwactcactcctacccatcagctgagagtccaaccacacatctgccattggtgcgagtctatcacacaatatgcacactgataaatctggctttcaagaaaggctaggaaagttacagacaagcacttacgcctattgaggtcttaataagtcacagaacaactaggctgccagaaggaacattagaatccatcttcttggtcaaaatcattagaaacataagtcctagaggacggaaaattgtattgtgggccctgttcacattgactaactgctttgtactgttgcttaatttttttcagtaatgt

SEQ ID NO: 453850 - DNA, 584 bp, Homo sapiens
gtagcctgagagagagacaaaatatctaacacatacctacctaatgtcctcgccaccaraaatactgcctgaatatgaaaagcactctattcacacctgttaccaaaataattctaaaaagtccacagggtataccaagcttgtgcaacaccatatctacatcacatgacccttgcagccaacactgtcttgttcaagtttatgtccctaacatctagcacagtgcctggcttgccatagtactcagtaaatactgattgcatgaataaaattctctttcataatccccttcttattttaacacattcctacttatcccctgctcagataggggagatatttttatcagaaccagcactgagaggcagcatgcaatattccaggggttctagaggcctaggtctactgggaactgcctttcactacctaagggatgttacaacatttagccactaagacttaacttccctacctgtaaatggaaataataaaaactatctcaaacaaaggatctgaagatcaaaacagtaattaaagtgttagataaactgcaaaagaaaatagaggataggagtaaaggaggt

SEQ ID NO: 453851 - DNA, 584 bp, Homo sapiens
gtagcctgagagagagacaaaatatctaacacatacctacctaatgtcctcgccaccaaaaatactgcctgaatatgaaaagcactctattcacacctgttaccaaaataattctaaaaagtccacagggtataccaagcttgtgcaacaccatatctacatcacatgacccttgcagccaacactgtcttgttcaagtttatgtccctaacatctagcacagtgcctggcttgccatagtactcagtaaatactgattgcatgaataaaattctctttcataatccycttcttattttaacacattcctacttatcccctgctcagataggggagatatttttatcagaaccagcactgagaggcagcatgcaatattccaggggttctagaggcctaggtctactgggaactgcctttcactacctaagggatgttacaacatttagccactaagacttaacttccctacctgtaaatggaaataataaaaactatctcaaacaaaggatctgaagatcaaaacagtaattaaagtgttagataaactgcaaaagaaaatagaggataggagtaaaggaggt

SEQ ID NO: 453852 - DNA, 632 bp, Homo sapiens
tctgttattccctatgtatttgaaaaccagaattctcagtgtggacaaaagatcagatgaaatacagaagtagttaagatattggaaatatcagtatgaacacacaagtatgtttacatctatcacattcatccttgctctttccttatgtgtagtttcccagctctgttcaccaaaaaagacctacagacaatggccaactcaataaaaattagcatccctggtgccaagataatggtcttgaaatacaattttgcattaaaagataccaggtcttcctggagaaatgattgattccaggtctgagacacaaaatacacaaggagtrgaagagagatgaaggggaaggagaatggcgagagggagagaaaatccctgataccaaaagaggtatcggtctccagattgtatgtattcataaattcataattcataaagacgttaccacaggaaggggaaggaggtgctgctcagccctggacacacacacacagtctggacacacagctagcagtgtccagccaaatgcttagtagtatgaggaggcctttgacctacagactgagtaatctggcctcaaagaggaaatcatcaccattgtttgggggcacacctcaaaccgtcttggcctg

SEQ ID NO: 453853 - DNA, 632 bp, Homo sapiens
tctgttattccctatgtatttgaaaaccagaattctcagtgtggacaaaagatcagatgaaatacagaagtagttaagatattggaaatatcagtatgaacacacaagtatgtttacatctatcacattcatccttgctctttccttatgtgtagtttcccagctctgttcaccaaaaaagacctacagacaatggccaactcaataaaaattagcatccctggtgccaagataatggtcttgaaatacaattttgcattaaaagataccaggtcttcctggagaaatgattgattccaggtctgagacacaaaatacacaaggagtggaagagagatgaaggggaaggagaatggcgagagggagagaaaatcyctgataccaaaagaggtatcggtctccagattgtatgtattcataaattcataattcataaagacgttaccacaggaaggggaaggaggtgctgctcagccctggacacacacacacagtctggacacacagctagcagtgtccagccaaatgcttagtagtatgaggaggcctttgacctacagactgagtaatctggcctcaaagaggaaatcatcaccattgtttgggggcacacctcaaaccgtcttggcctg

SEQ ID NO: 453854 - DNA, 493 bp, Homo sapiens
ctagtctcagctttatgggggcttcaaaaccrcagacccaggttcaaatctcaatgctgcaactcatatggtggggaatcttgggcaagttgtttttttctaagccgtagtattctaacagtactaggttgttgtggagataagagatgtatgtaaaaatgtccaacccgttgcttgccccattcacaaatacatgttgaatgttgaatgaattttaaaatagtaatcgtttattagatagagataattataatcatgcccatttcagactcaccaggtgaactgattaggacctctgtctgcacctctgttttcgtatttgaaaaaggaaactttattatttttgactctctgttccttccatctagtgattgtgatttaagtagctgaggttctccccaccccaccctttttgggggtttgctttgttgcagggactgaactttaagcagataacttgctgaagcttgggtgattcctgaggtgttctcag

SEQ ID NO: 453855 - DNA, 587 bp, Homo sapiens
tgcacaccaccatatccggctaatttttgtatttttagtttttgtatttttagtcgagacagggtttctccatgttggtcaggctgtctcgaacttctgacctcaagtgatttacatgcctcagcctcccaaggtgctgggattacaggcgtgagccaccgcgcctggcctgttccttggtttcttagcacttctcctttcttttcttttcctactggcccattctaatttccttctcttcttccctctccttgtttttaaactaacctattcctgctcccctatatctcttaacttcagtacaacttttcttgatagatatgtattgagcaagtasctaatgaaagaagccatgtggcttactagttgagagcctggattcagaaggcccaggtggacccccagctctgctgcttgctacctgggtagccttagacaagttactcagcctagatctcagttaccttatctgtaaaatggggctaataacagtacctccctccaagggcttttgtgaggatcaaccaagatgaatacatgtatagtgcttagaatagaactggcatgtagtgagcactcaagaatat

SEQ ID NO: 453856 - DNA, 587 bp, Homo sapiens
tgcacaccaccatatccggctaatttttgtatttttagtttttgtatttttagtcgagacagggtttctccatgttggtcaggctgtctcgaacttctgacctcaagtgatttacatgcctcagcctcccaaggtgctgggattacaggcgtgagccaccgcgcctggcctgttccttggtttcttagcacttctcctttcttttcttttcctactggcccattctaatttccttctcttcttccctctccttgtttttaaactaacctattcctgctcccctatatctcttaacttcagtacaacttttcttgatagatatgtattgagcaagtacctaatgaaagaagccatgtggcttactagttgagagcctggattcagaaggcccaggtggacccccagctctgctgcttgctacctgggtagccttagrcaagttactcagcctagatctcagttaccttatctgtaaaatggggctaataacagtacctccctccaagggcttttgtgaggatcaaccaagatgaatacatgtatagtgcttagaatagaactggcatgtagtgagcactcaagaatat

SEQ ID NO: 453857 - DNA, 576 bp, Homo sapiens
gaagtcaatttattttttcaaatgagtggggaaaaaaattaggtcctgctgtctgggcactgctctttatattgatgagaatacctygccccctaagaaagcattgatttgtttcctttgactgagaagacagttctaatcattccatcacacgctgctcaatccctatcaagtgttttctaaaatttaataaagtctgggccccttttaaagaaaaaaaaattggcaaacaccccgtgtttaaatgaataaataatatgtggtatagccatgctatggaatgttactcagcaacaaaaagaaatgaagtactgatacatgtcccaatatggatgaaccttgaaaacattacgctaaatgaaagaagccaaataccaaaggccacatattgtatgatgccatttaaaatgtccaaaacaggcaaatccatagagacagaatgtagattagtagtagtctggggctaggggtgttggggaatcagggatgatggattagaggtatagagtttctttttggggttcgcgccccaaacatgtttgaaaattgattgtggtgatgattatacaacattaa

SEQ ID NO: 453858 - DNA, 576 bp, Homo sapiens
gaagtcaatttattttttcaaatgagtggggaaaaaaattaggtcctgctgtctgggcactgctctttatattgatgagaatacctcgccccctaagaaagcattgatttgtttcctttgactgagaagacagttctaatcattccatcacacgctgctcaatccctatcaagtgttttctaaaatttaataaagtctgggccccttttaaagaaaaaaaaattggcaaacaccccgtgtttaaatgaataaataatatgtggtatagccatgctatggaatgttactcagcaacaaaaagaaatgaagtactgatacatgtcccaatatggatgaaccttgaaaacattacgctaaatgaaagaagccaaataccaaaggccacatattgtatgatgccatttaaaatgtccaaaacaggcaaatccatagagacagaatgtagattagtagtagtctggggctaggggtgttggggaatcagggatgatggattagaggtatagagtttctttttggggttcgcgccccaaacatgtttgaaaattgatkgtggtgatgattatacaacattaa

SEQ ID NO: 453859 - DNA, 359 bp, Homo sapiens
ccctcttgccagcccttgggaactacctttctactctctgtttctgtgattttgactacttcatatgaatgaaatcatatagtatttgtcctttttttgactggcttatttcgcttagcataatgtcatcaaggttcatccatgytgcagtatgtgacaggatttccttcctttttaaggctgcttaatattccatagtgtatatataccacattaaaacaatccattcatttaactatgaacattttggttgcttctatgtcttggctgttgtgaatagtgctgcaatgaacataggtatgtaaatatctttttgagatcttgcttagaaatttttgggatatatacccagaaatgtg

SEQ ID NO: 453860 - DNA, 535 bp, Homo sapiens
tatccacactgtccttgagtagcctgcatcctgacatgacccagccagtccttccatcagccggcaaccawtacctctgaggacataaaaaacaaaagacatgacatctgtcttctaaacgttaacagtacacataaagagagacatatgattcaacagtgacaatgtgctaaggtcactgctgtaataaggttatatctaccaagtccagtagaagcacagaaaggcaaacacctaatttgcttggatacaagtcagaagtactcacagagaagataatttttgaacttgaaggataaatagttggttggatagaaatagagaaggcaggccattctaggcaggaacatcagcgtgcatagaaatggagagttgaggcagcatggcctgttggtgtgttcagatgctacaagtcctctgccagatgagataaggctgaacatgcaggcagggtcaggtcatgaaggccttgcattgctactcttaagtcatgtgcagccacctaagggttttgagccacgaactttgatcaggt

SEQ ID NO: 453861 - DNA, 535 bp, Homo sapiens
tatccacactgtccttgagtagcctgcatcctgacatgacccagccagtccttccatcagccggcaaccaatacctctgaggacataaaaaacaaaagacatgacatctgtcttctaaacgttaacagtacacataaagagagacatatgattcaacagtgacaatgtgctaaggtcactgctgtaataaggttatatctaccaagtccagtagaagcacagaaaggcaaacacctaatttgcttggatacaagtcagaagtactcacagagaagataatttttgaacttgaaggataaatagttggttggatagaaatagagaaggcaggccattctaggcaggaacatcagcgtgcayagaaatggagagttgaggcagcatggcctgttggtgtgttcagatgctacaagtcctctgccagatgagataaggctgaacatgcaggcagggtcaggtcatgaaggccttgcattgctactcttaagtcatgtgcagccacctaagggttttgagccacgaactttgatcaggt

SEQ ID NO: 453862 - DNA, 535 bp, Homo sapiens
tatccacactgtccttgagtagcctgcatcctgacatgacccagccagtccttccatcagccggcaaccaatacctctgaggacataaaaaacaaaagacatgacatctgtcttctaaacgttaacagtacacataaagagagacatatgattcaacagtgacaatgtgctaaggtcactgctgtaataaggttatatctaccaagtccagtagaagcacagaaaggcaaacacctaatttgcttggatacaagtcagaagtactcacagagaagataatttttgaacttgaaggataaatagttggttggatagaaatagagaaggcaggccattctaggcaggaacatcagcgtgcatagaaatggagagttgaggcagcatggcctgttggtgtgttcagatgctacaagtcctctgccagatgagataaggctgaacatgcaggcagggtcaggtcatgarggccttgcattgctactcttaagtcatgtgcagccacctaagggttttgagccacgaactttgatcaggt

SEQ ID NO: 453863 - DNA, 606 bp, Homo sapiens
tagcaaactagccattattttttcctgcattgcataaaatagaataacactctccaagtgtaatccagcttctgtgatttatattgatgagcatctcaggactctgctccacaccaaggcttgtgaccatcggaaatgttgcagatccagttatggcaggatgcrtgcctctattctccaaggattctctattctacccttaaccaatgatctggcctcatgacagcagtcttctattgcagggacatggtcagcagggaggaaatatgcttacggggcagcacacttggattcctctaaaaatcatatactatccctctaaaatcacctatatttttccatctccctgtcctctaatcagtaagatatttaagcatgtgaacccctattgagatattggacaatcactctgtaattctttctgtgtgcatggtagttaataaatgtgtatgccttttctcattaatctgcctttttgtgagttgatttttcagcaaatcttccgaagggtaaggggatgctttccctttgccctgcagttggtaataatttactcatggcagcacatggtacagaaggtagaaggttactgagcgagtgacccac

SEQ ID NO: 453864 - DNA, 606 bp, Homo sapiens
tagcaaactagccattattttttcctgcattgcataaaatagaataacactctccaagtgtaatccagcttctgtgatttatattgatgagcatctcaggactctgctccacaccaaggcttgtgaccatcggaaatgttgcagatccagttatggcaggatgcatgcctctattctccaaggattctctattctacccttaaccaatgatctggcctcatgacagcagtcttctattgcagggacatggtcagcagggaggaaatatgcttacggggcagcacacttggattcctctaaaaatcatatactatccctctaaaatcacctatatttttccatctccctgtcctctaatcagtaagatatttaagcatgtgaaccccyattgagatattggacaatcactctgtaattctttctgtgtgcatggtagttaataaatgtgtatgccttttctcattaatctgcctttttgtgagttgatttttcagcaaatcttccgaagggtaaggggatgctttccctttgccctgcagttggtaataatttactcatggcagcacatggtacagaaggtagaaggttactgagcgagtgacccac

SEQ ID NO: 453865 - DNA, 616 bp, Homo sapiens
gaaacactgaaccatgcaatccacccaaatgacccaaccaaaaaactattatctataagaattctcaaaactctaaacgatctagttaacaaatgggcaaaagaaagagaagacattttgctgaagagaatatacaattgacaagcatataaaaaggggttcaacataattgtacattagtgaaatgcaaattaaaacaacatcactaagaaacatcactacacacctatcagaatggctaaaactaaagacaatggcaacaccaaatgccggtgagaacatgaacaaactgsatgatgtacatttctagtgacaatttgaaatggtacaactaccttggaaaataatttatcagtatcttagaaatttaaacatgtacaatccagcaattgcactcttgggcatttatcccaaagaaattaaaatttatggtcacacaaaaatctatacactaatgtttacaatatctttattcttaatattccaaagctggaaacaatccaatgtgcttcaacagatgaatagttaagcaaactgtgctaaatctataccatggaatactacttagcaataaaaaggaatgaattagtgataaatgcaactatttgggagaatc

SEQ ID NO: 453866 - DNA, 553 bp, Homo sapiens
ggtagaggtggagcaagatggccaaagagaagcctccagcaattgtcccccatccccgcttgcaggcacaaattgaacagtgatccacacaaaaaagcaccttcataagaaccaaaaatcaggtgagmaatcacagtaactggttttaatatcataccaaggaaagaagcaccgaaaagggtaggaaagacattcttgaattgcctacaacatccctcccccagcccccagcagcaaccacatggtgttcagagcaggcttgggagaggaagattgcagtgactgtgggacttgcattgaaactcaatgttgccctgtcacagcagaaagcaacatggagcagaactcagccagtgcccacagaaggagcacttagaccagccctaatcagacgcaaattgtccatctcagcagtcagaaactaaattctggcaagccctgtcactgtgggctaaagtgctctgggatctcaaataaacttgaaaggcagtgtaagccacaagaattgcaattcttggtcaaatcctggtgtgctagcctcagagccagtgga

SEQ ID NO: 453867 - DNA, 553 bp, Homo sapiens
ggtagaggtggagcaagatggccaaagagaagcctccagcaattgtcccccatccccgcttgcaggcacaaattgaacagtgatccacacaaaaaagcaccttcataagaaccaaaaatcaggtgagcaatcacagtaactggttttaatatcataccaaggaaagaagcaccgaaaagggtaggaaagacattcttgaattgcctacaacatccctcccccagcccccagcagcaaccacatggtgttcagagcaggcttgggagaggaagattgcagtgactgtgggacttgcattgraactcaatgttgccctgtcacagcagaaagcaacatggagcagaactcagccagtgcccacagaaggagcacttagaccagccctaatcagacgcaaattgtccatctcagcagtcagaaactaaattctggcaagccctgtcactgtgggctaaagtgctctgggatctcaaataaacttgaaaggcagtgtaagccacaagaattgcaattcttggtcaaatcctggtgtgctagcctcagagccagtgga

SEQ ID NO: 453868 - DNA, 545 bp, Homo sapiens
gggccagaaagaaaccggctgccttgaagggaaggaatcagtactggcaggattcatctcctgctgactaaagagccyttgggccctgaataatcagtgtgatagccaggcagtacttgccaggagttttgagtgagactcagagctgttcttgcttcaagagtgacccagcatattcccagctgtggtggctatagggagagtctctgtaaaggagaaggaagagtaaagaggactttgtcttgcagcttgggtactggttctgccacagtgggtgtagagcaccaaatggactcttggggaaactgattccaggccttggctcttggatagtatttccggacctgccctgggccagagaggagcccacttccttgaagggagagactcagccttggtagcattcaccataagctaactaaagaacccctgggccttgagtgaagattggtggtagccagacaatacttgccatgaacatgggggtggtggtggccacagggagagactcctttgcttgaggacaaggaaggaaagtgtggaaa

SEQ ID NO: 453869 - DNA, 545 bp, Homo sapiens
gggccagaaagaaaccggctgccttgaagggaaggaatcagtactggcaggattcatctcctgctgactaaagagcccttgggccytgaataatcagtgtgatagccaggcagtacttgccaggagttttgagtgagactcagagctgttcttgcttcaagagtgacccagcatattcccagctgtggtggctatagggagagtctctgtaaaggagaaggaagagtaaagaggactttgtcttgcagcttgggtactggttctgccacagtgggtgtagagcaccaaatggactcttggggaaactgattccaggccttggctcttggatagtatttccggacctgccctgggccagagaggagcccacttccttgaagggagagactcagccttggtagcattcaccataagctaactaaagaacccctgggccttgagtgaagattggtggtagccagacaatacttgccatgaacatgggggtggtggtggccacagggagagactcctttgcttgaggacaaggaaggaaagtgtggaaa

SEQ ID NO: 453870 - DNA, 545 bp, Homo sapiens
gggccagaaagaaaccggctgccttgaagggaaggaatcagtactggcaggattcatctcctgctgactaaagagcccttgggccctgaataatcagtgtgatagccaggcagtacttgccaggagttttgagtgagactcagagctgttcttgcttcaagagtgacccagcatattcccagctgtggtggctatagggagagtctctgtaaaggagaaggaagagtaaagaggactttgtcttgcagcttgggtactggttctgccacagtgggtgtagagcaccaaatggactcttggggaaactgattccaggccttggctcttggatagtatttccggacctgccctgggccagagaggagcccacttccttgaagggagagactcagccttggtagcattcaccataagctaactaaagaacccctgggcyttgagtgaagattggtggtagccagacaatacttgccatgaacatgggggtggtggtggccacagggagagactcctttgcttgaggacaaggaaggaaagtgtggaaa

SEQ ID NO: 453871 - DNA, 613 bp, Homo sapiens
tagaaagactatgagatgaaccaatcaaaagtaataactgaaactacttttcaagacataaacagtacaataagatgtaaatagaaacgacaaagtgacaacaagcagagagatgaagttaaaatgtagagtttttattagttttctctttccatgtttttttatgcgatagagtgttgtcatcagtttgaaataatgagttagaaaatattatgtacaagcctcatggtaacctcaaatcaataacatgcaacaaatacacacaaaaaaaaataaaaaggaagaaaataaaatacaccaccagagaaaaccactttcactaaaagggagacaggaaagaaggaaaaaaggaagagaagaccacagaataaccagaaaacaaccaaatggcaggagtaagcccttagttatcaatcataacgctgaatctaaatggacgaaactctccaagcaaaagttatagactggctgaatggatgaaaaacaagacacctggatggagctggaggccattatwctaattaagtaaccaaagaatggaaaaccaaatactgtattttctcatttataagtgggagctaagctatgagaacgcaaaaacatacagagtgat

SEQ ID NO: 453872 - DNA, 542 bp, Homo sapiens
caggaacctagaaaatgcctcatgagggcagtgattgattcttctctcaaaagttgcatctctctctctttctctctctctctctctctgtctctccctgtstaatacacacacacacacacacacacacacacacacacacacacaatctctctctggcagagtatcctgtaagaaagctgtcatgcaatagtatagaagaaaaagcataggaaaagatagatctagatttgggtccagactgctacttaaaagctgtgtggacttagacaaatctcttagcttctgtttcttcatgtgtccaattggaataataaagcctacctcatgaagttattgagaagattaaatgagattattttatcagctaagattgtgctgtctttgcgtaacagaaattctttcacttaaagtggcttagataataagggctttatttgtgtcactaaaaaaaaaggatggacttaaaccacagaggattggaacagtggttctaaagtctttaaatattaggttcttaggattcttggccccccaaatcc

SEQ ID NO: 453873 - DNA, 646 bp, Homo sapiens
agggctgtctctgtatcttaaagaagctggcactcttcagctgatggctgcttggtcttgaggcctcaagatctttaatctggctttctctatagtgtttcattcactgtttggtgatggaatctcttcagttcagagatacttaatagatatagctttttctttcctgcttccaggcctacctacctgtttcttgcttttttttctagcagctgttgttgtttctgaaagaatyttgagggtgtttggagtctcagaatggcttccttaaagactaccttcagactctcagctgctcatccacaacagagatcagcctttctttgtagatgattcattcctggctgcatttgaaaaccacatattgttaattgcttgacgaatttaaatcccttgactacttttcatttcagaaaacacttacaaaaaaagtccaaatgaggaccttccctccagtgaattagctgtggctttctcacagtccatagttaggataaatgtaaagccatttctcatttttctccgcactttccaagggtacactccttgtttccaagatggaatgagaaataaagaagtgcccttcctgccatcttctcccctgaccctttcctccttcccactttcctcctattcctccccaaac

SEQ ID NO: 453874 - DNA, 524 bp, Homo sapiens
ggtgtcaggattttggaaaacagagagagaaaaaaaacaaacaaacagacaaacaaacaaaaaaaccttttcctggtccctggagcaccagcaggagaaacagcaagctcttcttggaaaacctggcgagggakggcaatcagagacattccctctgggcttattgtaaacttcccctcattcctttttcctctgtgtatctccttcccaggtaccgcatgcacaagtcccggatgtacagccagtgtgtccgaatgaggcacctctctcaagagtttggatggctccaaatcaccccccaggaattcctgtgcatgaaagcactgctactcttcagcattagtaagtgcctagaagtgcagggaatgccccctgagggcacagagattcagagaggaccacttttgccattaaaacattattagggaaaagccagctcctggacatttcccttcttcattccccctccccatccccactctactctctctcagcatcattttcctaacaagaaacaatttcat

SEQ ID NO: 453875 - DNA, 580 bp, Homo sapiens
gcaaggtcataaattattctccatattttccagccattggtttcccttgtccagccagaggtgtgtctcaaagtatgctgaggccagattcaatagaaacctgagccagcacctgtgtaaataatttttaaagctccttttcctgaagctggatgaatatttttaaaaactaagctggattrtcttttatctagcatgccgtctcctacattcctagtgctatggacctcttggaggaatgtggtttggttatagtggtattgtcttgtctgttgtgggggagggagacatttctttcagaagcaaggtaatactttggtctggtctatgactctattttgtttaaaatgaaactatggcagtatagtggtattcattctgcttcccataggttaactttacatccctctgtcttcacccactcttcagttctgattcttttaaaagcagccaaccaaaaccagcaagtacatactgcttatctctgacttccaccagaatcaacttcagatcttgtccaaagctccatctgaagagaggggaataacacccagccaagagccctcagggcccatcagta

SEQ ID NO: 453876 - DNA, 580 bp, Homo sapiens
gcaaggtcataaattattctccatattttccagccattggtttcccttgtccagccagaggtgtgtctcaaagtatgctgaggccagattcaatagaaacctgagccagcacctgtgtaaataatttttaaagctccttttcctgaagctggatgaatatttttaaaaactaagctggattgtcttttatctagcatgccgtctcctacattcctagtgctatggacctcttggaggaatgtggtttggttatagtggtattgtcttgtctgttgtgggggagggagacatttctttcagaagcaaggtaatactttggtctggtctatgactctattttgtttaaaatgaaactatggcagtatagtggtattcattctgcttcccataggttaactttacatccctctgtcttcacccactcttcagttctgattcttttaaaagcagccaaccaaaaccagcaagtacatactgcttatctctgacttccaccagaatcaacttcagatcttgtccaaagctccatctgaagagaggggaatarcacccagccaagagccctcagggcccatcagta

SEQ ID NO: 453877 - DNA, 526 bp, Homo sapiens
ctagggagagatgtgtgagttctgggcaaccagtagttggctttacatagaactgtaggggtcaaggccaaaggggacgtcctgttccaagtcaccttctttggacattagaaaaccacgaggggtttggaaatcagaaaaccagcagaggcaggaaaactcagggcagcatgggagattcagtatatacaaraaggttcacaccagtaatcaaacagaattttaactgctgatgtggagtagaggcagctttgtctgctgtgtgataaccaaacctttacgaatagtaggtgtatatggggaattggagggagataggtggctgtgtttagtaattggttgacttcactgagatggtttggggattgtggcttccagatgatcagattttcttttttaggtagagactccaacatcattacagaactataaattacatgtggaaaagaaaggcctcctatgttagaatagaaaataaaatgctgtggggttgagggacagaggtgctgtctaggaagtcagatag

SEQ ID NO: 453878 - DNA, 526 bp, Homo sapiens
ctagggagagatgtgtgagttctgggcaaccagtagttggctttacatagaactgtaggggtcaaggccaaaggggacgtcctgttccaagtcaccttctttggacattagaaaaccacgaggggtttggaaatcagaaaaccagcagaggcaggaaaactcagggcagcatgggagattcagtatatacaaaaaggttcacaccagtaatcaaacagaattttaactgctgatgtggagtagaggcagctttgtctgctgtgtgataaccaaacctttacgaatagtaggtgtatatggggaattggagggagataggtggctgtgtttagtaattggttgacttcactgagatggtttggggattgtggcttccagatgatcagattttcttttttaggtagagactccaacatcattacagaactataaattacatrtggaaaagaaaggcctcctatgttagaatagaaaataaaatgctgtggggttgagggacagaggtgctgtctaggaagtcagatag

SEQ ID NO: 453879 - DNA, 630 bp, Homo sapiens
ttggttacaggaaactcctcaaaaggcttaggttgaggctgggagaaagaaggtaagataggaggaatcaggaccatggacatttgggctacttctttatgtaattttgttgtgccttcagtcctgtttgaggcttctgtgcacatccacatttatgatttggtgggtcaaacaacacccagtttctgataggcagctcagatatggtaacttggtggcccatggttaagcagtcagtccttattaaggtccagtagcacaccaaagcctctttctcaaaaggattgtagttacctacagaggattacaaggctttgctccaacatcctgaggatctgaactgtgattcacctacaggggcctgccaaaatgtccgaacaatatcactatccaccactaycacttcaaataccattggatatgctggctcatatggcacaagtggcagagcagcttgcatggcagcctgtacctgttgcagagccttctctttttctcagccccactcaaaattagcagatttttgggcctctaacaccaaaatgaggaatatgttgtctcccaaattcaaagaattccactaagcacaggaccacttttttggttgtagcaggagcgagatgtaacaac

SEQ ID NO: 453880 - DNA, 559 bp, Homo sapiens
ttttttttagtgttacataaaatgatggtgtaatttcaatcaatggcatcttagatttgaggaaatatggcaataaattatggcctttggcaaccttgggccatagatttcattgatgagaaaaaccaaggtttagraaggttaaataattgttcaagatcacaaagctggtaagtagcaggtccttgtgactctaaaatacatgctttgtctttcactgcaacacttcaagaattgagtaggcactcaatatcagtttgagcatttaaatgaatgaacgaataaatgagtaacagtaaatgtcagcctttgaaataaagtgtttcacgacattttgttgctgtccaatagaaatatgtgagcttcatatgtaattttaaatttcctagtgaatacatttttaaagttttttttaaaaagtgaaattaattttaataatgtatttatttcatctactatgccaaaatgttatcatttcaacatgcaattcaatttaaaaaattgttaatgagataatttacattttgtttttcatactaactctttgaaatctagtata

SEQ ID NO: 453881 - DNA, 423 bp, Homo sapiens
aaagttaaaataagaaaaattttaaccagatccatgctaaagaaacatctaagttatgtacttcagatgaaaagagaataattctggatgggaagtttgagatgcaagaggtaagagcaagcaaagacattggcaaacatgggggtaaatctcaatatacattaactattaaaaacaacagtgatgtctaatttgtgggaaaatagcaagataaataattgaacaacaatttatacaatggtaaggagtcattagagttaaaaaattctaagatctttaagttgttgaggatgaagataaagatactcattaactttagacttyactaagtatctacattaaaattactaagataaccagaaagtttgaaagccaaaaaaatggaaaaatttttactaggcaatgctaaccaaagaaagctta

SEQ ID NO: 453882 - DNA, 652 bp, Homo sapiens
caggcccagtccaagacaggttgggttaactgattaggtcaaaagggccctagctattcttggaggaaggaggcagaggttggaatccaggtagggtctgacaagagaaactcagatgccttgttgtctatagctgctcccattagtccataagccacctctttcttgctcaagccagagagttggtttgagggacacctatgcatgtgggttgcattcctcttccctgcccttgtcttagcttagatgagcatgtaactggacactgaagctgtcagcagaacagattacttatgactaggcatgtcaaaaacaggaggcagattaaagtctggccaatcatcccatgagctaggccccaaatgctggtacttagtgccagctctggcctgtggggcttactatgcctctgggagtaagcgctgtgttgccacaatttctcttggcaggaaggatccctagaatttaagtcaagagcctcrggttctacctctggctccatgacacatttgaaatatgacttggggcaaatctcttctttctctttgtctcagtttctccatatgtagcatgacagattcagactcttctagttctattactttgtagcttttcagataccttgacctgacttattcttccatcagtcctt

SEQ ID NO: 453883 - DNA, 571 bp, Homo sapiens
atgttgtatattaaacgatgrtaaatgctttgcaaaaagtagagcagatgacatcaggtgatattaaagatggagaatgtctgtttgtgctgctataacaaaatatcacagacttggtaaattataaataatataaatttatttctcacagttctggaggctggaaggcccaagatcaagatgccagcaggttcagttgtctggtgagcactgttctttgcttgcatccaagatggcacctcatttctgcagccttcaagggaacaaacgttgtatcttcacatggcagaagggacagaaaggagtacttactcccttatgcccgttataagggcattaatcccattcaagaggattctgccctcatgacttattcacttcctaaagcctcacctcaatattaacacactggccattaagattctacagatgaattttggggaacacattcagactataatagagagcaatgtttaataaaaatattttcatttaactttgtcacttaaagtatttcattccaacaaaataatttaaccatccagagttgaataaatgtagactaattaat

SEQ ID NO: 453884 - DNA, 571 bp, Homo sapiens
atgttgtatattaaacgatgataaatgctttgcaaaaagtagagcagatgacrtcaggtgatattaaagatggagaatgtctgtttgtgctgctataacaaaatatcacagacttggtaaattataaataatataaatttatttctcacagttctggaggctggaaggcccaagatcaagatgccagcaggttcagttgtctggtgagcactgttctttgcttgcatccaagatggcacctcatttctgcagccttcaagggaacaaacgttgtatcttcacatggcagaagggacagaaaggagtacttactcccttatgcccgttataagggcattaatcccattcaagaggattctgccctcatgacttattcacttcctaaagcctcacctcaatattaacacactggccattaagattctacagatgaattttggggaacacattcagactataatagagagcaatgtttaataaaaatattttcatttaactttgtcacttaaagtatttcattccaacaaaataatttaaccatccagagttgaataaatgtagactaattaat

SEQ ID NO: 453885 - DNA, 577 bp, Homo sapiens
agtagcaaactgaattcaacaatacattagaaaggtcattcattatgaccaagtaagatttactccctgtgatataaggatggttcaacaaatagaaatcaatcagtgtgatacatcatatcagcagaatgaagaataaaaaccatatgattatttcattcatgctaaaaaagcaatgaataaaatccaacaccccttcatgataaaatcccttaaaaaatggggatagaaaaacatacttcaacataataaaaaccacayaatatcatactgaatgggaaaaattcaaaagcctttcttctaagatctgccattgtcaccactgttattcagcatagcactggaagccctagtatgagcaatcagacaagagaaagatataaacatcatccaaatttgaaagaaaaatgtccaattattcttgtttgcagatgatataatcatgtaattggaaaaacctaatgatccaataaaaagctattagaactgataaaaaaattagtaaagttgcagggcacaaaatcaatgtacaaaaattagtagcatttctatatggcaacagttaacaatataaaaa

SEQ ID NO: 453886 - DNA, 577 bp, Homo sapiens
agtagcaaactgaattcaacaatacattagaaaggtcattcattatgaccaagtaagatttactccctgtgatataaggatggttcaacaaatagaaatcaatcagtgtgatacatcatatcagcagaatgaagaataaaaaccatatgattatttcattcatgctaaaaaagcaatgaataaaatccaacaccccttcatgataaaatcccttaaaaaatggggatagaaaaacatacttcaacataataaaaaccacataatatcatactgaatgggaaaaattcaaaagcctttcttctaagatctgccattgtcaccactgttattcagcatagcactggaagccctagtatgagcaatcagacaagagaaagatataaacatcatccaaatttgaaagaaaaatgtccaattattcttgtttgcagatgatataatcatgtaattggaaaaacctaatgatccaataaaaagctattagaactgataaaaaaattagtaaagttgcagggcacaaaatcaatgtacaaaaattagtagcatttctatrtggcaacagttaacaatataaaaa

SEQ ID NO: 453887 - DNA, 580 bp, Homo sapiens
atatactgaattagtatatgtgataaatagaataatgacctcccaaagacatactaattcctcagaacctgtgaatatgttatattacatagtaaggggagatttaagttgcagatggaattaagattgctaatcagttatccataaaataggattattctggattatcggggggggtgtaatcacaggggtcctttgagtaaaaggaaagacaggagagtcagtgtcagaatgatgtaatgttagaaagactgacctgccagtgctggctgtgaagatgtaagggggccacaagccaaggaatgaaggcagcctctagaaactagaaaaggcaaggaaaaaagaaaggataaaaggaaggaaggaaggaaggaaggaaggaaggaaggaaggaaggaaggaaggaaggaagggaaaaaaaaaaaagagcaagaaaatgaattaccctgtagagcctctaaaaaggaatgcactcctgctgacatcttgatttcagcccactgaggctcattttgaacttttgayttctaaaacaataagtctctattgtttacagccactaagcttatggtaaattgtt

SEQ ID NO: 453888 - DNA, 585 bp, Homo sapiens
ttacaaatgtaccatactaatgtaatgttttaacaatatggaaaactggatgtggggtatgtagaaacattgtattatatttgtaattttctgtaacctaaaattattctaaaacaaggatacctaatgcatgtggggcttgaaacctggatgatktgttgatgggtgcagcaaaccatcatggctcgtgtatacctatgtaacaaacctgcaagttctgcacatgtatcccagaacttaaagaaaaaaaaaagtgtaattagtaaacctggaaataaaagagaaaacaaacatacattttaggcaaaggatacactattcacaatgtggtaaggacacgtatttagttaacacagaaaatgtttgtatgaatactatatagactgcttaaagttttgtttgagtagataaggccagaaagaaataggtgtggcttgattttgaaaagacttagatcagctttaattgtagaaaaccaactcaggctgttaaaaaagatgtcacataatgaaacttacacttgagaaaaaggtatgcttatggtaatgcgaaggatgagcctaaaagaaaaaaatggataatgag

SEQ ID NO: 453889 - DNA, 585 bp, Homo sapiens
ttacaaatgtaccatactaatgtaatgttttaacaatatggaaaactggatgtggggtatgtagaaacattgtattatatttgtaattttctgtaacctaaaattattctaaaacaaggatacctaatgcatgtggggcttgaaacctggatgattkgttgatgggtgcagcaaaccatcatggctcgtgtatacctatgtaacaaacctgcaagttctgcacatgtatcccagaacttaaagaaaaaaaaaagtgtaattagtaaacctggaaataaaagagaaaacaaacatacattttaggcaaaggatacactattcacaatgtggtaaggacacgtatttagttaacacagaaaatgtttgtatgaatactatatagactgcttaaagttttgtttgagtagataaggccagaaagaaataggtgtggcttgattttgaaaagacttagatcagctttaattgtagaaaaccaactcaggctgttaaaaaagatgtcacataatgaaacttacacttgagaaaaaggtatgcttatggtaatgcgaaggatgagcctaaaagaaaaaaatggataatgag

SEQ ID NO: 453890 - DNA, 522 bp, Homo sapiens
tttgctttgctgctcaaagttttgcatgttcagttttattattaggcttccaaatgtctaatgatttctctctgacatactaacacttttgtaatcaaatccaccagcatatttctcactttatgctgccactaaaagctgacagtgaagaaaccttggcatgaaggctgctgagaagagcttaatttgaggggccaggtactgggaatgatgactagatgccttcactgacataatgataacgctctcaacaaacaacatggccctccccagccacacacaagcacagaggtagatccagagaaccagagaaaakcaggctctccttggggccattgccttgtatttaatgactttaatgcatggaaatttagatagcagaactctaaatgctgacagtaatggcaaggaaagaaatctacaaggagacactttgttactttcaatacgtaaggcctgcagagttagccctgggtactttaaagatgaatgtgggcgctggaggcacaacacacctgctga

SEQ ID NO: 453891 - DNA, 557 bp, Homo sapiens
gtgacagttcaaattttaagtatttaacagaattctggggaaatctgggcctttttcttgcagactttagtagccctcttcagctagaaaatttacattccaaattgtattctgtcctgagtcttccttacccttgctggcaactaggatgtgacccttcttttaattggagatccttatatctctgggtaagatttcatcagaagtggtagaagaattcttaaaactttgagagagtacagtccaaccatgttgtttgaccctagtctcaaaatcttcccatgcaaaagcaaaatgccctgagagttggagcttagagatgtgcaaaaaaaaatgcrtccttaaggtccacaacagtaaaccagctaaagtctctagagagaatagtaagtaaagcataagtgttaagcatcagcaggaggatatcttctacaatctaattaatggctgttaagtcccgtgtaagtcaatagtcttgtgtgcctgcctttgtgctaacaaaattggggtattatatggagaccagcatgggcggatgagttcccattcaaaaaggc

SEQ ID NO: 453892 - DNA, 488 bp, Homo sapiens
ccttttctgtcatgcaatagatgtgcagtatgagatgagcaaaaattttaaaggtagacaagaaccattagagggaaatgacttataggcatttgcttacccatgtgatacaacatccaaaggacaagagttaataagttaacgagttaatagtcaataaccatggcagtcctaatgctacccttgggtttccttmtaagaacctcagatattaaagcaacgagaaaagaagggaatgtggtatatgaacataactttgaggaaaataaagccttttgaatgggaagcagaaattttaagcaaagcacactactaaaacccactgtgacttctagctacgaagacagaaatgtttaggaagtcgtgggtactcatttggggttctgatgtgatgagatacattaataccactctattaataaagatgatgttctcatcgtcattaattttttttattagaaagcaatagagcagagttgaaaagctgt

SEQ ID NO: 453893 - DNA, 621 bp, Homo sapiens
actgtcctattgtattatgacactgaaatattgcttttgtggttagcattaatgtaattaatagaaatgtctgggtgggttatatagaatatcattaatatcaatgacttacataaaataaacggttttgctggataaaccttttgagctccatatgtgtgccaagcacctaagacaattagtgtttattcactctccactgtcgtcttccgtgctagtaaaatgtctgattttatgtgggaacacactgagaataaagttgacaagtggcctccattgtgtgtcatgggtgtggccatgtgactaaattatgaccaagtggaaattctaatcattaggacataatcagaagtatcatgtggtagataatgaaatctttccttaaaagatagacactttgtgcagtgtgcccttttcattttagttctttctccagtctactctctggaatgcaggtgtgatggctggaaggctggctgctatccttaatcatgcagatgagtgcccctaaggaggatggggtggtgggctagaaggaactcaggcaacaaygatttcatggatgacctgtgttgagacttatacatgagggagaaatagagagtgatttaattgtaaatc

SEQ ID NO: 453894 - DNA, 565 bp, Homo sapiens
accattctgctctttgttcctctttcttccattcttcttgtcttttggattatcttatttcattttttattctattagcttttgaattatatctgtatctctccattaataatacgaactgttatttgtttggtgtacccttgggatttggttcctttcttattttcttttggatgatgtttttatgattcctctactcccctctactagctttttcgcacatcaatatagttatagctatttccataaatgtgtacatagatgcataaatatatatatgtatacgtgcttgtgaatttgttttttatctttctttacttcgaagctacgttattatgtgcataaaaatttgggatttctgtattattgttgaactgacctttttarttataaaatgttcctctttatgtctagtaataattcttcacttgaaatctattttgtcttatagtaacataactacacagctttcttgtatagtgaaagaacaaagtatatttataatatactttaacaatttacgttaaaataaaatataaggtattttattttaattggtggttac

SEQ ID NO: 453895 - DNA, 592 bp, Homo sapiens
  misc_feature (1)...(592): n = A,T,C or G
ttttcgtctcagcttgtattccttctgcaagttttttagaaatcagtttcataggcttgtgctttgaagtacaatacctatcccttctggggagcgtaggagagtgaatgatgcattactaytttcggaaggcagaataatgccctcctagtgccgttagaaggaacacggtcctgacaacagcttgatgggggcccagtgagtccttttttggtccttcaaaattgtaagacccaaaatggggtcctttcaaactnnnnnnnnnnnnnnnnnnnnnnnnnnnnnnnnnnnnnnnnnnnnnnnnnnnnnnnnnnnnnnnnnnnnnnnnnnnnnnnnnnnnnnnnnnnnnnnnnnnntcctgatttatcatacatgtcttattataaattaacttaatagattctttgttccaaggcagcacttacctggaacatgaaggactctggggaaaaagaaccccatgccaaaaaagggaacaccacttatttcgcattttttccttgtctagaaaggaccacacataactaccagattaaatgaaacaaaagaaaccacagtcagcctgaaaacaaagcaacaccaacaacaaaaa

SEQ ID NO: 453896 - DNA, 638 bp, Homo sapiens
tccaagtttttattaagctgttctttagctttgcctcatggctaacttggaattttgaaaatgacatcaaagacgcaggttttctctgtccttccacactctctcttccttggtttattggctttttgccctcatgacattgccttacaattggaagatgagcrtgggaaaacagtttttcttatatcagggggcaaaaaaaaaaagaccccatgaacacaaatttcccaactgagtcccccgttatttgtttgtggttgtttgttggctaaaactacaagaggctgagaaagtatctgactagacaggaaagggattgccatgtttatcttgacaaatcatgattgttgaagatttaaaccagtatcagtagagatcaaacaaaccaactgaccaaccaaccaaacaaaacagagctgattttgttaacttgcaaagcaaagtaatatattgccagtaaagaaattcactcattgaaaaaagtcaggactttttaagtaaaagaaaaggggaattggtgcttatgctaattaagcattgaaaaccagcactctggataagtggtaatgagtccatgagtaggctcacaattggttaaagcaagttctattgttcactggtcggaaaagagtgggtcc

SEQ ID NO: 453897 - DNA, 426 bp, Homo sapiens
tttaaaataacttttgctagcttttattgcatatttttgcaacccacttctgctatgtgcaagttaaccacaattttctcatctatatcataacagcttacttcataggattgttgacagagagatgattaaaaaataatctacataaaatgctgaatattgtgcrtgacacctagaaaacactaaaatattgttagttactacattatggttcacagagacatgtttcttaactgagataatgatgtaccttataaacaatacagtagaagaaactacaaagattctttcactcagttaaatttgtttcctcttactgtgatttaattaaaatttactaagaagtcagaaaacctggtactgttcttggcataaagggaggtggaccaataaatataatattctttgacatgaataagtttcaga

SEQ ID NO: 453898 - DNA, 564 bp, Homo sapiens
ttttttttttttgagatggagtcttgctctgttgccagtgtggagtgcagtggcgtgatcttgatctcggctcactgcaacctccacctcgcaggttcaggcgattctcctgcctcagccgcccacgtagctgggactacaggtaggcgccaccacacccagctaatttttgtatttttagtagagagtcggtttcaccatgttggccaggatggtcttgatctctggaccttgtgatccgcccacctccacttcccaaattgctgagattacaggggtgagccaccgtgctcagccagaattatttttaatgacagtttgacttttttttttaacttttattttaacatttactttaggttaattttaagagttagaaaatgtatctgtaagtgtttatyccaggagttttcaagctgtggtctctggataagatgcctcatcattacctgaaacctcattaatctcgcaaattttcaggtgccaacaagggtgaccgacctgtcttggcttaccagacacattccccatttcagcactaaatgtccagcatcctggaaatcc

SEQ ID NO: 453899 - DNA, 640 bp, Homo sapiens
acagcatttttacagaagagctgagtctttttgggcagtgcctctaaggtaaaggtgtaatcacagcctcaagaaagtatccgtaaaaaggaatcaaatagaacaaaaggaagttttcctacttatatacagctgaaactcatttcattaaaggaacagaataattttatgtgggaaatattttcacctttgagtgatgttctgacagatgaaagatttgggggtacaaaaatrgaagactgtattatggcaaggatacaaattttctaaattgggataaataccctacttccaaaaaaccaaaagcccaataaaactcaatgccagacaagtataaaataattataaaaaagattacaataaaaaaagtgaaactgcattgatatccatgtaagaatttttaaaggcagtttttataatcataaataaaatatattataaaattgccttaaaaagaaattatgtaatcatctagttatgttctgctgcacatcttaaaccaggtaaacaaaaaatgcaaacactattccattggaaagaaaacaatttattatatctgaggaaagtcattacaatacatgtaatatatttccaatttactgatttaaaggcgtatggatttaatttttaaatacacttt

SEQ ID NO: 453900 - DNA, 444 bp, Homo sapiens
accctttattttcctagttattaatatcaggttgggtgcctatgttgatactaggtacctaaccattttactctaacaaacgagtatccaaactgctcagtccttagaattactaaggaaaccttttcaaatctgattctgatactccattcccagagattcagttgtattagttctaggatagagtataggaatcttaattcataaaaactcttccttggtggttctcaaacttggttgcacattaaaatcagcttgagaggttcattccaacatctgtgctacactctcaacacatcaaatgaaaattctgaccaagggaaccaggcatcaacacatttcttaaggayttttttaggagggagaggttctcactctgtcaaccaagctagaatgcagtggagtgatcatggctcactgcaacctcaacctcgggggctcaag

SEQ ID NO: 453901 - DNA, 444 bp, Homo sapiens
accctttattttcctagttattaatatcaggttgggtgcctatgttgatactaggtacctaaccattttactctaacaaacgagtatccaaactgctcagtccttagaattactaaggaaaccttttcaaatctgattctgatactccattcccagagattcagttgtattagttctaggatagagtataggaatcttaattcataaaaactcttccttggtggttctcaaacttggttgcacattaaaatcagcttgagaggttcattccaacatctgtgctacactctcaacacatcaaatgaaaattctgaccaagggaaccaggcatcaacacatttcttaaggatttttttaggagggagaggttctyactctgtcaaccaagctagaatgcagtggagtgatcatggctcactgcaacctcaacctcgggggctcaag

SEQ ID NO: 453902 - DNA, 539 bp, Homo sapiens
attattattattttggattttaagcttcatactagcaataaaactgatttacacaccactactacactattagagtgttctgtattttttatatatttaccttaatcaatgagtttcatacttttctgtgctttcatgttgctctatagcaaacttttgctgcaaattcagaaattctttaaaataattattttgaattctttgtcaagaagtttatagatttttgtatttttgcaaggtttttcatgtcaaataattgttttaaaggagagtaattagttacaagagaataaataggcaattcaaccaaaacttgaaaaaaaacaaaacacaaaccaattgagaagttccacagacagattgaaaaaatagaacccaaactaaaattctagagctaaagcataaaataaatgaaataaagaatgtaaaatgaagaatcaacagcaaaattgagcragaagaaagaatctgtgaatttgtttcagtcaggagcaacctgcaaagggtatttcagagataagatctcttcatcctagaaa

SEQ ID NO: 453903 - DNA, 534 bp, Homo sapiens
ggtaatggccgggtgacagaattcaagtatggtgcaaaactcggcacagttattcgcaagtggaatggagagaagatgtcttacttaaagtaaataaatacaacttttccctgaagtatttcatggatctattagtcatactacctcagtgtgacttatcttctggaacattcttattcagacaactatcaaagagtcaattgtgaatgataagtattctagtgccctaaactctaatcaatcatcttttgtatttagagtgtctgtcacaaggcaatatgyctaggaacgctaaacataccctaggagttttcatctaagtacgagatgaatatactggatttgactgatgtttgcatataatcttttaaagccaggttattattaaaatgatcctatcatttatgaagtatgtacaaagtttccatcctgtagaatttacatgtattatatgaattaaaaatataatagatatttatattataacaatacagtattggagccttattttaatctagtttgattaaactagat

SEQ ID NO: 453904 - DNA, 633 bp, Homo sapiens
gtgtttttaggaacatggttattttccgcaatgtagtggatggccagccttttacaaattggtatgataatgggagcaaccaagtggcttttgggagaggaaacagaggattcattgttttcaacaatgatgactggtaagtaaatatcaattaaaaataatattttgtaccagtatgttcttggtttattcttttttttctctgttcattgacttttatcatatctgaaaaatcatgtagtcagtggagcaagaagacaatagagatcaaaattgggcagaagcaaaaggatgatggctgttactccttcgttctttttttttcataagtgctttctgttgtaagcagaatcctttctgtgcacccttgcagtatcatatgcatatataygatgcacatgcatatgctcacctacacatgccacaaaatcaatatataaaatcacaatcaatataaggattgtgaaatcattaaaaaaaagtgtcttataatcctgcttttttaaccatggagaaatgctgcctaggtactaaaatatctttatttctaactctttttctcaatgactgctctacgtagttttttggtacactttcttcacttctctgtctccttgtgacaaataacatttt

SEQ ID NO: 453905 - DNA, 259 bp, Homo sapiens
taagtagtataaaagtgtttaatatttaattttctgctgcagtaatgtgacataacaaccttaaattcttggtactttaaacaagatattttttttctcccaaatttctaggttatttaagggcagttctgcttcatattgcagtttgcctgggctttactccaggctgtgtgttgragttaggtctaatctattgtatccctacacatcccacttagaaaagctaacaaatttcctttggacttcagtcagttcgatt

SEQ ID NO: 453906 - DNA, 499 bp, Homo sapiens
tctgattctatataaacaattcaaaaaagaatgtgttttccctatgtgcatttggtcaggtaaattaaaaaatacacctcatgctagcctcacaaaactggaataagccttgggaaagaagttgtccttgaagcttgtatctgacattgtagcaggacgagccrcagaaaaaacctctcagacactgagttgtagaaggaagggctttattcagctgggagcattagccagctactgtctctaaatctgagctcctggagtgcacaatttctgtcctttttaagggctcacaacactaaagatttcacatgaaagctttgtgattgatttgagcaagcgaggtatacatgacaaggactacttgccccggtggtcagggagaaacagaatatggaagagagtttcacaatgttcttctacacaatatctggaatctgtgaatcacatcggcttctaaatcataagtggatgttcaactactgggtttaggccaaccagg

SEQ ID NO: 453907 - DNA, 528 bp, Homo sapiens
gttactctcaaactattgtgaaatgatacatcaacgtatatcttatgtttcaaaaataggaactggggagaaggttggggtttcatgccttctgacagagcgcttgtctttgtggataaccatgacaatcaacgaggacatggcgctggaggagcctctatacttaccttctgggatgctaggtaraaaaccaagttctctatttttttaacacctcttttaatgatggtatgaatattgtgatattctatgataatataattatgtaactttcaggctgtacaaaatggcagttggatttatgcttgctcatccttatggatttacacgagtaatgtcaagctaccgttggccaagatattttgaaaatggaaaagtaagttttggagttgttcaaaatatccttttctcaagaaaaaagaggcaatcttctcctaatttaatatgacaactattaagtgtttatttattcaacaaatatttaattattgtaaacctgatacaggattgtgatttagtaatgcaggt

SEQ ID NO: 453908 - DNA, 590 bp, Homo sapiens
gtttttcatggcggagcacgagatgattaaacgtcacacagttgttaactggaaagtattcatcacccaggctgggattgaacctgggtcaccattgtaaaaaggcaacggctgaaaagtggtactaccacatggttacaggttatgcttaaggacataaaacaagtcggagacatgcagcaaagtttgttactgaccagtttatgagggtgtcttgaacagtgagctcaaggagtctcaggcctggattccattccaaggtaccctctgtctgactttttcttctattttctctccttttcctgagcctcctcctagtacgtcttatgaaagactgaggtggctactcttagaaggttttctaaggtgccttctagtcctatagcctgtttctgtagcttccttcaaatatcaggagctgcttgagtaaacctgtctttcaagatkagctgtccctcaattgaattacgagatagggaagcatgttttgccaaagtctctctcagcctttataaaaaggctgagggattttcatctgggttttgatctatcatggatagcttagagtagttaacaggtttggctctggt

SEQ ID NO: 453909 - DNA, 590 bp, Homo sapiens
gtttttcatggcggagcacgagatgattaaacgtcacacagttgttaactggaaagtattcatcacccaggctgggattgaacctgggtcaccattgtaaaaaggcaacggctgaaaagtggtactaccacatggttacaggttatgcttaaggacataaaacaagtcggagacatgcagcaaagtttgttactgaccagtttatgagggtgtcttgaacagtgagctcaaggagtctcaggcctggattccattccaaggtaccctctgtctgactttttcttctattttctctccttttcctgagcctcctcctagtacgtcttatgaaagactgaggtggctactcttagaaggttttctaaggtgccttctagtcctatagcctgtttctgtagcttccttcaaatatcaggagctgcttgagtaaacctgtctttcaagatgasctgtccctcaattgaattacgagatagggaagcatgttttgccaaagtctctctcagcctttataaaaaggctgagggattttcatctgggttttgatctatcatggatagcttagagtagttaacaggtttggctctggt

SEQ ID NO: 453910 - DNA, 590 bp, Homo sapiens
gtttttcatggcggagcacgagatgattaaacgtcacacagttgttaactggaaagtattcatcacccaggctgggattgaacctgggtcaccattgtaaaaaggcaacggctgaaaagtggtactaccacatggttacaggttatgcttaaggacataaaacaagtcggagacatgcagcaaagtttgttactgaccagtttatgagggtgtcttgaacagtgagctcaaggagtctcaggcctggattccattccaaggtaccctctgtctgactttttcttctattttctctccttttcctgagcctcctcctagtacgtcttatgaaagactgaggtggctactcttagaaggttttctaaggtgccttctagtcctatagcctgtttctgtagcttccttcaaatatcaggagctgcttgagtaaacctgtctttcaagatgagctgtccctcaattgaattacgagatagggaagcatgttttgccawagtctctctcagcctttataaaaaggctgagggattttcatctgggttttgatctatcatggatagcttagagtagttaacaggtttggctctggt

SEQ ID NO: 453911 - DNA, 590 bp, Homo sapiens
gtttttcatggcggagcacgagatgattaaacgtcacacagttgttaactggaaagtattcatcacccaggctgggattgaacctgggtcaccattgtaaaaaggcaacggctgaaaagtggtactaccacatggttacaggttatgcttaaggacataaaacaagtcggagacatgcagcaaagtttgttactgaccagtttatgagggtgtcttgaacagtgagctcaaggagtctcaggcctggattccattccaaggtaccctctgtctgactttttcttctattttctctccttttcctgagcctcctcctagtacgtcttatgaaagactgaggtggctactcttagaaggttttctaaggtgccttctagtcctatagcctgtttctgtagcttccttcaaatatcaggagctgcttgagtaaacctgtctttcaagatgagctgtccctcaattgaattacgagatagggaagcatgttttgccaaagtctctstcagcctttataaaaaggctgagggattttcatctgggttttgatctatcatggatagcttagagtagttaacaggtttggctctggt

SEQ ID NO: 453912 - DNA, 557 bp, Homo sapiens
ataattgcaacagtatcaataaggttacctatttccctaatattattgattgctgtgtatctgtccctccagatattaatgtttgctttatattttcaggtgcttcaatgttaagtgcatatttatttataattgtttcatccctttaatcaactcaccmctttttcattatttaatgaccatctttatcacttgctacagttgtatcttaaagtatattttgcctgatataaggatagctatccatgctgttttctggttttaatttgcatggaatatcaaattttctcatcccctacattcactccatatgtgtccttgaagctgaagtgagtctcttgtaggcagcatattgatgggtcttcttttgtaatccattcagccattctgggttttgaatgtagaatagaatgaatttaccttcaaggtaattattgataggtaagaacatacaattgccactttgttcattgttttttggctttttaacatattattagtttctttatttctcccttgctgtctttctttgagatttcatgattttctgtactgac

SEQ ID NO: 453913 - DNA, 616 bp, Homo sapiens
tttacttcacaggtaagtattctaagtaagagttttctgaggaaaaaacaatgtagtattcttgrcaactttatattttgtttctgagataatctttcttcaacaagagccctccaatgtgctgttaatattttcaagagatagctgcatataccaagattcaagaattttttatattattgattagtttctagaacattcaatgatatagagtaagaatttggtagttatgaagactgtttaatttgtaggtctctccaccaaatgaaaatgttgcaattcacaaccctttcagaccttggtgggaaagataccaaccagttagctataaattatgcacaagatctggaaatgaagatgaatttagaaacatggtgactagatgtaacaatgttggggtaagtgaattctagtttccttgaaaaataacagataggaaaatgatttctctctcttctttcttgctccttttcagcagaaagttttccatattttatttttttaattttacttcatactttaaaactcaaaattaaccgttgccttatgttcagcttttgtaaatatttgtgtatgtgctctctatctaccaaagaaacaagtttaaagcagaatt

SEQ ID NO: 453914 - DNA, 517 bp, Homo sapiens
gagacagagcaggtgtaaaggccctgaggtaggaacatgtcaagctgtgtggagaatggcagcactgagttcaggaagyaagagggagaggtgagaccagagtgattgggaaagtgagggagtggggaatagattatatagaatcttagaagccctactaatgctctggattttaccctgagggatatgccagtgaaaggtttaagcagaggaatgacatgatctgctttatgtttttgaaaggctcactttggtcactatacaggggccaaggtagaggtagcagttaaatagattttgcaataggtcaaaaaagatcatggtggctcagacagagatggaggtgacggtgacaaaggtgtcaatggcaggcgatttttcaaaggcagaatcatttagcagctgggctactttgactgagatattttgcctctcctggctcaggtccctcatcagtaacatgaaggtaacaataccaaactcataaaatcacggtatggattaaatgagataattt

SEQ ID NO: 453915 - DNA, 531 bp, Homo sapiens
ataaattaaacatacatgtaacacaaatagcacacaggtatgcatgcatgtcactgagactccccacctygagaaaatctaaaaatagctgcattggtgccctctaactgtgtcaaaatggaaagattttggaaactaaaaattgaccagacatgggtcaccacaccatggagggataggaaataaaactcctagtttctcattctccagaataggagcttcaaaagaacacaatgaaaaagagttatcatttctatcccaaacatggcaaagatagttaaagaagctaagattttaaaagtcttccctgtagaagcctttcctgaatgctccagagatttctactaccattgacagcttcacaaaaggaagcaacaactctttgaggtcctcctgcctggatagtaacataaacatgctctatatgttccaagtcctgcactttgcctaagcaatagtcacgtttccttcaccttgtcctcggggtttgctaaattcctaccgcaggttcatgtgccttgtccctacaga

SEQ ID NO: 453916 - DNA, 626 bp, Homo sapiens
gcattccagcctgggtgacagagaggaaggaaggaaggaaggaagaaaggaaggaggaaagcttctgcacagcaaattaaactatcaacaaaatgaagagacaacctatggaatgggaaaaatatttgcaaaccatacatctggataagggattaatagccaaaatatattaggaactcatatgactctacagtaacaaaataaataatcccactaaaaatgggcaaagtatctgaataaacatatttcaaaagattatatacaaatggccatatgaatatgttttaaaatgctcaacatcactaatcatcagggaaacacaaattaaaaccactaygagatatcacctcatacctgttagaatgactattatcaaaaagaggaaagataacaagtattagaaaggatgtgggtaaaagggaactctgcacactgttgggaatgtaaattatacagccattacagaaaacagtataaagcttcctcaaaaattaaaaagagaaatatcatatgatttagtaatccgactcctaggtatatacccaaaggaaaatcagtatgttgaaaaaatgtctgcactcttgtgttcactgcaacattattcacaatagccaagatatggaatc

SEQ ID NO: 453917 - DNA, 588 bp, Homo sapiens
agtataacattttcacacagtttgttaattgttcatctcttatctgtgtcttcttagggacattaactggcttaaaaagagaacttggattttgtttgcatacttatccatagtacctagcacttgtcasagtaaatgtatatagtgtgcataagtaaatcatttgcaggtgaggctctgccaatttctatgaaatataaaattttctccatgtttatatctttgattggacaaacccaagcctcttctggcatttgctttggagataggtcatgggagcagaagctcttataaccccaccctggtttgaaaagctggagtcagtttggagttccacaatgacccttggacttccacagacctcaaatattttacttaactttaccaattatttgattaatgctataaagtttcaaaatactttcacaagtaatatctattttcaccctcacttgaaatatctgggagcaagtgagcagatatattcataatccacacttgagggatgagaaagctgaagctcaaaatagttatttaacctgcttgaggtcacacagtgggtaaatgagaacctacagccactcagct

SEQ ID NO: 453918 - DNA, 588 bp, Homo sapiens
agtataacattttcacacagtttgttaattgttcatctcttatctgtgtcttcttagggacattaactggcttaaaaagagaacttggattttgtttgcatacttatccatagtacctagcacttgtcagagtaaatgtatatagtgtgcataagtaaatcatttgcaggtgaggctctgccaatttctatgaaatataaaattttctccatgtttatatctttkattggacaaacccaagcctcttctggcatttgctttggagataggtcatgggagcagaagctcttataaccccaccctggtttgaaaagctggagtcagtttggagttccacaatgacccttggacttccacagacctcaaatattttacttaactttaccaattatttgattaatgctataaagtttcaaaatactttcacaagtaatatctattttcaccctcacttgaaatatctgggagcaagtgagcagatatattcataatccacacttgagggatgagaaagctgaagctcaaaatagttatttaacctgcttgaggtcacacagtgggtaaatgagaacctacagccactcagct

SEQ ID NO: 453919 - DNA, 456 bp, Homo sapiens
tcctgttggggatataaatagatggtcatccaatttccattgacataccagagagagagagggagcgcagaactctttttcattagaaagtccttctttgtcttaaactgaagtttttttcttttgtatagcagtcatacacgtctttgtaattcttgacctgaacatttgctcttctatcattaaatatttcctgtctaaggatagacaccatttcacccratcctctatgctacacatctagtttgagttctatagatccatcctttctatttaagaaacatccaaagcttaattttttgttatggcttgtcagtgacagcaatgtttattggaaggagaggacactgcatcacacaagccccctttaaggaaatttagagtgaacatgttttacctatttcactttgtcctcttatagtaagttaataaggtttgcctttaagctgagggtgg

SEQ ID NO: 453920 - DNA, 592 bp, Homo sapiens
tcctgttccctgtgtttcttacactcatatraataatgagtaaatttgagaccagtatacacccgggcttagctctttctgctttttatgttcttcatttgctacttccatatggtagagtaattctccaaaaatttagccctggtatattaactagccattctgggtgggaagagaatgttaggcttataaagcagccgataaaagagtcttgcactgtgcttaaacacagcacactcttctaatatttatataagcaaatgggattacccatttgctgtctacttcaaaagtaaagctggcgtaatcactgaagctgggtgcaggaatttgtagatgcctgccttatagaacaaagaccatgatcattactaatttgagatgtaagctgttctctgcggtttctcacccactaagagtaaaaactgcctagatgttctttataagtgaacttggtggggcccacaggcttctgtgatttagcagccccagagcaaagaggtcagtttcccaggattccaagcccccagcagaagctgactctacaatgatgacagaatcagataagataagcacagtcagcctgtcctcc

SEQ ID NO: 453921 - DNA, 599 bp, Homo sapiens
ttcccaggattccaagcccccagcagaagctgactctacaatgatgacagaatcagataagataagcacagtcagcctgtcctcctcactgcagccaaactgcttaactccatgggcagcaatgatcattcctgtcgtccaaaagccttttttagtaaattagatgtgttgatattttcagttgggttgatacctcacagtggcagggcactgatcttttccattgttcctcagaaatcgaaaaatagtgaggatgatatattggcatactggtccattacccaataaaatagtttttccccgctagtttctatgccatcatgcaatagagaaaaaccatcgggggcagatataatttccatcattcaggaaattggttttgtcgttgtcttatccaagtgcattcaattattgaggtttttttggctcatgacattgtctgaggtttagggcaggacatctagctagagtcatattccatcctcttgaaayttagtgtctctgtatttttatgctattttatgaggggattaacctctccaaggttggaatttgcctgctttgtataaactaacccttccagagagttttcataatat

SEQ ID NO: 453922 - DNA, 517 bp, Homo sapiens
agctgtcttttcttcattcctgagagaaggagaaaaacctttgctttctaatgtgagcaaatcttctctaaggagagaagggaaggtcctagggtgttacaaccctttgaaatgtgaacatatggctcaaggggagagaaacttgtaaatctctcctaggtaacttactatccttaactttctacccttgtttgccattcactcactctctaacccaaattgctcagaaagctcagagcatacagaattgtgaaaatattcccattgttttctgacactaggcagctcaactaaggagtcaagtgccacagattyaaagaggcaagcagaaattcagaagtcagagtcagaaggaatgagatcagtggactctggggctggtggaaaggctatttttctctttctgtctgttgggtgtgggtaaccctaggccaaggggtatcaataaaggaaacactgcctcagatttggaagataagagaaagtagaattctctggtagccagttctagtgatgg

SEQ ID NO: 453923 - DNA, 260 bp, Homo sapiens
ctgctcgtcaacctctaaaatgttcaaatatgggcataactgagaaatagagagagacaggacagtaatgttttatcttaaattaagtttgccagttatactgagaagctgctcaggctcttcttgatccatctacttaacagtgccccaaatttttatacaaacataccaaggaacttgtcccattatrggaaacccaaccacaaaccaaaaaaatcacccttctcattcaatttggtagccatatattcttcagggaa

SEQ ID NO: 453924 - DNA, 608 bp, Homo sapiens
tagctcctgtactcacgattcttctggacctcagcctatgtaccttttcatttggttcatccatatcctttataatactctttacaatgagctggtaaatataagtaaatgttttcctgagttttgggtgccattttacaaattagcaaaccaaggaaagggttatgagaatccctgattaagacctcaagatcagtcagaagtacaagtgatccagacttgcaattggcatctaaagtgaacgggggcagtcttgtggggctgagcccttaacctgtgaggtctgtgctaactccacataatgagagttagtattgaattgagttgtaggacacatggttggtgtccagggacttgaattkcttggtatggaaaaaaaaaaaaaacacacatttggtgtcagaattgttgtgaacagagtaacagttttcccagaatagggcatgatgtttttgtttcctatattcatttctggccctcttacaagtctgtaaacagattccagtgatatgttttccaacagggaaagcaatggggtgaaccagagcattgagagaaaattgcctgcaatctccaccacactcccacctgccaccaaataacacagc

SEQ ID NO: 453925 - DNA, 452 bp, Homo sapiens
cattagcctcacattgctgctgaggaatgtgctataaatgcaaaaaatgcacaagattttgaagatttagtacaacaaaagaagwttaaatatctcattaataattttatattaattacatgtgcaaatgatattattttggatatactgtattaagttagacaaaatttattgttaaaattaattacaactgtttatttttactttttttggcatgacttcttaaaaaaaccatggatcacagctccagatgttctgtttatgtaactgctaaccccctaacctcatccaccatcaccacctcactcttagcttccccctgcccaggaattcttccttctaaaactcaatgcaagaatcaagtactctttcatcatatttaccaacatgtcttactttattttctggattttgggaggtaaaagggcagtcaactagggggcaaaataaaa

SEQ ID NO: 453926 - DNA, 523 bp, Homo sapiens
aagtgccaggaagtattcagagttagtcaagcatcataggaaaactctcctttatgtctatttctcactcaaagttattcaaataaaaggaaacatattaaaggcacttagataaaggaaggcatagtaaatattcttgttccatgaaataccatcttctaaccaccttaacagatgcaacagttgaacaatctagctgtgctccgctgatattagaaatactgtggtctgagccaaaggaccagtgatggcatcaggaattatgtcactggctatatcctatatatatgtttaccagataaaatacatgatatccagctaaatwtaaatttcaaatatacaataaataatttttagcaaaactgtacccctacatacttatgcataggacatacttatactagaaaagcactcatttttctgaaattcacatttaacttggcatcccatatttttatttgctaagtttagtaatgctacctacactgatttctgctttgggatacataatgagtgataattt

SEQ ID NO: 453927 - DNA, 404 bp, Homo sapiens
actgacattgctttcaattatattaattgaaaattaaattggtaaaagtgtaacttttgatgacctaataaatgaatttgcagaaaattaggtcagaaaattgcataattcgttgatataatattactaaattattatttaattaaaattataccaatatattattgtgatttgtaagtttgtattgttactcgtgtattattattattcctgttatgttttacaartaacaaaatgtttttaaagaaaaaacgttctcttttagcacctttataacatttttccctaattttttcacaaggagccctacattcttattttgcacgggaccctgcaaattatgtagccggccctggatggaatacagtttagatttttgccagaaatttgctgagttctattta

SEQ ID NO: 453928 - DNA, 523 bp, Homo sapiens
aagtgccaggaagtattcagagttagtcaagcatcataggaaaactctcctttatgtctatttctcactcaaagttattcaaataaaaggaaacatattaaaggcacttagataaaggaaggcatagtaaatattcttgttccatgaaataccatcttctaaccaccttaacagatgcaacagttgaacaatctagctgtgctccgctgatattagaaatactgtggtctgagccaaaggaccagtgatggcatcaggaattatgtcactggctatatcctatatatatgtttaccagataaaatacatgatatccagctaaatttaaatttcaaatatacaataaataatttttagcaaaackgtacccctacatacttatgcataggacatacttatactagaaaagcactcatttttctgaaattcacatttaacttggcatcccatatttttatttgctaagtttagtaatgctacctacactgatttctgctttgggatacataatgagtgataattt

SEQ ID NO: 453929 - DNA, 523 bp, Homo sapiens
aagtgccaggaagtattcagagttagtcaagcatcataggaaaactctcctttatgtctatttctcactcaaagttattcaaataaaaggaaacatattaaaggcacttagataaaggaaggcatagtaaatattcttgttccatgaaataccatcttctaaccaccttaacagatgcaacagttgaacaatctagctgtgctccgctgatattagaaatactgtggtctgagccaaaggaccagtgatggcatcaggaattatgtcactggctatatcctatatatatgtttaccagataaaatacatgatatccagctaaatttaaatttcaaatatacaataaataatttttagcaaaactgtacccctacatacttatgcataggacatacttatacyagaaaagcactcatttttctgaaattcacatttaacttggcatcccatatttttatttgctaagtttagtaatgctacctacactgatttctgctttgggatacataatgagtgataattt

SEQ ID NO: 453930 - DNA, 599 bp, Homo sapiens
gggttaaaaaccactctcatccagtcgacrtggctcaggcctgtgatctcagcaccttggaaggccaaggcaggaggatcacttgagcccaggagttcaagactagcctaggctacacagtgagacttcatctcaatcaaacagtcaatcaaccaatcaatcaatcaatagaaaagcactctctaatagaaatataaggcaagccacaaatgcaagccatatcagttaagattctctagtagctatattctaaaaagtaaaaacaagtaaaacaaatgaaattatattttttaacccaatatactcaaaacattatttcaatagataaggaatatgaagaaattattagtgtaatattttacattctttctttaatattaagtctgaaattcagtatgaattttacatgtacaccacatctcaattcagactagtcacagttcaagagctcactcatcacatgtagctaggggcctccatattaaacaacacaggttacaagaactaaaaagtaccaaatgtgtgactcaaaattacacctaattttggaatctaattttggaatatattttctgaatataattagatataatcctctg

SEQ ID NO: 453931 - DNA, 599 bp, Homo sapiens
gggttaaaaaccactctcatccagtcgacatggctcaggcctgtgatctcagcaccttggaaggccaaggcaggaggatcacttgagcccaggagttcaagactagcctaggctacacagtgagacttcatctcaatcaaacagtcaatcaaccaatcaatcaatcaatagaaaagcactctctaatagaaatataaggcaagccacaaatgcaagccatatcagttaagattctctagtagctatattctaaaaagtaaaaacaagtaaaacaaatgaaattatattttttaacccaatatactcaaaacattatttcaatagataaggaatatgaagaaattattagtgtaatattttacattctttctttaatattaagtcygaaattcagtatgaattttacatgtacaccacatctcaattcagactagtcacagttcaagagctcactcatcacatgtagctaggggcctccatattaaacaacacaggttacaagaactaaaaagtaccaaatgtgtgactcaaaattacacctaattttggaatctaattttggaatatattttctgaatataattagatataatcctctg

SEQ ID NO: 453932 - DNA, 597 bp, Homo sapiens
gatcttcatttgaagtctttgttcttattattttcattgaggattgttttaaatttttttatcagttctctgatttcctaaagaatttgatggtataattaattaaacaatttattatattaccttttctgtggcaactagcttagcctaagatagtctcttgaaattaagaaatcttaagactgaagtcggctaggcttgtttttctggaatgtctgtataaaataatctccatactattagtttctgatcataatatttgggaggagcctataaaccttctccaagccctgatcttaaacacagaaaaaaaaaaattctatttttcagaactagagaaatccctgtcatttaggtatctttcttctgtgttgtctctgagttgtttcctgtcctaattccttgtgtcttctctgaattctctcattgttacagtatttctattgctctgagacatgaatttgtgcttggtkttgttgatgtgaaaggatgtgattcctctctgggttaggcatgtagttttgctatggtctttttgttaccctctaaaattcatgcgttgaaagctaatcccaaaggtgatggtattaatatatt

SEQ ID NO: 453933 - DNA, 560 bp, Homo sapiens
aacaataagtgaagttcctcaggttaaaagcaagtgacatcagacaatgatttgaaaacacataaaaaatcaagaagcaccagggcaaatattgtatgattatattatattatatgaaatattggaataggtaaatttatggatacagaaaataggcagctgtttgggcagacacctagctagctgtagaagtattttccatatcccagtggtgtctggaatrccagcaatacagaaccatacattctcctggaagcggggctgaagccagagagccaagtggtctagctcagaggaacccacctccacggagccaagcaagctaagatccactggcttgaaattctcactgccagcacagcagtctgaagtcgacctgggacaagcgagcacggtgggcttgagtaggcagggtttcccctcacagtgtaaacaaagcaactgggaagttcaaactggacagagcccaccacagctccacaaagctgttgtagccagactgcctctctagattccttctgtctgggcagggcatctctgaaagaaaggcagaagcccca

SEQ ID NO: 453934 - DNA, 478 bp, Homo sapiens
ggtgggaggagtgttagaatggaaaatctacctattggttattatgctcattacctggtgatataktttggctgtgtctccacccaaattttgtcttgaattgtagctcccaaaatccccgcgtgtaatgggagggatctgttaggaggtaatttaattatgggggcacaattttcccgtgctgctctcaagataataaataagtctcatgagaactgatggttttataaagggcagttcccctgcacacgctctcttgcctgctaccacgtaagatgtccctttgttcttccttcattgtctgccataattgtgaggcctccctgcccatgtggtacttcaagtccattaaagctctttcctttagaaattacccagtctcacatatgtctttattagcagcatgagaatgaactcatggctaatcaaacaatctgtacaccataccactgttacaggcaatttactgatgtaacaa

SEQ ID NO: 453935 - DNA, 478 bp, Homo sapiens
ggtgggaggagtgttagaatggaaaatctacctattggttattatgctcattacctggtgatatagtttggctgtgtctccacccaaattttgtcttgaattgtagctcccaaaatccccgcgtgtaatgggagggatctgttaggaggtaatttaattatgggggcacaattttcccgtgctgctctcaagataatraataagtctcatgagaactgatggttttataaagggcagttcccctgcacacgctctcttgcctgctaccacgtaagatgtccctttgttcttccttcattgtctgccataattgtgaggcctccctgcccatgtggtacttcaagtccattaaagctctttcctttagaaattacccagtctcacatatgtctttattagcagcatgagaatgaactcatggctaatcaaacaatctgtacaccataccactgttacaggcaatttactgatgtaacaa

SEQ ID NO: 453936 - DNA, 478 bp, Homo sapiens
ggtgggaggagtgttagaatggaaaatctacctattggttattatgctcattacctggtgatatagtttggctgtgtctccacccaaattttgtcttgaattgtagctcccaaaatccccgcgtgtaatgggagggatctgttaggaggtaatttaattatgggggcacaattttcccgtgctgctctcaagataataaataagtctcatgagaactgatggttttataaagggcagttcccctgcacacgctctcttgcctgctaccacgtaagatgtccctttgttcttmcttcattgtctgccataattgtgaggcctccctgcccatgtggtacttcaagtccattaaagctctttcctttagaaattacccagtctcacatatgtctttattagcagcatgagaatgaactcatggctaatcaaacaatctgtacaccataccactgttacaggcaatttactgatgtaacaa

SEQ ID NO: 453937 - DNA, 478 bp, Homo sapiens
ggtgggaggagtgttagaatggaaaatctacctattggttattatgctcattacctggtgatatagtttggctgtgtctccacccaaattttgtcttgaattgtagctcccaaaatccccgcgtgtaatgggagggatctgttaggaggtaatttaattatgggggcacaattttcccgtgctgctctcaagataataaataagtctcatgagaactgatggttttataaagggcagttcccctgcacacgctctcttgcctgctaccacgtaagatgtccctttgttcttccttcattgtctgccataattgtgaggcctccctgcccatgtggtactkcaagtccattaaagctctttcctttagaaattacccagtctcacatatgtctttattagcagcatgagaatgaactcatggctaatcaaacaatctgtacaccataccactgttacaggcaatttactgatgtaacaa

SEQ ID NO: 453938 - DNA, 472 bp, Homo sapiens
acttctgaggcatgtactgctccctaggctgtcgttctgttttcatttggctgcctactttttactctgtcatcagagctatttttaggcaccttacctggcagaggaagaaaaaaaattgatgcatttatacaaatgtgcattgatattttcctgagttttctggtgggcagaggagagaggagaagctggagcagaagaatccaagtggggtattaacaaagaartacgaatctgaaacccagtggaggtagctaaattcagacacctgagatagagggagtggagaagagagaaaaaaaaggaaggggagaagaatggaggaggaaagatagaaaaaaaaaactggaaagaccaacacattttgggctcagtggctttgaaaatacggaaaatataagtggcccccttgatctctcttttaccctttctctatagtcccttcttcatttctgacttccttggctcatga

SEQ ID NO: 453939 - DNA, 571 bp, Homo sapiens
caattgaaaggagccttaaaggctctctagtccaactcccatccaatatttgcatctgccctgcaacactgtggcaattatacacacagccttggctcacatacctctagtaatggtgaatttctgacttcatatattcatcactcaattgtctgtctttcagtagtggaaatgtttccattgtgttaggcattaatatattatctgcttatatactgaacaaatctctctcaaracttcactatttcaggtcctgtatactgtgctaacatttgttaaagaatagaccctcaatagatctacttttaatcctagttccatagggctgtaggaattatttgaagcacttttcataaacagctaatctgacattttaaaaaaacattcatgtctcttgtctctccataccaccatatccaagctgaaattctccagagcacagttgtattgcttggggcactcatattcactctccaacgaaccagctcctgtttttctgtggtccagaaccaaactcaaagcacagcgaggtgcagagtaaagaggagctattaccattgattatagcaac

SEQ ID NO: 453940 - DNA, 623 bp, Homo sapiens
tagccgtttagttggggctcagtcagaatctgaggattttgtggctgaaatgtatagtgaatgacctgggtctggccggctgtgtgacgcataacagcatacattggatgactcatagaagtcagggatggaaaagacctattaggtcattttttccatcttccagctattgcaggtttrctctctgccaaggtaggattatattcaaatatttagcccagtctagttcgaactgattcaagtaatagggctcccacaacctcccctgggatcttaattccacaggatcattgatttcaatcttcggaaaatgttcctgatgttcactttaaattttcctttgctcaatttcatcccattaatcctacttattaccccttaggccaccctaaataatatcccttcttctttcatgttgacgttcctccaacactggtagggaggagacaggggaatacaaaaatgtcttcttggcttggctcacagtcttaagtataaaacaaagaatagaaatgttccaaataatagcttaaaatgttggggagactatgtgtatcagatgagaaagggttttccagattgcccaagaatagttcagacaatcaatggcaggtgtttctggg

SEQ ID NO: 453941 - DNA, 623 bp, Homo sapiens
tagccgtttagttggggctcagtcagaatctgaggattttgtggctgaaatgtatagtgaatgacctgggtctggccggctgtgtgacgcataacagcatacattggatgactcatagaagtcagggatggaaaagacctattaggtcattttttccatcttccagctattgcaggtttactctctgccaaggtaggattatattcaaatatttagcccagtctagttygaactgattcaagtaatagggctcccacaacctcccctgggatcttaattccacaggatcattgatttcaatcttcggaaaatgttcctgatgttcactttaaattttcctttgctcaatttcatcccattaatcctacttattaccccttaggccaccctaaataatatcccttcttctttcatgttgacgttcctccaacactggtagggaggagacaggggaatacaaaaatgtcttcttggcttggctcacagtcttaagtataaaacaaagaatagaaatgttccaaataatagcttaaaatgttggggagactatgtgtatcagatgagaaagggttttccagattgcccaagaatagttcagacaatcaatggcaggtgtttctggg

SEQ ID NO: 453942 - DNA, 620 bp, Homo sapiens
tttaattcatttctctcttctcacattttactgtcaagagaagccatgctataccctcaacactttgcttagctatttcttctgccaaatattgtatttcatcacttggaagttttaccttccacaaagcactaagacatggacaaaatttagccaagttcattgccactttataccaaggatcacctttcctccagttttcagtaacatggtctttatttctgtctgagacctcatcagaatggcctttagggtccatattgtttatgaccacttgggtaatttctaaggggactgaagtctcttctacaactctcttattctgagcctccaccagaactgtccttaatcctccattcacagaaatctaggttttttctagtatgcacctccaaactctttcaaacccttttcattacccagttccaaagccacttccacatttttaggtatttgttacagcagcacctcacttctgtctcagtctgttcaggctattataacaaaataytccagctggggaatttataaacaacagaaatgtgttgctcacagttcttaccatgggaagtctacatcaagagcaaagtgccagcagattcgatgtctgcagagggcct

SEQ ID NO: 453943 - DNA, 590 bp, Homo sapiens
gagtgatattaccatattttaaaagtaaagtgtgtggtaaatattgtagttcagagaagcaaaagaataaaatgaattagagtcagggtaggctccacagtataagttaaaccttttcagggttagtaaaaatcttattaacaaaagcctattctttcagtttcacgttttccagagagcagggtaattaaggaggaaggtacccacttttaggtagaaacctgggtgtttaaggaagtgattaaaatgagtctcccggaactaccagtggaccctagcactcttccagctttattggtgcccatcagtcattcaaaatctgcccaggcctctaaaactgttcttattaagattagacctgagtgaatmcacaaacataaaaataagactaatgtgaacctttgccgaaaatgcaaatccaacctaaattgccgccctgttttttaggttaaaaaattctggccggttatttttttttccaaattaattttggatcataagagtctattagctggtttttgctggcaccacactgctgaaaggatgacaagaaatagggagccttggaaattgtacatgtctgccctaag

SEQ ID NO: 453944 - DNA, 465 bp, Homo sapiens
gttgttcacagggcatctgggacctctttttcaaggtcaccttctcctggtctgaaaccaaaatgaaaacaaatagaatccaagtgtgctgtagctcctgacatccctccgtgggctcsgccagcccctgcatggaagcctccacatgggttcaccaggctgttcttcgggctctcccaaagtggctgcttttccgtcaatatgaatggcatgactggccacatctcccttttttcttcgggtgccaggaagcctggactgttgagctaactttacggtccaaccatagcaactatgtcagtgtgcagataactgaaggtgcctttccctccctggcttggcttctcctcttacttctcttcccaagctctcaatttgctttatttttgcatctttaaccacgacattgtctctctgtgtgtctttacataaaacttgagttactccagttctgccaatctgtgt

SEQ ID NO: 453945 - DNA, 568 bp, Homo sapiens
tcatatcccttacttttccttaccttaaacaattttaggagaagagacagcaagcctttcctagaaagctgtttcaactgatattccttcctcctgcatctagcctaaaactatcctgctataaagaacttgcttatttttatttgctccttagtgcagaaaaaaatgagtttgccaatatgttttatattcaaatctttcatttttttcttctaacatcaatcaacagtatctacagacattcaattatgggtccagcagtcccctttccctcagttttatgcctcatttctaaaacttttgataatatttgtcatttttattctaaatcttctcaattttcctcacagcttgcttaaaatatgaatccacaaaagctagacatacaatggtgagaacattgggaaaaagagcttgtgtgtttcagagaggcctagattcccttttattggtaattggaaaaaagaatattgatagaggaagctccatgcagtggagaggggctcacatccataaagaaagggtaagaaattcagcrttctccaaaatgtctccactgggatataat

SEQ ID NO: 453946 - DNA, 621 bp, Homo sapiens
tgcttatttctaatcctgtaaatatcattgaccaaattctatgaaacaaaaatccaataagatactctgccaaaaaataaaaggaggaggggttacatttaaaaatgtgagaaagtccacacatcatcctcatggaaattcactacacacattagcagattgtaggctctgagaagtaccacaaagaaactagttttactgtttaactcaaaaattcaaaaacagttcctttttcaactactattaactgcctatagagatcctctgagaaaactgctagattataattccctgtagcatacatatatatatatatatatatatatatatgcacacacacacatatatatatatgcaacacaggaaatatatatataygcacacatatatatatgtgcagcacacagaaacttgtactacctcatccatgggatccatattataagacagaattacagtgaagtccttttgctatatctggttaaaactaaaaaagtaaaagaaaaatgaaaatcttggttagggctccagaattacctgtatcaaagtgaatttttggtacattagatggtattcacaaggctcctgtatatttgcctagagtcaaagtacaaacaggga

SEQ ID NO: 453947 - DNA, 588 bp, Homo sapiens
ttataatgtagactcttaataaaaactgattaattagccagtgggcatagtttaaggaaatgctgcataaagacagtggaaaagtcatttgatttgggatctaagacctgggttttagtcctaggtggtataatctttctccattgttttagttttttttttaatcccccaaaggcatgatccaaaatatttcttagatctaaagttctatcattccatccaacatgtaatggtcatgattttcaccggatcttgcatcagacataataatggacctcaaagatgttcatgtcctaattcccaggacatgtgagaggaactttgcagatgtgattaagttaaggatcttgagaaggggggattatcctggattatcmagatgggcctaatgcaatcacaagggtccttacaacaggagggtcacagtcagaaaaggagatgtgaagcacaggttggagatatgtggctgctggctttgaagatggaagaaggccaggagcccaggaaggtagtctgcccctagaagctagaaaaggcaaaagacaagattctcccctagagcctccagaaggaatagccctgctgaca

SEQ ID NO: 453948 - DNA, 556 bp, Homo sapiens
  misc_feature (1)...(556): n = A,T,C or G
catttaacctaccacttctccattcctatcactactttatttcagaatttcaatgctttttgcctggacaattgcaatagcttttccccattctcctcaactctgaacacctcccccactgatttttatctcactgctccatttctttttgaagaacaaaggtaaaatgcctctctcctgctcattaacatgtccctgacccctgccaacaaatttatcttgcaaaaataattaaaactcctaacctgtcatctaagaccctcctgccccccaagttcaggctctaaactaacatgctagtctatacccttttctataactattttctagacaaagaaaagaatcaatattccccaaacttaagcatgattctgcacctctggaaatctgtttataattccatcagcctggaagtgttctccacatccataaatccaaaacctccctgtcattcatagtctggcctaggaccaccctmatctccatagtcagaggcaaagtcttactctaatctccaagaagaattctctgaactttttcaacaaaattactgnnn

SEQ ID NO: 453949 - DNA, 584 bp, Homo sapiens
tgtgaaggctacaagtaagggtttcctgctgtaggatggaatgaggcttctgtacatcttttttgccttgtgtgttctaactcaaagaactgtgccctgatctcttaaacagatttgatgaaaatctttcatctaagtagcaaaaggacaagctttcaagcaaatattacagaagaagggatcataagtggtagagtgtcatggaaaaattctagtcctaaatttgtttcagaagagcagggtgaccttggggaagtcacttcatcaatctagatcttcattttttcagctataaagtaaaggggttggattaaatgatcttttagttctttctcaaccagatattaaatgatttttcaagttgctcattaaatttctaggctccatcaagcagttcattatgtaccctacttgctcacttgatctgtatatttttcatccartttttcagtctagatttccatttggtacattttcattagcactgaagttttttgagcatctctttaggtgatctgtccctctctatctgtgtgtatgtgtgtgtgtgtttacatgcatgcatgtgcatacaataggacatt

SEQ ID NO: 453950 - DNA, 506 bp, Homo sapiens
atctaaaacttactactcaaccaacttggaatttttggcagtttttcttgtaaaatggctgtagattacattagcgtgaacattcagaatgttaacagtattcatttttcactcagtcgacaaaattttactgagcatctactttgtctcaggcattagtctaagcactaagcagtagtgataagtgaagacaaggtcctttctctataacaaacaagaaattgcagacaacaataaatgttacccagaaaataatacacaataatggagtgtcagggaagggagtttcaattctatttgggtagctaaggaaagtctcactgagataacagttgagctgaggactatatgacaagaaagcttgttctgtgatgatctggggcagaaaaaaaagaaaaaccattaggcagagtgattcaaaagttagtaaagagtaaaggctttcccaaaaggagccyggtgaatacaaagcatctactgcacaatttaattctaccacaccacta

SEQ ID NO: 453951 - DNA, 562 bp, Homo sapiens
taattcttctgtttctactcctcagttcctccatccttaacccacaaaaggttacacctctcagcaacatccatctgaagaatttatactctatattacaaattgttgatggttatcacttacataagtgatcttttcctgctgcttcttgaaaagagaaagtaggatatttgctttactaggtggaatatgtaagtttttttacatcaatttttttgtgcttttacacaaactagaacatgggagcaaatsacttgtttctttgtgcttttgctgctacttactgagggaattccttaattacttccttccttccttccttccttccttccttctctttatcctatatgcacatggtagaaatttgggttaattaaaagggagttagatatacctattaccccaaataggacactcccagtgcatttgtattacagcggcttgcaaaataaatgctggggtttttttctgcatgcagaaattaagcaacaggattatgtttccagctatgttaactgccagtctataattatcagggcaacatctctccacagctcatctt

SEQ ID NO: 453952 - DNA, 562 bp, Homo sapiens
taattcttctgtttctactcctcagttcctccatccttaacccacaaaaggttacacctctcagcaacatccatctgaagaatttatactctatattacaaattgttgatggttatcacttacataagtgatcttttcctgctgcttcttgaaaagagaaagtaggatatttgctttactaggtggaatatgtaagtttttttacatcaatttttttgtgcttttacacaaactagaacatgggagcaaatgacttgtttctttgtgcttttgctgctacttactgagggaattccttaattacttccttccttccttccttccttccttccttctctttatcctatatgcacatggtagaaatttgggttaattaaaagggagttagatatacctattaccccaaataggacactcccagtgcatttgtattacagcrgcttgcaaaataaatgctggggtttttttctgcatgcagaaattaagcaacaggattatgtttccagctatgttaactgccagtctataattatcagggcaacatctctccacagctcatctt

SEQ ID NO: 453953 - DNA, 558 bp, Homo sapiens
ccaaatgactacatttcctggattctcagaattatcaatataatgtgttttgtcaatcaaatttaatataactttcagatttaaaaggaggtattatggaaacaatgaaatacagtacatttcccttccaaacatagccaaatcattgtcattgctattatagaaagttcaataaacatcccttatatactaaacagcccttaaattattttgagatataatctgacctagttggctatattgtaagatacatggtctgttgttcacagagtcaactttctatactataacatgcctgwatctatcaacaatagactctcttgtatctgcacatcaacttcttgtaaggactgcagagttaaagcaattacccataatttttacaatatcctaataaagtagatgtatgcttgtgcattctaaatcgctttttctcccagaggaagattaaacaatttagacataacatcaggcatttgtatggaagtcaacatttcagagttttcgcatgttctcatttgttttgcataactctgtaacgtaatgtgcttcatttgc

SEQ ID NO: 453954 - DNA, 577 bp, Homo sapiens
tttcctcatttgccatcacagagaacacttttttttttcttttaagatagggtttcactctgtcacacaggctggagtgtaatggtgagatcatagctcactgcagcctcgaattcctgggttgaagtgatcctcctgccttggcctcccaaagtgctgggcttactgctgtgagccactacacctggccaagaacaatttctaatcctattttttttattttaaaacacactgaatagctaaatgccacttaatatggaaaccggatttcagtttgctatatgacgaagcttcactacacatgtattaaaaaggcagcatgtgtaktgttgagtgttgacaatgggctcaggctgccaaggttcaaatcccaactctatcacatatagtctttgtgaccttaagcaagtagcttaactgctttatacctgcttgtacatctgtaaaaatggagggtagtaatagtaacctcacaggattgtgatgtgggttaaatgagttttgttcatgaattatttagaacagtgcttaccacttattaaatattcactaaatatgagttattattatatttgta

SEQ ID NO: 453955 - DNA, 559 bp, Homo sapiens
ttatcttacgcatataggcactggtcaaaacttaagatatcagaagagcatatttgtttcttactataattagtgttttattccatttcagctgctataataacaaaataacataaactgagtagcttataaacaatataaattgatttcttacagagctggaggctgggaagtataaaattaagatatcagcagattcaatgtctggtgagagcccatttcctggttcatagatggcgccttctttctaggtccttacaaagtagaaaaggcaaggcagctctctgaggcctcttttataagggcactaatcccattcrtaagggcccagccctcatggtttcatcacctcaccataaatcctatatcctaatagcatcactttgggggttaggatttcaacagaagaatttagagagaacacattcagaccatagcagcaacaaaacatcaaccctggagagaaagactgactactcattctctgactctctgattgcagcacggtgccaggcacaatggtgattaagacagctgctccctgttctgtgtggacact

SEQ ID NO: 453956 - DNA, 659 bp, Homo sapiens
ttttcacagaaaatgttaacctatatattcatggggcaggttatttctgctttatgtcctctatcacaacagtcacttcttggttatttctgctaatggtgaagaggcaggaccaatgttaccccaaaatcctgcataattagttctagcatatgtaacactttgaacaacagatttggcttcccacttaggttttgcttggctttctagttctagtgtttttgttgtttctttgtcatggattgttttatctttttataattttaccttttctggactggttgtttaacacaagacaataggcttctgagcctgagtaaagccagcctcaggtgagaaaccarctacagataacctacaaaacagattgcttacaggtaggaagaaagaatggactatttgtggatcaactaacaaaatcatttagctcctggcaccctggatgcaaaatctccttccaagacaccaatgacaacaaatggaccaaaagctgaaccttaagtcagcaacactacctccagtgaatctgggaatatgcttttcaagatgacagcatgactttatattcagcacattatttgccttatacatttattcccatcccacaggcctgaaagggggatgcttgaatctcacttagagccaccgctcattaaata

SEQ ID NO: 453957 - DNA, 563 bp, Homo sapiens
aaactgtatcaataaaaacacatacacacacataaagaaggatgttacactctgttccctgcacatgagcacatcaccacaggttcattgtaaaaatgtgaagtgaatctaggtatacttcttactttccctagcaatagctgcaatgttagtactaaaggctcatccaaaccctgaaaattaacaacaaggaagaacaccatttctgatttgttggaaggtaggggggctactgtttgtgattccaatgtgattaaaaataattttccattggttaatattgacttttttaaaatgggaaaatatgtatcttagttcacagtattttccttatatctttcttactcatatattgggttctatttcaacacatgcttaatgaaaaaaatttcaggaagcttcagtgatcctgtttaaaacaaacttgacaaagcmtgcagtagcacttgtgaaacactacatgtgtttaagcataaaatgagttccccagcacaggtcaaaatagtgtttactgacaagactgcacgataacaaagcaagacatcaaaatgtttacttaccaa

SEQ ID NO: 453958 - DNA, 537 bp, Homo sapiens
ggctgttttattaaactaaaaatattaatgtctcattggtraagctttgcctaaattatatgagcttgaaaccttaaaacttttctgagttagtttttagaaggacacttttaaaatttagcacactgaaagtcttagaatttctggcaattttaggaatattccatttatgagcaataatttacctctaagccaattagaacagaactttaagagattttataatcaaatttggtaaaaccatctagaagcaggaaaatattgtactctcatacaatgagaggtaaaagcctttctgaaacacagacataaacatataaagagagagaaaaagtttatagcctcaactctaaaattcagtcatgggtcaagcataaacacagaaatacaaaactcactagtccatgttaaagagctattctcatctcagtgggtacaagctcttgattgatttgtcctcaaaattgacatgtaggcaaacacaaaagactaacacactagagtttctaacatctttcacccaacaaagacaagatc

SEQ ID NO: 453959 - DNA, 498 bp, Homo sapiens
ctgttaatcttagggagtattccctgtacataagcctcttctatcttgatgctttcaagaatttctgtctttcaataggcattttatgatgtgtataggtgtggacmtgcttgagtttatcctacttagagattttagagtttcgtacatttataatgtttttcatcaaatttgggaagttttgataattatttcttcaaatattttttcttgcttctttgttttttcttcttcttttctgagatttccattatgcacatgttgccatactcagtgatgtcccacagtttctgaggctctgttaatttttctccaatctttttactttttgtccctcacattgcataatctcaattgacctgacttcaagtttactgattctttcttttgtcagttcaaatctgccattgagtcccataaccacttcagcttttgtacttttcaactgtggaatacttatgtatattgattctcatcattcttatgcttttctttagt

SEQ ID NO: 453960 - DNA, 594 bp, Homo sapiens
gcgtcttctcttgagagttgacttctccccttccactcccattttgattttgatcaacacctttcacctactgcccaaggacagccatcaccaaagctcacagacagcctctgttctccagcataagaatgtttacatgcatttctacaggctgccagcatccggactacttcatcagaccagcattccttttgatttgtttaagtgttagaaaaagcttgtctagcacatgcttttcaaaacaaggaccatacttgtaggaaggatattctcatgtggaagaaattcccacagggtacagatcagttgggaaatctacccaaaattatttctgtaacttgttcacttttttccactcctggctaaagatagaaacaaaattttagggattagccaactgatatattttaaaacaaaaatttaaaacaaacaaagctgagagtatgggtgtcataaggatgctaactttcrgtttctcatcattgactctggagaacagcatgtcacacatcagattttatgtacacttgaagctcctccaatttatttctcagttagtctcacatatcagctcttgttctgaataaacacaga

SEQ ID NO: 453961 - DNA, 656 bp, Homo sapiens
tttaagtctaaatatttattccattaaaaaacctaaatttttcctaggctgattttcaaagttctagtctgcatattttattgtcaaattcattgctctgtggttcattctgacaaatatcattcggagctccattctattttagataagtgtaatctattttttagtttttaatttctatgctaagtaaatagatatattcctctgatagtaggattataatgtgcataatttgtctgtaaaaggagttgtmacatttcaatcaaacaataatattcaccagtctatcttgtttgtatacttaatttctttttatcaactgtgatccatagcagctcagaaacatgctttttcacctgtctcctacagtgccttgcatataactcatctgagtttattaagtgtaatatataaatatatatataatttttttcatagaggtgtggttttggagataaagctggcaacaacattgttaaccatttatattatattagggatgtaatagctcattaaatttgagctatcctctttaaccagatatattatcactttttgatgtaaagttttattaacaagaaggctaattttgttaaatgaaaagcacttccaagttcagagatttttaattgttgtcatctaattttacaatcatc

SEQ ID NO: 453962 - DNA, 580 bp, Homo sapiens
aacaaactaagtagctgaatgaacccccaaatccatgtttcctttattataccatactgttacattcatttttgctgggttttctttgttttgatatgatttwgttttatcataaatagtatttccttaaaacttcccatttattgggatataggagctcagtttttgttttttttaaattacctctttcctctgcttttaatagggaaaagtgatgtataggggaaatggtatccactggtgtccaaaggagcttcactgatctttgctcttggttgctaaatttgtctaattcttgacctgtaagacttgtcatgcctgccttgtgtgggattatatgtaggtgccatttcagagtccagaaccacagacttttgctgtatatatccaagttccaacctctgcaagtctatttgtgctaatccaaaggcctccctgtgttccttgcacttccatgcctctagccagtcaccagcgattatcttcctctcttttatacacattcaggccatggggatccaggaagctgctataaaatcatatatttagctatatctacttgtgatacaccattatccca

SEQ ID NO: 453963 - DNA, 618 bp, Homo sapiens
tatactgtcactgtttataaactaatgaataaaatccacttgaaagttatagtactgataatttagagggatattggaaatactaattttgtcatatgacatcatttataagggactgtcaaaaagttggtactcaatatttatatactaaatgaaagaattctacagtacattttcatcatgtactaaattattcrtatttattcatattttcagcctggcaaggaattgcagtggtggtgaagtgatacatttatgtttaaaaagccagaaagattaaaaatagaaagttaattaaaccttaatattctcacacatttttatttgatataatttaacaacctataaactaatctttatagtatgcactcttttgtatagaactccactatgaagtaatttgtgttaggtgatacctcaagacaaaatgatggcttttctaaaacagccaatagactaatgtgcattagtttaaagccactgaggtttggaatttctagaaatgacctattagactctcatgaaggaaagagaatgataaagtggcaagaacatcaaattgaaatcataacttgggcttaaggtttctcccattattaactctggggaataatttca

SEQ ID NO: 453964 - DNA, 540 bp, Homo sapiens
gtttaaatatcataatttatatagtaattacacgtgtggagtatgcacatgtacacaaaataaattatatacatatgatatattgaatatgtgtacatatagaatatatgtacagactatatacatttgatacatataccatatgcmaactatgatgtatgaaatatgtacatgtatacatatgcaaactacaaggtactacataatatatggctaatgaaaacattcagtcaacaaacactttcttaaaatattactcttaagttaaaatcatagaagataaatgagactccagatagctggagctaaagatacaggtatagacatagagatttagacatagatatataagtaagtagaaatacataaatcatatatgtggatatatatctatatgtttgtgtatctgtatatttttctctatatatacacacacatatctgatttcaaaattttaatttaaaaaatcctatctttgatcatactctgcaagcaccttgtaaatacttggtttagttaagacgtgtagtgggaaagctg

SEQ ID NO: 453965 - DNA, 502 bp, Homo sapiens
acttcacatctcagcattaacagaacttctacctctaacactgagactcaccatctctttcttccaagagttactactgttttgttagttgctacataaagctctgactggcatcagcctatttctcctgcagaatttcaaggattgtggaaaggccatatacaaatgcattagaaaaatatgactaatttaatgaacatggaaatgaatacacagtatacatacaaattagcttaaggatgcataaatttataggtaagtcaatgaatgtaagttaaaatagcatcatataatttggaaaaaatttaaaaatattaataatttccagtattacctttgtcaaagaaaattatcagaatttttttaaagttaaaatttcatrtatttctaaactcaaaaatccatagctaagaatgtctcctacttgctagttaaagaaataattagaatacatttatttcaacaaagttgttactagccaaaacttaaaacaacctaatta

SEQ ID NO: 453966 - DNA, 624 bp, Homo sapiens
tcttatgtcttatgactcttctatggtcyaggcccttgctatgccagggaagtttaaaaatcttgagaggagtaagtctgttataacagatattctttcactcttccatataattgccctccatttactgcttcctctttcctttctcttctcttttcccttttatctttttcaatgttttctcataactttttcttttcctttccattctactggcattacatcttagctcctgtggtgggtatgcagtatttgtttcagtttaaactacatgcaaagcatttcaaaaaatactgtgatgaaacatactgcttgataatttaattttgttctaaaaatagttattatttggggacattttaaataaagctagtcctagtgctaatttctttatatttgtgaaataactttgataagaatatcttatttttaataatacactctaacaaataaacactttaatgaagaaaaataataggttaattgatgtcccaaggcttcaaaattacttagtcactacatatgaaatagaacttagattcccagctatccctcagcctgtgatctctctgctacattgttccatgagcactaaagctaagctgaatcaataaaatcattaaa

SEQ ID NO: 453967 - DNA, 624 bp, Homo sapiens
tcttatgtcttatgactcttctatggtccaggcccttgctatgccagggaagtttaaaaatcttgagaggagtaagtctgttataacagatattctttcactcttccatataattgccctccatttactgcttcctctttcctttctcttctcttttcccttttatctttttcaatgttttctcataactttttcttttcctttccattctactggcattacatcttagctcctgtggtgggtatgcagtatttgtttcagtttaaactacatgcaaagcatttcaaaaaatactgtgatgaaacatactgcttgataatttaattttgttctaaaaatagttattatttggggacattttaaataaagctagtcctagtgctaatttctttatatttgtgaaataactttgataagaatatcttatttttaataatacactctaacaaataaacactttaatgaagaaaaataataggttaattgatgtcccaaggcttcaaaattacttagtcactacatatgaaatagaacttagattcccagctatccctcagcctgtgatytctctgctacattgttccatgagcactaaagctaagctgaatcaataaaatcattaaa

SEQ ID NO: 453968 - DNA, 436 bp, Homo sapiens
tatcatgattgaaaggcatgttggaaaagaaggtatttttgactaaagcggtctttaaaatcacaaaacaaacgctacttgccctgctttcactaaacatggaagggtgttttgttagtttattagtttcttctcttctgagagacactaccaagtgcttcgaatactgtccttatttgagttagtaaattgccaaaatactgtatttcagtgttaatgattttatttattttgatatgatatctgaatgcaattagtattgaggcagcagatttcccatacatctaactagagattaaaccattgaattygttgaacctcactctctggggttaggaacttagtgtcctataggaaaacaaatcttcgagtttcctaaatagaaaaaggagttcacatttcaatgtagactggcatgtctttcttaaatagaaaa

SEQ ID NO: 453969 - DNA, 574 bp, Homo sapiens
attatcaggccatatcaactcaatacttagaaaataatatcaactgatataactacctgtttttgccggtggcaatgtcaaaatcattggcaggaataaaataattgtgtagattggatccataatcaagcttttataaaacatttttttcgtttttgtagagacgaggtctccctcattgcccaggctgatcttgaactcctaggctcaagtcatccttccaccttgggctaccaaagtgttgggattacaagcatgagccactgtgattggcaaagactttttaatatatgtagttgctttaatgtttacagaaactccatgatcctgaccgaaagagaatggtaaatgagataaaattttaaattgaarcatccatttattatcttctttgcctcttttctacacaatgagatcatggattttcttttctgaaatttttttgatgccctagtctttattgttctccccattctcagaactcctgaagtcagatatgaatatcttgtcttacactgttctctgctaattaaatacctcagaatgtagtcttcaaagttgtactatatgtttt

SEQ ID NO: 453970 - DNA, 632 bp, Homo sapiens
ttggacacagtcttaatagcgagttagttagatggttaactaggttcaaacccctccccaatcaccatagtagtctagaacaaaaagctctccaattaggaataatcagaacagggctgcaacactatgcaacttgtaaacatagccatacctgagacaatacagaaatggttataggacattagaaaggaaaagcatattaataattttacaaaaatcatacatagaatggatgactattgcagattcagctatttgtaagtaatcccaaaggatcagaacatgtaaaattctgatttatttgctgtttggtgaaccaaattcaaatagcagcaaagaaaytgcagtgtataatttactgaaaaataccaatgaatagattgacagtgacacatgtgaagtgggatttgaaacactgaacacagattataccaagaggttgttttacattggaaaaaataatctgtagttaagagagtaaattcaggagttaaaccaacctactaccttcatgacgtctacaactaatttttctatctagtgaggggagaagagcaatcctctttcctagagttgttttaagtattaaacatggcagatgaaaacattctcaatagttgctgacagtaatt

SEQ ID NO: 453971 - DNA, 599 bp, Homo sapiens
tatttcctttttggatttttttttttacttagtggtaaagaatgatttagatctaaagccctatttgtaaaacttagttgtcattttgattttatatatacacacacacatatatatrtgatcacatttttcaaaattattaacatttgggttgtttaaataagaggtgttgagcttcttttaatataggcatattcaaagtaaactttaataattattattttaatctgtaaaaatgaaagtatacagtaatatttttaaatgaatttttgcctgtgtaatggagtcacttattcttttattgactttaggaatataataatatcttattttttaaacatacaaaatcttctctgttttaattcatacatccactgagtgtgtactttgttcaaggcattttggctgcaatggggataaaaaaaaaattaaaatggagtagacccttggcagagacatacagtttatagccattgtattagagagcattagagctctgaaagagacatatagtgttcctgtcatagaaacagcatgtggcaagaccaggaggttagactgtgcatggctgatttcagataatgaaatggagcaccaca

SEQ ID NO: 453972 - DNA, 571 bp, Homo sapiens
tagtaatggctgatcaaatccatgcaacttgccttgctttttatgacttgcctcaagaaagaaccttcttttcccartgctgtttggaatcaaattgagaaatagaaggtgttcttatttcactgcattttctactccatccttctgctcctcctcctaccccctagccatcacttacataactatatttaatgttgcccaacaccttactttctcttttacttggtggaagaattggataattagttgcattaattttataataaattattttttagataatggtatattaattagctcaccccagtctaaaatctaaactttttttttgtaaacagtattattcatcatttggactagcacctaggttttacagtcaaagatcatttgcaaatcctaaatactaactagcttgctctttagaaactgttgcctacctcatttcattggtcattttgatggttcagtaatctatctcttatgttaaacattcaggtgacaaaagtatgttagaattatttaacttcttcaagtgtttactaatctccaaattaatctcgttaatttcatt

SEQ ID NO: 453973 - DNA, 571 bp, Homo sapiens
tagtaatggctgatcaaatccatgcaacttgccttgctttttatgacttgcctcaagaaagaaccttcttttcccagtgctgtttggaatcaaattgagaaatagaaggtgttcttatttcactgcattttctactccatccttctgctcctcctcctaccccctagccatcacttacataactatatttaatgttgcccaacaccttactttctcttttacttggtggaagaattggataattagttgcattaattttataataaattattttttagmtaatggtatattaattagctcaccccagtctaaaatctaaactttttttttgtaaacagtattattcatcatttggactagcacctaggttttacagtcaaagatcatttgcaaatcctaaatactaactagcttgctctttagaaactgttgcctacctcatttcattggtcattttgatggttcagtaatctatctcttatgttaaacattcaggtgacaaaagtatgttagaattatttaacttcttcaagtgtttactaatctccaaattaatctcgttaatttcatt

SEQ ID NO: 453974 - DNA, 478 bp, Homo sapiens
tgatagactaatctgttactaaaggatgatatatgtaattgtctgatataattagcattatttatatttattctataattatgcagagcaagaaatgttttgtagatgcaacatcacatttattttattcttaacttattttaggttcagggatacatgtacaggtttgttatataggtaaatggggtctcatcagagttttgcgtacagatttcttttataatccaggtgataagctagtaactaatacaaaggtttttgaaacccttctcctaccctgcatgctccagtaggtctcagtgtctgtttcttcctttctttgtgtccagrtgtactcgatgtttagctcccacttaaaagtgagaacgtggtagctggttttctgttcctgtatgagctcactgaggataatgtcctctagttccatcagtgttgctgcaaaggacatgatcttgttcatttttatggccgtgtaata

SEQ ID NO: 453975 - DNA, 612 bp, Homo sapiens
cacttgtaagaattgcaaaaataacagtgtcaagtttcaaccagagacaaaatgtattataatctcttctacttctacaggtgtgggcactgttcttttttaaagagctcccctgtgagggaatgttgataataactgacaacacaatggacataattcaaattaatcagcagagttgttaccttccttgaaggatgagatcagagaaaccttaatcagaaaagaccctacctacatggggtcacttcacaatttgcaccaatactgtacaactatcaaggaccaatgagattagaagttaaatctctcaatgaatataagaataagtattggctacaattcctaaaccccagcaagagtcaaaacattatttcaattaagtttactcagaagttatgccaaattcaaagccaaaatgttctattttatatcatatttcaatatttgcctaatcaactattgtccacccaaacttaccagcccagaataactcaaatcaataaataagtaaatatcaatgatataaaattcaccatacttgctttyactctacagataaataactatttaaaacacttaataagatgtcagcagcaatggcagagtaagtac

SEQ ID NO: 453976 - DNA, 616 bp, Homo sapiens
caatacatgattgctaaggcgatgacaaatttgtagcacttcactttcaacataagggatcccaagaaaagacaaaatgcactgctaaaatgggaaaataaccagtttttgccaggcagcagtaatttctgtgacacaacataagcaaaaatatgcagtaaaattggtttgttataaaagaacatgtaacattaaagagatacacacaggaaatgtgtgataaactagtctattatatattggaatttaacaaaaggcagactcatcctgtacgtatccaatgaggtatagttatggagtccttatcctaaggtgacttcatcaataaggcaatgaactagcaagcacctagaggctaatgatgctgtgatgtatcagtgtcttttaaactccattagccgagggcaaaaagaatagagatgacaaacacttcattaacgaaagtacaattatgaaataaacttatatgaaaatattaaagttttagatgtgatgatattgatggatttacattttgaggggtactactataaattatgctaccatcaaagagataatkactatgaaataattttaattaaaaatccctacacaaatcagttgatatttgacaaaa

SEQ ID NO: 453977 - DNA, 639 bp, Homo sapiens
tagtacctagtattacccaaactaacaactctcttggtacatactgtgacaatacattaggaagaattgaaaataaggtttttattcttattcaagcaaagcgagtctcamattgtgaataaacatttttgatgcgagggaaggatttgaaaggatattctagtgtgaaacagcactttcttgagctagtcagagagggagaaacaattgaatttgagtttttgaaatgggtatttgaactcttaatgaattgatgtttttccaaaagtatgttttatcaaatatgattggaaaacaatgcattatgtatccaacctctagagttacatgtgcattatcacattaaaggtttttttgttttgttttgttttgttttgtttgagacagagtctcactctgttgcccagactggagtgcagtggtgtgatcttggctcactgtaacctccacctcccaggttcaagcgattctcctgcctcagcctcctgagtagctgagactacaggcatgtgccaccacaccaggctaatttttttacatttttagtacagacgttgttttaccatattggccaggttggtcttccaactcctgacctcatgagccattgtgcccagcccagattaagggttttaaaga

SEQ ID NO: 453978 - DNA, 639 bp, Homo sapiens
tagtacctagtattacccaaactaacaactctcttggtacatactgtgacaatacattaggaagaattgaaaataaggtttttattcttattcaagcaaagcgagtctcacattgtgaataaacatttttgatgcgagggaaggatttgaaaggatattctagtgtgaaacagcactttcttgagctagtcagagagggagaaacaattgaatttgagtttttgaaatgggtatttgaactcttaatgaattgatgtttttccaaaagtatgttttatcaaatatgattrgaaaacaatgcattatgtatccaacctctagagttacatgtgcattatcacattaaaggtttttttgttttgttttgttttgttttgtttgagacagagtctcactctgttgcccagactggagtgcagtggtgtgatcttggctcactgtaacctccacctcccaggttcaagcgattctcctgcctcagcctcctgagtagctgagactacaggcatgtgccaccacaccaggctaatttttttacatttttagtacagacgttgttttaccatattggccaggttggtcttccaactcctgacctcatgagccattgtgcccagcccagattaagggttttaaaga

SEQ ID NO: 453979 - DNA, 624 bp, Homo sapiens
tctctagtataacaattcttttcatattacataaaggatatgccttcactttgtaaacaaatctgattatatggataaagtgaccagcatctgctgaaatcccctttctaacttaccaaacttagtggtttgtgttgtgtacttacagttctatttctacacatttgcatttgcagtgcatttaatggtcaaaaacacatactattgtatattactstaaataatataattaagatgcagtgttttattacaactaaatataattcagtttttcttttatgtatactcagtaatatgtatgagatctttccaaattaatatgtttggatccatcatatttacttttactgctacagaggaatgtctgaagtttctatttctgttttttctggatttcaattcctccaataaaagtgtccatcttgtcatctattatacaactatcctggaggtccatttctactgtttcttatgttttttctggtttttaataatttaattttacattctggtatcattgttactttttactgaatgccagtccttttgtgttaaaagaaaaaaaaaaaagctgggagtaatttgtgactctgaatactaactttctccagaggaaagcttagc

SEQ ID NO: 453980 - DNA, 541 bp, Homo sapiens
gacagtaactaaaagagagctgaattgtctatactaataatgaatgaaataaayttttttctctttttttgagatggagtcttgctctgttgcccaggctggagttctatgccatgatcttggctgactgcagtctctgcctcccaggttcaagcgattctcatgcctcagcctcccaaatagctagaactacaggcatgtaccaccacgcctggataattttttgtatttttattagacactaggttttgccatgttgaccagtctggtctcgaactcctgacctcaggtgatacacccacctcatcctcccaaagtgaggggattacaggcatgagccatagtgcctgaccctaaatagactttaagataaaaattgttattagagttagggaaggacattcaataatgaaaaatatccattcaatcaaaagataaataataccaaacatatataaaatagacaaaaaagcccccaatacgtcaagccaagattgacaaaatttataggagaaataggcaatttaataataatgtttgt

SEQ ID NO: 453981 - DNA, 541 bp, Homo sapiens
gacagtaactaaaagagagctgaattgtctatactaataatgaatgaaataaacttttttctctttttttgagatggagtcttgctctgttgcccaggctggagttctatgscatgatcttggctgactgcagtctctgcctcccaggttcaagcgattctcatgcctcagcctcccaaatagctagaactacaggcatgtaccaccacgcctggataattttttgtatttttattagacactaggttttgccatgttgaccagtctggtctcgaactcctgacctcaggtgatacacccacctcatcctcccaaagtgaggggattacaggcatgagccatagtgcctgaccctaaatagactttaagataaaaattgttattagagttagggaaggacattcaataatgaaaaatatccattcaatcaaaagataaataataccaaacatatataaaatagacaaaaaagcccccaatacgtcaagccaagattgacaaaatttataggagaaataggcaatttaataataatgtttgt

SEQ ID NO: 453982 - DNA, 522 bp, Homo sapiens
acagtaaattaaaatgcttttttaaaagatgtagcttgtcatttgagaattgtgttagcatagggtgttgctttttcaaatatagataaaacaaaaatgttaaacacatgtaattacactactaaaaataaaacacatgcaatgcaatttatttcattaataacatctgcaaatttatacgtaagtgatacgatttcaaaatggtgaccattttttcattcaaaatggattattagactgatacattaaaggtgctcttaaatttgaaaggggagcaatggaaatacagacattcactgctagtgttgctatcagcaaagggatgaagtactggaaaactgtattttagatgtgtttcatttttgtaaaatgagttaaaatctgccaatatttgtttcatttatttctccaaatttaaacttaatagtcatgcaattgggtacctcagtaacrcttcaatttgatcatgatgaggatttgtgtgtgaagtcatatatgtcatacaagagaatcacacagctc

SEQ ID NO: 453983 - DNA, 646 bp, Homo sapiens
cttggcatgttcctgcgtctactgcatttcctacaatttgtcaactgggttcagaggctagatcatatttgatcagaggctcaatcaaatcaaatgtagattttatcctttggcaagagtataaatggcattttcttctawtgagatatttgtaacatctggttttcccatttttctgtgagttataagttgttgctcagtgcctagattcattaattcactggagatgattgcaaaatgatcatattctaagtgttttaatgtatttttcatacttagctaaaatatttttataaagagacgtcccttcctctacttcttggtttcttgtattagagtttatactggaaaggcaaaataaaggagtgattcacattttttatttacctgtttttattgtaattaataggcttattgttcattacaataactctccaaaaatcaacaatcaattttaacattcttataaactcataaatatatttcttgggttttacccattgctcatatcattctaactgtagcttaaattatcccatttcagcccataatagcctcttcaagtaggtttttaggtacttttactataaggtatttttattttataattttcttgccatattttatacaaagatattctaggttt

SEQ ID NO: 453984 - DNA, 583 bp, Homo sapiens
catagagcagtcagtgcaatatgtttaaaatataagtcaaatcatgtcatttgctgtcacagtgcctctactgtcttttgatgtcaatgtcagtaaaagccaaacttcttagaatggtctataaacctttgcatttgctgtccctgctgcctgaacactcttctcccagctttcaccgtggtgtgtttcatcacccttttttagacctctgctcaactgtcacctcaattagagtggtcttccctgatgatcctctatcagattaccacatcacacactcttccctattttccttaaactgcttattcccctcatagctcttgaaaataaaagcaagatttctatgacattatgttccacacactattytaagcatttgacctatattaactcattcaattctcataacagcattaagagatagttttattatatccattttacccatgaggtactttaggcaagctaatgttaagaattagcccaagactacagagttatcaagtggcagagctgagattcaggcccttgcaatttgtctcaagcatctatgcttttgtccactgtgtgatgtagcttctca

SEQ ID NO: 453985 - DNA, 583 bp, Homo sapiens
catagagcagtcagtgcaatatgtttaaaatataagtcaaatcatgtcatttgctgtcacagtgcctctactgtcttttgatgtcaatgtcagtaaaagccaaacttcttagaatggtctataaacctttgcatttgctgtccctgctgcctgaacactcttctcccagctttcaccgtggtgtgtttcatcacccttttttagacctctgctcaactgtcacctcaattagagtggtcttccctgatgatcctctatcagattaccacatcacacactcttccctattttccttaaactgcttattcccctcatagctcttgaaaataaaagcaagatttctatgacattatgttccacacactattttaagcatttgacctatattaactcattcaattctcataacagcattaagagatagttttattatatccattttacccatgaggtactttaggcaagctaatgttaagaattagcccaagactacagagttatcaagtggcagagctgagattcargcccttgcaatttgtctcaagcatctatgcttttgtccactgtgtgatgtagcttctca

SEQ ID NO: 453986 - DNA, 515 bp, Homo sapiens
ctaaaaataaaataacagactcaagggttgcataaagtgcatatagataaaaaataaaggaaaacataatttctgaaatagaaaggttctataaataaatctgaaaaatactatatatgaacacttctagaaataaaaaatcattaccatccttgcatcattcaacagctctcattattcaaaagctttaaactcattgctaaaataattagagctgctgaagttcagtttgtttcttctactgtagttctataataataattatgaagacatctttggattaatgtgtgtcatctactcaacctatraatgtttcatgctgagttcatctcttcagtaaattcttagcattttaatactaagtgagtacattaattattctaaattaaaaagctagaaacatagcttttgttcttctcatgtgtaccatctgtgtagtattgagaaatacactgattttatttctttatttccaaagtattttcccattcacatatttcatggtaccttgcctt

SEQ ID NO: 453987 - DNA, 635 bp, Homo sapiens
ttttaggtctttaatatatcatattttttctactttgcagttcttatcattgttttgttcattctttatttagtggaggcataccatgcacctcagtatggcgataatatatgggtggcagcaaaaagttccagcccagcatggccagtgctatccctctatctttttaaaaaaaattgtgcacttttatttgtcatgctttctaaaaaggtatctatgccattgattttttattgatgcataatacatgtacatattttcaaggtacatatgataagttaatagattcacataatttgtaaagttcagtgtacttgggatagccaacaccttaagtatttgtcttttcattgcactataaacattctaattattctcttccagctgttttgaatgtgcagtagattactgtaaactctactcaccctactgatctatcgaacagtrgatcttatttcttctatcaaactatgtatttgtttctgttaatcaacttctcttcatcccccaataggtaagaatgtgagaagtaaaagtgtgggagggaaacagagctaagataactcaagaagtcagtcactgtattttaaacattgcactaaaacaacagacaccatgatggccttttctactac

SEQ ID NO: 453988 - DNA, 581 bp, Homo sapiens
cttaagcacagctaacctggatgtcttagtcccctaaaatgcacatactatacatttacatgcacataggtacaaatgcacaatttcttagtcaaattaaagactcattttctaattataaagatgaaactgaaatacgcttcttttatttttctctaaatgattggactttccacagagaacacaatttatttggtatgtcattacctaccaaccataactctaaagtggggaggggatgacagaggaaattgtggtccaggaagagaaacaggttccagcttctcactgcctcagtcaggatgtgacttgcactgttggcaacagagaaggcgagacagaaccattctgcagcctgcttttgttttttgtttttttttatacagagtttcgctcttgttgcccaggctggagtgcgatggcacgatctcagctcattgcaacctctgcctccctgattcaagagattctcctgctcagcctcctgagtagatggaattacaggcacctgccaccaygcccaactatttttcgtatttttagtagagatggggtttcaccatgttggcgaggctggtctt

SEQ ID NO: 453989 - DNA, 622 bp, Homo sapiens
cttgtaatatttgattaaaaataagcagtatttacatttcatgatgaacttctgtcacaccacttatgctgttttatcaccattgttgtagatattgtgattatcttcaagttccattttatctaaccaaattttgaccctatcacaggctctttggtgatctaagccagtcaaggtaatgccattcccttgactagartaattatgtcaaaaagcaacctccaatttacattagtgaatatttggaattcctctacccagcatgattacttcagtggtgtccacgtaggctaaagtggcacaataaaagcaaggattaggcaaaagttcctatttagaagaccttagaggatagtaggtctgacagtatcccatcacctaactaacccatgcctgaaactcaggttacaactacatgaaacccagagtatttcaacttcctaagataataataaaactttattgtttaaggcaatttaactttgattttctgttacatataattatgtgcatgacaactgaaacaatatcacaaattcaatgttatagtaaagttattaaactttgtatccaatatattaaactaggtgtctgatcatgagctaaagcctttaaaattata

SEQ ID NO: 453990 - DNA, 603 bp, Homo sapiens
atatataacagttttattaggtaattaaatctttattttgtaagccctaaactcaaaataagtaaagtttaaaaataaatcatgttgatttaaatcacacttggaaatattactggaaagtcaattaaaataacttgtattttcagtattttagtagtgaatgtatatttttaataacatagtttaaagtttttcttatatacttcagtgcccctacaaaataaaatttttgaaataaaytacagttttctctttttgctgtattattaaattctaacattagtaatcatattgtcttgtaagttagccatattttggggacctataaaaatggctgagtggctgtaacagaaatggtttcaaattgctgtacctttgctattctttttgtctgtttattcatttctttttctttgttggaaattatcagtttattgctacatgtgtttgattttatactaattctctctgctacttctttataatttgatagcatacaaacatcttaagtacctatgcatctaagagatggggtaatctctgatgattaaaagaaaacaatcattgtcactgatctcaaagaatacaatctattttaggtga

SEQ ID NO: 453991 - DNA, 556 bp, Homo sapiens
agaataggtgtttagtatttatgaattcatcagcaagttttcagaggacctagacactgggtatgcacaaaaatataacactcacactgttaaggaataaagtgtgttttctagaaccagtttctttttggaaatggtcatttatattggggacacacaccaccaaggacatactattgaggtggaattatcaccataaatgtgccctctgtcttttcttctttcttacaaatgtaatatatgttgactgattgaatcattcattcaactaacattgagcacctaatatgtttcatgaatggtgttaaacactctccagtgctaagtggtgagcaagagggacatggtccctatcctcaaggakcttgcagatcagtgtgaaatagcaaaacaaaaaaagtatgtttgattgcaatgacaaattattcaaatggtatgtaggaacagtacaggcttctgtgagggactaatgtaaacaagggaatcaaggaaaacctctttgcttatgtcactttgaaattgagaatgagaataacaataaattaatcatgtgaaa

SEQ ID NO: 453992 - DNA, 556 bp, Homo sapiens
agaataggtgtttagtatttatgaattcatcagcaagttttcagaggacctagacactgggtatgcacaaaaatataacactcacactgttaaggaataaagtgtgttttctagaaccagtttctttttggaaatggtcatttatattggggacacacaccaccaaggacatactattgaggtggaattatcaccataaatgtgccctctgtcttttcttctttcttacaaatgtaatatatgttgactgattgaatcattcattcaactaacattgagcacctaatatgtttcatgaatggtgttaaacactctccagtgctaagtggtgagcaagagggacatggtccctatcctcaaggatcttgcagatcagtgtgaaatagcaaaacaaaaaaagtatgtttgattgcaatgacaaattattcaaatggtatgtaggaacagtacaggyttctgtgagggactaatgtaaacaagggaatcaaggaaaacctctttgcttatgtcactttgaaattgagaatgagaataacaataaattaatcatgtgaaa

SEQ ID NO: 453993 - DNA, 538 bp, Homo sapiens
aggaaatatatatgttttagaaatatctgcaactaaagtgatattttaaatgttccagtatttaaagaggtacacaatcatttctatagaatacaattttctaaaatacagatctctagcatatttcaaaatatctaggttttaatctgttccctccaaccccatggtgaatattatctgtttttgttttgataaacaacttctataacaaaaaagaaaatataacaagcmattttgtgaatttataatcttataaggacaagaaaataaccctttataattttataaaactaaccactgctttttaaagtatcattttaatgaaatccaatacatgaaaatttaagtttcaaattttccaatgggaataattattattataaaattatttagtcacagagattttaaaaatagaaaatttccatttggcatttataataagattcaactcacccatgttgtccttaaatatatctttacttgtgaaaaatgaggcttagctagagtttagcactgaaataatataggcatgtgtgtg

SEQ ID NO: 453994 - DNA, 550 bp, Homo sapiens
ttttttttccaggatagccatatacttcaaaactcttctgctttacttgaaagctttttcaactcccaagacaagtcatttaagctgagagaaacagggtgtatggaaaatagcactaatcagagacatatgacacctaccttttagtcttggccttatcactaattagtggtgtgaccttgggaatgtccyttctatctcttgacctcggtatttcatctgcggaatgagggagctactagattatccctgaggttactttgtgctcttacagtctaagtttagtagaaagtttgagtagacagataggcccaattcttgataaatattggggaatatacaaagaatccctgtgttcttccttcccagtgcattatccttcaggcctgactgaatcctcacaccacaagtttaactgcttgggctccatatccaatccaagacccatagtcctaagcagacttttctagttggcacagatttgttcctctcacagactactccccatcaaaatatcccttatagcgagtgtttctacttttatgcttaa

SEQ ID NO: 453995 - DNA, 545 bp, Homo sapiens
tccctaataaaaccacatcttttcttccccgttggggttatccaaaccctccaatatcacctatacctacagcaaaaaaagcagtagcctctagaaaatgtgataatagtggtgccctggcagtgtatgaacaaggtttaatatcagcaagctgggaaatcaaagaggaggatatgtggaatgactatttatcagtgtctcaccaatgytttctttgctctgttcctagagaggaagcaacactccctttctaacctcccatgtatgaatcaactcagatatatagcatagcattgcccccaaacttaattactcaaaggaattaaaatcacttcaaaagtgttttgcagtaactgttccctctgcctagaatgttcttccaatagctgtcttgtatcttccttcagttttaaaagtccttcagttctcaaagtggcaccctagctaaagagttccccaccccagagacacaagtttatttctaatatgttaccttgaatttttccctcatgactcctaatttgtaattatttttaaaatttgtt

SEQ ID NO: 453996 - DNA, 614 bp, Homo sapiens
tgtggagaaacatttcaaataaatattttagatttagggttaggggatatgaggtgggcaaaagagaatcactatatcaagcctatagctgtaccaatgtttagaaaatatttaaatcaacataaatcatttcattttgaaatgcaaagaaagacacaggtttgtacaagaagaaaagttccagaggtataggtgcctgagggtgaatgtagtctcttttaaaggggaagcctcataaaacatttatctcttggcygtatggccggaaacgtcaggctcaggtaacatttgttaatgattatcaaagtgcagaattgttttggaatgtgtctaaagctaattttcaaagcaggaataaaatatgaaattcattgagaagacaacaattatttgaaaacgaaagggaaaaataatgagtgagagagaaaatatacaattctacaagtagctgagtttttcccctcaatattttagtttctgattatctggaatattttccaatgaattcacttctctgtattaacaagcaacataaaatagtgcattcattttattttttgtgcatttgtctgacaaaaattggaccttatttttaaaaggaaagcagcacataa

SEQ ID NO: 453997 - DNA, 613 bp, Homo sapiens
gtttctctagttccttaaggtgtgaccttagattgtctgagctctttcaggcttttcgatgtaggcatctagggctatgaactttcctcttagccccgtttttgctgtattccagaggttttgacaggttgtatcatgattgtcgttcagtttgaagaacttttaaatttccatcgtgatttcgtttttgagccaatgatcattcaggagcaggttatttaatttccatgtatttgcatggttttgamggttccttgtggagttgatttccagttttattccactgtggtctgagagagtgcttgatataatttcaattttcataaatttattgagacttcttttgtggcctattatatggtccatcttggagaaagttccatgcactgttgaatagaatgtatattatgtgtttgttgggtagaatgttctgtaaatatctggtaagtccatttactacagggtatagtttaaatcaattgtttctttgttgactttctgtcttgatgaactgtctcatgccatcagtggaggattgaagtctcccactattattgtgtttctgtctatctcatttcttaggtctcttagtaattgttttataaatttggga

SEQ ID NO: 453998 - DNA, 613 bp, Homo sapiens
gtttctctagttccttaaggtgtgaccttagattgtctgagctctttcaggcttttcgatgtaggcatctagggctatgaactttcctcttagccccgtttttgctgtattccagaggttttgacaggttgtatcatgattgtcgttcagtttgaagaacttttaaatttccatcgtgatttcgtttttgagccaatgatcattcaggagcaggttatttaatttccatgtatttgcatggttttgaaggttccttgtggagttgatttccagttttattccactgtggtctgagagagtgcttgatataatttcaattttcataaatttattgagacttcttttgtggcctattatatggtccatcttggagaaagttccatgcactgttgaatagaaygtatattatgtgtttgttgggtagaatgttctgtaaatatctggtaagtccatttactacagggtatagtttaaatcaattgtttctttgttgactttctgtcttgatgaactgtctcatgccatcagtggaggattgaagtctcccactattattgtgtttctgtctatctcatttcttaggtctcttagtaattgttttataaatttggga

SEQ ID NO: 453999 - DNA, 515 bp, Homo sapiens
atgaaaattaagttaaaatgtattaaagaccaaggcataataaccaaaactataaaatccctagaagaaaacataggggaaagttttcatgacattggacttggcaatgatttcttatatgtgacaccaaaagcataggcaacaaaaccacaaatagacaaatgggactrcataaaactttaaaacctttgtgcattaaaggacacaattaacagaattaataagtgaatgggagaaaatatttgcagatcagatatctgataagtgcctaacatccagaatatataaagagctcctacaattcaacaacaaaaaacaacctgatcaaaaatgggcaaagaacttgaataggcatttctctaaagatgatatacaagtaaccaacaagaatatgaaatgatgctcaacactgctaatcattagaacaatgcaaaacaaaatcacaatgaaatatcacctcacatccattatgatggctactataaacaaacaaacagaaaataacaagtgcggac

SEQ ID NO: 454000 - DNA, 579 bp, Homo sapiens
taggtgcaaaaatcttcacaatatcagtaaattgcatatagcaatacatatattttaaaaagataatgcatcaagactaagagaaatttgtcttaggaatgcaaagttggttcaacattttaaaaagtcaattaatgtaatttaccatattaagaaacaatatagaaaaaaatatttgacattctcaatagatgaagaaaaaaatcatttggtaaaattaaatacccagccattagaaaaattcccagcaaaatgagactaaagaaaatgtcctgaatctgataaaaggtaactraaaaaacctacaacaaacataatacttcatggtgaaagattgcatgctttttccttaagattgagaagaaaaggatatccactcttaccactcctattatcatatcaaaagttttaataaatgcaacaaagcaataaatatgtcatagagattgcaaagaaaaatgttatttgtagattacatgatcatgtatataataaactcagtgaactctgtaagttataagaactaataaatgaatttaacaaggttgcaggttaaaaggtcaacataaaaacgtattt

SEQ ID NO: 454001 - DNA, 483 bp, Homo sapiens
ccagtgagtcacaaatttgatatcctcacataatcccatatttcttggaaattttgtttattcattttccttctttttctctattcttgtctgtcttatttcagaaagccagtcttcacgctctgaaattctttcttttgcttggcgtattctcccattaatgcttacaattgcattcctaaataattgtagaatgtttttcagctttgttaggttgattactttcttttctatactggttatttatctgtcagctcttgtatcattttattgtgatccttagcttctttggattgggattcaacatactcctgcatctcaatgaccttcattcttattcrtattccaaattctatttctgtcatttcagctatctcagttcagttcagaacccttgctggagaggtagtgagtgcggttgtttggagaaagaagacactttggctttttgagttgtcagagttcttgcactggttctttctc

SEQ ID NO: 454002 - DNA, 549 bp, Homo sapiens
gggtgtgtgaaatgatgctttcacataacaatgaaagtttgtagcagtgagttacaaacccataaattttcttgaactcattagagagctaagattataggacaatcaagaggcctgaaatccaaaaacagaccagcccctccaaggagcacaagaatgtacaaaatggttcatctgtggcatgaagaaaaaaagcatagggaaaaagatgatatgcaacagctaaaactttaagagatttgtagaaaagctgagtgtgggctagcatgagagtatagatccctgggagttacaaacacaaagggagtttgcacctacttgcaaactcttttccattggtttcactcaggtgcttaaaagaaagattggggcaggacaagagaccagaaagaacttccttcagtggttcatgttcactgaagcarattgggcactaatgtggaaatgacaagaagcgtttctgaaccctcatgaaataatagcctgaaggcacagaggtagaagcagcaaacgttggtactcaagaacacggataaagtatcattgtgg

SEQ ID NO: 454003 - DNA, 554 bp, Homo sapiens
ctaataccacaaatttaagaaaatatttctgttggttgtggtcctattcttgtgatagtacttgttcaccttgtgtatacacatttatttttaatctagacccaagttcacttttgtagaaaaattataccatgatctgtwatacctttctttttaaatcatataatatttaacaactgaatacagaatatccccttagagataaatacacctggacctacattaatgggtctcactgggttccttgaagccaagtcataaactctaaagctgagaagagcctctgaggtcatctagtctctccctgatgtggcttagatttctctttacaataggatcaagcaaagagttactcagactgattaaatacatccggtttgaagaagtatcatccaaacagctctgaaagaaagttcatccttattgctgagttaagaactgtctccttgtagcttccaattattgattccagttaaactaggatcaggcacatataagctaatttgatccttcccccaaagctgctcaaatatctaaagatgtctatcgcatcc

SEQ ID NO: 454004 - DNA, 616 bp, Homo sapiens
tattgattttttaatcataatttttaataattttatattatatatgttaatgtatattataaaaataacttttaaccacaaatactatcgattggcttcccaatagggaatacaaactttcataccatattatagcatatattgaaattaagctattttcatataatgttttagatttgcacatgtataatttcatgtgatcctcacagaattgttgacaggtatgttgtcatatcattcccatttaaaagataargaaatcagaacacagataaatgttgtgcccaagaccacatgactagaaaatagcaaagatggaactggagcccagaatatttgctactaatatactggtttttttgttttgttttgttttgttttcatttttacttcaacagctatggaaccattttgcttagagtctcgattctggtaaaaactccctccaggtcctgttccagtggcaccttcttcatgaaattttcacccctgggcaggtcttttccttatgttttcacagccatttgtctgtgcctccatcatagccttcatcacaatgaataataagttgctcttttcacaatcctcgaagttagagtgtgagctcatcaaagcc

SEQ ID NO: 454005 - DNA, 461 bp, Homo sapiens
aaacccactccttgaattgagaggggccagttaagatattggctaagaactggacagatgtctccaaaaatgctccagtaaatcatatagaggggctcttgattttcatgcagcacacagagacaaaaaccaagtttcttctgtgaaatcttagaaatctacttctttataaaaagattacaataaattcttggtctatttttgttcactcaaaagataagtgctgagtcctctttaactcaatttataatcctcttattctaaasttttctgctatgcctctgccacgtatttccttagggatggctttctctacccctgcatggccctgaggctacgtctatctcctctgagctctgtcccagctatctgcgttctccagataccgctttgttctctcttctgcccctggctcccagggtagcttcctgattggacctgaaatgcaaatgatgcctttc

SEQ ID NO: 454006 - DNA, 609 bp, Homo sapiens
gcaatgttatttattatacccgattacttttcttctctaaaatattttatttagattcccttgttattgtaaagcttattttattaagagaagctttcttctatagaaaaatacttmagagaaaatgcctagtatctacaaatctgtgaccatcaatacttccaaggagatgatgtgcttcagtgacttccctgtccctgatcattttcccaactacatgcacaactccaaactcatggactacttcgggatgtatgccacacactttggcctcctgaattacattcgttttaaggtaaaatctaaatgaatcattgcatagtagatgtgtgtgtgcatgtgagcacacatgcatgtatgtgtgcagacacactcagttgtacacacatgagctatatttggcatcttcaggtatgatcagaggaagagatcatcagtgagcttccaccctagaaaatcaccacttataaagaagtaatgttttgaatatttcacttgaatataaggttgaagaattttgcccaacagaacctattctaacaagactttggtgtggcattgtaagggtcctttctgtcagccttaaattcaactgttgaaggacttaca

SEQ ID NO: 454007 - DNA, 640 bp, Homo sapiens
agtaaactaaagagcttctgcacagcaaaaagtaaaataaaaataaacagacagcttacagaatgggagaaaatatttgcaaattctgcatctgacaatggtctaatatccagaatctataaggaacttaaatagattaacaagcagaaaacraataactccatttaaaaaatggataaatgacatgaacagacacttctcaaaaaaagacatacatgtaacataaaaccaataaggatcccatttttttctacaaatgctttcattttaacagtagacatctcacaaagctgagaattcaactttagttgtaattgtcaggaaatatacccttcatttacatagagcatacaccaagtaaccaatagaaacctctacagggtatttaaaccccagaaaattcagtaatggcactcttgagcccccgtgcttgggcccactcccaccctgtggaatggcttgtgtttgacttttagcaatttcagccctatggctacaggagagattcttctctagggcatacacagaagctctttggttatctatgtgtagaggaagccaggaatttgaatccctgaactcaaacttttctttcattgctttgttcagcaacattagaagaaaccaaccaacatcatta

SEQ ID NO: 454008 - DNA, 640 bp, Homo sapiens
agtaaactaaagagcttctgcacagcaaaaagtaaaataaaaataaacagacagcttacagaatgggagaaaatatttgcaaattctgcatctgacaatggtctaatatccagaatctataaggaacttaaatagattaacaagcagaaaacgaataactccatttaaaaaatggataaatgacatgaacagacacttctcaaaaaaagacatacatgtaacataaaaccaataaggatcccatttttttctacaaatgctttcattttaacagtagacatctcacaaagctgagaattcaactttagttgtaattstcaggaaatatacccttcatttacatagagcatacaccaagtaaccaatagaaacctctacagggtatttaaaccccagaaaattcagtaatggcactcttgagcccccgtgcttgggcccactcccaccctgtggaatggcttgtgtttgacttttagcaatttcagccctatggctacaggagagattcttctctagggcatacacagaagctctttggttatctatgtgtagaggaagccaggaatttgaatccctgaactcaaacttttctttcattgctttgttcagcaacattagaagaaaccaaccaacatcatta

SEQ ID NO: 454009 - DNA, 499 bp, Homo sapiens
ttactgtgaaaccatcctcacaaaattaataaaaagaaattgttaggattttaacaaaggcaaaagctttgaatagaagcattgctaagcatcaaccagcttgccctatagccctcttctgaggcaggagaataggacctggaggcaggaaacctaaggacttcctagaactaaatcaaatggaaacacttcagctatgacaggaaatatccccttcatttacatatagcatacaccaagtaaccaatggaaacctctagagggtatttaaaccccagaaaattcagtaacrggattcttgagcccccatgcttgggcctgctcccaccctgtggaatgtacttttattttcaataaatatttgcttctgttgcttcattctttccttgctttgtttgtacattttgtccagttctttgttcaagatgccaagaacctggacacacctgcaccagtaacatattttggcaaaccagccaggaggttagcccaaagttta

SEQ ID NO: 454010 - DNA, 499 bp, Homo sapiens
ttactgtgaaaccatcctcacaaaattaataaaaagaaattgttaggattttaacaaaggcaaaagctttgaatagaagcattgctaagcatcaaccagcttgccctatagccctcttctgaggcaggagaataggacctggaggcaggaaacctaaggacttcctagaactaaatcaaatggaaacacttcagctatgacaggaaatatccccttcatttacatatagcatacaccaagtaaccaatggaaacctctagagggtatttaaaccccagaaaattcagtaacgggattcttgagcccccatgcttgggcctgctcccaccctgtggaatgtacttttattttcaataaatatttgcttctgttrcttcattctttccttgctttgtttgtacattttgtccagttctttgttcaagatgccaagaacctggacacacctgcaccagtaacatattttggcaaaccagccaggaggttagcccaaagttta

SEQ ID NO: 454011 - DNA, 634 bp, Homo sapiens
gtggaattgttcttatctataaatgcccacatgtgacagttcgggacttctggcttcttatggtttcgctaaagttttaggttactaaggatcagaattctagttaataggtaattctgtawacaaaatgtgtcagaaagtgttgtgttattagtgagaaaaagaatacttttgcctaactgagtagttatctaaaagttagttcaaattacagatttgaaaaggttatttttgaaacaatgtattaagggaccagtaagtaggggaggacaatgtggaaaagtttagataataaaatattccttaaaacctgacagagaattgaatatatttgcttaattaacattttcatagttaaagcttttagtcttgattaaagtaaaatgagaaatattataaagaaatgcattggcagtttggcaatcctttttttaaacatagttaagcatgaagccagatttagtgtggagccaaatttcacatacacgttcgcattgctttacactatgtttacagttttgtgtggatagtgctggcacctgagtgcttattggtcatgtgcctacagtgaatttcttgattgtacaagatgtatggtaatattggtaggcttaaggctattgaattgtgtatc

SEQ ID NO: 454012 - DNA, 552 bp, Homo sapiens
gacagtgttaaagattattggtaaaataaaaatatcttcaaaatacaaacatgtggtctaaattatgcaggtcagatattaggtttgttaaatgctttaagttcatatactacttctttgacttttaaaaattgttcagtttattttggagcaattgattctagataagaccaggggacatgtgaaattagccatgccccctagctatgcaaagaaggttataaagaaaaaatattttatataagaaagatcttgtacrgtaaattcttgtcctaaagtaaaataactggatgtttcaaatgggaggtgtttaggacagccagaaagtccaagcatgttatagatggtctgtgtaagttgtgaaatcatttataaaagagaatttatgcaagaaatgttgtacaatttaaaggagattaggcctcctaaatgcttcataaaatgccactatgactcttaactgtccaccttgcctgctttacagctaagtaaggcctaggacacatggaattagatgctggaaagagatagaccttatctgaacttctctct

SEQ ID NO: 454013 - DNA, 615 bp, Homo sapiens
ttttgccttttaaaaaaattttgagtcattattttggctaaatgaatgacttgtaatctggtattctatttcataatatcaagtgttttaaacctttaacatatttgataggcttcccaaatcaaatttcagcttcaaggttgtctttttctgacttttaactttgagatgctgcagaaggcccctgaagcttccaaaagakaggtaaacagaattacttgacctgtttagttacatgagaagcaccatcaaaaataatttttaaaaacgtttaattttctcattgggttttagtgaatgatattattatatgttaaaaattgtataagatttctaaaattctaatatgtctgattatatgctataaatcataattatggatattatgttattgtaaaccacagaaataaccaaatttccttgtcaattgtatttttaactataattatttaaagtcatttctacagttaattacttaatactgatgcagtttctgaaaatttcacaagcacaaaaatcctagaatatggtgtctttgagaaggttcatgaaaggaagaaaagaaccctaaaaagcactcttgaatacaagtttctaataactttataatcatat

SEQ ID NO: 454014 - DNA, 615 bp, Homo sapiens
ttttgccttttaaaaaaattttgagtcattattttggctaaatgaatgacttgtaatctggtattctatttcataatatcaagtgttttaaacctttaacatatttgataggcttcccaaatcaaatttcagcttcaaggttgtctttttctgacttttaactttgagatgctgcagaaggcccctgaagcttccaaaagataggtaaacagaattacttgacctgtttagttacatgagaagcaccatcaaaaataatttttaaaaacgtttaattttctcattgggttttagtgaatgatattawtatatgttaaaaattgtataagatttctaaaattctaatatgtctgattatatgctataaatcataattatggatattatgttattgtaaaccacagaaataaccaaatttccttgtcaattgtatttttaactataattatttaaagtcatttctacagttaattacttaatactgatgcagtttctgaaaatttcacaagcacaaaaatcctagaatatggtgtctttgagaaggttcatgaaaggaagaaaagaaccctaaaaagcactcttgaatacaagtttctaataactttataatcatat

SEQ ID NO: 454015 - DNA, 567 bp, Homo sapiens
agttaagctgaataatagaactggctaaacagaaaagtgtctggagaaaacagcagatattatagagattcagttgtagcagattaacaaagagactgcttagttaagcgagtagaccctttatctagctcattctttgatctctgattttaggaggtttgatttatggggaccctgggtaaggagcatactatctccaagaggacagtcattatatagtcatattatagtcataataatagtctccctggcatgctgtattctctcaaaggctttaaatgtttgcatgcagccatctctaagatgtcaaatggtctctcttcaattggaatgacaagagctgaaagaaatgtgcgaccatgagaacactgtaacctatgaatgacatactgagaccagaaacccawaatgatggtaactgagagtagtgctaaggccctaagttgtggtcatactctcactatgtgaggacctgaccaaaaagggagaatttttttaaaaaaattgtgggaggccattgttttggactgagctcatgcactagccccaacagaccaaaccaaacca

SEQ ID NO: 454016 - DNA, 618 bp, Homo sapiens
tgttttggtttctttattcttttcttgccttgtttgtgcatgtggtctaattctttgtcaagatgtcaagaacctggacacactctaccggtggcacttccttatagcttcttactgcttaaaagtcacatactccttgtcactagrttctaacttcccttaaatgtttctacagataacatctttaaagaaacctcaacttttccatttgagatattttccaaattctgtattccaatgggtccactgacaccagccagtttgaaaaccctctccgaggaactgactcagtgcaagaatgcagtttctatgtctttatgatttcctcccccattccccaaccaatcagtgaccccacctcctttgtactctacccatcgaaattatcttaaaaactccagttcaaaacccctcagggtggcagatttgaggtttcctcccataccctcatttggctgccctatgattattaaactctttctctgcttcaacccctgctatttcagtgtattggtatgttattgtgcaatgggtaatcaaacctggtgatcttataacagctggtgtaagtcttggagttcaaaggctaaacagcctggagtttggacgtgcaagggc

SEQ ID NO: 454017 - DNA, 679 bp, Homo sapiens
tttttcaaatgaacaaacctccaataaatatggaattatgcagagacaaaatctatgattcattggmattccttggaaacaagaagagagaataaacaatttggaaaatatatttgaggatatagtccataaaaatttccctcatctttctagaaaggttgacatgcaaatccaaaaaatacagagaaccctggctagattctatacaatatgaccatccccaaggcacatagtcatcagattcaccaaagtcaatgcaaaacaaaaaacaaacaaacaaaaaccttaaaggcagatagatgggtcaagtcacatacagaaggagcccaatctgtagcagtctgtatactagcagcggacttgtcaccagaaaccttacaagccagaagaggtttccttctatttttagtttccttaaagaaaagaaatcccaaccaagaatttcatatcccaccaaactaagcttcataagtgaaggagaaataaaatccttctcagacaagcaaatgcccaggaattcatttcaactagaccagccttacaagaggtccttcagggagtgctaaacatgggattgaaaggacagcacctgctagcacaaaaacacacttaagcacacaccccaaggacactataaagcaatcacacaatcaagtctatataacaaccagctaacgta

SEQ ID NO: 454018 - DNA, 679 bp, Homo sapiens
tttttcaaatgaacaaacctccaataaatatggaattatgcagagacaaaatctatgattcattggaattccttggaaacaagaagagagaataaacaatttggaaaatatatttgaggatatagtccataaaaatttccctmatctttctagaaaggttgacatgcaaatccaaaaaatacagagaaccctggctagattctatacaatatgaccatccccaaggcacatagtcatcagattcaccaaagtcaatgcaaaacaaaaaacaaacaaacaaaaaccttaaaggcagatagatgggtcaagtcacatacagaaggagcccaatctgtagcagtctgtatactagcagcggacttgtcaccagaaaccttacaagccagaagaggtttccttctatttttagtttccttaaagaaaagaaatcccaaccaagaatttcatatcccaccaaactaagcttcataagtgaaggagaaataaaatccttctcagacaagcaaatgcccaggaattcatttcaactagaccagccttacaagaggtccttcagggagtgctaaacatgggattgaaaggacagcacctgctagcacaaaaacacacttaagcacacaccccaaggacactataaagcaatcacacaatcaagtctatataacaaccagctaacgta

SEQ ID NO: 454019 - DNA, 607 bp, Homo sapiens
ataatatattgttatgtagtaagtaaatgtatcttaatataattatattaaatataatataaattttaaatataaacatgcatattaatataaatatgtaatatatgtaaattatatatatatttgttgaatgaatcaacctaaaataatgcrtcagacaaaaactataaaattagtatgcttactaaccacagttggtttactttttgccttttcagtattgctgctcccatcaacaaggaccagagtctttacaggagcagatttggccctgaaatccaagtcacaaaatcatgtctgcaggactggtcctctcttttgtataaataaacccacagagctttaattcaattatctgttcaagtactcttgcacataccagttaacatttttcttctatgttaatggtagtccctgctaagtgccagtaattattttttgcccccagatgcaaattattattttaaatctaaaaattcataagaacttgggacacgagtgccccaagaaaactttatttcctctagttctgaagctctttccttgggtcatagtattcttgaatgattttacacacacaggcacacacacacatacacaacacgtg

SEQ ID NO: 454020 - DNA, 607 bp, Homo sapiens
ataatatattgttatgtagtaagtaaatgtatcttaatataattatattaaatataatataaattttaaatataaacatgcatattaatataaatatgtaatatatgtaaattatatatatatttgttgaatgaatcaacctaaaataatgcatcagacaaaaactataaaattagtatgcttactaaccacagttggtttactttttgccttttcagtattgctgctcccatcaacaaggaccagagtctttacaggagcagatttggccctgaaatccaagtcacaaaatcatgtcygcaggactggtcctctcttttgtataaataaacccacagagctttaattcaattatctgttcaagtactcttgcacataccagttaacatttttcttctatgttaatggtagtccctgctaagtgccagtaattattttttgcccccagatgcaaattattattttaaatctaaaaattcataagaacttgggacacgagtgccccaagaaaactttatttcctctagttctgaagctctttccttgggtcatagtattcttgaatgattttacacacacaggcacacacacacatacacaacacgtg

SEQ ID NO: 454021 - DNA, 607 bp, Homo sapiens
ataatatattgttatgtagtaagtaaatgtatcttaatataattatattaaatataatataaattttaaatataaacatgcatattaatataaatatgtaatatatgtaaattatatatatatttgttgaatgaatcaacctaaaataatgcatcagacaaaaactataaaattagtatgcttactaaccacagttggtttactttttgccttttcagtattgctgctcccatcaacaaggaccagagtctttacaggagcagatttggccctgaaatccaagtcacaaaatcatgtctgcaggactggtcctctcttttgtataaataarcccacagagctttaattcaattatctgttcaagtactcttgcacataccagttaacatttttcttctatgttaatggtagtccctgctaagtgccagtaattattttttgcccccagatgcaaattattattttaaatctaaaaattcataagaacttgggacacgagtgccccaagaaaactttatttcctctagttctgaagctctttccttgggtcatagtattcttgaatgattttacacacacaggcacacacacacatacacaacacgtg

SEQ ID NO: 454022 - DNA, 410 bp, Homo sapiens
gtgcaaccatggatgcccagctagggtgcttcccaggtctttcatcatagctccttcttgggctgcctgcatccaactataggagaactccagcagagagccacccttcccccaccaacacacaagtaaaagtaataatctgtataccaaatccctgtgacatgcaatttacctatataacaarcatgcacatgtactgctgaacctaaaataatttttttaaaaaacaacctagatatacaataaaataaacataaaaatgaagaaaaagaaaataataaaaatataagctgaaatcattgaaatataaattaaatgagcagtacatggcatgatattgtttgttattttagaggattaagaaaattaataaatccctagcaagattaactacccccaaaaagagaaaa

SEQ ID NO: 454023 - DNA, 601 bp, Homo sapiens
agcccagcaatagatcatcctaccctaccctatacccttgctaagtcaggggaaaaaatagtgtgacatctctaactttgagcacaatatcatctgatcagttgaaagaatcctcaaccactatatctttctaatatttttgatgaccacatggaatctcagctaccctgaagagaatckgataaatttcatggcttaatctgaaattgacatatattcatataattcctcagttaatccataatataagcaagaatattagagtcattacataattcctaatatgtgatgtgctgtatgtttcctctgaggaaaccagcatcaaattgttctagctatttttttttaaagttacatgcctaaaaccaaatgaaatctaaacttactcgaaatttccagagatgtccaatatcatcatttctttcaaagcaggtgggctccagatcttcatccaggcagcacttgatggcccccagtccgctaattccagctccaatcacagcaatcgctttttggccatcgtgtctcagctggttagtagaaatttagagctctgtcactgtcatccatcccatttaaaaaaaattacttgtcacaagga

SEQ ID NO: 454024 - DNA, 601 bp, Homo sapiens
agcccagcaatagatcatcctaccctaccctatacccttgctaagtcaggggaaaaaatagtgtgacatctctaactttgagcacaatatcatctgatcagttgaaagaatcctcaaccactatatctttctaatatttttgatgaccacatggaatctcagctaccctgaagagaatcggataaatttcatggcttaatctgaaattgacatatattcatataattcctcagttaatccataatataagcaagaatattagagtcattacataattcctaatatgtgatgtgctgtatgtttcctctgaggaaaccagcatcaaattgttctagctatttttttttaaagttacatgcctaaaaccaaatgaaatctaaacttactygaaatttccagagatgtccaatatcatcatttctttcaaagcaggtgggctccagatcttcatccaggcagcacttgatggcccccagtccgctaattccagctccaatcacagcaatcgctttttggccatcgtgtctcagctggttagtagaaatttagagctctgtcactgtcatccatcccatttaaaaaaaattacttgtcacaagga

SEQ ID NO: 454025 - DNA, 604 bp, Homo sapiens
cagaactgggctaaagttttgtatgagggaaaataaactacgaattaagaacttaatctcacaggaaacattcaaagaaatagtgacttagtgcagatttgagaactgttgccacatctgctgtgctatcctgattccttctctctggccccggttcacctttaccaccaccaccaccgcttgtgcctcccccacttaggaaagtcttctccaagatcacttgctcagagctctcctctgtgctrtatctgtatctggggaacattttatttccctgtattttgtaaataatttcctgtatttttatatttcttatatatttatatcctctcatagagcagggttccccacacccctgggccaggaggacgtgagcagtgggcaagctggcaaagcttcatcagtatttacagccactccctatcactcaccttaccttctgagctctgcctcctgtcagatcagcagcagcattagattctcataagagtttaaaccctatagtgaactgcacatgtgagggatctaggttgcatgctccttatgagaatctatacctgatgatctgtcactgtctcccatcacccccatatgggaccatcta

SEQ ID NO: 454026 - DNA, 511 bp, Homo sapiens
tgaagttggagagattttctagctggtgccagttctgcatgagccgttgatcttggggactgagcccagcttgttcatgagtgtgcataagacaatcccttccttcagactcttctggaagtaggggctgaaagagaggcgggtgagtccctcgatccagctgcagagcgccgcctgcttctgagggtcgcatttgaacaggagctggttcttgatctcggcaaaaagctggtaagacggccccttgttgaactgcgtggaactcatggctgatgggaagggacagggtaagakggacccattagcattttaaaatctaattgaattacagcgccaattccagaaactctagaaccaattcagaaaacatattctcagaaaaaacattcttaaatttcttcctctggaatcattctttgtaccaaaatctatactggtttgagttctccagagaaatagaactaaaggaaatatctacatatctatatatttattgatatataaagttgtt

SEQ ID NO: 454027 - DNA, 561 bp, Homo sapiens
tcttcacaccttccattattttgggattgtggatgccaatctcccactgaggttgaaatttagtaatacagatcttgaaatattgtcatagtcacagatttctagtgaaaacattctagcaaataggaaaaacatagtttcatataccttaatttataaagtgtttaggaataatgaacagaatctctctttttctcacctagaaatccttaagggtagctgagatattatgtaaacttctgtcttgtaaactttatccyctatcctcaaaaagaggatgctggtagaactcctatggaaataaaattaggatttaatgctcctgcatcaagatcctccaagttcttatctagtagtgaggagtctccaattctttccattcttcatgagagaatactaaggtgctgtggatcagagcggaagtgagggtgaggttgtaggatctcacttggtgttcttatagctcttcatttggtacttcacttttctcccccatagattttctttttttctacgtcctttggtaccacaatagtcctgatttcacacgtgttggtagcc

SEQ ID NO: 454028 - DNA, 614 bp, Homo sapiens
ctgcttttcatgcctatttgtggccttttatatgccacaaatagcttcgtgtttagtctcatgtattggtttacaagcacaccttctattcttcagtaattgctgaaattgttagatagtcataggtgtgttgtgtgaagttttggctttttaatgartattctccttttctagtgtatatatttttggtcatttaattttttttcccaaagctggttgttaacgtatgatattaagccactttggtcattaagtgttaatacatgaattaagaaaaatacagcttttgtgatagaaatccgacttctatattgtacatagctcagcacaagagtataattagcttgtttcaaaatgcctttgaaatatataatttttttcccttcaatcagagttatcatatgttcctagaatttgggttttcagagtagagataatttgatatgtgtgaagaatctcagttctacacttgttcttaattttgatctttgagaaaaattttccactaagattaatctacctggaagtttctcaactcacttaaatttttatgaataattttttttactaattatttatattattttgcttgagtttggcccttcaaaggaata

SEQ ID NO: 454029 - DNA, 508 bp, Homo sapiens
ttaaatttcttactgttttctccagttgatcctgttctgtttgatgtcagcttgtatgtcatgcactgacagtaatttgttcagttctgggaaagaaaatctagaatttggagatgattcttaaagagtcaaatcacaaaataagtttaggaagaaactgacgtgcattacaggtaacatctgtgtgtggaaactttcctayttaccaatcttgtcatggaacgtttcctagagacacggtcacttgaaggacaagtttagacaaatgagtagtaggagagttttttagacttctgctctttgtcagagccatgaaataaaaattatctttttaaaaaatatgaaacagattatttggatttattctcaatttttcaaaatcttatgtcttgtgatgctaagcatttaaccagaggctttttgtttgtattggtgtgcattgttttagaatcttttgaacatctcaaaaatccagagatctttttgtgctcacatatttttgttatgt

SEQ ID NO: 454030 - DNA, 514 bp, Homo sapiens
tgagggttgcctctttgatccttccatcttccatagtgactgcaaacctctatcagatgcctgtctttatcattgttcattgtaattggttgcttgcctgttgttcccaacttgactttagggcaagaaggatttattttattttattttattattattttttgtgcttaacacagttcactgcacacactgggcaaatacaatatgttaatatagtatttgggccaggcacagtgattcacacctgtaatcctagcactttkggaggctgaggtgggtggatgacttgagcccaggagttcaagaccagcctgggcaacatagtgagaccgtgtctctatagaaaaaatccaaaaattagccaggcatggtggtgcattcctgtagtcccagctactcaggaagctaaagtgggaggtcaagacctgagcccatggatgtcaaggctgcagtgagccatgactgtgccactgcacagatgtgagtgagacaacagaagtgagaccttgtcttg

SEQ ID NO: 454031 - DNA, 475 bp, Homo sapiens
attattctaggtctaagaaataacagtcaactttgtataacttcatttcgaccctttcatatgatcagattttaatttcaatgggattgtatttgaatgtgggattgagaaaagggttgagagatgagaatttttacttttgtccaaactgtttactagaataataataatwattattattttagagatgagggtcttactgttgcccaggctggagtgcagtggcacaatcatagctcattgtaacctcaaattcttgggcccaagcaatacactccaccagccttagaagtagcagagatcacaggtgcatagcaccacatctagctaattttcaaaattttgtagagatgggatgttgctatgctgcccaggctgttctggaactccttggttcaagcaatcctcctactttggcctcacaaagctctcagataataggtgcaagccactgtacctgggctgaaagaatttt

SEQ ID NO: 454032 - DNA, 383 bp, Homo sapiens
gcttggtgggtcccacacccacagagccttgctcactgctaatgcagcagtctgagatcgacttaggatgcgggagcttggtgggggaaggggcatctgccgttgctgaggyttgagtaggcggttctatgctcacagtgtaaacaaagcagcagggaagctcaaactgggtggatcccactgcagctcagcaaggcctactgcctctatagattccatgtcttggggcagggcatatttgaacaaaaggcagcagacagcttctccagacttaaatgtccctgcctgactgctctgaagagagcagtggttctcccagcatggcatttgagctctgataacggacagactgcctcctcaagtgggtccctgacccccgtgta

SEQ ID NO: 454033 - DNA, 550 bp, Homo sapiens
gtcttcacaactggtagaccaggagatatcctcctgtgcctggcttggtgggtcccacacccacagagccttgctcactgctaatgcagcagtctgagatcgacttaggatgcgggagcttggtgggggaaggggcatctgccgttgctgaggtttgagtaggcggttctatgctcacagtgtaaacaaagcagcagggaagctcaaactgggtggatcccactgcagctcagcaaggcctactgcctctatagattccatgtcttggggcagggcatatttgaacaaaaggcagcagacagcttctccagacttaaatgtccctgcctgactgctctgaagagagcagtggttctcccagcatggcatttgagctctgataacggacagactgcctcctcaagtgggtccctgacccccgtgtaacttgactgggtgacacctcccagtaggagctgacagacacctcatacaggcaggwgcccctctgggacaaagcttccagaggaagggtcaggcaacaatattttctgttctaaaacctctgcta

SEQ ID NO: 454034 - DNA, 617 bp, Homo sapiens
ccaaagggctgggattacaggcataagtcactgcacctggccaaattatgtaagtttttcttgatgaattatgtattagtccattttcacactgctatagagaaccacctgagactgggtaatttataaagaaaagaagtttaattgactcacagttccacatggctgggaaggcctcaggaaacttacaatctggcaaaaggcaaagggaaagcaagacgtgtcttacatggtggcaggagagagagagagaggaaggaactaccaaacacttttaaaccatcagatctcatgagaactcacccactgtcgtgagaatagcatggcagaaactgcccacatgatccaatcgcctcccactacgtccttccctggacacctgcagatttgagatgagatttgggtggggacacagagccaaaccatatcaaattagttaagtgaaaatttactgagtgctaartgcatgataggtgttgaggttaccgaggtatttatctctcggagttacaatatagtaataagtatcatgatgggagatataaagttgtgtgtgcgtccatcttttgtgccaacaacccaaaataaataatagccaagggggaacaaaggtagta

SEQ ID NO: 454035 - DNA, 617 bp, Homo sapiens
ccaaagggctgggattacaggcataagtcactgcacctggccaaattatgtaagtttttcttgatgaattatgtattagtccattttcacactgctatagagaaccacctgagactgggtaatttataaagaaaagaagtttaattgactcacagttccacatggctgggaaggcctcaggaaacttacaatctggcaaaaggcaaagggaaagcaagacgtgtcttacatggtggcaggagagagagagagaggaaggaactaccaaacacttttaaaccatcagatctcatgagaactcacccactgtcgtgagaatagcatggcagaaactgcccacatgatccaatcgcctcccactacgtccttccctggacacctgcagatttgagatgagatttgggtggggacacagagccaaaccatatcaaattagttaagtgaaaatttactgagtgctaaatgcatgataggtgttgaggttaccgaggtatttatctctcggagttacaatatagtaataagtatcatgatgggagatataaagttgtgtgtgcgtccatcttttgtgccaacaaccmaaaataaataatagccaagggggaacaaaggtagta

SEQ ID NO: 454036 - DNA, 619 bp, Homo sapiens
taaagtgagtgaagacagcaatatctgtgggtgacctcttatctcagattctgttccatatccatgcactctaccttgtgctaaggaacacctggaaaagagaaaaaaatacaaaacaatcatttcactttgctgatctgtattttactagctcagaaatgtttaattgagtaatggattattttatctgtttttgtcatttttacctcctacatcctctctaacactttagaaatttgcttaaaattcttcttttttctctgtctctcttgcagaagtctcacttagaagtatgcaaaatatttacatttcataatgtctcgccaagcaccaaagtaaatggctttattggaggctaattatctttaataaaataggtttgaagtatttgaatatgaatggcctagttgaatgaggccactattcattagtaatgcatagaactttaggctctaagtgagctgtgcattgtgtatagcattgaagaattgtttgcatctaggaacagaatgtttaaattaattaatgattaatatttcagagtacatattctgggtcataycctgaacaggtgttatgaatgcaaaagtgaataaaaattgttccttattgtactcag

SEQ ID NO: 454037 - DNA, 619 bp, Homo sapiens
tattaattcctctgatctataagcatggaatgtttttccatttgtttttgttatccacaatttatttcatcagtgttttgtagttttctttgtagagatctttctttcaccttcttggtaaaatctattaggtatttgtagttattttaaatggaattgtctttttgatttctttcttacatagataattattggtgtatagaaatactactaatttttgtacattgattttgtatcttgcaactttaattcatgatcaaatctttttggtggagtcttaggtttctctagatataaagtcacatcatcagcaaacagggataatttgacttcctctttaccaatttggatgccttttatttccttctcttgcctaattgctctggctagaacttccagtataatgttgactagaagtgtaatgtgggcatccttgtcttgttccagtcttggaggaaaggcttaacttttctgtattcagtatgatgctaactgtgggtttgtcatatatattttgaggtgtggttcttctaygtctattttgatgctaagttttatcaaatgttttttctgcatctatgagaagatcatatggtttattgtccttgattgtttatgt

SEQ ID NO: 454038 - DNA, 613 bp, Homo sapiens
tttctaagcaatctaagagattgctggcaatctctttacaagaagtgtgggtcctgttatgggtcgaattttgttccctataaattcgtatgttgaagtccaagccacagtacctcagaatgtgaccttatatggaaacagggtctttacagatgtattaatacaattagttaagatgaggtcataatggagtaaggtgagccttgtctaatatgactgatgtcattataaaaaggagaaatgtggtgrtagacacaaacacagggaaaactccatgtgaagattgggacagagataggagtgatgtttctacaagccaaggaataccaaagactgccagcaaaccagcagaagataagagagaggcatggaacagattcttcctcacaaatttcacatggaactaatcctgtcaacaccttaatcttggacttctagcttccagaactgtgagacaatagatttctgctgtttaaaccacccagtttgtggtactttgttatagcaatcttacaaaacttattactattaaaaaagtctatgccacaaactattttatttgatccttacaacacatataatacagatataattattatctccattttaattt

SEQ ID NO: 454039 - DNA, 613 bp, Homo sapiens
tttctaagcaatctaagagattgctggcaatctctttacaagaagtgtgggtcctgttatgggtcgaattttgttccctataaattcgtatgttgaagtccaagccacagtacctcagaatgtgaccttatatggaaacagggtctttacagatgtattaatacaattagttaagatgaggtcataatggagtaaggtgagccttgtctaatatgactgatgtcattataaaaaggagaaatgtggtggtagacacaaacacagggaaaactccatgtgaagattgggacagagataggagtgatgtttctacaagccaaggaataccaaagactgccagcaaacmagcagaagataagagagaggcatggaacagattcttcctcacaaatttcacatggaactaatcctgtcaacaccttaatcttggacttctagcttccagaactgtgagacaatagatttctgctgtttaaaccacccagtttgtggtactttgttatagcaatcttacaaaacttattactattaaaaaagtctatgccacaaactattttatttgatccttacaacacatataatacagatataattattatctccattttaattt

SEQ ID NO: 454040 - DNA, 438 bp, Homo sapiens
acctgtgattaaggtgaatgggaaattacaacaacctaatccaggcaagactatgaatggccaagaccctttaggaatgaaggtttgcatcgccccagcaagtaaagaaccacaatcagctgaggtgcctgttgaagacacaggaaatacaaaatagstcgtagaagaaggtagttataaatatcagctactaccctctgaccagttgcagaaattaggactaattggcatgcatatttcctccttgttttgttagattacgtttgtgtttatgtatacatatattaagcaaatatctttgtttttattcctcttactattttttcgtgcaacataagatatattggctttatatcagtacttagctattgttaattttacatcatggtatttaagttatgggatatcaggagaagaaagaacacccaaagaacttta

SEQ ID NO: 454041 - DNA, 508 bp, Homo sapiens
gttcctatttctccacatcctctccagcacctgttgtttcctgtctttttaatgattgccattctaattggtgtgagatggtatctcattgtggttttgatttgcatttctctgatggccagtgatgatgagcattttttcatgtgtctgttggctgcataaatgtcttttttgagaagtgtgtgttcatcaaatcttataataccttattacaaggcatatcaaatctaagctagtattagtgttcttaggaaaagctggtcattactactcgcttttttttttcctaagagctatagctttgcagatgacactatggaccaactgtccatgttctctgcttcctagtgatccttcctgacagtgttcttgagcttttttgagctccatgcataaggggctttagccccatcrtggtcatcatacgggacatagccatttgcatatgttgtaagcaacttgggtgggttcacatctaaccattaggacctcctgaggataccatttc

SEQ ID NO: 454042 - DNA, 508 bp, Homo sapiens
gttcctatttctccacatcctctccagcacctgttgtttcctgtctttttaatgattgccattctaattggtgtgagatggtatctcattgtggttttgatttgcatttctctgatggccagtgatgatgagcattttttcatgtgtctgttggctgcataaatgtcttttttgagaagtgtgtgttcatcaaatcttataataccttattacaaggcatatcaaatctaagctagtattagtgttcttaggaaaagctggtcattactactcgcttttttttttcctaagagctatagctttgcagatgacactatggaccaactgtccatgttctctgcttcctagtgatccttcctgacagtgttcttgagcttttttgagctccatgcataaggggctttagccccatcatggtcatcatacgggacatagccatttgcatatgttktaagcaacttgggtgggttcacatctaaccattaggacctcctgaggataccatttc

SEQ ID NO: 454043 - DNA, 616 bp, Homo sapiens
ttaattttaccgggagttttcaaagaaatattaagtttgatagctcagatttgtttgagaactgttgacatgcatactgtgttatcctgatttcttctctctggccccagttcaccaccaccaccaccaccacttgtgcctcctcatttaggaaaattttctgttcaatcacccactcagcactttcttctgtgctaccactctatctgaggtacattttatttcactatgtttaaaattttccctgtatttcaatttttttttacatgtccatctctccttgtaagatgagattcttacattgagtccatgtcactcatctatattatcaagatggaataaatgagactagagaaaaaggattgcaaggaatgataatacgagatggcttctgatgtctaaaaagagtgagtcagtatttagtgcttccaaaacaaagtagttagtaggctttctagtcaaatttccccacactagtactatgatttaccactttatgttactgcatgggaaataaaccttatttaacaggcctgttaaaaatgcattaaagcagkcagttcttgaaaaaaactccaaacccccaaaacagaattgccatatgagccagcaattc

SEQ ID NO: 454044 - DNA, 602 bp, Homo sapiens
atgatttaccactttatgttactgcatgggaaataaaccttatttaacaggcctgttaaaaatgcattaaagcaggcagttcttgaaaaaaactccaaacccccaaaacagaattgccatatgagccagcaattctactcctgagtatgtacccaaaataatggraagcatgatctcaaacaaatacatgtacataacagcattattcgcaatagccaaaacataaaagcaacccaagtgtccatcaatggatgaatgaataaacaaaatgtggtatatacatataatggaatattattcagccttaaaaaggaagaaaattctggctcatgctacaacatggataaaccttgaagacattatggtaaatgacataagccagtcacaaaagaacagctatgcatgatttcactctagtcaaattcatggacacagaaagtagaataatggttgccagggctgggcggggaggaaggaatggggcattattatttaatccgtacagagttttagttggggaagataagaaagttctggagatggatggtgattatggttgcataatgtaaatgtacttaatgtcacagaactgtgcacatgaa

SEQ ID NO: 454045 - DNA, 602 bp, Homo sapiens
atgatttaccactttatgttactgcatgggaaataaaccttatttaacaggcctgttaaaaatgcattaaagcaggcagttcttgaaaaaaactccaaacccccaaaacagaattgccatatgagccagcaattctactcctgagtatgtacccaaaataatgggaagcatgatctcaaacaaatacatgtacataacagcattattcgcaatagccaaaacataaaagcaacccaagtgtccatcaatggatgaatgaataaacaaaatgtggtatatacatataatggaatattattcagccttaaaaaggaagaaaattctggctcatkctacaacatggataaaccttgaagacattatggtaaatgacataagccagtcacaaaagaacagctatgcatgatttcactctagtcaaattcatggacacagaaagtagaataatggttgccagggctgggcggggaggaaggaatggggcattattatttaatccgtacagagttttagttggggaagataagaaagttctggagatggatggtgattatggttgcataatgtaaatgtacttaatgtcacagaactgtgcacatgaa

SEQ ID NO: 454046 - DNA, 608 bp, Homo sapiens
gtgctgctggattcagtttgcaagtatttgttgaggacttttacatcgatattcatcaaggatattgacttgaagttttcttttattgttgtgtctctgctaggttttggtatcagtatgatgcagaatgagttgggttagaatctcttctcctcagtttttgggaatagtttcaataggagtggtaccagctcttctttgtatatctggtagaatttgggtgtgaatcagtcaggtcctcaacttttttggttcatgggctatttattactgttacattttcagagctcattataggggtctgttcagggaattagtttcttcctagttcagttttgaaagggtggatatgtccaggaatgtagccatccctgctaggttttctattttgtgtgcatagaagtatttgtatttatttctcttggttatttttatttctgtggggtcaatggtaacactccctttgtcatttctaattgtgattttttggatcttctctcttttcttcttcagtaggctagctagcagcttattattttwaaaaaaaaaaaactggattcgttgatcttttgaatggtttttcacgtctcaatctccttcattcagtt

SEQ ID NO: 454047 - DNA, 608 bp, Homo sapiens
gtgctgctggattcagtttgcaagtatttgttgaggacttttacatcgatattcatcaaggatattgacttgaagttttcttttattgttgtgtctctgctaggttttggtatcagtatgatgcagaatgagttgggttagaatctcttctcctcagtttttgggaatagtttcaataggagtggtaccagctcttctttgtatatctggtagaatttgggtgtgaatcagtcaggtcctcaacttttttggttcatgggctatttattactgttacattttcagagctcattataggggtctgttcagggaattagtttcttcctagttcagttttgaaagggtggatatgtccaggaatgtagccatccctgctaggttttctattttgtgtgcatagaagtatttgtatttatttctcttggttatttttatttctgtggggtcaatggtaacactccctttgtcatttctaattgtgattttttggatcttctctcttttcttcttcagtaggctagctagcagcttattattttawaaaaaaaaaaactggattcgttgatcttttgaatggtttttcacgtctcaatctccttcattcagtt

SEQ ID NO: 454048 - DNA, 354 bp, Homo sapiens
catttagtctaatttttatgactatctttttcatatatggaaattctttttttcacagtcatttccttatgacttaggtttcttctatatctttaataatttaaaactttatatattctttgagattgctctttttattccattttcttgcattagagattggtctgttaacccaatatgtggagagctattcatcaggtttttttktgtgtgtgactgctgatactgtctcattttgtatcattttcatgtatatgatttgtaattttttgttatgatctcattttcagtaattattttttccttacctgtgggagtctatactgcaacctgaagtatagaagagcagtttta

SEQ ID NO: 454049 - DNA, 566 bp, Homo sapiens
ttagtctgttgttgcgctcaattgtattttttattttattcattgaattcttcaactccacactttttgtttggttctttttatgatatctagttctttgctgaatttgtcattaaaatcacaaattgttttcctgatttcattgaattatttacctttattctcttgtatcttgcttagttttcctaagattactattttgaattccttttcaggcatttcatagattttctttgctttgaagtctgttactggagaattattgtgttcctttggcgatgtcacgttcccttgctttttcatgttttatgggtccctacattgaaatcygggtatctgctgaaacagttacctcttccaattttatctagtagatttcataaggaaagacttttttttctgtaagtgcatcctattgtgtcagttgggtaaagtactttggctttggttgtgggtgagcacagtgctgtaatcatgtaaatctttttttgactgtaatcaatgccagcagtatctgtgagtgcctcagtggccaagaccgtaggtgtttgtggaggcagtggcat

SEQ ID NO: 454050 - DNA, 577 bp, Homo sapiens
atggatggaactggaagtcattatcttcagtgaaataagccaggcacataaagacaaatatcacatgttctgacttatatgtgggagctaaaaaaaattagaacacatagaggtagggagtggaaaamatagataatggagaccgagaagggtgagtgatgtggggaggataaagagaagtaagttaaagagtacaaacatacagtaagatagaaataaattcaatgcttgataatagattattatatatgggattagtatatttaacaaaaatattttgtactcagatgatgcacaccctgaataccatgtcttgatcactgtgcattatatacatgtaacaaaatttcttatgtgccccataaatgtgcgcaaatttaaaaacattacttgggggtgttggtggtaatcaatttagttcagcataattatttgactgtatgattttcaagttactataggcaattcaaattttgatgggaattttagggcatattaatgatacagcaaatgaaactttatagaattttagttaaataccattttaacaggtagatatatcgttttgtgtgtaaag

SEQ ID NO: 454051 - DNA, 556 bp, Homo sapiens
ccacagacaggaacccctcagacaccgagttgtagaaggaaagggctttattcagctgggagcatcggcggactcacatctccaaaaaccaagctgcccaagtgagcaattcctgtctcttttaagggcttacaactctaagggggtccaagtgagagggttgtgatcaattgagcaagcagggagtacgtgactgggggctgcctgcaccagtaatcagaacagaactgaacaggacagggattttcaygatgcttttccagtacaatgtctgaaatctatagataacacaagcagttaggtcaggggttgatttttaactaccaggcccagggcatggtgctgggctatctgcctgtggattccatttttgccttttagtttttacttcttctttctttggaggcagaaattgggcataagacaatatgagaggtggtctcctcccttaaatccatgtgtttgtatgtcttatcctctgctaggctttgagttgcttaagggtaaaagatgttttatcatctctttatctacattccctagtataatacctggt

SEQ ID NO: 454052 - DNA, 575 bp, Homo sapiens
taatttaatcaattcaagtgtagcaggagactaacaggtggttcttgatccggtaataatctgtagagaattaacatagaaagaagtaaatgaagtcgggggaagccacatgattttataagttgaggtcaaggcacactgtgtacagcactccacctcagggacataccagagaggtggacataccagaagccaggaaattcagaaaagagttggtaccagagagacctctcttcctgtcaggacagttttcctgggtatttccagtttgttcccacatccaagttccaggaatcactgcccaaagcattcagtataagtgtgakgcaaaatgctttacattctgtatttactgtttgaaaaattagataatgagcaacctggaaaccaaacaatcatcttaactaaggatgagcaggttgatgcatagtgctgctcttcccttctcccactcttccctcccaagtttttctttaagcactcggtcccttctaggattgatatgggataagcatgtttgtctagttggcatgaaaataaaaagctgaactgatccccttaccattacataatgg

SEQ ID NO: 454053 - DNA, 543 bp, Homo sapiens
tgtagggaaacaatgaaacaatgaggcaattcaaagatcaagatgagatttaaatactgtataaaaccttcacccatgaaagacctttaagtggacagaatcgcatcttttgattgctgattttatacatctctgttaaggataaaaataaaacattttgaaacagccctcttaggtgactgtggaccaagggcactgaaaacttttatccacctagtccagacaatattccttcatcacctttacactgagctgctgtatattggcagaaagtgaatgtctaacatactttctactagagtctactgctacacccagaactaatgaaacagtgtgtagtccatgatgattatgtggatccytaatttcacaaatttctcctaataaggtgtgatagttaattttaggtgtcaccttgactggattaaggaatatgtagagaaccgggaaagcattacttctggaagtgtctgtggagatgtttccatagaagattggcctatgagtcagtggacccagtggagaagcttcaccctcaatgtg

SEQ ID NO: 454054 - DNA, 536 bp, Homo sapiens
gtagttgggctattttaatttctgtcttgcttaatttcttagcttcttcactaacaaagctttaaaatgtgttatgtactttaggggagaaactgctgaatctagagtttacttccacataccaccttatttactaagatattagcttcttaatttctggctgccttgatttatcmgtactgtaacttttgtctctcttccatttcaaattattaaaggttatgcttacttcaagaaatgtttacatcaacccttttcctgaattcttagcttgccataacaaaaatgacaagcaaccccagcagcttgaagaatgttggcccacttctctgaaaacccctttaagctttaagatcttgatgactgcattcctggttgaattaacagtttttcaaaaagtatttacaaaatgtcactttctccagttttcctcagcacatcttaatgtgaatattagtcttctgagatctatctctttatcatatttggtaaaaatgtagaaacatctccaattgagagtctttgagggtagactg

SEQ ID NO: 454055 - DNA, 536 bp, Homo sapiens
gtagttgggctattttaatttctgtcttgcttaatttcttagcttcttcactaacaaagctttaaaatgtgttatgtactttaggggagaaactgctgaatctagagtttacttccacataccaccttatttactaagatattagcttcttaatttctggctgccttgatttatcartactgtaacttttgtctctcttccatttcaaattattaaaggttatgcttacttcaagaaatgtttacatcaacccttttcctgaattcttagcttgccataacaaaaatgacaagcaaccccagcagcttgaagaatgttggcccacttctctgaaaacccctttaagctttaagatcttgatgactgcattcctggttgaattaacagtttttcaaaaagtatttacaaaatgtcactttctccagttttcctcagcacatcttaatgtgaatattagtcttctgagatctatctctttatcatatttggtaaaaatgtagaaacatctccaattgagagtctttgagggtagactg

SEQ ID NO: 454056 - DNA, 536 bp, Homo sapiens
gtagttgggctattttaatttctgtcttgcttaatttcttagcttcttcactaacaaagctttaaaatgtgttatgtactttaggggagaaactgctgaatctagagtttacttccacataccaccttatttactaagatattagcttcttaatttctggctgccttgatttatcagtactgtaacttttgtctctcttccatttcaaattattaaaggttatgcttacttcaagaaatgtttacatcaacccttttcctgaattcttagcttgccataacaaaaatgacaagcaaccccagcagcttgaagaatgttggcccacttctctgaaaacccctttaagctttaagatcttgatgactgcattcctggttgaattaacagtttttcaaaaagtatttacaaaatgtcactttctccagttttcctcagcacatcttaatgtgaatattrgtcttctgagatctatctctttatcatatttggtaaaaatgtagaaacatctccaattgagagtctttgagggtagactg

SEQ ID NO: 454057 - DNA, 566 bp, Homo sapiens
attgggccagtagaacagcctcaacttgaaaaagtgcttcactgcttcataagaataggcaatccaagaatcaacttgagtttggtgaatgcttcatgaagtaatcaaaggtattttttcttttgccaagtaatagtatacagaaaagccacgagctgtcagaatttttacccagggacttaggaagaactttttgcactgtatacattttaaaagtgcaatgagaaaaaaataaattaagctcctgtgtcttagcttctcatattcaacytcattcaaaatgctgattttggtccttcagggaagggacgccagatcatgtgattccagaaacatgtaacataaaatagcacagctgagcattcctcagaagtcagggattgtccttgaacaggtagattcagagggataggaaatgggacacaatgaattagtgtggattgtctgggagatggagggaggctggtctaactggagagagaggtttgttttacagggttccagcatatcagttcctacctgctgggatgagagctttaatttcacaagcaaacaaaatcttcaga

SEQ ID NO: 454058 - DNA, 631 bp, Homo sapiens
taaaatagcacagctgagcattcctcagaagtcagggattgtccttgaacaggtagattcagagggataggaaatgggacacaatgaattagtgtggattgtctgggagatggagggaggctggtctaactggagagagaggtttgttttacagggttccagcatatcagttcctacctgctgggatgagagctttaatttcacaagcaaacaaaatcttcagatgttgaaaagtagatcattgagatttaatctgcattgcatttatagatctctagagattttatatctatgtatatagatatatgtacatatttktgttatatatataatctgtgtgtatgcatatatatatatataaaaaaaaccataccattatgtaatctctggcgctatcttagtatttaatgtaaatcagtcatctttcatattttaagcgtttctttttcttttcttaaaggagaagaattctaaaaagaatcaaacccttgaaaattagaatcaattttcccaggtgacttccatctgatgatacatatatcaagttctcaaaataagaatggcattagaagaaggtagacgtagttaaataataagaaatcttgaaagaaatatgtaagacaagggtggg

SEQ ID NO: 454059 - DNA, 482 bp, Homo sapiens
ttttttttattatgcctttcttgagcaaatagacacctcatgtaattttttaaataaaaagtattaaatttgctgatatataacaggtgcagtaagcaggattgtatataatttgaaagagatgcaatgaattaaattcaggagttaatttgcatggaaaggtctatataatgagacaaatgccgactcgaattgtagttgtggtagcagtaagcatttctgtaattccttatgttatttcaggtatgtgatttttatcaaagacaattataaaacacagaatcattgaactatcagtgaaaayacatttcatttaaaaaatatttatgatgattaagatatagattgtaaacacacacacacacacacacacacacacacacacgtttagtgacgagagcattcagattgaaaaaagtgacttttccaagtagcatggtaaaacttagacccaatgtatcctcttctgtagtccagaatcc

SEQ ID NO: 454060 - DNA, 569 bp, Homo sapiens
cgcctttttaaagtaaaacattctcttcataaattgttctaagcagacataaacagacattttattttctctgttgtgaacaaaaaaaattaccagaccatatcttttagaggaagtagagagaactccagaaatagcgttgactcttagacatctccagygcaagctttacacaaatattcttttccagtctcgcagttaatttttcaagtgtagacatatcagttacttttttaccaattttttctctggtgatgagtactgtcactgtttttttctgcttatattacatgtctatctcatatgtgtatatagtttggctttcttttaaaatttacctgtctatattattattttctttagaacattaggaaataactaggtatccacaacactgcaaagaatgtttgacaaatatttttaaaaatgagaaataaattatctgcacatttgttttctttgtctctgtttacagtattttgactcaaagctttgctactgtcttgtcaattatcataattcggagaagattttttccctgataaattgtataaaatactgcacgttca

SEQ ID NO: 454061 - DNA, 576 bp, Homo sapiens
aaagaatccaatgacattagctcttgtcatcttgcactatgtattctagtatagaattaaactaaaattaatgatcaagtgtacattaaactagtggaagttaaacatgttagtgtgggtgatgatctaagtaaagaagcgtatagagtcaaatggaatgagccaagaaaaattaattagatgacatcaactatatggtggttgtgaagaaggttatgaaaaaaggtagaaaaagaacagagggatttccaggtaaaaggaacggcatagagcatattctcgcttttttcactcaatctgtctccataattttactctttaaagaaagscttcttggataaaattaaaaattggggtaagataagtggtttaacttttttaaacaaatagacactaagattcatgacaaatagtacatcaggtaagatgaaagacatttaaatattgatcaaaatcacttcacacacatattgacataaccaaagccattttcctgacaatatttggataattcattcaaaatgtattatacatatctctgtttattatagtgatataatataaatcttttcaggt

SEQ ID NO: 454062 - DNA, 579 bp, Homo sapiens
gtataattaaatatttagtgcatttgtataataaggtctacatgttttaaataacataatatgtaatatgataaaataatattttactgactttttaaattatatgtaagtgatttatragcatctaaaactgaggttatcccaggctaatgtcaaccctctcccaatagaataatcatgaatatcatcttttgaaagactagaaaataaaagccattgtcgttgcttcagctatacatggtaattgcagccatggcataataaacatcagtacttgtcttatataaacacagaggagaaacacaaatccaggggaagtcacagcttttaaagttattacttaacttccttgtccagtcataaagatgtactttcactttttcttcattcgttttctttattctttttatttttgtcactgaatgagcaaaatttatgtagtttttttttaaactacataatcctgtctagtgggcaaatcgctaaataataactaaattaattcattttaggtaggataatcatgtatatgtcatgataattaccatgataattttttatccaatcaaaaaatttaaa

SEQ ID NO: 454063 - DNA, 579 bp, Homo sapiens
gtataattaaatatttagtgcatttgtataataaggtctacatgttttaaataacataatatgtaatatgataaaataatattttactgactttttaaattatatgtaagtgatttatgagcatctaaaactgaggttatcccaggctaatgtcaaccctctcccaatagaataatcatgaatatcatcttttgaaagactagaaaataaaagccattgtcgttgcttcagctatacatggtaattgcagccatggcataataaacatcagtacttgtcttatataaacacagaggagaaacacaaatccaggggaagtcacagcttttaaagttattacttaacttccttgtccagtcataaagatgtactttcactttttcttcattcgttttctttattctttttatttttgtcactgaatragcaaaatttatgtagtttttttttaaactacataatcctgtctagtgggcaaatcgctaaataataactaaattaattcattttaggtaggataatcatgtatatgtcatgataattaccatgataattttttatccaatcaaaaaatttaaa

SEQ ID NO: 454064 - DNA, 603 bp, Homo sapiens
ttcagtaattatctcatttactcatgaaatatattggaaggatagtgaagggtaagtcaagaatgcacaattcagttggaatattttatgtttattacaaaacatatatagcaattcaaatatgtggctttgtttatttttaatagctatgtataagatatgtctaactacaaagtaaggaccacatttyctaaaatccatttcaagctcaaccagctccaaacaaaatagttcagtgctccctggttgcatatttcttctgtgtaattttatctctgtgatgcagatgtcactctgaggtttctaatattgacacaatagccttagaaaacctccacccttcaaggtagtagacataaaaataatttaaccaataaatctgaaactttcaaattcatgtttcatgtttttcacttgtttggttctttttgtcttttctcttcttttcctctattccagcctctcctgacacagggtccacctcctgtggctgccacttgacaatggcaattcctttgtatggggatgtggtggcactgtgacactcacatatccacgctgtcttcctgtcccttctcttgtagctcgagtcccttcaacttt

SEQ ID NO: 454065 - DNA, 595 bp, Homo sapiens
atccaatttaaaagtcagctatacagctagattggtcttcataatataacactctgatatttagctagttgtttttttttttwaaagatttctgaattccctctaggcttatctgtatatctccatttttaatgttcctctaacacactcaaactctttcttaaaaaaccttaaaccctctctgtgtgatctgagatgtaaatttgctacattgttttctccaaaaatcagtgagggcatcggctatgtaagaaagataaatgttaacctttcccattaacaaaggcataattcaattcaactgtacagttttaaactagtgagttttatctgtctcatggctcaaattttcaaataaaaattatcaagtctttgtgtctgtctgtatttttacatgtatatttgtgtgtgtgtgtctgtgtattatctacatgagtatcaaattgacgtaaataaatggcactcataatttaagttacaaaccctaaatgctaagtttatgtgattttagtaatctttgattaatcattaaggtttgaagattattggtaaaataaaatagacatatattcaaaatttaatgtagacatttttt

SEQ ID NO: 454066 - DNA, 617 bp, Homo sapiens
gcatatgtaggtatacacaggtattatctgtgtattgaggtaagttaacatctggatacatataactctagctgcccaatatgttgctcagaagtacccaaatgaaagtrgggcaagaagagatcaggctggctcagggaagccaccttccttctgcttctaaccttactcttccactaattaacttcttgtagcaccggaaacaaaacggcagatgctattttgttttgtctttccagaattatcttaggaaaccaaggagaggagagtgacatcatcccctcactcaagagcatcggtagtgttgactaggaaatttgattgactggttcaaagactgacattcagtgcaccttactcttcaaggcgttaacagtccaggcagaaagagtagtcagagctgcctctcctgtcactctaaaggctatgagtcctgaatagttattgcttaatattttaagcacacaaacaccatgggcagtagacatttgaagctcatcttatgaggtaatttggagaaaacttgaactgttttcttttctctcttctcttcacaaacttatggctccagcactagaaccttccaagtggaggaatggagaatctagtggcacatg

SEQ ID NO: 454067 - DNA, 617 bp, Homo sapiens
gcatatgtaggtatacacaggtattatctgtgtattgaggtaagttaacatctggatacatataactctagctgcccaatatgttgctcagaagtacccaaatgaaagtagggcaagaagagatcaggctggctcagggaagccaccttccttctgcttctaaccttactcttccactaattaacttcttgtagcaccggaaacaaaacggcagatgctattttgttttgtctttccagaattatcttaggaaaccaaggagaggagagtgacatcatcccctcactcaagagcatcggtagtgttgactaggaaatttgattgactggttcaaagactgacattcagtgcaccttactcttcaaggcgttaacagtccaggmagaaagagtagtcagagctgcctctcctgtcactctaaaggctatgagtcctgaatagttattgcttaatattttaagcacacaaacaccatgggcagtagacatttgaagctcatcttatgaggtaatttggagaaaacttgaactgttttcttttctctcttctcttcacaaacttatggctccagcactagaaccttccaagtggaggaatggagaatctagtggcacatg

SEQ ID NO: 454068 - DNA, 617 bp, Homo sapiens
gcatatgtaggtatacacaggtattatctgtgtattgaggtaagttaacatctggatacatataactctagctgcccaatatgttgctcagaagtacccaaatgaaagtagggcaagaagagatcaggctggctcagggaagccaccttccttctgcttctaaccttactcttccactaattaacttcttgtagcaccggaaacaaaacggcagatgctattttgttttgtctttccagaattatcttaggaaaccaaggagaggagagtgacatcatcccctcactcaagagcatcggtagtgttgactaggaaatttgattgactggttcaaagactgacattcagtgcaccttactcttcaaggcgttaacagtccaggcagaaagagtagtcagagcygcctctcctgtcactctaaaggctatgagtcctgaatagttattgcttaatattttaagcacacaaacaccatgggcagtagacatttgaagctcatcttatgaggtaatttggagaaaacttgaactgttttcttttctctcttctcttcacaaacttatggctccagcactagaaccttccaagtggaggaatggagaatctagtggcacatg

SEQ ID NO: 454069 - DNA, 617 bp, Homo sapiens
gcatatgtaggtatacacaggtattatctgtgtattgaggtaagttaacatctggatacatataactctagctgcccaatatgttgctcagaagtacccaaatgaaagtagggcaagaagagatcaggctggctcagggaagccaccttccttctgcttctaaccttactcttccactaattaacttcttgtagcaccggaaacaaaacggcagatgctattttgttttgtctttccagaattatcttaggaaaccaaggagaggagagtgacatcatcccctcactcaagagcatcggtagtgttgactaggaaatttgattgactggttcaaagactgacattcagtgcaccttactcttcaaggcgttaacagtccaggcagaaagagtagtcagagctgcctctcctgtcactctaaaggctatgagtcctgamtagttattgcttaatattttaagcacacaaacaccatgggcagtagacatttgaagctcatcttatgaggtaatttggagaaaacttgaactgttttcttttctctcttctcttcacaaacttatggctccagcactagaaccttccaagtggaggaatggagaatctagtggcacatg

SEQ ID NO: 454070 - DNA, 528 bp, Homo sapiens
tctcacttgcctatgcctctagaaacctggaaccaagtgaatgggcaccaatacttctaataacttggtcatacctaatagactgaaagaattttcctctcatggcaggtaccacaaattggtctctagatatataaggaaaattggaattggaaccactaaaacctatatatatatacacacatatatatatgtaactatatatatacatatatgtatatatatatacatatatatacagcttgagtraaaattatactcattaagctatatatatatatttacctgagggatgggttacaagctgatcctaagataatttaacaaggggctatttaaaatttattttgggatcagggaagaaattactaaaaaacaagaatactttaaatacacaatttccattgaaatgctgggccaataagataggggcctatagaaaaccagtcatgtgaaatatagtgccctaaacccagagccttattatatcctattgttgctgaatggtatcagtatgtgctgttgtat

SEQ ID NO: 454071 - DNA, 641 bp, Homo sapiens
taaactcaggaatggggatcaccatctctgcctggacacaggaagaagatgaagtatggacctggtgctcctatcaaggtgctggcaaatgagatatgctggatgccaggctgtctgtggctggctaagctgctccccatcttttgaggcacagccagtacacaggtggtgagcggggcccagcatgccctgaccttctcctgttaggaggtgatcagcagccctccgtcctcactgtgccacgtggaagcctggggaaaggagacacattttgccaacacatttgatacatgcagayactgagtcctagagatatgaagatatttgccccgaattacaaaacaagctagaaaataagaattgtttggttacctttcattttctgtgatgtactatcctcataaaacaaaattcattttatatttaccataatgcaaattaccatagttgacttaaatttataatttttattttaaatgaaaatataagtgtttatgacacatcttttctaagagtaatggaaaaagtcaaggtagaggaaagcatgaaaaaaaaaaaaaagtaagattattcaggctacctggaatgaacttgattgagatttgactggatttgtaatataagtagtgctatttgagaca

SEQ ID NO: 454072 - DNA, 641 bp, Homo sapiens
taaactcaggaatggggatcaccatctctgcctggacacaggaagaagatgaagtatggacctggtgctcctatcaaggtgctggcaaatgagatatgctggatgccaggctgtctgtggctggctaagctgctccccatcttttgaggcacagccagtacacaggtggtgagcggggcccagcatgccctgaccttctcctgttaggaggtgatcagcagccctccgtcctcactgtgccacgtggaagcctggggaaaggagacacattttgccaacacatttgatacatgcagatactgagtcctagagatatgaagatatttgccccgaattacaaaacaagctagaaaataagaattgtttggttacctttcattttctgtgatgtactatcctcataaaacaaaattcattttatatttaccataatgcaaattaccatagttgactyaaatttataatttttattttaaatgaaaatataagtgtttatgacacatcttttctaagagtaatggaaaaagtcaaggtagaggaaagcatgaaaaaaaaaaaaaagtaagattattcaggctacctggaatgaacttgattgagatttgactggatttgtaatataagtagtgctatttgagaca

SEQ ID NO: 454073 - DNA, 535 bp, Homo sapiens
aagaagactgtgtcactcctcgctcataaccttctagtagcttcccagcttattcagcataaaagtcatcacaatgacctttcatagctttatgattgcatctccttccactcttgaaattgagcacaatttcccacccattgtctctttatactgttctacaaacacacagcctgcactcaatcaaaggtggctcctttctcacctctttgcatgaacaaaggttcattgtcttatcaactcaataacagrtgtcattgaaatagcatatttcttcttttctttgacttacacacacacaccaactcttagaacccacccccccttctttatttattttgtcctagcacttatacaatctaacgtattatgtttttacttacgtgttttatttgtctcccactaggaaaatttaaattatatgaaggtagatatatgcttattttctaactgtatattatctaaaacatgtctggcatatagtcagaacttattaaatgtatttttatgccaggcgcggtggctcacacctgta

SEQ ID NO: 454074 - DNA, 487 bp, Homo sapiens
gttccttcaattttactttaaaatatatgcatttttaaattttactttaggcatatgttaaggaagagtagaaggtcattcaagaatagggttcttggggaatactaattaaagaaggaaaatgaagagtataaattagagttaaattcaaattattacttcgttttatgagaagtcagagataagcttgctgtttggaaattgcatagctgggattacactatatggagactgtattagtttgctagggctgttgtaaaaatgwaccccaaattgagaaacttaaacaagagaaatttactatctgattcctggagactagacgtccaagatcaaggtgtcaccagagttggttcttcctgaaggctgtgaaggagaatttgtcccatgccccatcctggcctttggtggtttgttggcaaccttctgtgttccttggcttatagtcgcattgcctaatctctgccttcattttcacatgatgttc

SEQ ID NO: 454075 - DNA, 539 bp, Homo sapiens
agttaattccacagctctcaagtggaattgctggcttgaaatctgtcttccatttcaagtcctgtgctccctccactatctgctttcttctcctggaatgatatcactgctgtttacctgggtgaatataaaacaaaaagagtctaaaaaattaggagcctatttgaccttcctagatttctattgattgattgattaggttcaaaaacagggatggggtcttgctatgttgcacaggtcttgagctcctaggctcaagtgatgctcctccctcagcctcccaaagtgctgmgattataggtgtgagccactgtgccaggccagttccctagatttgaaattactttggggtacaattaacttgagttacatcagtaacttgagttacatcaactgtaaagagtaacgtaggcagaatttcccttcattattttcattatttttgttttagcctggacgtttttctttctgtccgatgcaaacaatctctttttctcaggtactcaggtatctcttatttgttgcctttttcttgggta

SEQ ID NO: 454076 - DNA, 487 bp, Homo sapiens
gttccttcaattttactttaaaatatatgcatttttaaattttactttaggcatatgttaaggaagagtagaaggtcattcaagaatagggttcttggggaatactaattaaagaaggaaaatgaagagtataaattagagttaaattcaaattattacttcgttttatgagaagtcagagataagcttgctgtttggaaattgcatagctgggattacactatatggagactgtattagtttgctagggctgttgtaaaaatgtaccccaaattgagaaacttaaacaagagaaatttactatctgattcctggagactagacgtccaagatcaaggtgtcaccagagttggttcttcctgaaggctgtgaaggagaatttgtcccatgccccatcctggcctytggtggtttgttggcaaccttctgtgttccttggcttatagtcgcattgcctaatctctgccttcattttcacatgatgttc

SEQ ID NO: 454077 - DNA, 370 bp, Homo sapiens
catcctttgccaaccctaacatggaagtcagagcagcctaaatggaagcctgagaaaaaggaggaggcttgtagcagaattccggtatacacgcactaaagtcatgtgttagcaatgacagtttttggatccctcatctctattgttcataagagaacatccctataatgttttaagtaaaatttttattgaagtataacataaatatagtaaagtttacaaatcgcaagtgtaaaagtcagtaacatttctctttayaattatcacctaaatcaatcaaggaaaagatgattatcattagcccctgtcttatgctgtccaaaccacaactcgggctcccctaataaccattatatcaatttctagcact

SEQ ID NO: 454078 - DNA, 486 bp, Homo sapiens
ttcacttaattttggtgttatgtataaatatagaaagtacaaagagataaaaaaaattttaccagtctttcttaagagattgttttgaaaaacacatgagatagaatatatggaagtactatgaaaaccacaaagcatcatcccatcattagttattattctattctttcaggcaaaaaaagagggatgtctgaatatatcctgaaagatacaaaagtgaaataaaataatggggttaaattgtcttgtgtcatcctgtgagaaactggctgaaagaataacacttaatatggctttattgcctcttgtctctacctttgtacaacgtatagctttctgaggttggaaagaatcccttacacaccaaggctgtacggtctgggagtctcccatagccacagagtagggaggagaaccagtactatatatcacaaaaagcaatsccccaaaagctaaccatatgagtcagttccattcttaagacat

SEQ ID NO: 454079 - DNA, 599 bp, Homo sapiens
gagcagtggaaaatggagtggtcattggagggtggtagtcaaaagtcaatggtctctctctagttgtgacatataactggcttaaagtggaaggaggaattggacagtcaggaactcagtaaatgattttttctggaaaaaaatcccaaataaggattatatttgtttctctggtatcgcctggctatatttgatttacttccctaaaatataagagcaacatttgaccagcttccttcatggggctctttatactgagtttgttgacagtcatggtacttttttctctgtgattttctgcctccagtttttcttgacatagtgtatatctgagagtaattgcaagaaaatatgtaatcatctttattcaggccatgatacatctgatttctggtcttttatctgtttcctttcagtttggtaccaaccacaaataccagtgactctgaagcaaacaaggactgtatggagayggttgttggacatgctcttcttgcaaggcctaaactttctttcctatttctggcctgaaatatgattctacctccatttactttctcttgttgtatttcccaagacaactaagacaggatactaaa

SEQ ID NO: 454080 - DNA, 653 bp, Homo sapiens
aactagtatttaaatctacatagagatcaaatgaatgaatcccgagtgtattttgggcctggagagggaggtcatagagggactttatgacatgccagacccaagtgattattagtgtcatcatcatcatcattaataacgtaacatcactttcatcattattaatattttagatgagaaaatccttcargagtaggcttccactacttccagcttcccttctcaccctgtctcctactttaacagactccaaggcacaaaagcacagcatttcttccaagtaggtctctcctctctctctcaccaactttaagtttcttccatgtacatgatcatgtgaattctcatggggggcaacgcaatttaaagttggaattgcctgaaaaacaccagcactgttcgggtactcagaaatgatatccagaccacatgcaaatgaactcacagccctcttaactaatttgatccacctggatgtggctcttaggaaaaacctaatagagacacctgctatgaacactgaaagaatagtcccctcggtggtttttcaccccttctgtttctgctaccaattttaactaggggaagtaatacgctggtgtaaaacagtaactaagagttgggaagaaatagtaaccattgaacttcattca

SEQ ID NO: 454081 - DNA, 653 bp, Homo sapiens
aactagtatttaaatctacatagagatcaaatgaatgaatcccgagtgtattttgggcctggagagggaggtcatagagggactttatgacatgccagacccaagtgattattagtgtcatcatcatcatcattaataacgtaacatcactttcatcattattaatattttagatgagaaaatccttcaggagtaggcttccactacttccagcttcccttctcaccctgtctyctactttaacagactccaaggcacaaaagcacagcatttcttccaagtaggtctctcctctctctctcaccaactttaagtttcttccatgtacatgatcatgtgaattctcatggggggcaacgcaatttaaagttggaattgcctgaaaaacaccagcactgttcgggtactcagaaatgatatccagaccacatgcaaatgaactcacagccctcttaactaatttgatccacctggatgtggctcttaggaaaaacctaatagagacacctgctatgaacactgaaagaatagtcccctcggtggtttttcaccccttctgtttctgctaccaattttaactaggggaagtaatacgctggtgtaaaacagtaactaagagttgggaagaaatagtaaccattgaacttcattca

SEQ ID NO: 454082 - DNA, 603 bp, Homo sapiens
acaggtgatactgatatgttctgtaactaaggataccatcacacaagccccatgtgatgattaaaattcatggaaagttagctcagtttcccattattcctgtttacaataaattcctccctttcccaccattgttccagtgataaacacagccaaatccttctttttttaaatatagctcacttaggtttctttgcatctccagctctctgatgggtttttttaattatgattytttttttttttttctgagagggagtctcgcactgtcggccaggctggagtgcagtggcatgatctcggctcactgcaagctctgcctcccaggttcatgccattcttctgcctcagcctcctgagtagctgggactacaggcacccgccaccacgcccggctaattttttatatttttagtagagatggggtttcaccgtgttagccaggatgatctcgatctcctgacctcatgatccgcccaccttggcctcccaaagtgctgggattacaggcatgagccatcgcacccagcctaattattatttttttttacatcttgcccattttgttcttgttgctaaggtagtaattaaaaaaggaaactg

SEQ ID NO: 454083 - DNA, 483 bp, Homo sapiens
gagaatttattcctcaagaatgattttatatttgattctatcagtaatcctcagaatatcaccagcatgagactgaattttgtgttaatttcttaatttgatatctctcaggacaagaacctaacgtaaattcaaaactttacccctgtgattttaaggcctatgcttacaatatatcgagagactctttttcacccaaaagccaggcagacacttaaagatgtctttgtcatcttctgatgctcctgagaagattgtttttatacagtataatttcactgaggttatagcatttttaagggttcctactttatatgtgcgtgtgtgtgttggaagaagatattaatcccagctatgtgactcttgtaagtccaaaacttcatctctcatacttgaatgaatattaaaaataaagacctaatctttcactttaggacaggttcaaataactaaaaytggacttaccatttcatcctatataac

SEQ ID NO: 454084 - DNA, 539 bp, Homo sapiens
gatagagtcagacaaatggcatttatcaatgggtgttttctggcattggaagcagggggacaattcttcatttgtaggactaccaaacgttgcagaacttttagcatccctaaaccccacccatcaaatgctggtactgctcccaagtatttgtgattatgaaaattcctgcatacttccatacctccttcctgagggtagggaaggagcaataatgcttctatcgagggcactggccaacaattaaggaaagatgaggaaatctttggttcagggtcctgaaygtgaggctaaagaggttaaggcagataaaataggaaacaagaagtgactatgggctttaactggggcttgtgctgaaaacaattttctaatcacttacttctagccttgatgtccaagatgacggcaccactaattcaaaattatgtttccgacttaacttgaggcattaactcacaaaagacttacacccaaatcaagtcgattaatccaagtgtcacatatgggcattcaaatattaaagaataaattcctga

SEQ ID NO: 454085 - DNA, 498 bp, Homo sapiens
gcaccactaattcaaaattatgtttccgacttaacttgaggcattaactcacaaaagacttacacccaaatcaagtcgattaatccaagtgtcacatatgggcattcaaatattaaagaataaattcctgaaaactcaggacacttctaaattaasactactaaatcagtctcttacctcctgaggctagaatggtatgtagatggaagtaacttcccctaatgaaagaaatcaatctggcaagagaaccagagaagttaaagtaatttgaaggtgtctacatttcctgcccacccagccttattttctaaatttttttactatttagagagccactacagttgcttcaggcatgtcaggcccttccacacagcacatcttcccttgatgccaaaaccactggaaatggttttcaataggattgctgatttgccaaactacacttttgtcctcttcgcctttgccccttgagtggccctttaagctattttagctgaa

SEQ ID NO: 454086 - DNA, 529 bp, Homo sapiens
caagaagctactatatggggaaaactattgtattcatgtagtcatgtatgcaccacgactggcatatagtaggtgctcattaaataatttttgctaaatgagtgaactgataagkttctagaacttgtaaatgatctaagtctaatgacaactctacatgtttatgttatttaatatttaaatgagcacattcacatctcattatctcatttaactcttaaaacaacccagtgtagcaggacaggtactaatcaaacactgtcgattgtccactcaatagccacatcatttctcttttgtactggcaggagccctggttttcttctagagctcattttcctctaagtaaccagaattaatactgattggcttgaagtaatgtggtgactgtggcagcctgtttccatagaagacagtctgaggcaagggttaagtgctattttggggaggtgcattgcaaggcctagggagtgaaggaaggaggcagtgagacaggtaataatgagaagtaaacaaaaattgatgcttt

SEQ ID NO: 454087 - DNA, 578 bp, Homo sapiens
gagggtgagagacgacatagaagctaatctttgcttgcattcttgatctctcatgtactaaatagatgccttaggacaattcagaagaaatctctgagcctcagtttcccttagaagtataaagagagtaaaatcttctatctcataaaactactatgaggttcacaggatgcaatgttcatggaagtgctttgcaacatgctgtgtcagttagctattgctgaaaaaaatatggctgcataacaaaccaccttcaaaactctrcagcttaagacaatagcctatattcactgatctatgggttgggttgatccaggctgagcctgactggatttggcaggcagctcacatgatctcagctggattcattcacatgtctgatggtcagaatgggatcaactgacctaggtagggctcaataggacaaatcagctctagtccacatgtcactcatcctccttctggaatcagtaggctagcccagagatctttgtccactgataaatgaaaagtataagagagcaaactcagtcactcaggagcttctcagtcctttgctcacatcatgccatgctagc

SEQ ID NO: 454088 - DNA, 587 bp, Homo sapiens
ggtgtggtggctgccagaaacaccacaccaaagcagggtgagagcaagaaagaaatgccataatctttctcttctcccaacctctgatttcttgctggtgcctcccactggccaaacccaatcgggggccagtaggcaaaggaatccaggtgatgcagtccacactggacagcctcccaagtacagagcaaggcaggagagcaaagaatggatctgaggccagagtagatgtccatggaggttggtataaacagggaataaccaggacatctagttattcacatgccattctatctgcaagagtgggagatgcttattataatagtgaaaccccttttcaacattccaccatctgacacacacataaaatactggtgtaaaaatggctctggcctgaatacacatcartgttttttaatgtgttagtaaatacagtcgttagctgttccaagagagaattgtgcatcatcaactgacataaaagggagtgtaatgtcatcttcaattgctgttagaagaaataggatgaaattatgagcaattaggaaaagaaatattgtgtctctatggcagctcaggttttactg

SEQ ID NO: 454089 - DNA, 616 bp, Homo sapiens
tgtgggtatgcatataaacctagccagctaattgtcatttgtggatttaactcctcatccacccattcacrcttgtactttttttattccatcctcaccaacacaggcactatttacagtacatgttgtccctaaggaagagacccagttctgtcctcttctcttattctgttccacaggcagtttctatacacatgtgtgtgcgtgcatgcatgcaggtgtgattgtaagtcactttgtaaaatgtcaagtgtaatctagccactcattaataacacctagctctgcatttctgggtaagtaactaattgccgcttttcttgtgtcatcttctcctgcctgtgttgtcactttggtacttcaagggatcaaaatgtggaaactttcagttctttaaaaatcttatcttcaaaggaaaaattctgcgactgacttgaattgacataattggctccatatcattatttttccctacacacgttttaaatttaaaaatgcaatttgtttttgtttttttatttctggcatcacacaaaataattcgttataattgggaataaattgcttctaggaatgaataaagcatccaattgtgtttaaaagaaatgtgtcatta

SEQ ID NO: 454090 - DNA, 591 bp, Homo sapiens
tacactgggtttgtatctagctgtctcatgcagcactttctaagcagttactttttttttttttttttttttttttttttttgagaccgagtctcactctatcgcccaggctggaatgcagtggcgcgatctcggctcactgcaagctccacctcccgggttcacgccattctcctgcctcagcctcccgagtagctgggactacaggcgcccgccaccacgcccagctaatttttttgtattttttagtagagacggggtttcaccatgttagccaggatggtctcgaactcctgacctcgtgatccgcccgcctcggcctcccaaagtgctgggattacaggcgtgagccacggcacctggcctgagcagttactttttaagagctctgccgggaatccatttttaatagcaccagggggaaatctctgtttcagcacctctccatcgtggacagcagccaayccagcttattctagccagtctatgctttaccgaacattttattcctttcatttctatttacaggattggcccataccatcctttgccttcaaaaaagccttttcagagggtttgatgatccatgac

SEQ ID NO: 454091 - DNA, 571 bp, Homo sapiens
ctgggaaggccacgtaagcaagtgactgaaccaaggatgtagaatgaaggctgggatcrgggctgtaggctgaggtccgagcccaagtcaggaacgtgcaggcccagcacaagtaagcaggaggccccgtcagaggagtaaccagagactctgtcctgtaggttactgagtcaggattcgcccgagaaacagaacatataggatacaagaggagatttattgtgggaattgactcacacatttagaggctgagaagtcccagagtatgccatcttgcaagctgtaaaatgagggaagccagcagaatagctcagtctaagtctgaaggcctgagaaacagagcagctgaccatgtaactctcagtccaagcctgaaggcctgagaacctgggatgccactggtataagtccctaagttgaaggccagggaacctggagtttcaatgtctgagggcaggagaagacagatgtcccagctccagaagagcgacagtgaattcacccttcctcttcctttttgatctctccagacccccaagccactgaatggcacccacccacattggggagg

SEQ ID NO: 454092 - DNA, 571 bp, Homo sapiens
ctgggaaggccacgtaagcaagtgactgaaccaaggatgtagaatgaaggctgggatcagggctgtaggstgaggtccgagcccaagtcaggaacgtgcaggcccagcacaagtaagcaggaggccccgtcagaggagtaaccagagactctgtcctgtaggttactgagtcaggattcgcccgagaaacagaacatataggatacaagaggagatttattgtgggaattgactcacacatttagaggctgagaagtcccagagtatgccatcttgcaagctgtaaaatgagggaagccagcagaatagctcagtctaagtctgaaggcctgagaaacagagcagctgaccatgtaactctcagtccaagcctgaaggcctgagaacctgggatgccactggtataagtccctaagttgaaggccagggaacctggagtttcaatgtctgagggcaggagaagacagatgtcccagctccagaagagcgacagtgaattcacccttcctcttcctttttgatctctccagacccccaagccactgaatggcacccacccacattggggagg

SEQ ID NO: 454093 - DNA, 532 bp, Homo sapiens
gccacaacattctgcataggtttggtgagggcgaagacaaaagacgatgtgttcctaggcctggaagatgtcagggttttttttatatttttctattccgaaaattgccaacccagtgaggcttctcattctccttgaggagggaaagagtctcaagggcaggatcctccttgaactttgacctcgaaaatttaattactttgttttcaataatgtagtgtcttcttgtaaacctacactgttgggtaactctgtgcatagagaaatttatcattcaaatgtttataaacatcataycattgcacacatggttctcagcccaaataaaaaagttaaaagaaagctatacacaaaaatcactggtttaaactattttcatttcatcagccagtgtgcaaacgtagatatttttcactttccttgtataaacatattgttagtccagcaggtgtccattgtgctagaagagggttgccaactacatttaagatgctacatgaatgcaaatatgctcataaataacatacccagt

SEQ ID NO: 454094 - DNA, 578 bp, Homo sapiens
atgaaatggaccaattcctttagcgacaccaactacaaaatttgtaaaagaaataataaataattggaatatgtctattgtctgaatgtttgtgtccctcccccaaaattcatatattcaaaccgaatacctacagtaataatattaagaggtggggcccttgtgaatgggattagtgatcttataaaaagaggttgaagggagccgccttgcccctttcaccatgtgaggatgctgcaagaagatgccatctttgagaaagaggctctcaccagatatcagatttgctggtgccttgatcttcgacttctcagcctcaagaactgtaagaaataaatttctattgtttatacattacccaggttaamgtattttgttatgacagccagaatggtctgagaaaggtaatatgtaataaagaaattgaatcaataattagtaatcaatataattaataatcttctgaaataaaagcaccatgttctgtcttttttttttctgataatttctaccaaacatttgaggcagaaatgatccaaactctctacaatgtctgccagaaatagaagcaaagagaa

SEQ ID NO: 454095 - DNA, 574 bp, Homo sapiens
catggaatattgttttttgatttactatcttggccacatggggatgcagtttcaaaaacttccacttaaacttccttgctatgattaccctttcttcccaggccaaagaaccaaagtgggagttgtgtcaactatcaagtatgcccatttaaacgataccttcaaagactaggaaaataaatccgaagtatatctttggaaccagtggaccctgtgagcagtatatgagccaggatcctattacttgaccctcatatgtcttcattctaatagaggggctgtgatgagattcttggttctctgagtaacaatatcaactcagattctgagtttaagcagtccttaaaatgtttgtatatttatctttcctcagaatatagttacccaaatataggagagtcctactgtgatagtattagatgaactgttaccacatacactttctaagagccctttttgttagagacctggcctctccttcagtcaatgaatttkgggtttgaaaaccaaaaatttagaagaggaatcatgaatttttaactaaagcaactggcctcagccttctggacatcta

SEQ ID NO: 454096 - DNA, 606 bp, Homo sapiens
ctgtaactgttctactccagctaaacaccacagaaagaactgtgtccccacctctgcctatgccagcataggctgagtggggtgccaccctcaccagcctctaacaagttaccctaactttcctgctggggtgttacagagattgagtaggtacctgggactttcatctctatcaggtggtaacaaggctcctcccatatttccagtgtagactacctggggaacctgaatttcctggcacgcccaacagttatgaagtacccctccccactatggtagtgtcataggagccctgctggaaagttagaacttttgcccccaaccaacgtcagtgaggacatataccccaactgtggtggcagtggaaggcacatgggagcaataataaggcattcctttttctctcatcaagaaaaacatcagcggaggccacagaggacacccactcttaggtgtcagcatagatcatgtaaggaacctgcccttcttctccctgacctgccagtagcaaggaacatccatccctttcccatgctggagcagcgtcaaaggaaatcagctagtacagaaagctwaaatagacctggcgacccttaacacaaaata

SEQ ID NO: 454097 - DNA, 457 bp, Homo sapiens
gatccattaaaaaaagagttcataaraaaaggtttcatttttaacaaaagcctttctcataaaaatgtaagctcatataatatctttgaatttttgaataaataaatccttagattcttgataggaagaaaatggaactgagaaacttaaagataaggtgttagatactcttgaaaatggaagatcaatctgaaataaggagaacacatttttcaaattatgatatgtcaagtggcatggaaaacttaatttatcaaaatatggcatacactataattagagcaagaattctgaggctcatctagttacttccggattaggagaatgaaagaatcttcaaaaggtttattaaagtttttagctgctaagggcaaaactttacctgacatgtgggttgatgatcaatgcttacaactgatagacctgagatttctctcaagcttcaactgattgattt

SEQ ID NO: 454098 - DNA, 543 bp, Homo sapiens
atgaaattttcatgtcaactcttrgtcatattgagatcagatatctttatcctgtttcttcaactgtctatcaacccaagacccatggcatcatcttactacctcaaaaactctggggaattatctatacaggactgaatgcatgatttatttccatattaatgtcttattaactttaaaaaatttaaagtacagggtcatgcaaaccatgactatttacttcagtttcttcattcataaattgaatatagtacctatattacaaggttattgtgacaattaagtatgcatataaagaatagacacagtattccacatatctgaagtactaaatatgttgctactaaatagcacttaataaaattgttaatattttttaaggtggtagagaatgatttataccatcatggcactctgttatacagagagcccattaataaggttccatatgaaaagtgaaaccataaattatgaaaaactcaggaaaagcctttattaaatgaattgtgacttacgatgttctcttatttttagattgcaaga

SEQ ID NO: 454099 - DNA, 500 bp, Homo sapiens
gaataaaactaaacaatattagctagaagaaattgatttaaaacatttaacaacaataatttttcatttcatttgctataagcgatatgtgtattctaaacaaatgaaaaataattggtggaaggtattttgtcactcaccaggccagcagtgacaagtgtaattgtcaacactgtcctcacatgtagcattattgtgacaaggttttgaccaacaaagaggcatcaaggtctcacagtgtgtccctgtgaatccactacccgtgcagttacagctatatctggaaagtaaatgaaattttcatgtcaactcttggtcatattgagatcagatatctttatmctgtttcttcaactgtctatcaacccaagacccatggcatcatcttactacctcaaaaactctggggaattatctatacaggactgaatgcatgatttatttccatattaatgtcttattaactttaaaaaatttaaagtacagggtcatgcaaacca

SEQ ID NO: 454100 - DNA, 543 bp, Homo sapiens
atgaaattttcatgtcaactcttggtcatattgagatcagatatctttatcctgtttcttcaactgtctatcaacccaagacccatggcatcatcttactacctcaaaaactctggggaattatctatacaggactgaatgcatgatttatttccatattaatgtcttattaactttaaaaaatttaaagtacagggtcatgcaaaccatgactatttasttcagtttcttcattcataaattgaatatagtacctatattacaaggttattgtgacaattaagtatgcatataaagaatagacacagtattccacatatctgaagtactaaatatgttgctactaaatagcacttaataaaattgttaatattttttaaggtggtagagaatgatttataccatcatggcactctgttatacagagagcccattaataaggttccatatgaaaagtgaaaccataaattatgaaaaactcaggaaaagcctttattaaatgaattgtgacttacgatgttctcttatttttagattgcaaga

SEQ ID NO: 454101 - DNA, 535 bp, Homo sapiens
ggggagtttccctgcacaagctctctctttgcctgctgccatccatgtaagacgcracttgttcctccttacctcctgccatgattgcgagacctccccagccatgtggaactgtgagttaattaaacctttttcctaaataaatcacccagtctagggtatgtctttattagcagagtgaaaatggactaatacaggcatcattccacaattccaaataatgataaccttcatctccccacctgtgctgatttgcgccacccccatccctgccaaaactctcctctcagtgaatggtattatcatccaggtcatccaagccatagttctaggagttatcatcttatttgccactattccccgtgtcctaattagtcatcagatctcatcatctctctcttagaaatggatctaaggtgccatccttattgctgtgaccttaattcaaccctcatcatgtctcatctgctctcactattattgacttctcttttcgcaatcactctctacatttctatagaaatgtgatcactat

SEQ ID NO: 454102 - DNA, 367 bp, Homo sapiens
ctgtaagtaatgtagaaaaaaaatcaacaaactgggagaaggaatttgcatggcatacagtcaacaagataatgatgatcttagtatgtaaagcactccttcaaatcaatgagaaagtgacaatggaccaattaataaaatggaaatgagacatgaagaactatttcacagaagaggaagcacgaatggtcaaaaacataagaaaatgcagtccatctcactagttatcagggaaatgcaagttcagatcacagataaatgccattttgcatctagattggtaaaaatgattacatcttacaaagccaacctgacagacatrtggaacaacaagtaagagtgactcttacatagaactaatgcatgt

SEQ ID NO: 454103 - DNA, 588 bp, Homo sapiens
tattttataaatttgaccataaatttactctaaattgactaagtaattccactcctacacacacactaaaggaaaaatcttcaatgtgtatgtgcaatcgtgtacaaatcaaaatatgtaaaaaaatgttcatacagcaaaaaacttgaaaaataaaagtatttttgccttgacaagaaaaggaaaaaamaaactgtagtatatttatataacaggttgttagagaatattgaaaatgaatgaactactgttatgtgcaactacatgcataaattgttaaaacctaagttgaaccaaaaaaggcaggactccatagaccatgatgtgctatacagacgtgcctcattttattgtacttcacagtaatgtgcttcacagatactgcattttttttcacaaattgaaagtttgtggcaactcagcatcaagcaatagcatgtgctcagtttgtgtctcggtgtcacattctgataatttttgcaatatctcaaactttttcagtattttgttacatgtgttagggtaatctgtgatcaatgatctttgatgttcctattgtaattgtttttgggcaccacaaaccatgcc

SEQ ID NO: 454104 - DNA, 573 bp, Homo sapiens
tatgattctcagagaatgtgtgctggtgctaagcttgcatttctcagaacccccaaaactctctttgcaatattatatagtttcattttcttgaacttattcatttgttaaatatgcatttactaagcaccaactatgtacatggcactctgctagtcaatagacaaataataagatatatgtactttggaccctgcattgaaagaaaaagcaaataatgttttttaaaaaactactttatgcttgattgttataaggaactttatgtrtattatctcttttattcctaataataataagaacaaggatgattgataatgctcactctgtgccaagccctgttaggcattttatgttcattaatttaaccctttataacaactctatgagataggtgccatttttacaaaaatggaaactgaggcagagcgatgttatcttgataaaactcatagacttagtaagtggcagagccaggatttaaacccaggcaccaaacttcatgcgcttatccactatatatatggctccacatcattttctttagtaatcaggacactgaggctcagtgaa

SEQ ID NO: 454105 - DNA, 524 bp, Homo sapiens
agcatccctagagtcgagacagaagggtttccaacaagtttattacccaatctataacaacaacaaaaatcaaggayggatgaatgatgacctcgagactaacaacagccctctcaataattccttggctgggttacagaatgaaaccaatccacagacttaaaatctcattaattcatgaatagatcaggaccccaggaggagaaccatgcagcaccatatggagaaaataaaatattgaaaatattaaaaatatttataccttggaaaccaaagtcaaggattcctcctgcccccctttaagggtgggagtatataggagctaggtggtatatggatatgtggcccaggtctgaatccccctgaaagcactctggtagccagttactccatccttgaacatgtaattgtaatgtatatacttgatccttggcacaacctccatataggttccttattctgtggtacaagagctgttatagtaggaaaagtcaagcccaagactaggaaactaataccctcac

SEQ ID NO: 454106 - DNA, 524 bp, Homo sapiens
agcatccctagagtcgagacagaagggtttccaacaagtttattacccaatctataacaacaacaaaaatcaaggacggatgaatgatgacctcgagactaacaacagccctctcaataattccttggctgggttacagaatgaaaccaatccacagacttaaaatctcattaattcatgaatagatcaggaccccaggaggagarccatgcagcaccatatggagaaaataaaatattgaaaatattaaaaatatttataccttggaaaccaaagtcaaggattcctcctgcccccctttaagggtgggagtatataggagctaggtggtatatggatatgtggcccaggtctgaatccccctgaaagcactctggtagccagttactccatccttgaacatgtaattgtaatgtatatacttgatccttggcacaacctccatataggttccttattctgtggtacaagagctgttatagtaggaaaagtcaagcccaagactaggaaactaataccctcac

SEQ ID NO: 454107 - DNA, 524 bp, Homo sapiens
agcatccctagagtcgagacagaagggtttccaacaagtttattacccaatctataacaacaacaaaaatcaaggacggatgaatgatgacctcgagactaacaacagccctctcaataattccttggctgggttacagaatgaaaccaatccacagacttaaaatctcattaattcatgaatagatcaggaccccaggaggagaaccatgcagcaccatatggagaaaataaaatattgaaaatattaaaaatatttataccttggaaaccaaagtcawggattcctcctgcccccctttaagggtgggagtatataggagctaggtggtatatggatatgtggcccaggtctgaatccccctgaaagcactctggtagccagttactccatccttgaacatgtaattgtaatgtatatacttgatccttggcacaacctccatataggttccttattctgtggtacaagagctgttatagtaggaaaagtcaagcccaagactaggaaactaataccctcac

SEQ ID NO: 454108 - DNA, 513 bp, Homo sapiens
atcagtgctcaattataattgaaaaatgatcttctctcttaaattttaatctaacaactggtgactgcacaattccacaaggctttcaattctactctgaatctcacaagatctaaactttwaatattaacatttaaagttttttattctaagagagcaattttttgtaagatctggaaaataacactgtaacgattgactatataccttattgaactacagaaatatctaagattagatatttcatctccctaaatgctagagtaaatcacacagctataattttgttccataaaatcatctagattccaaatttcttatagttcattcttgtctccattaacttgcaacatacaggtatctcaatgagaatgaacattttcatgaaacggttcttggaaaaatcttgatgatttgttaaaagcaaataggagttagcctaatgaaggggatggaggtaaaatagcattaaacataaaaagcatcttaaacaaaacttttgagggatgaaac

SEQ ID NO: 454109 - DNA, 513 bp, Homo sapiens
atcagtgctcaattataattgaaaaatgatcttctctcttaaattttaatctaacaactggtgactgcacaattccacaaggctttcaattctactctgaatctcacaagatctaaacttttaatattaacatttaaagttttttattctaagagagcaattttttgtaagatctggaaaataacactgtaacgattgactatataccttattgaactacagaaatatctaagattagatatttcatctccctaaatgctagagtaaatcacacagctataattttgttccataaaatcatctagattccaaatttcttatagttcattcttgtctccattaacttgcaacatacaggtatctcaatgagaatgaacattttyatgaaacggttcttggaaaaatcttgatgatttgttaaaagcaaataggagttagcctaatgaaggggatggaggtaaaatagcattaaacataaaaagcatcttaaacaaaacttttgagggatgaaac

SEQ ID NO: 454110 - DNA, 513 bp, Homo sapiens
atcagtgctcaattataattgaaaaatgatcttctctcttaaattttaatctaacaactggtgactgcacaattccacaaggctttcaattctactctgaatctcacaagatctaaacttttaatattaacatttaaagttttttattctaagagagcaattttttgtaagatctggaaaataacactgtaacgattgactatataccttattgaactacagaaatatctaagattagatatttcatctccctaaatgctagagtaaatcacacagctataattttgttccataaaatcatctagattccaaatttcttatagttcattcttgtctccattaacttgcaacatacaggtatctcaatgagaatgaacattttcatgaaacggttcttggaaaaatcttgatgatttgttaaaagcaaataggagttrgcctaatgaaggggatggaggtaaaatagcattaaacataaaaagcatcttaaacaaaacttttgagggatgaaac

SEQ ID NO: 454111 - DNA, 518 bp, Homo sapiens
tcagctttttacatatcaatttttagcatcatcctttttttttggtgcctgttctaagtccctcagagaaaatacctgtcagagaataaaaataaataattggtaattgyatttctatatatttattattttaattttatataaagtggtactatcccagaaataacaggtcttttaaaaatagtcccttatttttgctctgttgcaatcctctataacaatgaatgatacattcattctttagagaattgaagtctctttaaatctaaatcggctactttataaagtatgtaattcggagaggacttttaaagtatgcatatatataatataatcagcatacctttattttttcaaattctgaaacaaaaattatgttttggtgtcaaatgtgaaaacctgtttcctctacaaaatatagtcagtttgtgccttgaacatgcaatatctgttgaacagtaaacgatggaaggcttgctcaaaattgaaagcgagaattccctactgatatgggtata

SEQ ID NO: 454112 - DNA, 518 bp, Homo sapiens
tcagctttttacatatcaatttttagcatcatcctttttttttggtgcctgttctaagtccctcagagaaaatacctgtcagagaataaaaataaataattggtaattgcatttctatatatttattattttaattttatataaagtggtactatcccagaaataacaggtcttttaaaaatagtcccttatttttgctctgttgcaatcctctataacaatgaatgatacattcattctttagagaattgaagtctctttaaatctaaatcggctactttataaagtatgtaattyggagaggacttttaaagtatgcatatatataatataatcagcatacctttattttttcaaattctgaaacaaaaattatgttttggtgtcaaatgtgaaaacctgtttcctctacaaaatatagtcagtttgtgccttgaacatgcaatatctgttgaacagtaaacgatggaaggcttgctcaaaattgaaagcgagaattccctactgatatgggtata

SEQ ID NO: 454113 - DNA, 518 bp, Homo sapiens
tcagctttttacatatcaatttttagcatcatcctttttttttggtgcctgttctaagtccctcagagaaaatacctgtcagagaataaaaataaataattggtaattgcatttctatatatttattattttaattttatataaagtggtactatcccagaaataacaggtcttttaaaaatagtcccttatttttgctctgttgcaatcctctataacaatgaatgatacattcattctttagagaattgaagtctctttaaatctaaatcggctactttataaagtatgtaattcggagaggacttttaaagtatgcatatatataatataatcagcatacctttattttttyaaattctgaaacaaaaattatgttttggtgtcaaatgtgaaaacctgtttcctctacaaaatatagtcagtttgtgccttgaacatgcaatatctgttgaacagtaaacgatggaaggcttgctcaaaattgaaagcgagaattccctactgatatgggtata

SEQ ID NO: 454114 - DNA, 506 bp, Homo sapiens
gatcaccatagcagttataaaaatgaaaagatttgaaatgtcatgagaattaccaaaataagttacagagacatgaaatgagcatataccatcttatatataataataatgtacacaataagatggtaaacttaagtgataaatgttttgtgtgttctgactgctcaactggctcaactgaccagctattctcaaattctctcctccttgaggctctctattgcctgagacacagcaatattgaaattaggtcatttagtaaccccacaatgacctatgtgtgttcaagggaaaggaagagtcacaggttcaagtgttcaagagtcacttgagatcaaaagctagaaatgattaagcttagtgaggaaggaatgttgaaagctgagataagccaaaggccaggccttttgtgccctgtgaatccaagagttatgaatgcaaaggaaaawatttttaaagaaattaaaagtactactctagtgaacatatgaatggtaaggaagcaa

SEQ ID NO: 454115 - DNA, 552 bp, Homo sapiens
atataatcacagacataactacttcccacacagcccttgtattgcgcagaatcccaaaactaacttaagaaaccagctttgagaaaattagcagtgtcttatattacttgaatgtacttctaattcaacatctgcttaccaagtactacagaaaatgccaaaagttggataaaacactatgaaaaaactgtacgtttatcttatactttctakgttatcaatgttaaacaaggattcttactaaagcataactaccaatatggctctattgcatcaaataaatttaattaattaaaaggttataaaaaggtaacagatcttgcttcccacttccttgtctgctatagatgacctataccctttgaattaataagtgctagaaaatatatttattcattcactaaaaaatactagtattacatgtcaggtactattttagattttgtggacacagcacaaagctcctgcattctaggagtttatattccagagggagaaacaaaataagaataatgtagtatgccagaaagtaataaatgctgtaaagaacat

SEQ ID NO: 454116 - DNA, 557 bp, Homo sapiens
aaaaaaacaaacaccgcatgttctcactcataggtgggaattgaacaaggagaacacatggacacaggaaggggaacatcacacaccaggtcctgttgtggggtggggggagggggcagggatagcattwggagatatacctaatgttaaatgacgagttactgggtgcagcacactagcatggcacatgtatacatatgtaactaacctgcacgttgtgcacatataccctaaaactaataaaaaaataaattaaacaaaagaaaaaaacaaaaacaaaacacaacaaaacaacaacatagatgttggcatggatgcagtgaacaggggacacttctacactgctggtgggtatgtaaactaatacagccgctatggaaaacagtgtgaatattccttaaagaaataaaagtagaactaacttcgatccagcaattccactgctgggtatttacccagaggaaaagaagtcatcatatgaaaaagattcccatgcttgtttacagcagcccaatttgcaattgcaaaaatatggaaccaacccaaatgtccatcaa

SEQ ID NO: 454117 - DNA, 510 bp, Homo sapiens
gaacatttggacaatgtatcatttcaacatgattttgttttattatgttttaattttaaatatttcttaagaaaagaagtattaacataccctcattccatcatcaccaggaggacctgggaggaccttgaggacctcgttcaccctgttaaatcaatacaaataagattagcatatggaaagaagtagaatgtttacaagtctatcaggtagctatccaaaccaaataaaacaggacatttggcagggaaaatatatgctttatttaccctcctcaaaaaattttgcagataaatcataatttaacaactttaactggctttacatgttagtatgctaataatattttataattataatattttctctcaattttcaatacaaaagagttatgtaaaataagtatcttaaatcgttttcagacatttaattattttaagctaaattgttcagaaacttattttgctgatgattrtattaaatatggatatattttggtgattttgactt

SEQ ID NO: 454118 - DNA, 569 bp, Homo sapiens
cagttgtgacttatgtatacagctgtgaaaccatcatcataatcaagaaaataaacattgccatctcacccaagagattccttatcatcttttttaattcattccttcttccatcctaaccccagacaatcatgaagtagctttttatcactgtagcttttctgggacttttacaaatggaattatactgggtgcactcattttaacttaactcgttttaactcgttttttttcccttgttattaatagtatgtcgaattaygttgattggtttttcaaatatttaaaaacaacttttcaatctttagaggtctatagactgtactggtgatgtagtatgttgtcttatttatattacatacaattcagttcttacttagtataatgatcttaagaattacccatgtttattgtatttaatattattattattattattattattattattttgctgagtaggattttaacacatagctacaccaaaattttttcatccattcaccctattagtgggcatttgtgttacttccaggttatggcatctataaagccactataaacattca

SEQ ID NO: 454119 - DNA, 569 bp, Homo sapiens
cagttgtgacttatgtatacagctgtgaaaccatcatcataatcaagaaaataaacattgccatctcacccaagagattccttatcatcttttttaattcattccttcttccatcctaaccccagacaatcatgaagtagctttttatcactgtagcttttctgggacttttacaaatggaattatactgggtgcactcattttaacttaactcgttttaactcgttttttttcccttgttattaatagtatgtcgaattatgttgattggtttttcaaatatttaaaaacaacttttcaatctttagaggtctatagactgtactggtgatgtagtatgttgtcttatttatattacatacaattcagttcttacttagtataatgatcttaagaattacccatgtttattgtatttaatattattattattattattattattattattttgctgagtargattttaacacatagctacaccaaaattttttcatccattcaccctattagtgggcatttgtgttacttccaggttatggcatctataaagccactataaacattca

SEQ ID NO: 454120 - DNA, 600 bp, Homo sapiens
gatttaaagagatttcattcattttaatatttaacttataaaaatataaatcaaattctaaaatgcayaatttataagagcagaattaataatgagagcagatgtgtaaaaatataaatgttttcacatataaaatctgtttcggtattcctagtttgaactttaagtatcccagacctcaacattaaaatgaaatcattaaaattgctacattcctatctcatgaagatgttatgaagactaacaaaaaaccattaagtattttaaataaaaggaattttcctatgctggaaaatgcattttgtttttaacaaaatactcttatactaaatgtttttttttggaacccaaccatttatattcatatgtaattttccagtctttgtaaattagactgtgaaagcttttgaaatagtatctattgtttgtccagcatttgaaagtgcaataatttcaccataccactactggcaaaaagcataatattgggagggttactaaacactgaaaatctgcaaaacaaattaagttgaagttatttaatacagatgttttaaaaatcagatctatttcaatatttaaccatatttgccggcctta

SEQ ID NO: 454121 - DNA, 444 bp, Homo sapiens
ctatttttttaacacctttctttcaacttctcttgtgtatacaaaatgactaagtaggtgcacattttacagagtttacatataacatccattgtacatttgaatcttcaaaatcacctctgtttagattatgaatagtttattagtaactgttggaaaatgaaatatttacaaatgctggctttcactttaattctacataatgttattacttggaattattaaatattttataaattataattgagatacatatgaatgtttataaatcatatataggaaactttaaattccagatgcacatatgcctatgtacacacacacrcacacacacacacacacagacacagacacacacacacacacagacaccccttctgtgttgcttaaccataatttgattccagatttgagatattttgaatttgagaatgttgttatggt

SEQ ID NO: 454122 - DNA, 528 bp, Homo sapiens
atgaaatgacatactatcctgtgttaaaaatactcattgttatatcagatcgttgttcaattctggttttttattgtttgcttatttttcagctgctccagttgatgtactaaaagcactagattttcacaattctccagagggaatatcaaaaacaacgggattttgcacaaacagaaagaattctaaaggctcagatactgcttacagagtttcaaagcaagcacaactcagtgccccaacaaaacagttatttccaggtatattcactttattattattattgttattattactaaaagttattacacttttgttactactaaaactacttttagtatttctttactaattagtatttttatcaggttagataatgtgcaattatatggtaaaatgcaattctttcwtatatcagacaccaaataccttgtggtcaccaaagtaatgtaatgaaaataacaaaaaatttgataattgccagtcttaattcaacacaatcacatttctgtgaaaatattcttattt

SEQ ID NO: 454123 - DNA, 628 bp, Homo sapiens
taattgtttaactgatatatttatataacagatgcttagtaaggaccaatgtagatcagactgtatgctagatatttggcatatgattgagagagagaagaaaagaaaaagagtctgccttcttgaatttaaaatcaagttagccaattacctaatagttctggctcataatgacatatgcttctttaataagaagcaatatacagtgaaactgcattgtttgatattaagaactaatcgaaaactcttaagcttttaaagaaacaacagaaagaatacgtttgtaaattgggtcattacaatgcctctttaaagtgggcatgtatggctacggactagacaaagacaaaaaatacaaactttasgccaaaattagcacttaaataaatgttttaagagtggtggttatgtgtttgatatttactggtatcataatcctgttgcctaaaccaaatttaatttcacataaacattgtgctttaagtactttaagtgagtgtctttaaagtttgactatagcttggataaaaattgaagagaaaccttaatggaggacccctatttatttattaatctgtttactattcaaagttagttgatttataaaggccatgtagaaatttcaaaa

SEQ ID NO: 454124 - DNA, 602 bp, Homo sapiens
aagttcgtatagttggaaagtgatagagatggggtttgaactcaggaagtcaggcttgcactgcgctcttttgcaaatcatgtcgaattctgaattatgtattgtggttgtttcctttcacttatggagcagctaaatakaaattaatgcttattaaatttactcaatattttatcactgaatccagacctctaaaaacagctttatccaaaatagcacatttggttatagctataagaaggaagtagcagtgatcattgacactcattatatttttgtcaggaccacagagaaactctcaagtctcagttttactgagactttacaactttaggcttttacaactaatttacattattatcctataaacaaattagatataatagcacgttgtgtttctttttttgactgttagcaaactccatgctaaggttttaatctatatttggtaaatgtagaaaatattttgaattcatcttattattcacaccttatttttccttaatcctgctttcctaactgaagaaaaaaaaacaaaaacatcaatttattgcagcccagcccacatcctattcaaaactagcaggtagtgtttactatga

SEQ ID NO: 454125 - DNA, 608 bp, Homo sapiens
ttatgtattgtggttgtttcctttcacttatggagcagctaaatagaaattaatgcttattaaatttactcaatattttatcactgaatccagacctctaaaaacagctttatccaaaatagcacatttggttrtagctataagaaggaagtagcagtgatcattgacactcattatatttttgtcaggaccacagagaaactctcaagtctcagttttactgagactttacaactttaggcttttacaactaatttacattattatcctataaacaaattagatataatagcacgttgtgtttctttttttgactgttagcaaactccatgctaaggttttaatctatatttggtaaatgtagaaaatattttgaattcatcttattattcacaccttatttttccttaatcctgctttcctaactgaagaaaaaaaaacaaaaacatcaatttattgcagcccagcccacatcctattcaaaactagcaggtagtgtttactatgaatgtatccttaaagtaaaacatgaaaaaataaaaataaaaaaatggagaatgttcaataaatatttttaattgattatcaaacagaagttatatttacat

SEQ ID NO: 454126 - DNA, 608 bp, Homo sapiens
ttatgtattgtggttgtttcctttcacttatggagcagctaaatagaaattaatgcttattaaatttactcaatattttatcactgaatccagacctctaaaaacagctttatccaaaatagcacatttggttatagctataagaaggaagtagcagtgatcattgacactcattatatttttgtcaggaccacagagaaactctcaagtctcagttttactgagactttacaactttaggcttttacaactaatttacattattatcctataaacaaattagatataatagcacgttgtgtttctttttttgactgttagcaaactccatgctaaggttttaatctatatttggtaaatgtagaaaatattttgaattcatcttattattcacaccttatttttccttaatcctgctttcctaactgaaraaaaaaaaacaaaaacatcaatttattgcagcccagcccacatcctattcaaaactagcaggtagtgtttactatgaatgtatccttaaagtaaaacatgaaaaaataaaaataaaaaaatggagaatgttcaataaatatttttaattgattatcaaacagaagttatatttacat

SEQ ID NO: 454127 - DNA, 608 bp, Homo sapiens
ttatgtattgtggttgtttcctttcacttatggagcagctaaatagaaattaatgcttattaaatttactcaatattttatcactgaatccagacctctaaaaacagctttatccaaaatagcacatttggttatagctataagaaggaagtagcagtgatcattgacactcattatatttttgtcaggaccacagagaaactctcaagtctcagttttactgagactttacaactttaggcttttacaactaatttacattattatcctataaacaaattagatataatagcacgttgtgtttctttttttgactgttagcaaactccatgctaaggttttaatctatatttggtaaatgtagaaaatattttgaattcatcttattattcacaccttatttttccttaatcctgctttcctaactgaagaaaaaaaaacaaaaacatcaatttattgcagcccagcccacatcctattcaaaactagcaggtagtgtttactatgaatgtatccttaaagtaaaacatgaaaaaataaaaataaaaaaatggagaatgttcaataaatatttttaattgattwtcaaacagaagttatatttacat

SEQ ID NO: 454128 - DNA, 614 bp, Homo sapiens
tacagtggtactggaaaaggacctttgattaaggaaaaatggatatgccatttctttttcagcatgtcacacacgcatgtaaatgagaatattgtaatggcagctatttattgaaaattataggaactgagaatttcttcggtgatggatgaaatacaagctccgagagacacttttgcatggattcagggattattttactgaagctatttatttttattttccacattgagcctttctgtggmgatatgtgaatattttttaatatcaaatttctgtacttttcatgcataaattttctattttcagtctagcaacatacctgaaacacttttaaacagcatcccagtaccacatcaaataaatggtgggaaaacaactttccctatttttatgaagccaagtaatgatagaaatagcaaagtataaggattagattttgttgggtttcttcttcatgaaatgccctgaaagttaagtggtagtttagatatttatattttaagattttgttatgtgttttatcaagctgtttagtgctcatttttcctgggaggccacatattaacataaatccacttttgtaggcattcttatcccttaattaacttcaa

SEQ ID NO: 454129 - DNA, 601 bp, Homo sapiens
ttttttcggttttttattttcttcaatttgtgactaaaatagaaccacatggttgttcatgttaagttatccttaaaatacagcaaagcaaacatctcttttcaaatttatgggttggctttctagctaagaaaattgtataaagagtcacctttcttttctaaaaatttgctttttcctaggataaattctcttcactctgattaatttagtgagatgctggctatttcatgataacaaggatttaaatcaagtttggttgagagtctctgtgtaatacaagctgaatttttaaaaggttaaaaaaagrtgtttatataagatttttaaaagagaatgctagcactagaaattatagaaattgctaatcaatcttaccttctcaataaatgaggaaactaagacacaaaaagttgtcagctgaatactcttcctcataaaaaatattcttgtaatattcaaggtttttctgagtagagtgaagatctgtaatggtgatcaaaagaattttaaataatagaagtctgagacaatggaatgagaggagagaacttagtagtgcaagttctaattaaagttttattttggattgtcaaaacac

SEQ ID NO: 454130 - DNA, 618 bp, Homo sapiens
gtgttgtcaacaactattacaaatttaattaccacatgtgaaattgcagggatgtaagggaggaaaattttgattttctatctcaaaatttatttctagaagtccagtcttcaactagtattcccaccaaattaagagtctttctgtttttagggaaaagcaatacatggccatagggtcctgaagattatactgtgaaagcatttatcatgagtttttatactcacaattaactataccattttatgtaaatatggagtttaaaaaatgctgagatatctccatcrttgtatacaatttttaatgattatgtttaggtatttaaaagccagaattttattagatacacttttattttctccttacttttggagaagtaatcaagcatggatggcgtgatcattaggaattcaaggcaactgcaagtggggactgagcgttggtcagcatttctgcttttactccttcacttccctcatgtaatactggggaaatgtgacctgagttgggagtggtgagaggaaaccaaactttttcttttttgaccattcaagttttgttccttagcaaagaagagagataaacgctgatgttataaaaagttgcaatgttccctaa

SEQ ID NO: 454131 - DNA, 548 bp, Homo sapiens
acttttccttatatctccaggtgagccctaataccaaatacatgctcagtatgtacaaggttctgtcatatgcactttcatagagaatcttatttaattgwgacagttttcctggaagtaagctgatatcaaaatactgattttacccatgagataactgaaaaacagagaagtgaaagattttgcctaaagtcacacagctagtaagtagtagacccagaatttgaatgctgccaagctttctccaaggcccttgcttttggccacttgtccatgttgactttgctgggtgttctaatgcttctatacagcctcctaggcttatcttattattatggtgccctggggcctaatattaatgtacacatcatgcagctaaaccacagaaaataccaggtcattgggtgaataacttgactgccttcaaggagaaataaaaagaggttctggtaaaaggtgatgttagaatccagatagctcttcagcctgcacttaagttcagtggtagagaccatattactcttaccattttatggacaaacctcagc

SEQ ID NO: 454132 - DNA, 541 bp, Homo sapiens
tggtgcatttaaagatactgagtttgtgttaattttctatgtaaaatgtaaaattagataattttagagtataaatgttgccttaaattatttaagcttttagatgttagcagcatctaggtcatctatatccaataattcccatagtttgttattccattttatgcagtattgacatacatacatagtatagtcaatataagagccaaattctacacagtaaagcattttttcttatttgatggacactatgcatgttaattcaggtgttctgagaaatgacagctgtgtagaaatggtaacggcattttgtactttgttttgttggtttaagagagccatggtgatggctacctagaaagtagtattgcccttaatcaaagataaattcagaatcatgtattttatgtagagttgacttttgaccaacataagagtaagaggagccaactccctgtgcattgaaaatccatgtataacttttggctccccyaagacttcattactaatgcctaccattcatgggaagccttattgacaa

SEQ ID NO: 454133 - DNA, 557 bp, Homo sapiens
tcttacaatagagaacagaaaatgttcttaagaaacataaggatgagaaaatatatttagtattcattaaatgtaagtgaatcatcataaagattttccttatcatcatcatcatcttcatgttgaggaggaggaggaagacaaggggctgatcttttctcagggatggcagaggcagaagaagtggaaggggaggcaggagacgcagacacacctgtgcaactttagggctatacattgtaattggtgtctgactttttgcttttttgtatctctaaaaaatgttttcatatggtaccaatccttcytccactgtttgctttaattttagttaccatatcatagaagggtctatgtgataaaagaaggcaaaagcagtcttgaataatcagaccacttctgccagattgtctaatgtcaatttgttttctgacactgcctcttctatttcttcttccccatcttctgacactggtttggaagcattcatcctcatcaagttgtcttctgctaattactcttgtgtggtgtctattagctcttgaatttttccaaga

SEQ ID NO: 454134 - DNA, 550 bp, Homo sapiens
gcacattaaactcatctgggaaacttaaaaaatatggatgtctgtacccaatcattctagtttattagttctggggtgggttccaggcattcataggttttataaactcttcagatgattctattgacaggattgaaaaataagtcaactgtccttaaccaattgaggaaggactggaaaaaatctacagataaagacagcaaggtacattttagaaactgaaaattattccagttctagtaataaatgtcaggatgggcgagtcgatagtttttattggagatggctcttggagtttgtggcagtgaatgcatgatgaagatatgatttttctccagtggtcctcagcagccatggtgcatccagggataatctggagagctaaattttctccgtgtccatgtctccttgggcaagcatggctggtttccttgaactctttactctctttgtatctgtgctaccatatctgctgtttctttccttctcttcttcactraggaactcctatttatccctagggactcagcttaaaagggctaggtagtag

SEQ ID NO: 454135 - DNA, 603 bp, Homo sapiens
tggatacacacccaaattctaccagatgaacaaagaagagctgatagcattcctactgaagctattcaaaaaaattgaaaaggagggactcctccccatttcattctatctatgaggccagcatcatccttaaagcaaaacctggcagagacacaacaacaacagaaaaagaaaacttcaggccaataaccttgatgaacatagatgcaaaaatcctcagcaaaatactgacaatgatgaagtaggatttatcactgggatgcaaagttgggtcaacatacacaaatcactaaatgtgatttgtcacttatacagaactaaagacaaaacctacatgattatctcagtagatgcagaaaaggctttcaataaaattcagcattccttcatgttaaaactcccaataaaccaggcactgaaggagcatacttcaaaataataacaaccttttatgacaaacccacagccaacatcttgctgaatgggcmaaagcttaaagcattccccttgaaaactggaaccagacaaggataaccactcccatcacttctcttcaatatagtattgaaagtcctggccagagcaatcaggcaaaagaaagaa

SEQ ID NO: 454136 - DNA, 523 bp, Homo sapiens
aaggagcatacttcaaaataataacaaccttttatgacaaacccacagccaacatcttgctgaatgggccaaagcttaaagcattccccttgaaaactggaaccagacaaggataaccactcccatcacttctcttcaatatagtattgaaagtcctggccagagcaatcaggcaaaagaaagaaaatagaaggcatccaaataggaagagagaaagtaaaactatctctgctttcagacaacatgattttatatttagaaaacctcakagtctcagcccaaaagcaacttgagcaaaattttgggatacagaatctgtgtacaaaaatcagtagcattcctatacactaacagaacccaagtctagagccaaatcagggatgcaatctcattcacaactgccacaaaaagaataaagtacctaggaatacagaaaaccagggaggtgaaagatctctataatgaaaattgcaaaaaactgatcaaacaaatcagtgatgacacgaacgagtgaaagaagatt

SEQ ID NO: 454137 - DNA, 527 bp, Homo sapiens
atttggacatagtatggaaagaaagcaaattaatacacaacatattctttcagtgtatttaagttataattttacttactttgtttccgtttattttgcgccattatctcaaaaaagtattgttgaatgttataaattcttcataactatctacctggcattcaacaaaccatatctataatctaataagaaatatttctcttgataagttagcagttttgctggtaagattgtttcttttcttaaggaaamcaataaacataaattgtaattttgaaaaccaaggtttctggacacaatttagactaaagaaaaacagagttaatttggtcttcttaataaatctacagagatgtggtagtaggttttcctcagatatttatcaagtaaagaattggggttatgatttatacctgaaagaagaagaagtggtggaggcttcagcaacataatgataggcaaagaatgaggtgatgacaggcaacatgatatttctttgtggtggaactggttaggacctttaaaac

SEQ ID NO: 454138 - DNA, 631 bp, Homo sapiens
tgtgccacacattacattacctcctagacttaaaaaaggaaataggaaaacaaaatctctgtcaataagtgttcagttttttgatatctagtttggcaaattaactttaccatattcagaaaaactcttgtcaaaatatgacacagtggaaaatattataaaagcataaactgcaatggaaaaattatgtaatcttaaaattaaatgtatcctgatgaatgggcaaggcttaaaattaataaagtagagttgttacaaaaactattgaatctaagcaggcaaagggatatggaaaattccacctaggatgaagtgggtctagaaattcagttccattgcttcaaggatgagttattataggacagtctaaatatggcggaaaaattctgatcatgaaaccaaactaacttctttctttgtgacaaatactctatttctggaaaatatgcatttcaaagcaccatgaaaggctgaaattatgaaagaggaattcaaaagtttgaaagctcagctggtctgagrtgaggaaaagaatgtgaggtttgaaacaccaaagtcaaatactctaggcatgaactctgggaaatcaaagaccataccctagaacgacccttttcaggtttaggatgta

SEQ ID NO: 454139 - DNA, 556 bp, Homo sapiens
cagtctttttgaacactaaaacaaaattattcgttrttggtattttgttgaaatttaaaaatatatatttaatcacttgtttcctactaaggttttaaaatgtgataaatatataaatgatcataaagaattttatttggaattcttagccttgagttagacaaatattttcaattaatacacagggagtcaaatcttttgcttaacttaagtcagtgtcattaaagctatcatctctgttagaaaaagaaattaaagttagcacatctacaaggcaatgaagctcgccaagtccctgtgtctgcaggcaggctgcccaaacaaacaaaaagtaaataaataaaataattaatgtcacttttagctatttgtgctgaagcacagtgttactctttggttgaatggtgctagtggaaggagtttgaaaacaggaaatggaaagggaaaaaagaggctctttcatgaattactgaatctctagacaccaaactgccttaacctctgaattctctgcttggaaaaatgctgatttacctttactcttgaaactaaaaac

SEQ ID NO: 454140 - DNA, 556 bp, Homo sapiens
cagtctttttgaacactaaaacaaaattattcgttgttggtattttgttgaaatttaaaaatatatatttaatcacttgtttcctactaaggttttaaaatgtgataaatatataaatgatcataaagaattttatttggaattcttagccttgagttagacaaatattttcaattaatacacagggagtcaaatcttttgcttaacttaagtcagtgtcattaaagctatcatctctgttagaaaaagaaattaaagttagcacatctacaaggcaatgaagctcgccaagtccctgtgtctgcaggcaggctgcccaaacaaacaaaaagtaaataaataaaataattaatgtcacttttagctatttgtgctgaagcacagtrttactctttggttgaatggtgctagtggaaggagtttgaaaacaggaaatggaaagggaaaaaagaggctctttcatgaattactgaatctctagacaccaaactgccttaacctctgaattctctgcttggaaaaatgctgatttacctttactcttgaaactaaaaac

SEQ ID NO: 454141 - DNA, 580 bp, Homo sapiens
tacccttcctgccctcctacaaacaaaacacttgctcaactgtaattctgtttcaccagcttaatatagacattacatatctaaactcaagtctataggattcagacagttctggctgtacacttggataggtgacctaagccttagttttctcatctgcaaaatagagacagcaataatactttcttcatatcataactactgttttcatatacatgctgggttaggtgtttagtacagactttcaaccccgtatgttctctgaaaccaatactttttattcttaacaagttccttttgctgataaaagacatttcttttctcctgagagataaatttccacttataaatgcattgtttgcttgaaaataattagtatatttgcagtgttcagttgttcattttaaaaggtgtagaaacaagagactttttagccctatgaaactatttcaagagtaatctstttaataaaaacaacactctgtgttttaaatctttcattattcacttgtgtatggtgaactgagatggatactgcatcctccttggatctgaagactaaaatgtgctcagctgcaga

SEQ ID NO: 454142 - DNA, 610 bp, Homo sapiens
ggcagaaacattcttactttatgaattctggtatttcttaactcatactgtatatgattcctgaccaacattaacaatggactgaattccctgggattataatattccctgaatcccagggtatctgcctgtcagattctggtgaggaccacctgaggctaaatcaggacgaaggcattcatcctgtgttrttgctcctaattctccatggtgctattcaacttctcactctgtaattggcatactaccttcccaatttgccaggactggcgatttgccacatttcagaaactacttttgtgtatgccagattatactgaggttccatgttcatggggtttttaaaatctcttttaatccctttgattgatagattactaaaatatttcagggtggatttgttgggtctgttttcctgttgcctaaattcaattcagtttaatttatatatggaattatgactacagataaatataatctttagtaagaattccataattccatatttaaagatgcaggggggaacatacaaatttaaggcacagtttacattctaattgggtagataattcaagcacaaagagaaacataatataggacagagtaaggt

SEQ ID NO: 454143 - DNA, 610 bp, Homo sapiens
ggcagaaacattcttactttatgaattctggtatttcttaactcatactgtatatgattcctgaccaacattaacaatggactgaattccctgggattataatattccctgaatcccagggtatctgcctgtcagattctggtgaggaccacctgaggctaaatcaggacgaaggcattcatcctgtgttgttgctcctaattctccatggtgctattcaacttctcactctgtaattggcatactaccttcccaatttgccaggactggcgatttgccacatttcagaaactacttttgtgtatgccagattatactgaggttccatgttcatggggtttttaaaatctcttttaatccctttgattgatagattactaaaatatttcagggtggatttgttgggtctgttttcctgttgcctaaattcaattyagtttaatttatatatggaattatgactacagataaatataatctttagtaagaattccataattccatatttaaagatgcaggggggaacatacaaatttaaggcacagtttacattctaattgggtagataattcaagcacaaagagaaacataatataggacagagtaaggt

SEQ ID NO: 454144 - DNA, 610 bp, Homo sapiens
ggcagaaacattcttactttatgaattctggtatttcttaactcatactgtatatgattcctgaccaacattaacaatggactgaattccctgggattataatattccctgaatcccagggtatctgcctgtcagattctggtgaggaccacctgaggctaaatcaggacgaaggcattcatcctgtgttgttgctcctaattctccatggtgctattcaacttctcactctgtaattggcatactaccttcccaatttgccaggactggcgatttgccacatttcagaaactacttttgtgtatgccagattatactgaggttccatgttcatggggtttttaaaatctcttttaatccctttgattgatagattactaaaatatttcagggtggatttgttgggtctgttttcctgttgcctaaattcaattcagtttaatttatatatggaattatkactacagataaatataatctttagtaagaattccataattccatatttaaagatgcaggggggaacatacaaatttaaggcacagtttacattctaattgggtagataattcaagcacaaagagaaacataatataggacagagtaaggt

SEQ ID NO: 454145 - DNA, 609 bp, Homo sapiens
caaaaaacacacaaaaatccctccaatctatcagtgaaattgtaccctcaaataacattctataaattatatttggttattttgataggagttataatcagttttaatttactcattcaaaattcaacatatttgttgagaatctacctactacatgccaagtagataagttattagccctcatggtgtctagttttacttagcgtagatatttaataaatgagagaaaaaattaagtaaaataatttcacataatgacacatacttgtaatgagctctaccatagccttcccagacaccccttcaggtatggtgttcttatttccctagtcactaggaatgctgtctgtagatagccttcacctctcagwccctgtgatggttaacttgatgggtcaacttgaccagattaaagaatacctagacagctggtaaagctttatttctgggtatgtctgtagagttgtttcaggaagagattggcatttgaatcaatagactgagtaggaagatctatcctcacccaatgtgtgtggcaccatccattccactgaaggcctggatagaacagaaaggcaaaggaaagctgaatttgctctttcttctgga

SEQ ID NO: 454146 - DNA, 609 bp, Homo sapiens
caaaaaacacacaaaaatccctccaatctatcagtgaaattgtaccctcaaataacattctataaattatatttggttattttgataggagttataatcagttttaatttactcattcaaaattcaacatatttgttgagaatctacctactacatgccaagtagataagttattagccctcatggtgtctagttttacttagcgtagatatttaataaatgagagaaaaaattaagtaaaataatttcacataatgacacatacttgtaatgagctctaccatagccttcccagacaccccttcaggtatggtgttcttatttccctagtcactaggaatgctgtctgtagatagccttcacctctcagtccctgtgatggttaacttgatgggtcaacttgaccagattaaagaatacctagacagctggtaaagctttatttcygggtatgtctgtagagttgtttcaggaagagattggcatttgaatcaatagactgagtaggaagatctatcctcacccaatgtgtgtggcaccatccattccactgaaggcctggatagaacagaaaggcaaaggaaagctgaatttgctctttcttctgga

SEQ ID NO: 454147 - DNA, 601 bp, Homo sapiens
tctggttcatgttaccaggcaagacaaataaacctgtggagtttctaggtgagtttagggagcatatagaatggagagtagaggagggagaatgtgatcccaagactggctgcagtggctagagatgtattttattccactaaacctcaataagtttcactgagaatcagatgccccagcatcctaactaagctgcctccagaatttatacaaagcagtggattcaaagggtggactctggtgaaatgttgcccatattcctattcaatacttaaaatcttactcctcaagaggttgagaatgttgcaaacagacagttttagctttcaggtgtctttggaaattgtctcaacttaagagctgctgtgmcttcttggggcagctagcatccaatgttgggggtataaagacttgtctcctcgttttgaaacttggtatattctaaaaagccattctagcttcagaactccctgtggggctggctgaggtctttgttgagactgcagttatagcctaacttctcccttttcccagcattcttattttccttcccttcttcaggtgttgatcaagagtacctctaataacttcttccatgcaa

SEQ ID NO: 454148 - DNA, 601 bp, Homo sapiens
tctggttcatgttaccaggcaagacaaataaacctgtggagtttctaggtgagtttagggagcatatagaatggagagtagaggagggagaatgtgatcccaagactggctgcagtggctagagatgtattttattccactaaacctcaataagtttcactgagaatcagatgccccagcatcctaactaagctgcctccagaatttatacaaagcagtggattcaaagggtggactctggtgaaatgttgcccatattcctattcaatacttaaaatcttactcctcaagaggttgagaatgttgcaaacagacagttttagctttcaggtgtctttggaaattgtctcaacttaagagctgctgtgacttcttggggcagctagcatccaatgttgggggtataaagacttgtctcctcgttttgaaacttggtatattctaaaaagccattctagcttcagaactccctgtggggctggctgaggtctttgttgagactgcagttatagcctaacttctcccttttcccagcattcttattttccttcccttcttcaggtgttgatcaagastacctctaataacttcttccatgcaa

SEQ ID NO: 454149 - DNA, 470 bp, Homo sapiens
tgatttccaaaccaagaggaactttatagtgggttaaatagtgccctcccgcacatccaaagatatatccacgtcctaactcccagaacatgtaaatgtgaccttattttgaaaaaggagttttgcagatttaactgggttaaagatcttgagatgagatcatcctggatttagggtaggtgactgaatatgcaaatggacaatggccagaccatatgtaaaaacagaacwctgacccacaacctgcagcaagcaacccaggagactaacccattatctacagtaaccagtccaggaagtctataaattagacttgtagaaagttaaatcattatctctaataacaatcctaggagacaaactataacaattgtcccaaatgaccagtactggattaataactggcatcttccctaacttttgtccccatttccaagttgagactaacaaaaagaagccatagaatgctc

SEQ ID NO: 454150 - DNA, 502 bp, Homo sapiens
gttggtaaaaacaaaagcagccgccttactttgtaattatagctgatgttagaggttttctttttctattgtggagttgttgccaaggcaatagcttggcaatcttctacacaaatgcttttcacattaatctacacaggcttcacagatgttaatttttgtaacacacctatgcattccagaagagcaaaatatattttttaaaatctgttttatwtggtaggaaaagagcattagaaaacgtttttctggcctcctctctcgcttccaggacacactcacagtgaccgtcatggattttgaaatggcctccagaccttagcccaggactgtggggaaaagagggcaggaaacccaaagagaatccacacgacaaaccagatcaaggacatggctaacggtcagagttggaagttctgctgctgagacaaggtggaagccaggaggcagaaactcaagaggaactaaagccaaatgtcacagttagcaaaaatcagggcta

SEQ ID NO: 454151 - DNA, 473 bp, Homo sapiens
cacaaggaatagaatctattttgtgctctctgttttctcagtcagttcagtgatgcagacagattaaaaacatgctttttgtcagtgaaataaattgagagggcacagagacaccctaggaggagtaatactgaacaagataccactgtgaaatgttttcccaccagtacacagctagataaaaccagaaacagaccaggctctgtcttgaacccttgaatctggcaagmctggtactgaagttaggcctgctctccaggcataccccaaactgttgagttaatttatataggcaactgaatgtactggctttcaagttttagggaaaggaaatcattttaaggacaaaatgaaattcgaaattcacacacaatttataagctgtggcattttctttttgtgaattatggtagtaaaatgtgtaactagcacctgttatgtattgtttatatagttatctgaaaaagaagatg

SEQ ID NO: 454152 - DNA, 478 bp, Homo sapiens
cttaccacttctctgaaatgaactctgttctggccacattgagtatttcagttcctcaaattgccatgcactcagttcccagaccctttcacttctaaatttcgattgaacaccaatcataatgactctatcacctaaatattttttccatgcctctctcccactcccacattgctgccagtctgtttttcatcacttctttctctgcaataacctcttaattgatctcttcttgatcctagcttgctcctttcaattctttcttcactctgccagcagaatgrcctttcagaaacaaacattttatcttatctctcctttccttaaacacattaatggcatgtatccctacaacttttaggagaaaaataaaacgtcttaacacatagagtcctttgtgatttggtttctgcccatctagatctctagtttcatcttttacccctctctcatacagatcatttcccagaatgaggtc

SEQ ID NO: 454153 - DNA, 587 bp, Homo sapiens
gattaggcacttcattacagccttgcaatggtagaaatttaggctttccacccagcccttgctggcatgagtgttggaggggccatagttttttctgtagtgtttgactttagtaaaacagttactgcctacaagttttctgtctcactaagctgctattttccttatcttttggctagatagaacaaatttttcttagggctttttgtctgtatttcttggcatttccagattgctgtcttctccagaatcctctctgggatatatgaggaaaaaagaaaacccaggacattacttgggtcttgaggttccctaaacmgtttgccttcttctctccaactttcatgagcttctaatgtttgttttgtataaaatgtccagagcttttagttctacttatcaggaagaataggtaactgtagtatatctacttcatcttgccagcagtagtataaattggtaaaggatgatgtaagtgtgctcattgttacatttagaggaaatgttactcgagattaagacttctgctttttgatgtctccatcataaaacttcttgtcatgaaacaaataaactttttaagtttt

SEQ ID NO: 454154 - DNA, 555 bp, Homo sapiens
gtcttcgtgtcgggccacaagaacacccaatcttcttaaaaaacagctttacagaaatataattcacataccatataatccatcctttaaagtgtacaactcaagggcctttagtatattcatagagttgtaccaactctatgaagttaccaaccacaggttcttargctctcatttaatagaaattgacacaaggctgagcaagtttcccaaacaaggcttttattgggggcttatgtttgaacacaatggagacagtgcaggagcaagagttagctggctggctttctgagggcaggtctttgtggtgtttctaggaaaggtgacaggaatgtgcatgaggtatggaagtgtcattacatgtgccgggtggagcacagggtgtgcaggcacaatgagaaatcatgctagcgcatacattgcatgatcaaaatatgatggataagctcttccctgggtgagaatttcagtattataatgagggatagggtaaagatcagtcattcttctggtcttgtgcacatgcctgcaataaggttaactcccttgagtaag

SEQ ID NO: 454155 - DNA, 578 bp, Homo sapiens
ggaggtgaagaataacaaaaagaaagtcaaatatatcaaaacaattggaacgagtacaaacttgattttttaaaaaaactgaagtaattataaaatgtctctccctcacttttttttgcctccttctttattgaatttgtaatartcttttaatttaaatgttaataataggggacatataacacttgaattttaaaaactattttaatttaaattttaagaaattttaaaaatatcattttctagatattaaaaattcaaatgaagtcttatttgaccaaatatgccaactctgctttttgcacccttgttgtgatactacagtttgtagagttaaaatatagaaggaaatggaaaaaaaaaaccaacttgtatgagttttttaaattttctctttcaaaattcctttttcaccagaaaatgaactctgagcttgtattcaagggtatgtcaactgttatctctttgaaacaaaggaatgaaaaaaaaaaaaaagaagtactactgcccaatacctgttagctaaaatataatgaagctcttgtggattttttgcagcggggagagcagagggttaa

SEQ ID NO: 454156 - DNA, 578 bp, Homo sapiens
ggaggtgaagaataacaaaaagaaagtcaaatatatcaaaacaattggaacgagtacaaacttgattttttaaaaaaactgaagtaattataaaatgtctctccctcacttttttttgcctccttctttattgaatttgtaatagtcttttaatttaaatgttaataataggggacatataacacttgaattttaaaaactattttaatttaaattttaagaaatttwaaaaatatcattttctagatattaaaaattcaaatgaagtcttatttgaccaaatatgccaactctgctttttgcacccttgttgtgatactacagtttgtagagttaaaatatagaaggaaatggaaaaaaaaaaccaacttgtatgagttttttaaattttctctttcaaaattcctttttcaccagaaaatgaactctgagcttgtattcaagggtatgtcaactgttatctctttgaaacaaaggaatgaaaaaaaaaaaaaagaagtactactgcccaatacctgttagctaaaatataatgaagctcttgtggattttttgcagcggggagagcagagggttaa

SEQ ID NO: 454157 - DNA, 665 bp, Homo sapiens
ataaactcccaactagcccaatgaactcaaagatgtgcaatgaaacacattatgatggactgtcaaaactgtgtttaacgaagagggaatcttgaaagcagcaagagagaagcaaatgagcatgtacaagggattcttcctaagattgtcagcagatttctcataagaaactttagaggccagaaggcagtatgtgatacattcaaagtgtcaaaacaaactaaagaaattctccacagcagaagaaactatcaacagagtaaacagataacctacataatggaagaacatttttgctaactatgcatccaacaaaggtctaatatccagcatccataaggaacttaaacaaatttaaattgggaaaattttaaattaagccccacaaaaaagttggcaaaagacataaaaagatacttttcaaaagaagacacacatgcagccaataattctatgaaaaactcaacaccactgatcgttacagatacacaaaaccacagtgagataccatctcacaccagtcagaacgrttatgctagaaagtcaaaaaataacagatgctagtgagattgtagaggaaaaggaatgcttacatactattgttagttaattcaaccattgtggaagattggtgattccttaaagacctaaagacaaataccatt

SEQ ID NO: 454158 - DNA, 579 bp, Homo sapiens
ttttaccaacttatatctattgagggctcagcttctaraacctgtgagagctaccatgctgaataattgatgctacccgcccataagcccttagattcagaaaaggaaatgggcatacatgcaaaaaaattctgatacttgataaactgttacatgtaaaataaactgaattcaacaatgtgacatatgttcagtgcatgatgtaatttgttcatccattcagctattcatttgttcacttcttgtttgatcaaatatttaataagggcctattgcatactaaacaccagaagtacttggtataaagtattggataaggcaacataattcatacatttacagcttatagactaacaggaaagacaaatattctagagatactcataagtaaatatataatgacaagctgcaataactctatgaatgaagaaaaccaagtatcatgaagcaagataatgggcaagaccctgagttggcttaaggagttatcaaaagcatctcaaatttaccttttttgtttgttatgaatgaaaaaataggataagcaagtaaagagagagagaaagagtattccacatg

SEQ ID NO: 454159 - DNA, 566 bp, Homo sapiens
actgtccaactgaggatcaaagagactggagtatttcaccatccactcccatcccttatgagttaagtttgctcctgggtcattaactccttgcattttccattcagctctataggtgggctgatatcattcatgtaaccagagaacaccgttagggagagacaaagagatactgagggtagaaaactgatggttatgtataggaattgtcccctaacctttcagatgacctctggcatgggccaaggtgatgcaaatggggtaccagccgtatatgctacagacactgacaccaaagtctccaatgmctgatgctatatttcctgtctcatatccattatttattcctgctttgttctcactcaacactgttatcatttagtcctaaagctaagggaaagctggagtcaatctccaggagggcctttaataattcttctagttttcccaggagctttcttttcccagtatgtcagagaccactcttaacacaaagacactggtttgtgtccagtctggcatggtaaatgttagtggcaaagaaattaaagctaagtagttacagt

SEQ ID NO: 454160 - DNA, 609 bp, Homo sapiens
attttgttgcatcaatgtccctgaggggaagctggcaccaatgccaggatagcagctgatctgcgtgtctatttacataaatttgcattggtgtgatgttgaaaactaaatgccaatattaaggaaaatcgttttctcccagactaagtcatctcagcagwgcacagtagcaaggaatacaggctctggaacctggcctgctaccctctatttgtgtgaccttgaaagttataacctcttgtgttgtatttccttatctagaaatgggaataatgatagcactgaccacagaaggttggtgcaagggttaaataagttaatgtgtatgaagggtttagagcatcacttgacctattaagtgctgtgatattagctgctattattaactcacaccccatccattgtccctcaccatcagtttttgtaacgcagcctctgctttttcttctataaatcataaaatttagaaatttagagctgggagggatctcagaacatctaatcagtcacttttagacttttattttattccttttaaaataactatggagcactttttgaaaataaaagcttacacggaaacccagcatggggaaccatagtagcgtt

SEQ ID NO: 454161 - DNA, 609 bp, Homo sapiens
attttgttgcatcaatgtccctgaggggaagctggcaccaatgccaggatagcagctgatctgcgtgtctatttacataaatttgcattggtgtgatgttgaaaactaaatgccaatattaaggaaaatcgttttctcccagactaagtcatctcagcagagcacagtagcaaggaatacaggctctgraacctggcctgctaccctctatttgtgtgaccttgaaagttataacctcttgtgttgtatttccttatctagaaatgggaataatgatagcactgaccacagaaggttggtgcaagggttaaataagttaatgtgtatgaagggtttagagcatcacttgacctattaagtgctgtgatattagctgctattattaactcacaccccatccattgtccctcaccatcagtttttgtaacgcagcctctgctttttcttctataaatcataaaatttagaaatttagagctgggagggatctcagaacatctaatcagtcacttttagacttttattttattccttttaaaataactatggagcactttttgaaaataaaagcttacacggaaacccagcatggggaaccatagtagcgtt

SEQ ID NO: 454162 - DNA, 620 bp, Homo sapiens
ttgttctaattctgccactgtcccctactggtcatgtgattgctcttcttttcctttttcttaaagttacagccctgagacagtctctttggtttaaacacctttttctaggcctgattaagctgagcaagattgtgtggcatcccctgtggttggctcccaatgggggtgaaagtatcatgaacttgcatttctaacatcttctgttcccttcctgtgcctttgacagctcacagccggagggggagtgagtcatttggttaaaaataaaaatactaccatcttttctctaatggctttgttcatgatcactgcaggctggcactgatatgtattctaagcagccagggatagccagtgggcagcctgggaasctagctggattgcctaaaaccaaagttttgtcatctcctttactttgctgaaacacggggattcagccatctctaccttggctgggctacattagcatggggtggatggaatagatggtcagccttcagaagaggggaacagtgatgaacccaagagtcacttagaggagagaaggtaagattcatagcccacaagagggtagcccaatcccttcattttactgagacccagaaatggagcgttac

SEQ ID NO: 454163 - DNA, 538 bp, Homo sapiens
attattttcctcattttacagataagaaaactgaagtttaacaaggtaaagtgacttgcctaagttccactgactagtacatggtaaagaagtgataaaataagttcatttaggtccagtgcctaggttttcaatcattgtatcctcaagtttagggagtggggagtgtatttattagcatgtgtatgtgctaagagagcagcaacagtgtcctattcattattaaatccccaatttttttttttttctgagacagggtctctctctgtcgcccacactcgagttcagtgacacaatctccactcactacaacctycacctcctggattcaagcgattttcctgcctcggcctctcaagtagctgggattataggcttgtaccaccatgcccagctaatattttgtatttttagtagaaacagggtttcaccatgttggccaggctggtctggaactcctgacctcagatgatctgcccacttcagcctcccaaagtgctggggttataggcatgagccaccatgcccagcctaaatc

SEQ ID NO: 454164 - DNA, 538 bp, Homo sapiens
attattttcctcattttacagataagaaaactgaagtttaacaaggtaaagtgacttgcctaagttccactgactagtacatggtaaagaagtgataaaataagttcatttaggtccagtgcctaggttttcaatcattgtatcctcaagtttagggagtggggagtgtatttattagcatgtgtatgtgctaagagagcagcaacagtgtcctattcattattaaatccccaatttttttttttttctgagacagggtctctctctgtcgcccacactcgagttcagtgacacaatctccactcactacaacctccacctcctggattcaagcgattttcctgcctcggcctctcaagtagctgggattataggcttgtaccaccatgcccagctaatattttgtatttttagtagaaacagsgtttcaccatgttggccaggctggtctggaactcctgacctcagatgatctgcccacttcagcctcccaaagtgctggggttataggcatgagccaccatgcccagcctaaatc

SEQ ID NO: 454165 - DNA, 604 bp, Homo sapiens
aaaataacacaaatttattctgtcatagatgtagggattacaagtctgatatcaagttgttggcatggccatgctcccgccaaggtctctggaaaamaattcccctttgcctcttcctacttctggtggttaccagcaatttttggcattccttggcttgtagctgtgtcacttcaatttatgcttgtgtcttcacatggctgtcttctctctgtgtgtgtctgtgtctttttctctgaatccgcctctcctttcacttataaaaatcctggtcattgaatttagggtctaccctgatgcagtatgacctcatctttatttgattatttctacaacaccctataccaagtaataccaagtaagatcacattctaatgttcagggtatacacgaattttggggggacattattcaattttggggggacactattcagcccagcacagatggtataacatggtgccaagggaagcgtactcagaagttcaactgtctgggactttaatcccgatctgcaacttgctcactgtgtgacccagaaaatctcgtaacttctctaaatctcagttttctcttctgtaagatagggataataatagtacat

SEQ ID NO: 454166 - DNA, 326 bp, Homo sapiens
cttttttttcataaggttagcaagttaggaaatattaggaaatcagagctgcccttaaatmctattggtaaaggtatatccggagtatctgtgacaatgagcgttgtcaggacaaacatggggggcaggaggaaaaacgctgctatccaagaacccagccatgtggagaggaggcttggcttggccatgtggagatgccagtgttgccatgccaacagcgatagcacatagggagatatgcacagatattggcaatgggggtggttgctggggctggcaaaagagttaacactgtagtcaaaagcatctcttagaaaccacaccca

SEQ ID NO: 454167 - DNA, 519 bp, Homo sapiens
taagggcttgttagtccagggagacctcctggcctgggtctcaggaagcagtccatctggctgaatcccagcaactcttcctgggagacagtatgtcttatgggtaagggaaataggagagccacatgattccatgctatttctagatgggtaacagacacagtgaactccagaggaatgcaggtaatcagggaaatatatcccaaatgtttttttccaggacaattaaaacgggtgctaaaatcagctttacaggtaaaaagaagtctcaaaaactttgtcagtgtgcrtggggttagcttttttcagaattaggaacacaatcattaaaaaaaagaagcaaagaactacaatttattgagcacctactaaataccaggcattgccctagatgctttctgtgcactgcaatacttaatctgttcaatagccttgtgaaataagtactactattattatcataaccattttgtagaagaagaagaaaaaaaacaggcctgaagagaataaattactcac

SEQ ID NO: 454168 - DNA, 584 bp, Homo sapiens
ggaatgggcctctggccaaagcaaatgccagccctgcactacagggggactgrccttcagggctctgactaatgggccctggacatcctccctctttctctgtccatcttctactttcttggcagaccaggaagtccctggtgagaggatccagccttgagccagtgatgctttgctaggacaatatgtttggaaatgataaatcccttaaaaatgtatgatggtcaaaagtatggacctcaaactatagactaccatgttgtaggggaaggtactttcctagacactaaaaaaatgaataaaattaactttgcccttacgtttagaaaataaatcttctataatatattttaatgcagatgatccctgacttacattggttccacttaagatttttcaagtttataatactgtagaagtgacacacattcagtagaaactgacaaacattcagtagaaactgagaattttgaagtttggttttttcctaggctagtaatatgtagtaggagactctcttgcgatgctgggcagatgcagtgagccccagctcccagtcagccacgtgattatgagggttaaca

SEQ ID NO: 454169 - DNA, 609 bp, Homo sapiens
gtatccaaatttctcctgctctggagggggtggtgatctctgttgagtagctcacgtgtttccaggtagattacataggacctggatgatatcttggctgagtggcatgacttttcaggcaaaatcgatatcactttggggcactaagttccaaatataagacttagatcatttttctgactttataattcactaattatgaatcttttaataaagcatacaatttgtatgtatgtctaatattcaaattacttgctttctttttctggccgactttgcaaactcaggtaatgaccaagaggacattcatgtatattacatcacttggtcttcaaaacagccttgcaagctgaacaaaggccatggcctccattttgcagatcagatcatggaggattagctaaactcacagactgctcatggctcagtgcacctttttgcagtttcctaagtcctaggctcacatttatagagggttatcttcctctcaagcaccctcctcttaatttcagaaaatagccaagttttggkttgaaccaacacttccctgataagccattctctcactaccacctgttgcagctgccaccactgtggactttaaaatgc

SEQ ID NO: 454170 - DNA, 535 bp, Homo sapiens
cacaatcctggggccacattccagacaattaaagaaaatatcagcatctatttaccaacgaattacagaacatcattcaaatgtcatcagtccagaacccactccctggctctcacagagctctgactaagagcagtcttcttttccctcttctcattacctcgctaatattagatcaacatcttataacttctcatggcataagcttggtgtgagggaacttgctttctcaggatgcccttctctgccacataaacatacacrcctctttgactgctgttttgtgaatcaaaatttccatcttcttactttttttctgcatcctggtgtcaagaagtcagaaaacctaatttctaaatcttgcttctgccatttctccttgggatgatcttcaacaacttttccaaaccttggatttcatgctgattcttccttcttgatcaggtttttaagtttttgagataatcaaattatcatctgaattttaaagtctattatgaactacaaaaacatcattcgaatgttagtattatta

SEQ ID NO: 454171 - DNA, 535 bp, Homo sapiens
cacaatcctggggccacattccagacaattaaagaaaatatcagcatctatttaccaacgaattacagaacatcattcaaatgtcatcagtccagaacccactccctggctctcacagagctctgactaagagcagtcttcttttccctcttctcattacctcgctaatattagatcaacatcttataacttctcatggcataagcttggtgtgagggaacttgctttctcaggatgcccttctctgccacataaacatacacgcctctttgactgctgttttgtgaatcaaaatttccatcttcttactttttttctgcatcctggtgtcaagaagtcagaaaacctaatttctaaatcttgcttctgccatttctccttgggatgatcttcaacaacttttccaaaccttggatttcatgctgattcttccttcttgatcaggtttttaagtttttgagataatcaaattatcatctgaattttaaagtctattatgaactacaaaaayatcattcgaatgttagtattatta

SEQ ID NO: 454172 - DNA, 616 bp, Homo sapiens
tctgtccaattaacattaaagctctggcagccatgaagagacctttaggaaaaggcaatttgacacaattgctaatcatgttcacatttaggaaagtggctcccaaacataacattctcctggtgacagctggagacctcatcaaaggaggaacacaggcttcacgcacctccaccatttgacccattttcttcatccagcattttcaccttggacgcctgttacgttccagctgtcttagcaggatcagtctttcagagcctgctgcggtcatccacactactstgctcttgcccactgaacccacggcctatgtgccttctcaattttatcgtggcctagtccagttcctccatattactttcctagtaatggttatttcaacaaataatgctcgtgatgtgttgagacttggtttgaatgccacttcaatcaattattaacttaggtatgttttatgcttttattttcaagtaatacatgttcacagccaaactcttcatacagtacaaaggcttctacagtgaagcctaaatctctctctcttcctaacttctagattcctcattgaatgcaatctcagttaccaacacctcgtcttttcttccaaagatgc

SEQ ID NO: 454173 - DNA, 616 bp, Homo sapiens
tctgtccaattaacattaaagctctggcagccatgaagagacctttaggaaaaggcaatttgacacaattgctaatcatgttcacatttaggaaagtggctcccaaacataacattctcctggtgacagctggagacctcatcaaaggaggaacacaggcttcacgcacctccaccatttgacccattttcttcatccagcattttcaccttggacgcctgttacgttccagctgtcttagcaggatcagtctttcagagcctgctgcggtcatccacactactctgctcttgcccactgaacccacrgcctatgtgccttctcaattttatcgtggcctagtccagttcctccatattactttcctagtaatggttatttcaacaaataatgctcgtgatgtgttgagacttggtttgaatgccacttcaatcaattattaacttaggtatgttttatgcttttattttcaagtaatacatgttcacagccaaactcttcatacagtacaaaggcttctacagtgaagcctaaatctctctctcttcctaacttctagattcctcattgaatgcaatctcagttaccaacacctcgtcttttcttccaaagatgc

SEQ ID NO: 454174 - DNA, 697 bp, Homo sapiens
gtatgagtgtgtgtgtgtgtttgtgtgagtgtgtgtgtgtgatctcagccctgatctattgacagactgaaggcactgcttggaataaaccctaggaaaaatgacaaagtcactaaagctgcctttccttaacccaccattttcaggaatttgttgaatgggaaaagcaccaggcttaggagctttggttgagggtcccagttgtgccaattactttgagcaattttatgacttctttcaggcttttgtcactcatctgcataataggagtaagtgattgttcctgggtaagattattgtgaagcgtaaatcagatgatgcatatgaaagcactttagacttagagtggttttaacagggagaacattattgaggggatcctgcatttgatcttgatataatcaacccctacattgasactcttgcctggctgctttcccaacttctaacatattccaacaacaggttccacgtagcagaaggtttcaggcagacagcaaaaatagaaacttaggtagaactacaatgtggcttttgtgatctgcccattcataacaataccaatcccattgttagggatatggtaagcaggagacccagggggcagaagcaagtaagtgtcacagtctcagtaccctagaaaaagtgactgaggtcatggtggatcctcagtcctcgagtcagtactgttcaaagt

SEQ ID NO: 454175 - DNA, 609 bp, Homo sapiens
caccctccaccagtaacaaaccgccattaaaaaattataactgagatggtaaaagagagctaacccaaccaaactccatcttgcttctaacctccaggctgtccttgttcaatcctgagcataggctgaactaactttgagaggagcttagtttatggtttagctttgaaacaaagatgataacagccctttcccgaaacaaacccacttctctggggactagactgcctttgtgggactaacgaattagccaaaagattagaaattatggtttaggagtcatgcagcaggagactataagattctaatcttccgcaaattgcttgtggggataatatcaccattgtaaagcctgtgtttgagatattttgcagactctgtacttgatggatcagctggcaccacccagattgataaactagctcatctaatcttgaggcccccacccaggaactgactcagtgcaagaggacagcttcgattccctataatmtcacctttgacctgaacaattagcactccaactgactcactggcccttcatccaccaaattatccttaaaaactctgagcctcgaatgctcagagatactgatttgagtaataata

SEQ ID NO: 454176 - DNA, 626 bp, Homo sapiens
tgttgcaattttcctgtcttgataaatcagctctatgtgggggcaaggtaaacctgttgggwggttacaataacagtagtgcccaaagacctagaggtaaatatctcactgtattgaaggaaggccttttatatctagctaaactattagtcatgtttaaaggcaagataaactattttttttttagaatgcaaagactaagtgagcttaacaattttagtctattgctgaaacaagtaaaacacatttcaaaaaagaagaaatgtgaacctcgaatgaagatgtaagatacaagaagcaatggcaaaagattttaaaaaggcgaatgtctgtgagcacagaagttaataaaatatcagtaaatttaattagcttttgaatgtaaaattaataataatgtttatgtgacaaatgtaaaacaaagtctaaacaataagtataatagtggggactcatgtgtagtggcaaatcatgtttattcacatagctgataattcctaaaatatcagaagggaacagtaaacataaaaaatatatcagtcaacgaggaatcaaaagaagaaaggaaaaaatgatgacagaaataagcctaactatatctgtaatcccaactaaagtgaataaaa

SEQ ID NO: 454177 - DNA, 626 bp, Homo sapiens
tgttgcaattttcctgtcttgataaatcagctctatgtgggggcaaggtaaacctgttgggaggttacaataacagtagtgcccaaagacctagaggtaaatatctcactgtattgaaggaaggccttttatatctagctaaactattaktcatgtttaaaggcaagataaactattttttttttagaatgcaaagactaagtgagcttaacaattttagtctattgctgaaacaagtaaaacacatttcaaaaaagaagaaatgtgaacctcgaatgaagatgtaagatacaagaagcaatggcaaaagattttaaaaaggcgaatgtctgtgagcacagaagttaataaaatatcagtaaatttaattagcttttgaatgtaaaattaataataatgtttatgtgacaaatgtaaaacaaagtctaaacaataagtataatagtggggactcatgtgtagtggcaaatcatgtttattcacatagctgataattcctaaaatatcagaagggaacagtaaacataaaaaatatatcagtcaacgaggaatcaaaagaagaaaggaaaaaatgatgacagaaataagcctaactatatctgtaatcccaactaaagtgaataaaa

SEQ ID NO: 454178 - DNA, 626 bp, Homo sapiens
tgttgcaattttcctgtcttgataaatcagctctatgtgggggcaaggtaaacctgttgggaggttacaataacagtagtgcccaaagacctagaggtaaatatctcactgtattgaaggaaggccttttatatctagctaaactattagtcatgtttaaaggcaagataaactattttttttttagaatgcaaagactaagtgagcttaacaattttagtctattgctgaaacaagtaaaacacatttcaaaaaagaagaaatgtgaacctcgaatgaagatgtaagatacaagaagcaatggcaaaagattttaaaaaggcgaatgtctgtgagcacagaagttaataaaatatcagtaaatttaattagcttttgaatgtaaaattaataataatgtttatgtgacaaatgtaaaacaaagtctaaacaataagtataatagtggggactcatgtrtagtggcaaatcatgtttattcacatagctgataattcctaaaatatcagaagggaacagtaaacataaaaaatatatcagtcaacgaggaatcaaaagaagaaaggaaaaaatgatgacagaaataagcctaactatatctgtaatcccaactaaagtgaataaaa

SEQ ID NO: 454179 - DNA, 580 bp, Homo sapiens
gtagtggcaaatcatgtttattcacatagctgataattcctaaaatatcagaagggaacagtaaacataaaaaatatatcagtcaacgaggaatcaaaagaagaaaggaaaaaatgatgacagaaataagcctaactatatctgtaatcccaactaaagtgaataaaattttccattataagaatattatctgactgaattttaaaaatccagttacaatgtttcataaagagattcacttaatacaaaaatcacatgaaaagtctgaaaagaaaatgacatactatgcgaatactaaaccaatgaaaatgaggcaataatctagggagaaaataattcataccagcaaaatgaaatccaagacaaaaacattactagagataaakaaatatattatttaataacaacattttaaaaaacactcaccaaagtgaatataaaatatagatgcacttaacaacatatccttaaaatagaaaagcaaaatttgtatcattttcaaaattgggaaacactattgtaagtgggaaatttttaaatatctttattggaacctgatagaatacatagacaaaaatag

SEQ ID NO: 454180 - DNA, 529 bp, Homo sapiens
tagttacatacctggcttaccttgaaatcaactgaaatcagtcactaaggaacaaaattctccagagaaactgtttcttccttgaatctgaatgctagggcatataatcataaggctaatgttgaagtaacttggttaatggcaacacatatacacatatctagctctaactacttatacagctgctcaaaatccttataaagcctttcaactcaaacttgrtgcaaatgcaaacacacttgcattctccatgttcccctgcctccagtcttttttatttttcctttttcatcttgtcttccaccgatttctctctaagatggtttcttctctgtgatagtttctatgataaaactaatgataaggcaggctcattaattctgaaaaagaaagaagtatagctatgttgaattaggtgcaaattcatttatgtggtctgaagtctttcagcatcgaatgttttcaagcatttgtaaaaagaagtgttcttttatgacgttcacgttgtctttaccttccactcttgctg

SEQ ID NO: 454181 - DNA, 587 bp, Homo sapiens
ttggcttacacattaatttggtactgagactgagccctctgtgtgcagaggagccctggtaaggagcctttagcttccataaaagaataatgctaagtacacattttatgtgccagcctcctgctccagacagatctcacaaaaaaagaatctttacaggtgaaaagtggyaagagctccctttgcttttcattgcaagagggtatctcatgcatctgagaaaatgaggtcagaggaagtcagattaggaaaaggtgggtgaggatgggagcagcagaggaagtctttatgcaggaggtgtggggtacgagctgcgccttgcacaggtggagaggtgggaggtgagccctgcagaccagaaaggtggaggaacacagctttagtgttaatttccaaatggagcctgaagatgtttccatcatgaatacaaaattatttcttctgcaaggaatgtttcatgcttccataaacagcctacgcctgtatgattttatgggagaaatactccataatagggaaagatttctacttacagggagtttttaagtagctgcaatgatgtgccttcaataaaagaagaaatgaaa

SEQ ID NO: 454182 - DNA, 513 bp, Homo sapiens
tggttaaattattaataaagaagagctttgtctcccgtatgtatcatttcccttgtgtatacagtcacctcagtgaagagccatccaggtatacaagcagcaggatagactccgagcatttacccaactcctggcttaaaatattttaattttttccaaaccttgccctgatctcttcattgtagctgccatcattccaccaccaccacttctgctatcatcatcatcatcaccaccaccaccccagaaagagccaaacccaatttaattcaattcaatttgaattgaatttrctgggtctctgaaatataccgaatgctgtggttctgtcctctgcatttgtgtcaatggatggcccgggttcatttgaacagtttaagtgggttggacatacttgtactaggcactggggatacaatggggaaccaatccctgccatcagttgctcatagggatgaagaacaatggcctaactcagagactagagaaaatgtgggtcacaaggggtgatgc

SEQ ID NO: 454183 - DNA, 513 bp, Homo sapiens
tggttaaattattaataaagaagagctttgtctcccgtatgtatcatttcccttgtgtatacagtcacctcagtgaagagccatccaggtatacaagcagcaggatagactccgagcatttacccaactcctggcttaaaatattttaattttttccaaaccttgccctgatctcttcattgtagctgccatcattccaccaccaccacttctgctatcatcatcatcatcaccaccaccaccccagaaagagccaaacccaatttaattcaattcaatttgaattgaatttactgggtctctgaaatataccgaatgctgtggttctgtcctctgcatttgtgtcaatggatggcccgggttcatttgaacagtttaagtgggttggacatacttgtactaggcactggggatacaatggggaaccaatccctgccatcagttgctcatagggatgaagaacaatggcctaactcagagactagagaaaaygtgggtcacaaggggtgatgc

SEQ ID NO: 454184 - DNA, 543 bp, Homo sapiens
ggtttacagtaacaatctgggctatctacckcctgatatatatccagtgagagacaagctatttgtttattccaactgattctcagagttctgagtctgactctcattgaaccaccttagataacttattcatccctgaaccaataactgtaagagtgataatactatctttgttgaattaccgaaatccttaccagctccttgagctgagggacaatttgatttttttctcaaactgtagggatactgcacagtgggtaagaggaaaagtggatgtttgagagaacattacaatgtacacctcaatgctgaagataaaagtgatagtaattttggtacagatgatgaagatgataaagtggtgaagaagagtaaaggtgatgaaggtggtaaagccactgagataataaaggtgatcatgataatgactgtggcaatggtcaagaggcagtaaaaatcaagctgatgagagtgatgaagttaataataaggagaaaaaaagcaataggccaacatttaattatcagaagcgcagtgaatctg

SEQ ID NO: 454185 - DNA, 598 bp, Homo sapiens
gaaagtaatttattctgagcctccctttgttaacctccaaagtgaaataagaagaagtatatttaatggctgttttaagaattaaataacagyggtcatggaaaatacctagcatatggcttggtacttagcaggattgaaaatctgaagataatgtaagttgccatcaccatcactgccatcattctcatcagcattatgatcactatcaccttatgccccaaatagacctgcttctcccttttctattgaaaaaaaaatgtgctttagtggaaaaagtggtggatttagggtcagaaaaacatgcattcaaaaccgaaccataaatttactctacaactttgggcaaataactttatgcctctgagcctctgttccctcctccacaaaaggggaaccttatcagtcacccataatggagtcactaatgatgcactagctgagaaagcactttataaattatacattgcaacacaaatgtaagttctagcttgcagtttattattgcaagtagtagtccataggggctacgattctcacaggagaaaagttcaaagttatctttgacatcagcttccatcacatcaaaggcacaatg

SEQ ID NO: 454186 - DNA, 510 bp, Homo sapiens
cttttgatccaaatggaaatgagttctgatcactttactgagagggtatatatcccatcccatgatgggaggstctaatattaataatattaatactaacgacaagcactgtgacaatggataatttagatttagttttggctatgtgccaagcactgtgttaagcattttccaagcaatatcttcacttctcagaataaccctataaggaaaaaactgtaattattcctatttagagttgagggagctgaaattcaaataagttgtataaggtcactaggacctcctttatagttggaaaaattgtagcccagaaagttaaatgagttatccaaagattcagcacatctttgaggcagaagtatcagaaaggagaaaagggcttggagttagaagactggagctcttaagttctaggtatttactgtcagtatacgtccatcagtgtgctagttacatcatctcatttcattgcacaacaactttggaagagtgatattatttttgtct

SEQ ID NO: 454187 - DNA, 588 bp, Homo sapiens
tcctctacgtcatactgtgtttcaggttcacgtaagcagtgtttcattctgggcccagggctacccagagaatgttcttctaatgaagggaaagagaagtacaagaggccaaggcaaagcaagtaagcatatttcaagcctctgtttatggcatgcctgctaaaatatgatgggccaaagtaagccacatagccacctrttctacttggagatatatcaaagccacatgaccaacgacatcagtgtgtaactcttaaatagaataagtaacaaacagaaaaaaagaccattctaccaaaagaaccatattgaaactggaaaaatgaaataaaggtccttttattacaaatgattaggaaatcttaaattatatttccccatgatctcattgaggtacatactcagtattttctgatcctgaagcagttgctcttgttgtttttttatatatattaacccatttattagcttgctgtttattgattgcttctcatgtcttggccacctggtagctcttaatttcacaaagggtattctcattttactttaattatttttgataaattgccaaattacaggtaactcctg

SEQ ID NO: 454188 - DNA, 588 bp, Homo sapiens
tcctctacgtcatactgtgtttcaggttcacgtaagcagtgtttcattctgggcccagggctacccagagaatgttcttctaatgaagggaaagagaagtacaagaggccaaggcaaagcaagtaagcatatttcaagcctctgtttatggcatgcctgctaaaatatgatgggccaaagtaagccacatagccacctattctacttggagatatatcaaagccacatgaccaacgacatcagtgtgtaactcttaaatagaataagtaacaaacagaaaaaaagaccattctaccaaaagaaccatattgaaactggaaaaatgaaataaaggtccttttattacaaatgattaggaaatcttaaattatatttcccyatgatctcattgaggtacatactcagtattttctgatcctgaagcagttgctcttgttgtttttttatatatattaacccatttattagcttgctgtttattgattgcttctcatgtcttggccacctggtagctcttaatttcacaaagggtattctcattttactttaattatttttgataaattgccaaattacaggtaactcctg

SEQ ID NO: 454189 - DNA, 696 bp, Homo sapiens
ttaaatatgttaaaatctaggcaaagagacacatgtcatctaagtaacttgattccaaagtccagaagaaagattgattctctttagtagagaaaggttattttgatgaaagcatgaaagaatgagtagaatttgatctgatcagcgaaaatagaggaaaaaaaaattctgtggagggggaataacaaaggcaaatgccaaaaggtgggcaagcgaatgtctcaytataactccactagtgtaaaatcctcctccatttcccaccatctaaaacacacctcaggggattcacaatctcccagcctgaatttccaatgcacttactgtagtttactatccacccaaggctcctaaactacaccgcaaagtgtttgcacttttttttctaacataacaccttctgtttcatgcctctctgaacttgcatttgctactcattggacacaaaattgatttattcgcctgaaaaactattctcctgaaaaacccaattcaaatactacctcctttttgaagcctcccgatactcccagataatttcacactgtgtcacgactcttcgtctgcatgtctgaatgttatgcttcttaaatgaatgaatgcacatgtgaatgaatgaatagattaatagaataatatataatatattcataaaatggcaagtctgaaagtattgggacataacctatgagatgc

SEQ ID NO: 454190 - DNA, 584 bp, Homo sapiens
gggctagggaaggaacaaagggcctggttgcatcactggcacctccagcatgctgcaaccaccacacagagaggaccccagtctctcttccctgtaagaccccaccacctactcttcaccaggaagggcccttggctcaggaccacagaacagttgccccttccctgactgagcattcccactgctagtggcttggtatttccctggggtaaggcttccagaggtaacctctgccactgccactgcctttgctgccrtgagactggagaaggaacaaagaccctgagtgctttattcacaccagcagaatgccacagtcaccataaggagaagaagccagtctgtcttccacatgatcgccctctccccaggctcattaccaagcagggcttcttggcttgggaccacaaggcagccatcccacctcgggcctatcgctctgattgatagtggtgctgtatttctcttaagtggagccccaagagacaaatgaaaagccttctttcattgccactaccaaggtccctgtccctggttcccccaagctggggagggaacataaagccagagctcaccccagggat

SEQ ID NO: 454191 - DNA, 586 bp, Homo sapiens
tgctgaactgcatctctttggggtggagcccccaggagacaagcaagtaacccttggccacaaccactactaagatctcttcctctgctgcctccatggtgaggaagaaacataagcactgagatcaccccagagctgcagtgggcaactcaggagtgccaagtcacaatctatggccagcactgaagtgggagaagaactctgcaatttcagagcattgaaaaagaaaatgctgcaactgtgcagaaacataggaagctgcataaccaagcaagagtctactgactgaccaataagcctaagtgccacttgctggatcacaccccaaagcttcaacaccaaaaatacctcactaacgagcctccctctgaaaccagaggcaagaagtcagcttcaaataaaggccccacacaaagcctcagcctggtgaacacatccagaaaagaagtgtagtgattgtactcaatctacactgcagttaaatgcacacccacagwcagagatgagaaagaaccaatgcaagaactctagtaactcagaaggccagagtgtggtatatcctccaaatgaccataccagctctcca

SEQ ID NO: 454192 - DNA, 449 bp, Homo sapiens
ttttttaaaaaataaaagtaataaagacttgtcttatgagatgtcaaaaatattacataaaacatttattaatgaaaaataatgcaaagttcacaattacttttgtatttattgaaatgtatttggttttccttctttargctatttgtttcccctaaatgatgtgcaattttcctttttccatgtgtgtggttcagcgctcatgtaggtcagcctattgggcggggggtggggggctctcaggtagtgatagaagtaggaggtgaatgataatttcagtgtttcttttccaagggatcagaaatatttctaggctaatcttcaagttactgtgaaatggaaaaaaatgttttgggtcaaggtaatagaaaaatatatcttaggtgttaggtgttagacaaatagtaagacgtgagaatattgggaatcttgagcaataatttttatat

SEQ ID NO: 454193 - DNA, 449 bp, Homo sapiens
ttttttaaaaaataaaagtaataaagacttgtcttatgagatgtcaaaaatattacataaaacatttattaatgaaaaataatgcaaagttcacaattacttttgtatttattgaaatgtatttggttttccttctttaggctatttgtttcccctaaatgatgtgcaattttcctttttccatgtgtgtggttcagcgctcatgtaggtcagcctattgggcggggggtggggggctctcaggtagtgatagaagtaggaggtgaatgataatttcagtgtttcttttccaagggatcagaaatatttctaggctaatcttcaagttactgtgaaatggaaaaaaatgttttgggtcaaggtaatagaaaaatatatcttargtgttaggtgttagacaaatagtaagacgtgagaatattgggaatcttgagcaataatttttatat

SEQ ID NO: 454194 - DNA, 509 bp, Homo sapiens
agagagggaagtggcctgtcccacaccactcgcatcaggatttaaacatatgtcttgatgctaagcctggtgtagtctctattatctattactctccactcctctttgttttgtcttttttctcctcaaatgtcctaacatttttttctaattcctgggcattgggctatacatatgagacacggctaagacytagatagggggagtcaggagagtagagtgggaagggcatgaactttggagtaagactggctggaaatagtagatgcacaataaatacctggggaatagatggataaatgatttggtattaatcttaaccttgcagtcttgagcaagtcagtttttctgaatctcatctgaaaagaagagaataatgtttcccttgtaggattgttatgagaattaaaaatataagcaaaaagatgcatgtaaagcctttaaataaagcttcagtcacctcatatgccaactacaaaaggttaccattttattgataataacgttta

SEQ ID NO: 454195 - DNA, 445 bp, Homo sapiens
accttaatggattttctgtaagggctgaatttcctggggatagcaaaggatgttgccctcaggcagtacacgagttaaggtgtttgggagttgcaagcgatagaaacagactctttggttagtgtaagcccaaagggaattattggaaagatayaggtatctgaagaaacacaagggagaaatccttggactgggaaggaggaactgttcattatctcagtcgttcattcagtaaatgtttattgagcatctactgtcatctaggcactgtgcttcacactgtagctagggcagttaatgacagaaacatgatccttgctctcgtggggcttgcaaagaggatacagactccaaaaaagtatcaaataatcataagttgtgataagagctatgatggaagcaaataggatggtcagggaagtcttctctgaggaagtgacattta

SEQ ID NO: 454196 - DNA, 445 bp, Homo sapiens
accttaatggattttctgtaagggctgaatttcctggggatagcaaaggatgttgccctcaggcagtacacgagttaaggtgtttgggagttgcaagcgatagaaacagactctttggttagtgtaagcccaaagggaattattggaaagatataggtatctgaagaaacacaagggagaaatccttggactgggaaggargaactgttcattatctcagtcgttcattcagtaaatgtttattgagcatctactgtcatctaggcactgtgcttcacactgtagctagggcagttaatgacagaaacatgatccttgctctcgtggggcttgcaaagaggatacagactccaaaaaagtatcaaataatcataagttgtgataagagctatgatggaagcaaataggatggtcagggaagtcttctctgaggaagtgacattta

SEQ ID NO: 454197 - DNA, 445 bp, Homo sapiens
accttaatggattttctgtaagggctgaatttcctggggatagcaaaggatgttgccctcaggcagtacacgagttaaggtgtttgggagttgcaagcgatagaaacagactctttggttagtgtaagcccaaagggaattattggaaagatataggtatctgaagaaacacaagggagaaatccttggactgggaaggaggaactrttcattatctcagtcgttcattcagtaaatgtttattgagcatctactgtcatctaggcactgtgcttcacactgtagctagggcagttaatgacagaaacatgatccttgctctcgtggggcttgcaaagaggatacagactccaaaaaagtatcaaataatcataagttgtgataagagctatgatggaagcaaataggatggtcagggaagtcttctctgaggaagtgacattta

SEQ ID NO: 454198 - DNA, 585 bp, Homo sapiens
ggtggctgggacacatctacagtacacaatagtcccctacacatagaatccaaggatcagggtgaaatgcattatttcaactgtgtaagaaagaaaaacctcaaatcatatgcagaggggagatggggaagggattggggagaatcttggttgtatattaaggctttctctttggggaacaattgctagactttgttcatcaaatacaacaaactgtaggaaaagagagatcagactgtaactgtgtctacrtagaaagaagtagacataagagactccattttgttctgtactaagaaaaattcttctgccttgagatgctgttaatctgtaaccctacccccaaccctgtgctcgcagaaacatgtactgtgtggactcaagttttaatggatttagggctatgcaggatgtgctttgttaaacaaatgcttgaaggcagcatgcttgttaaaagtcattaccactccctaatctcaagcacccagggacacaaaacactgcagaatgccacagggacctctgcctaggaaagccaggaattgtccaaggtttctcctcatgtgatagtctgaaatatggcct

SEQ ID NO: 454199 - DNA, 533 bp, Homo sapiens
ggtggctgggacacatctacagtacacaatagtcccctacacatagaatccaaggatcagggtgaaatgcattatttcaactgtgtaagaaagaaaaacctcaaatcatatgcagaggggagatggggaagggattggggagaatcttggttgtatattaaggctttctctttggggaacaattgctagactttgttcatcaaatacaacaaactgtaggaaaagagagatcagactgtaactgtgtctacatagaaagaagtagacataagagactccattttgttctgtactaagaaaaattcttctgccttgagatgctgttaatctgtaaccctacccccaaccctgtgctcgmagaaacatgtactgtgtggactcaagttttaatggatttagggctatgcaggatgtgctttgttaaacaaatgcttgaaggcagcatgcttgttaaaagtcattaccactccctaatctcaagcacccagggacacaaaacactgcagaatgccacagggacctctgcctaggaa

SEQ ID NO: 454200 - DNA, 585 bp, Homo sapiens
ggtggctgggacacatctacagtacacaatagtcccctacacatagaatccaaggatcagggtgaaatgcattatttcaactgtgtaagaaagaaaaacctcaaatcatatgcagaggggagatggggaagggattggggagaatcttggttgtatattaaggctttctctttggggaacaattgctagactttgttcatcaaatacaacaaactgtaggaaaagagagatcagactgtaactgtgtctacatagaaagaagtagacataagagactccattttgttctgtactaagaaaaattcttctgccttgagatgctgttaatctgtaaccctacccccaaccctgtgctcgcagaaacatgtactgtgtggactcaagttttaatggatttagggctatgcaggatgtgctttgttaaacaaatgcttgaaggcagcatgcttgttaaaagtcattaccactccctaatctcaagcacccagggacacaaaacactrcagaatgccacagggacctctgcctaggaaagccaggaattgtccaaggtttctcctcatgtgatagtctgaaatatggcct

SEQ ID NO: 454201 - DNA, 453 bp, Homo sapiens
cttgcttggtggcgagaaatccccgcactttggtgattaaaagtcacagaaacatttgtgttatgttgagtataaagtagagtaggagaaactatttgtttattcctatattacagtrtgaatttaatttgtatgtcattaatataagtagatatacatggctcattaggtaaagagcaagtgttcatttgagaacatatatattcaactaatgagtaagttcaaggaaatatatgtgcttgaatgaaaactggatctttacccaatatataaaatgtataatattagataaccagttctactcaagtatccttgatgaagcaataaatattattaatgttattaactcttgacccttacatacattgcgttttagtgttccgtttggtgaaatgggaagttcccataaagcacaccaaagtgctatcacatatcaaggaaagggacgtgcag

SEQ ID NO: 454202 - DNA, 427 bp, Homo sapiens
ttctccctcccagtggcatgtcatggtcactttgcaaagacagccccaggagaaatagaaggaagcagaagaaaagggagagtagagtaccctgaagacaaactgactagctccacctttttaccaagagaagggccctgtgataatgggaagtgtctgtgagtgcacttttaaatcttgtacgcttttrccttaccttagacccagtcctattctcacctatattaatttcattttttcctttaactcatctttcctttacatgtgtttgaaaagcaagctttatctcagtaatgcaaatgaaacaccaaaaatttctcttaagtggaactgaactctcaaatcaatgcacataattaagacaaatttatctttcagtctatccatatgacacccaaaatcattggcattctatcagcgttgtgtc

SEQ ID NO: 454203 - DNA, 552 bp, Homo sapiens
ttgttttctttcctctttcctctctcccttcctcactcagtcgttggtttcctcctccttttcttcctgcctgcctccttttgtgcactgtctccactcttcctttccttcattctttcctttctctctgctttttatttcttccttccttttcctctttctatactcccttccttttctgtccccttccttccttctctcttgccttctttctttctttcttgtctctccctcttctcatctttactccctcygtctccccgtcttgctccaccttccccacctcaccttccagcctctcagtagccacttggtgatggtagggaggatgaaaaggtattccttgttttaccacatttactcagataattcacagcatgggtccagcatgtctaatttattctttttttatgagctgaatataatctttgagaaatagaaaaatagattgagtgtggccaaggatcattcaacttctaacattctcaaatgtagactgaattatgtcttctgtttgttagaattaaggaaaaaaattcatgtttcgagtac

SEQ ID NO: 454204 - DNA, 592 bp, Homo sapiens
cttgatcccattaccctgttcgtgggtgattgaaccaggggtaagctgctgacctaaagtgagccatcagattctccatcctatgcatttggaaatggtggtggggatgggaaaaaataggaaaaaaaaaagctacctaataaagaacttatcccatttataataaacagaagcatactccaataaaaatataggcaagcaaaataaatgggaaattcacaaaacataaaaaaagtttgtrttagcaaggttcgaccagaaaaaatagaaatagtaagagcaacatattgagagatttactgcaaggactcagcttgggcaactgtgacgtccggctgggtaggcctagaatctggggagcaagttttcaggaagctgagactctaacacatgggctgagactctgtcctcaggcagaatttctttttcagggagcctgagctccttctcttgaaatctttcatgtgattggatcaggcccaatcagcttatctatgataatatctcttacttaaaatcaactgattatggacttttatcatatctacaaagtaccttcccagcaacacttagccaactatttgattgaata

SEQ ID NO: 454205 - DNA, 547 bp, Homo sapiens
ttgaataactaggaactgtggcctcgccatgatgttgatacatcaaattgtccatcatgacattcaatcacactaataatctaggaagggaatactaaagtcacaagcatattacttttacctaataaattaaaaattgtcttaaaatactaagacttggtgttactatgaaagaaaagcaaaagatacatctactggagaccataagttgtaagctgtctttctagcaatgtggcataatatctcagggacaccaacattttaaaaagaaatttaatgtgaaagaaaatagagcataaaataagtaaattattatttaaccataagatggaatgtcagataactattaaacattgagttaaaggacaatatttcatggcataaataaagttcttgatatattaaagtaggtatattaaagagatagttgataaatatcatagacattcagttttgtacagtaayaaaaagggtagaagtatataaatcaaactataagagtaactctaggtaatgggtaattttttttttttcttgagacagagtc

SEQ ID NO: 454206 - DNA, 502 bp, Homo sapiens
tgcagccactacttgggctgctgtggctgcacctggggagctcctascccaatatggaaggggcaggtgtcccatttgtccctgattccctcctgctctgtagagtatgcagtcctggctgtgcctcctccaagcctggggcagggactccaggtccttgctgggctcctttctgcctgcccctcatgcccgaccacactgctccactgttagtggcccccaaggcaatggactgggcttgttgggggctcccaccagctctgtgtagtacagcaccacccctggctcaggtccacctcctcctcgtgccttccctgcagtggccagtgtgacggcagcagccactccagggagtaattaagatattatttggaatagatgaatgaatggataaggaataaaagaatctgggggtaggtgaggaatataatctgtaaaagtgaaattagcattgctataatataatggatatttcaccattgtaatttaggaatggaaaaat

SEQ ID NO: 454207 - DNA, 502 bp, Homo sapiens
tgcagccactacttgggctgctgtggctgcacctggggagctcctaccccaatatggaaggggcaggtgtcccatttgtccctgattccctcctgctctgtagagtatgcagtcctggctgtgcctcctccaagcctggggcagggactccaggtccttgctgggctcctttctgcctgcccctcatgcccgaccacactgctccactgttagtggcccccaaggcaatggactgggcktgttgggggctcccaccagctctgtgtagtacagcaccacccctggctcaggtccacctcctcctcgtgccttccctgcagtggccagtgtgacggcagcagccactccagggagtaattaagatattatttggaatagatgaatgaatggataaggaataaaagaatctgggggtaggtgaggaatataatctgtaaaagtgaaattagcattgctataatataatggatatttcaccattgtaatttaggaatggaaaaat

SEQ ID NO: 454208 - DNA, 321 bp, Homo sapiens
ttgggaaaaaatgaaaaggaaacattttgacatatcttgagagcatcacaaatgatgtggggtcttgatgaagggccctccagtttctgtttgtttgttgcctgttttccacattgagatacagaagacaaggacactcatgtagctggtgtcatcctcgccttctttgcatgcctttccatccataaaattcaacaaatatcagtctagcagmgctttattaaacactgcctacctatagagctgaaaccaacatttacgttaatctttatccaccttactaggacttttttattaatgcacccctaagccagagggagt

SEQ ID NO: 454209 - DNA, 563 bp, Homo sapiens
acatacaatgggagcaacatgaaagacaggattttgttttacctatgactacattctcagcaccagaacagtaccagatatgcagcaagtgctaaatacttaactgcgacatcaacagataactgaaagcacacatattgcttacccttaagtccttcagcctcagacatctctggcttcccattgtgttgctatttaagtttcaacactcatagctaaatgaatgtkgaaggagaatttcataggatggagtgcctcatcattccgtgggcacatgggaaacaaacagacggaaaaagaggcactgtgatgaaagaattggtattgatgtaattcattctctgactgcataccacacagacacttttataggggcaaaacactcatttatatcttaaggatcttgtgcgaatggactggacattcaaggtgagtggtgcctgagggtatgtattagaaacacaaacaacatacggaaatattctatgtatgtgcacgtgtgaggtatacatgcttcttctcctttataaaagagaaaaatccaagctgcttctgaaatctgg

SEQ ID NO: 454210 - DNA, 572 bp, Homo sapiens
aggattttgttttacctatgactacattctcagcaccagaacagtaccagatatgcagcaagtgctaaatacttaactgcgacatcaacagataactgaaagcacacatattgcttacccttaagtccttcagcctcagacatctctggcttcccattgtgttgctatttaagtttcaacactcatagctaaatgaatgttgaaggagaatttcataggatggagtgcctcatcattccgtgggcacatgggaaacaaacagayggaaaaagaggcactgtgatgaaagaattggtattgatgtaattcattctctgactgcataccacacagacacttttataggggcaaaacactcatttatatcttaaggatcttgtgcgaatggactggacattcaaggtgagtggtgcctgagggtatgtattagaaacacaaacaacatacggaaatattctatgtatgtgcacgtgtgaggtatacatgcttcttctcctttataaaagagaaaaatccaagctgcttctgaaatctggagaaggggcagaatgtcgagtacatgcatctttaca

SEQ ID NO: 454211 - DNA, 572 bp, Homo sapiens
aggattttgttttacctatgactacattctcagcaccagaacagtaccagatatgcagcaagtgctaaatacttaactgcgacatcaacagataactgaaagcacacatattgcttacccttaagtccttcagcctcagacatctctggcttcccattgtgttgctatttaagtttcaacactcatagctaaatgaatgttgaaggagaatttcataggatggagtgcctcatcattccgtgggcacatgggaaacaaacagacggaaaaagaggcactgtgatgaaagaattggtattgatgtaattcattctctgactgcatamcacacagacacttttataggggcaaaacactcatttatatcttaaggatcttgtgcgaatggactggacattcaaggtgagtggtgcctgagggtatgtattagaaacacaaacaacatacggaaatattctatgtatgtgcacgtgtgaggtatacatgcttcttctcctttataaaagagaaaaatccaagctgcttctgaaatctggagaaggggcagaatgtcgagtacatgcatctttaca

SEQ ID NO: 454212 - DNA, 185 bp, Homo sapiens
ggagctataacaggaacacccctagcatcttctgtggatggtaaaaagagagaaaaaataattgcaggacttgcaggtgasagtttcccatcataactccactccacaagtgagcctacactgccctggagggctttcactgccagtgcatttctagcaacattggaaacataaccaggaaaaca

SEQ ID NO: 454213 - DNA, 185 bp, Homo sapiens
ggagctataacaggaacacccctagcatcttctgtggatggtaaaaagagagaaaaaataattgcaggacttgcaggtgacagtttcccatcataactccactycacaagtgagcctacactgccctggagggctttcactgccagtgcatttctagcaacattggaaacataaccaggaaaaca

SEQ ID NO: 454214 - DNA, 185 bp, Homo sapiens
ggagctataacaggaacacccctagcatcttctgtggatggtaaaaagagagaaaaaataattgcaggacttgcaggtgacagtttcccatcataactccactccacaagtgagcctacactgccctggagggctttcactgccaktgcatttctagcaacattggaaacataaccaggaaaaca

SEQ ID NO: 454215 - DNA, 596 bp, Homo sapiens
attgcatacatttaaacaatgataatcaatgatttaaggatgtagtgaagatgcaaaggaggacattaggaaatgaggaatgaagcaaagggaagggcccatgacccagagagaaactgaggcaactgtgacaacatagctcctcacagtgaggacaatggaagcagagatgtgggagctcccaggttcctggagagaagcaaatctatagcacagtcacttttctgctgtagagccgcatcttacatcagataggctaacaaaaaacttacttaggacctaagacaagggtaggaggcagtttgaaatgattcccaatggtcctagtatctggcattcgtgcgcttgtgtaatcatctyccctgagtataaactggacccagggactcacttctaatgaagaaaaggcagtgcacatgaaggactgtcactcctggggttagattataaaaagattgtggcttgtatcttggtgatactctcctgctctctgccagttaaacactttggcaaagccacagcttataaactgctcgatggagaggcccatgtggcagggaactgaaagaggcctccagcccacaacaaagaaggaa

SEQ ID NO: 454216 - DNA, 487 bp, Homo sapiens
ccaccctaattttagcccctaagacccattttggacttctgaccttggaatttcaagacaacaaatttgtgttgttttaagctacttaaatgtgcggtaatttgttacagcagagataggaaactagtacatatgaatatattctgtcctattattttcattaaatcagctcactttttatatacatctattgtaaagaggctttgatactatgagtttggagtgctgattgtatccatccctccaccatatattstgaaagcaaacagccaatgaaatttaaagatttaaaaatgtgcccctaacatcatgttgtgtataagaagtgtgaggatcttactttaggatgcagcacagaaggagaaatgccacatccagcctctcagaactcagtcctttgggcaggataaggctttgtgtgctcaagttcattttgggctttgagtacaacagatttggaagcggtcactaacaactacaaatcctc

SEQ ID NO: 454217 - DNA, 521 bp, Homo sapiens
ttgtttgctgtctgtggactcacttgaagagggaattggtgctctactcaaaaccatggtccacagatgagtgaaataarcccatcagggctggtagcttcatcatggaccagtggttctcaacttggggtgattggttccccaggggacacttggaaatgcctggagatttccaagagtcaagactcaaaaatgatacagacatttagtaggcagactccagggatgctgctatctatcctacgatgtcatccccccaactcacacattcacacatacataaatacacaacaaatacttattcagccccaaatagcattcgtgctgaggttgagaaacccgatacaagccaatacatatgctaagtctactaaattactaaaaactcagggacagatgagataagacaaccaggtcctctggtattattgtagactatcctttaaaagcataaagggttaaatacaaacagcccaggcaattacgtcaggaccaggaaggtagagagaagaaaacccgtg

SEQ ID NO: 454218 - DNA, 521 bp, Homo sapiens
ttgtttgctgtctgtggactcacttgaagagggaattggtgctctactcaaaaccatggtccacagatgagtgaaataaacccatcagggctggtagcttcatcatggaccagtggttctcaacttggggtgattggttccccaggggacacttggaaatgcctggagatttccaagagtcaagactcaaaaatgatmcagacatttagtaggcagactccagggatgctgctatctatcctacgatgtcatccccccaactcacacattcacacatacataaatacacaacaaatacttattcagccccaaatagcattcgtgctgaggttgagaaacccgatacaagccaatacatatgctaagtctactaaattactaaaaactcagggacagatgagataagacaaccaggtcctctggtattattgtagactatcctttaaaagcataaagggttaaatacaaacagcccaggcaattacgtcaggaccaggaaggtagagagaagaaaacccgtg

SEQ ID NO: 454219 - DNA, 521 bp, Homo sapiens
ttgtttgctgtctgtggactcacttgaagagggaattggtgctctactcaaaaccatggtccacagatgagtgaaataaacccatcagggctggtagcttcatcatggaccagtggttctcaacttggggtgattggttccccaggggacacttggaaatgcctggagatttccaagagtcaagactcaaaaatgatacagacatttagtaggcagactccagggatgctgctatctatcctacgatgtcatccccccaactcacacattcacacatacayaaatacacaacaaatacttattcagccccaaatagcattcgtgctgaggttgagaaacccgatacaagccaatacatatgctaagtctactaaattactaaaaactcagggacagatgagataagacaaccaggtcctctggtattattgtagactatcctttaaaagcataaagggttaaatacaaacagcccaggcaattacgtcaggaccaggaaggtagagagaagaaaacccgtg

SEQ ID NO: 454220 - DNA, 479 bp, Homo sapiens
tgctgtgtaaaatagaatacaagctagtttaacacctaacattaaattgttggtctttttttcttcattttatcactgtcaatgttctcataattatttcatacaaagggagtcacagatctgataattyacagatgggtcacataggaggttaaacaatgaaaatcgtatctatatatatacactcacacacatatatattatttatctgactcactagtgttttataattttgtgacttggttgccaacactaacaaatatgaagattttatataaaaatacaaattcttttgaagagtaagaagactggcaacactagacttgaatcctgtaacacggctaaagaggagacacacaccctctctagtttcttacggacacaatggttttgctccttagcaatgcatacttaatgcaattaatgacttttatacttgcttgttacctatacctagcctaagcccttgcaacacacag

SEQ ID NO: 454221 - DNA, 625 bp, Homo sapiens
caacactaacaaatatgaagattttatataaaaatacaaattcttttgaagagtaagaagactggcaacactagacttgaatcctgtaacacggctaaagaggagacacacaccctctctagtttcttacggacacaatggttttgctccttagcaatgcatacttaatgcaattaatgacttttatacttgcttgttacctatacctagcctaagcccttgcaacacacagtgtggtccatgaatgagctgtgtcaacattgcctgggagattattagacctgcagaatcccagactccatctcagacaagatacccaggcatttcatgtgcccttgaaagttcaagaagtactgacagagattcaggttcacacaggatggaaggcatatactcagttttttggggggttgtcttggcttctactgccttttagtctcacttccaccttcctcctctacatactttgctctttgaatttaatgctactattgatatattctagtcctctccagtctccacttktcctctacagacattcacaggatactgatacctaagggagcaaaaacatcctcattctacattaatagtgctattaaaactaagcaagttttcattagaa

SEQ ID NO: 454222 - DNA, 561 bp, Homo sapiens
tggtgatttcttatggcagccacaggaaattaatatagttctcaaagctggttgcctatcagaatcacctgggtggtatatgagtggtgaaaattgcagaaggcagagagtggagctagggagaattctttacagctgagaaagaaaaatagccagcagcattgacatcatcaggagcttcttagaaatgagttagacagagagaatctgaggccccagacctactgaatcagaaactgcattttaacaggatctctaagtgattcatagatacattaatgtttgagaagcccttcaatttcaattagcaaatttggcagagtgtcttcttgatcctgtgtttgtgttgatcagaagtacaaagtgttccttctcctctgtcttgtctaagtctatgagataatgttcgtaaaaacacaaattccagaagaattcagracaaaaagacacgcaaattctaacttagggggcgagagcccttccaactccttaataggacactgtgagaacaaagctagataatgcaccaaaccagatgtttgaaacttgtgaacaaaggca

SEQ ID NO: 454223 - DNA, 596 bp, Homo sapiens
aatattacccttcaacatacgtgtgtcggaatctctcagtcttcataacacctaactggtttttcatagtcttaaacctctttgtcatatatgatggtgaattctcagtaatatcggcaatactaattctctttttgacaatgtccattctagaatttggccattcaccgcatgcctcatttgaagggttatgcttctaatgtcaacatttccgcatttcctgtttcattgcatcttattttatactctcttattcttcctcatggacacagtttccgcagataagtctttgagtttcttaaacatacctaagacaaaaagctycatctgcgcaaggcatcctgaacagtgcctgacacgtgtccacattcaaagaatagttgttgtcttaggttaagtttttccagatgggttggtctaatggttctaattgcttattttgcagcctccttggcattaatttcctgtgctttattcacaaaccattctaacatagcacatctgcacttactgcacatacatacgaaaactttgagtggaatgaattacttatttttcactttcccttggtgatcacacacatgtacacacacata

SEQ ID NO: 454224 - DNA, 556 bp, Homo sapiens
tggccattcaccgcatgcctcatttgaagggttatgcttctaatgtcaacatttccgcatttcctgtttcattgcatcttattttatactctcttattcttcctcatggacacagtttccgcagataagtctttgagtttcttaaacatacctaagacaaaaagcttcatctgcgcaaggcatcctgaacagtgcctgacacgtgtccacattcaaagaatagttgttgtcttaggttaagtttttccagatgggttggtctaatggttctaattgcttattttgcagcctccttggcattaatttcctgtgctttattcacaaaccattctaacatagcrcatctgcacttactgcacatacatacgaaaactttgagtggaatgaattacttatttttcactttcccttggtgatcacacacatgtacacacacatacacacactacttttgtttatgcctccaccaaccctctgagtctcctatctggcattggccttttaatggcaatttgagattccaattttgtagagacaaagaggacaccccatatcc

SEQ ID NO: 454225 - DNA, 558 bp, Homo sapiens
gcaatgatgcatgatcttatagacaagaactygatatattggggcatgaacagggatatagttagttctgattaacacgtcagcaagacgccattcatgtagttcctgggctgcaaatgacagaccatttactggggttgtacacaaattgttcaagtgaagaatcagtcaactaaggcatttttaaacagactgtttactggggttatatcaaaattgttcaaatgaagaatcagtcaactaaggcattttaacacacttcgtgtaagcagtattttctagcaagcattactacagaacattgcatggagaaggctttgtgccatgagcagaataagataatatacctggttgtgaaaatataacctcaaatatgtcattgttctttttttgcagaaagagggattacaatttaaaaagtattttatgtgaaaaaaaatacatagatgagctaagaaggacatatgtcatgacactgttcaagtttcaagatgggaatctgaggtctgagcacaatttttccctctcactaaacccttagaagtgaggaaaaataga

SEQ ID NO: 454226 - DNA, 581 bp, Homo sapiens
acacacaattaacgcaaccacattaaaagactgagttgacatatttttaattataataatttatagaaaattcttgtgaaacttttttgactttcacttcttggatggcccctgattttgcctgtcaataaatagagaagagcaaggcagtatgctgtagcgcacaaaaaggtttaggtagataagtgtcccaaagagtccactgatacaatgcaagtccctggttaatgtgtgacagaagaatgtaatgctgggaagacatactcaatagtctagaactcctccaatgttaatktagttcagcaaatatttttgagagcctataaattcaatttcacaatcttaagatccttttctattgaactgatgttgtgaatttgtcataacactgttgttagaagaaattctaaatttcttatcaatgagattgactttgatatgaccatcatctactcatccactaatgatgtagtggttgatgtcataagaaaaacagtattgagggctgggcacggtggcttcagaggtaatgacaacctgaccaagctctaagacaaaataaccgtttctgaggggatgcc

SEQ ID NO: 454227 - DNA, 536 bp, Homo sapiens
ggcaaatgctacaagtaaggactttttttaaamaaatttcccagtgagttggcccactagtacaccactggccccatgaaagcagagatcttctttcctttttccctcttgcactgttagcaccaggttgcagttagtaagttgttggatgagcgcatgcatgactattattactttagacaactccttttttgtctcaaaaacaaaattcaaaggaaaattactcatttgctcaacaagaatgaggtgcttatgcttgaacaattaactatttaaaaaggtaccagaatcatgttataactcaatgctgggctacacttagctagctgtggtgatggaggcagcggtaccatttctagaaaaaggactgggtaaagaaaaggaaaaaaaaaaaaatgattgctgcacttatttcttccactgaatgaggctcttcttgaggctgagatgattttgtattctactttgtggtccacctactcaccagcacgctctaagaatattatttatttaggttagaatgcaattatatatta

SEQ ID NO: 454228 - DNA, 616 bp, Homo sapiens
atatacacaatggaatactacacagccataaraaaagaatgagatcatgtcctttgcaaccacatggatgaagctagaggctattatcctaagtgaagtaacgcgagaacggaaaaccaaatactgcatgttctcgcttataagtgggagctaaacattgactacacatggacacaaagaagggaacaatagacaccagggcctggttgtgtggggagtggaagaagcagctgagtattgaaaaactacctatgcggtactatgcttattacctgggtgatgaaatcatctgtacaccaaaccccctatttacctatataacaaacctgcacaagaacccctgaccctaaaatacaaattggaaagaaaaaataaaagaaacctttcctctaaagcttccgtggtttatttaaggaaactagtgaatgtagggacactcatctgttgcctaaaccattaggaggatccctcaggccaaattcaacacacatgccctccacactccaatttgtgctaacaaatcacatattgcacagccttatgaaaaaatgagcattttttataaataactttattttgaatttttcccttgtccaaatatgtagtaataacaagg

SEQ ID NO: 454229 - DNA, 616 bp, Homo sapiens
atatacacaatggaatactacacagccataagaaaagaatgagatcatgtcctttgcaaccacatggatgaagctagaggctattatcctaagtgaaktaacgcgagaacggaaaaccaaatactgcatgttctcgcttataagtgggagctaaacattgactacacatggacacaaagaagggaacaatagacaccagggcctggttgtgtggggagtggaagaagcagctgagtattgaaaaactacctatgcggtactatgcttattacctgggtgatgaaatcatctgtacaccaaaccccctatttacctatataacaaacctgcacaagaacccctgaccctaaaatacaaattggaaagaaaaaataaaagaaacctttcctctaaagcttccgtggtttatttaaggaaactagtgaatgtagggacactcatctgttgcctaaaccattaggaggatccctcaggccaaattcaacacacatgccctccacactccaatttgtgctaacaaatcacatattgcacagccttatgaaaaaatgagcattttttataaataactttattttgaatttttcccttgtccaaatatgtagtaataacaagg

SEQ ID NO: 454230 - DNA, 616 bp, Homo sapiens
atatacacaatggaatactacacagccataagaaaagaatgagatcatgtcctttgcaaccacatggatgaagctagaggctattatcctaagtgaagtaacgcgagaacggaaaaccaaatactgcatgttctcgcttataagtgggagctaaacattgactacacatggacacaaagaagggaacaatagacaccagggcctggttgtgtggggagtggaagaagcagctgagtattgaaaaactacctatgcggtactatgcttattacctgggtgatgaaatcatctgtacaccaaaccccctatttacctatataacaaacctgcacaagaacccctgaccctaaaatacaaattggaaagraaaaataaaagaaacctttcctctaaagcttccgtggtttatttaaggaaactagtgaatgtagggacactcatctgttgcctaaaccattaggaggatccctcaggccaaattcaacacacatgccctccacactccaatttgtgctaacaaatcacatattgcacagccttatgaaaaaatgagcattttttataaataactttattttgaatttttcccttgtccaaatatgtagtaataacaagg

SEQ ID NO: 454231 - DNA, 614 bp, Homo sapiens
acagataggcttaagtaattttcccaaaatctcatagctggaaaattaccacgaggggataagaactctgcctcttcaactccacatccggagccatgccatacagggaaataaatagtcccatttaatttgatctaatcagtgatctgttgaaagagaaagataaacgtccacttttttaagctgacatgatcttgaaactgcacttgaagtttggataggatccaagtgtggaaagcccaccccctcctgcatcagtcatttcatttttatcaaattgaaatgcagccattctttgccctaattatcccccctttgtcaattctgctccttcacaatggatcttcattcattaatgtatacaacactttttttattccattcaggcaaacaaatataagagtgctcatcaaatctcaatgctcttctgggaagtggagctaaagtgctaaaggtasggccaggcatggtggctcatgcctgtaatcccagcactttggaaggcccaggcaggcagattgcctgagatcaggagtttgagaccagactggccagcatggcaaaaccccctctctactaaaaatatgaaattagcccggcatggtagcacgccc

SEQ ID NO: 454232 - DNA, 567 bp, Homo sapiens
aactctgccagtgcccatacctgactactgctctgaaccagttcatcccaataggagtgggtggggagggcggaaagagggaggagggtattgggaggtggtgaataaaggaccatgcttggggtgtttagattgctaagtcttgtttcctttgtgctgacctgctagggagactcccttggcctccttagactgcgatttctttttttttaaatgaatgggagaacagttcaccctgggactcttgagtctatctgggaytgctagaattcagcaaaggtgcaaagcaggggatttttaagatttttggctcatgcctgtaatcccagcactttgggaggcccaggctggaggatctcttgaggctgggagttcaagatcagcctagacaacataggaagaccccatctctacaaaataaaaaacaatcagctgggtgttgtggagcatgccagtagtctcagctacttgggaggctgaggtgggaggatcacttgagcccaggagttggaggctgcactgaactatgattgtgccattgcactccagcctgggcaacagagcgag

SEQ ID NO: 454233 - DNA, 602 bp, Homo sapiens
acaacaaaacaaccaaatcaagcattaagtaaaacaacaacaacaaacagttccactcagaacaaagaaaacacaattgatgtgccaaatgcccttaagcgtttcttcctcctttaaatctggtaataaacaacagaccatggaattagtgatgattttggctctgacaagtattttacaatctacacttacctaaaactatattcaagcccagaggtattttgtattactgtatgcataagaaaaatagaattaatgtccccctttaacccacgtgatagcctgattgcataacatgtataacgtcaaggagctaagacaaaaaatacaagttttgaagtttgctaatctaataatgcgtcaggatcaaaaggaataagctttatttttggggataggtaaacacactgcatttcatctattccaagatgcacgctttttccacatctaacatctatgaaatcaagacgtgtcttaaaattgacacagtaaggaagaattgtgttatgttttaagggatagagagctttttctttcttkatgacacattaaaaaaatggtgtcttagaagcagtggcatttcagacttgttgcaatatggt

SEQ ID NO: 454234 - DNA, 514 bp, Homo sapiens
tcacgtggccctctcgtagctgacaccaggaggaaagaaaacagggtcagcagacggccttaatcactgttctccagctcacagttcccctttctggaccatcaaacccatcccgctgcccagctgaggccatagagaggaaagcgtatttatttccctcaggcccaacaggtggcagcattgaccttcccaacggatccagcggcctctatatgtccccacccctgcccaggacctgcccagccacttctgtccagccgcctagaggctaccaggkccctatggccaggccagggccagccgcccttccatgcatcacctgtagggtgatggtgctgcgccccctggtgatggcctgcagcaggacaccgtcggcctggcgcgtgcggaacatgaggctgaggtaccagggttgggagatgggcagcgagaggccatgccaggccaccaggctgctgcccaggaagtgctgtggattggccatttctggggaggcaggaaaaggcagactgtg

SEQ ID NO: 454235 - DNA, 599 bp, Homo sapiens
gatctcccaaacatgggtttcatctctattttctagacccttaagtatataattctttaaattatgcaagcactgtatgaaagggaccaaacttttatgcagtagtcatcattttaagaattacctgagtgtatgcaaatggctataaagccaacctaatgttctcatcaaatccttagctctactgaaggaggtggactatcagagaccaagactatactatcttacagggccgcatcagaatgaagaattcaaagagaaagccaagatagccttacttagaatagaatggattgttcctttacctagaactttgctaggggctagaaattgctttggtaattggtactatgacctttcattcatagcaatcgtacccagtagagaaatggataatagtagttatttaaaacattcttgttcatgtccctgcccatggcatcttggcagaaaattagaaagataaatattgacatctgttctaggatacmacaagaaggatccacgtttcaacagatcaaggggacacatggagcatggcccagctcccctccgtgggacaggaacagttctattctattctggcagcaaatgatgac

SEQ ID NO: 454236 - DNA, 201 bp, Homo sapiens
caagacccagtgctgtgctatctttgggtgtgactcagcacagtctcagtgtggtagtcacagtggagcttgcatcacccctcyacaagaggagtacaagcaagtgcagactgcaaatattacaataaatatctaactattcaatgcccagacactcacaaacatccaaaagcatcaggaccattcaggaaatcatgacct

SEQ ID NO: 454237 - DNA, 559 bp, Homo sapiens
attaacaacctaatgatgcatcttaaagaactagaaaacaaagagcaaaccaaagccaatattagtaggagaaaagaaataataaagatcaaagcagaaataaatgaaattgaaacaaaacaaacaatacaaaatatcaattaaacaaaaaggtggcttattttaaaaaaataaaattgataaacatttagccaaagacataaagatagaagacccaaataaataaaatgagagataaaaaggaggtattacaactgatactgcagttcagagaatcattagagactactatgagcaactacatgccagtaaattggaaaacctagaagaaatagattgaatcctagacacatacaacctaccaagaccgaatcatgaagatttccaaaatctaaatagaccaataacaagtaatgagttcaacaccatawtaaaaagtatcccagtaaagaaaaatcagagacccaaagccttcaactgctaaatttcacccaaaatttaaagaactaatattaatctaatcctattcaaacaattccaaaaaaataaagaagcaaat

SEQ ID NO: 454238 - DNA, 633 bp, Homo sapiens
tgtccaggtggagtcagtttgtgtctggaaaacatctcagaagaccaatcttaggttttacagtagcaatgttatctataggagcaagtgggcaagtcacaaatctgtgacctcaggcttcatgactcttgagcagtaaaggattacaggaaagcatgctatgaaacaacggctggctatcatctgaccacacccaccacccttttatcagaactcaggctccttgcataatcctaatcttgtggcctttcattagtcttacaaaggcagtttcagtccccagacaatgaggagatcagttttagggagggattatgaccattcttgtttcaaagataaactataagctaaactcctcccatggttaccttggcctatgtccaggaatgagaaaggacagccagcctgtgaggcygaaagcaagatagagtcagctatgctagacctctctctctcactgttataatctttgtaagggttatttcagtagccactccttatccacaagagatatgttttaagacccccagtagatgcttgaaaccgcagatagtactgaaccctatgtacactatacataaatttcttttttctttttcacaatttcataaataggagatttgttattgtcat

SEQ ID NO: 454239 - DNA, 633 bp, Homo sapiens
tgtccaggtggagtcagtttgtgtctggaaaacatctcagaagaccaatcttaggttttacagtagcaatgttatctataggagcaagtgggcaagtcacaaatctgtgacctcaggcttcatgactcttgagcagtaaaggattacaggaaagcatgctatgaaacaacggctggctatcatctgaccacacccaccacccttttatcagaactcaggctccttgcataatcctaatcttgtggcctttcattagtcttacaaaggcagtttcagtccccagacaatgaggagatcagttttagggagggattatgaccattcttgtttcaaagataaactataagctaaactcctcccatggttaccttggcctatgtccaggaatgagaaaggacagccagcctgtgaggccgaaagcaagatagagtcagctatgctagacctctctctctcactgttataatctttgtaagggttatttcagtagccactccttatccacaagagatatgttttaagacccccagtagatgcttgaaaccrcagatagtactgaaccctatgtacactatacataaatttcttttttctttttcacaatttcataaataggagatttgttattgtcat

SEQ ID NO: 454240 - DNA, 557 bp, Homo sapiens
ccttcaactgctaaatttcacccaaaatttaaagaactaatattaatctaatcctattcaaacaattccaaaaaaataaagaagcaaatacttccttactcattctgtgaggccagtattaccctgataccaaaatcagacagagacatcaaaataagaaaactacaggccaatgttccacatgaatactgatgcaaaaatcctcaacaaaatactcacaaaccaaattcaacaacacatttaaaagataattcatcatgaccaagagggatttatgccagggatgcaagaatgattcagcaaatgcaaataaatcaatgtgatatatcatttcaaaagaatgaaggacaaaaacatgcaatcatttcaaccgaaggtaaaaagcattagataaaattcaacctcctttcataataaaagccctaaaaatgtggtatagaagtatatatctcaacacaataaaaaccatatatgacagacacacagctagcatcayactgaatacagaaaaactgaaaactttttctctaagatctggaacaaaccgaaacatccac

SEQ ID NO: 454241 - DNA, 527 bp, Homo sapiens
tctaattctcaactgttgattaaggctctattttattgatatctggccaatacattccttttctgattaatgtaaccaaagtcagtttctgttgcttagaactcagaattctgacaactgtgaaacacaatgcttctgagggaattacagcatattactttttgctttattttatttaatcttctgtttctctcctcatgaagtgttatttattatcctcatttaacagataggaaaactggggattcaatatttgaagcactttattcaataccacacagcctgtaaastgtgaaaccagaattcaagccagctctgcctgattcttgaactgctactctttaagccttccagatattcaatgggtgattttaaacctttctttctgaccctaatattctatgaactgaagaataaatacagattgccaagtataaatcaggaatagcttaggtactgagaggtcaactctataagcccaaatattcatatattcttaagttttaattgacaaaagtacttctcct

SEQ ID NO: 454242 - DNA, 574 bp, Homo sapiens
attcagttggttaacactaagaagtctaatctccgtatctatctactatagcttagaatttttcatattataaaattttacatatcatagatattttgcctgccatgtttattaagcattatattttaatctgttttgtggttagtatgaaatttcaaatcatataccacactggttttagattttgtgacttaaagatctgtaatggtattacatttttagagtttttaaaaataatctgcaagacacttaagctgtttaggatttagtttctatatttgcgttaatatttaaacttaattcatcatacaacatttagtgtaattctgatgttattaaaattaaatgtcatcagagtttctgtttctttaatttcattgttctattcacaagagggaagtgttctaaggctctagatgaaaacacatactgaatgaaaacccctatgaaattaggcaggtatacttaattaaagttgccacttggctaatatgttttccatactcccacacactgtaatatcrtaaatattctttatgtccaaagtgtgcatctttgtgaagaaaattaatgg

SEQ ID NO: 454243 - DNA, 638 bp, Homo sapiens
tgtcatgttaaaaaaaatagaatgaatgtatcaatgccaatcaatgaacagaaaacagatataataggaaatataaataaatcagaagttggttacattgaaataaaaaatataaacctctgataacttaatcaaaaagataaagaaatctcaatgaaaaattttaaaaatgaaaatgtgggtatatcacaaacataacagggatttttaaaacatgaaagcaaaataaaatacataaaaacaataaatttcaatttagataaagaaaatttctaaaaataaaaccataccaaacttactcaagacacaaactgagagcctgtattaatcttgtgtatactgaagagaatgaattgggggttgaaaatcttcctaaaaagaaaatatcacactaagattgtttagttgatttacaaggagcagccattctattgtattgcaattctagaatatggaaaaagaggggctatttctcaactcwttctataaggtcagtattcccctagtatcaaaaccacacaaacacaatagagaacattattgggggtgagtctcactccctaaaagattttaagtttcgtttaaaatactaccaaactaaatttaacaagctaaaaaaatacaagcacatataacca

SEQ ID NO: 454244 - DNA, 529 bp, Homo sapiens
cctacagcctaaccatgaaatggaggtgatttgtctaaatccccacggcagaggcatccacactctccactttcgcggcgccgaaactcctcgggccatccccgccaaacactccgttacccgttccaggccaaggggccagccaggccttcggagcacgctcgtgcgcgccgaaactcacaagcccgacgaggaggcccgagctycgagccttgtgggtaggaagcggtgtccccacgctcgggacagaggccgagaaaccgatatcggaggcaggaagagaaacaaacactggccgggggccccaccgctggcttcgccagctgcgaccgaaatcggtcccagggaactggcgagccgttagcacgccccgcggggagttccctcttcacgccttcagtaccggggactgcactcggcaaactcgggcctgccctcactgttaggccatgtcgaggccgcggctcagcccaggcacccactgccctcctgggtcggccccggcaccctcaccttccttgtcggccat

SEQ ID NO: 454245 - DNA, 529 bp, Homo sapiens
cctacagcctaaccatgaaatggaggtgatttgtctaaatccccacggcagaggcatccacactctccactttcgcggcgccgaaactcctcgggccatccccgccaaacactccgttacccgttccaggccaaggggccagccaggccttcggagcacgctcgtgcgcgccgaaactcacaagcccgacgaggaggcccgagctccgagccttgtgggtaggaagcggtgtccccacgctcgggacagaggccgagaaaccgatatcggaggcaggaagagaaacaaacactggccgggggccccaccgctggcttcgccagctgcgaccgaaatcggtcccagggaactggcgagccgttagcmcgccccgcggggagttccctcttcacgccttcagtaccggggactgcactcggcaaactcgggcctgccctcactgttaggccatgtcgaggccgcggctcagcccaggcacccactgccctcctgggtcggccccggcaccctcaccttccttgtcggccat

SEQ ID NO: 454246 - DNA, 542 bp, Homo sapiens
gaaaagcaatttattccattttaagcacttacacagttagtcatggagagtaacaggcctgctggtgaaacaggtcacccaaaatggagatggcatcaaactagtggtcaaggactaactcctaaaaaaaaaaagcaactcttatcaaggattaatttaatttttaaaacaaatacaagttattgattcactcttctcaacttgacagtctacctgtggtataactgtcaggtaaaaacatacatctttacaacttggtggtcccaagttaaaaaaaaaaaaaaaaaaaccaacaacaaaaaaaaaaacaccatttcacagacaggaaataaacaacatgaaaacagctcaagaaatacactaacgagcaaaaatatatgaatatatggggaaagaggaacgtgttgttttgacttaactgaagaaaccaagaggaaactggtctacgtatgaaaatgtgcatcctggaaagtcaggtgtcaagattttcgagtaggaatctataygacttgaatctccccctatttcctgaataaaagtga

SEQ ID NO: 454247 - DNA, 547 bp, Homo sapiens
aatatgaaccttgaaagggcacaaacatttctttaacccaaatatatgctagattttgataggatggttgtgcttgggaaaaaaattgtatctagttgaccatcttccagaccctgcacaaatgctgctatgaatgataatcatggttgttgccaaggtcacctaaaaaatgatttatagtcccctttccccaaaaatgtatcagctgcttacttagaaaattaggtttctattcagttayggcaccaaatcacttctgcatgattcttctatttttcctgtacaccagaacttggaaaatgtatgtttctgcaaatgtttatccccttctaaataggaacgattgaaaataataaaagtattttataatcttaaaataatttatgcatactggcctcaatgtttttattatcattttttttgagattaaaaaaaacagaaaagttttttttctgttgcccaggctggagtgcagtatgtgattatacctcaccgcaacctcaaactcctgggtgcaagtgatcctacttcctcagcctccacagta

SEQ ID NO: 454248 - DNA, 547 bp, Homo sapiens
aatatgaaccttgaaagggcacaaacatttctttaacccaaatatatgctagattttgataggatggttgtgcttgggaaaaaaattgtatctagttgaccatcttccagaccctgcacaaatgctgctatgaatgataatcatggttgttgccaaggtcacctaaaaaatgatttatagtcccctttccccaaaaatgtatcagctgcttacttagaaaattaggtttctattcagttacrgcaccaaatcacttctgcatgattcttctatttttcctgtacaccagaacttggaaaatgtatgtttctgcaaatgtttatccccttctaaataggaacgattgaaaataataaaagtattttataatcttaaaataatttatgcatactggcctcaatgtttttattatcattttttttgagattaaaaaaaacagaaaagttttttttctgttgcccaggctggagtgcagtatgtgattatacctcaccgcaacctcaaactcctgggtgcaagtgatcctacttcctcagcctccacagta

SEQ ID NO: 454249 - DNA, 607 bp, Homo sapiens
ctaacgaacaatgaaaacatcatttggatataacattttgggggtgaattataaatatttttctaaagtatttatattactcaaagttctattctctacccttttctctctttatatcttagaccatttatgttgctataatagaatatctgtgactgggtaatttactaagaactgaaatttattttctcacagttctggaacctgaggagtccaagatataaagtgctggtgtctagtgaggaccttcttactgtgtcctcacatggcagaaggtggaaaggcaartagggaccaacttctcctatcaagccccattataagaagacctaatcccattcacaaaaaaagaagttctcatgtgccaatcacctacctcttaaatactattaagattgacctctcaatactataatattggtaaaatctaaattttggggggagtacattcaaaccatagcatcctgtatctctgactggtattattatgcataatggactcaactacaagtgactttatgctgaagatttcaaacaatatatctcttggaaacattttcttagctccaaagaacaagataaaagcacaagaaatgtatttaacatt

SEQ ID NO: 454250 - DNA, 607 bp, Homo sapiens
ctaacgaacaatgaaaacatcatttggatataacattttgggggtgaattataaatatttttctaaagtatttatattactcaaagttctattctctacccttttctctctttatatcttagaccatttatgttgctataatagaatatctgtgactgggtaatttactaagaactgaaatttattttctcacagttctggaacctgaggagtccaagatataaagtgctggtgtctagtgaggaccttcttactgtgtcctcacatggcagaaggtggaaaggcaaatagggaccaacttctcctatcaagccccattataagaagacctaatcccattcacaaaaaaagaagttctcatgtgccaatcacctacctcttaaatactattaagattgacctctcaatactataatattggtaaaatctaaattttggggggagtacattcaaaccatagcatcctgtatctctgactggtattattatgcataatggactcaaytacaagtgactttatgctgaagatttcaaacaatatatctcttggaaacattttcttagctccaaagaacaagataaaagcacaagaaatgtatttaacatt

SEQ ID NO: 454251 - DNA, 607 bp, Homo sapiens
ctaacgaacaatgaaaacatcatttggatataacattttgggggtgaattataaatatttttctaaagtatttatattactcaaagttctattctctacccttttctctctttatatcttagaccatttatgttgctataatagaatatctgtgactgggtaatttactaagaactgaaatttattttctcacagttctggaacctgaggagtccaagatataaagtgctggtgtctagtgaggaccttcttactgtgtcctcacatggcagaaggtggaaaggcaaatagggaccaacttctcctatcaagccccattataagaagacctaatcccattcacaaaaaaagaagttctcatgtgccaatcacctacctcttaaatactattaagattgacctctcaatactataatattggtaaaatctaaattttggggggagtacattcaaaccatagcatcctgtatctctgactggtattattatgcataatggactcaactacaagtgactttatgctgaagatttcaaayaatatatctcttggaaacattttcttagctccaaagaacaagataaaagcacaagaaatgtatttaacatt

SEQ ID NO: 454252 - DNA, 616 bp, Homo sapiens
acattcaaaatgatgaaccaaatcaaacccttccaacaaattatctattaatgtggcactcattcatcctggtatgaggccttttagtagagccaaggggcaggtgagtctactgtcctagagtttctaccagagacacattccagaagtcagtgcctaatacrtgatctgaactcagacaacttgtgctgctgagttgatcaaagtagtcaaatttctcatcacttgctccaacacatcccttacttggttgctctgggcagtgtttggtagttccatatactcacatagctgcttggatttctcaaggccatttgcagaagcacttaaacaacttctagatcgcatttgctgcctccagggatactgatggaccacatgtattaacaattttgagccccaataaataatttcttataaaactaatatttttatgatgtttaaattgtatcacaactcttactcaactaaccattatcatgaaaattaattccagcctccaaatattttctaagatttttgatattcaatattcctctattaaattaatcatgctagaagaaaaggcccatgagtgattggtatttgtggcattctactaaaatttgttacacca

SEQ ID NO: 454253 - DNA, 575 bp, Homo sapiens
tgacctgctgagtacaatatttagatgtttatggctaacttcacaaaaaaacttagttatgtgtttgtctcctcagcagaagtactatttggaaaattgcacttaaacatcagcaatatattattgaacactattaatcaggtaaatttcagttatcckgaattttagtaataaaaatcttccattaattagaaatctgccatacctcttaagagaaacaaaaataaagcaagacaataacctcatagtcgtacagttttagcttaaaactgaaattcaacaagattatgttgatagtgaacaaaggcatacaaatcataagccctctgtaattgtcctggtattattattcgggagtggcttttttacatttgagcttacagattcctcatccataatgtgtggatattcatacagagagaaattatttcccaacatttttaaatgtgtaaaaaatattaaacatatgttcatagagccttattattaaaaaaacaattacatttgtttctaaaatgttctaattaaatgaaaaatacagaattgtgaattccatagtaaaattttaactgatt

SEQ ID NO: 454254 - DNA, 608 bp, Homo sapiens
  misc_feature (1)...(608): n = A,T,C or G
cactttggttacttctggtttgatcatttttcttttacttttaaaattatcctttcacaataaccttaactgacatctgaacatttttgcttagcccctattcttttgcttgatcaagctcaggggatctttagttttattcacctctaccacaaattataagtcctaatttatagcatgttgcataggaactggtagcatttcacctggacgagaaaggataacttaactaggttggatctcactataagctacttntgttttgtctcccaacttctcttaagccaatgccgaaatactcaacagttctgaagaatgtctctagatatactgctggaattattattatgcatgacatggtgaaaactattagggcataaaacaatactttatatacttccctttttttaagttagcctgttcctcttttttttttttttttttttctggaatccagcygaagaggtagacagagaattgggttaggacttatataagactaaagctcccttagagcagtgaaacacatgattgaaatgtgacaaagttttagaaacactcgcactttaagaggtgtctaaccactagagtacaacagttataacatg

SEQ ID NO: 454255 - DNA, 598 bp, Homo sapiens
cattcagttcatattcctgtttctattctattttttctaattctctcttgacattgggccatgttatcttttggcctcacctctaacacaatacttctttataaaacacatcagtggagtccatttttaaccatacaaacttcatattaaactaataatttctcagtcctcagcttacagcctgggtgccagcatttggtatgattcactactcctttttcctctaaattctttctttayttaattcttattctccacttacctcacttattcttcctgcctgctatttttgtttctcctcagctctcctaaattcagtttctctttctacattcactcccttaatttacctcctccaggttcatgtcattaaatatgattgctttgtgaattgatcttaaattcacagtttaagaccatttcacccttgaaattcagatttttatattcaccttgttagtaaaacattccacctgtgtgtttaacttaacagtaagatgtctaaacagaaacttctgacttctgacccacattggcttccttaaaggttttgttcaaaagctgttattccaattgtttagacttaaaaaaaatttga

SEQ ID NO: 454256 - DNA, 598 bp, Homo sapiens
cattcagttcatattcctgtttctattctattttttctaattctctcttgacattgggccatgttatcttttggcctcacctctaacacaatacttctttataaaacacatcagtggagtccatttttaaccatacaaacttcatattaaactaataatttctcagtcctcagcttacagcctgggtgccagcatttggtatgattcactactcctttttcctctaaattctttctttatttaattcttattctccacttacctcacttattcttcctgcctgctatttttgtttctcctcagctctcctaaattcagtttctctttctacattcactcccttaatttacctcctccaggttcatgtcattaaatatgattgctttgtgaattgrtcttaaattcacagtttaagaccatttcacccttgaaattcagatttttatattcaccttgttagtaaaacattccacctgtgtgtttaacttaacagtaagatgtctaaacagaaacttctgacttctgacccacattggcttccttaaaggttttgttcaaaagctgttattccaattgtttagacttaaaaaaaatttga

SEQ ID NO: 454257 - DNA, 554 bp, Homo sapiens
aaggccattcgacttcaaaccccagtggaacatgactcagcacaaaatgtaatataggccacaaaaaataattgagttgactgtgacatacgcttttctttttgcaaggaaccacattagactgcctgctcatactacttttctattttattttcacagttttggttttagtaccaatctgcatataatcatcacacaattgtgatgcttaatttttttcttccaacataactctccaccctatcctgcatctttcctcactttgcatataattatgtttcttcctgactaatttacagatatgttgaattctaattctattcaggagtaactatgcatggcatgatatattatttttcaagtctgctcaccctgtaaacttattatacaaaaagagtaaaatgatgactaccttttagaaatatttcatattgccatggatgaatttwccaagactatgaacattatccactcctcttattcattcttaataagattatactctcttattagctaagcaaaattcatttcctatagctaatatacatcagttg

SEQ ID NO: 454258 - DNA, 566 bp, Homo sapiens
atcatttcctatagctgatattcattggttgaccactcgctgcatcatttccttgaactattaactattatcagaatgaatttacaaataatcatatagttgaataatacgtattagactttccttttctgtttgtaaataacagagataagatattgtgttgggaaagagctagaataaatgtgaaaataactggttaaactacttgcttttataaaactgcttgaccataagtgactgagtagatttagctggtaaattgagaattatattcacattacatatgggttatccatgagttagattgttccaatgtagttaaatggaaagaggtagatactctggcagagttctcagatatttaaattttattttctgtcagatggaatcaatgctgacaaattcaaaggaattctgttagagcggggtaagatatcatctataaaatgcatagcataytgtgtggcacatggtagaatatacacatattaactttctcattataattgtagaatattaaagagttttgttattgttactcttgtgctttttgtgttcatttttat

SEQ ID NO: 454259 - DNA, 557 bp, Homo sapiens
aaataatgacttggcaagctttgcacttctattaattcatggagccattattgacatttgaaattatcatttttcaatgtgatttaaatgtattaaagttgtcttttttaaaaatcacgtagwttatttcactgataaacttatcctttttcattgaagtcattttttaataacagttgtttttaaaaattttttttaaatatgtatacttttaaaatttatgtggaagctgctctattttcttcaggacaacactcctgtaccattctaatgtagttttaaatatatccaaagaaatttaggaaatctataaaaataagatatttctaaactttagattcttattccacaaaaagtcttctgtttttaataaaaactatttccttacagttaatataccaagctgacaaagctatgttcttttgccaagtttttgttaagattgctgtatacatcactaaaggaacatttgagtatccatttataaatgcacctactttttggcttagaatcttagtttgtgcgttttgaaaatagaagtactttataaagtcctt

SEQ ID NO: 454260 - DNA, 557 bp, Homo sapiens
aaataatgacttggcaagctttgcacttctattaattcatggagccattattgacatttgaaattatcatttttcaatgtgatttaaatgtattaaagttgtcttttttaaaaatcacgtagtttatttcactgataaacttatcctttttcattgaagtcattttttaataacagttgtttttaaaaattttttttaaatatgtatacttttaaaatttatrtggaagctgctctattttcttcaggacaacactcctgtaccattctaatgtagttttaaatatatccaaagaaatttaggaaatctataaaaataagatatttctaaactttagattcttattccacaaaaagtcttctgtttttaataaaaactatttccttacagttaatataccaagctgacaaagctatgttcttttgccaagtttttgttaagattgctgtatacatcactaaaggaacatttgagtatccatttataaatgcacctactttttggcttagaatcttagtttgtgcgttttgaaaatagaagtactttataaagtcctt

SEQ ID NO: 454261 - DNA, 557 bp, Homo sapiens
aaataatgacttggcaagctttgcacttctattaattcatggagccattattgacatttgaaattatcatttttcaatgtgatttaaatgtattaaagttgtcttttttaaaaatcacgtagtttatttcactgataaacttatcctttttcattgaagtcattttttaataacagttgtttttaaaaattttttttaaatatgtatacttttaaaatttatgtggaagctgctctattttcytcaggacaacactcctgtaccattctaatgtagttttaaatatatccaaagaaatttaggaaatctataaaaataagatatttctaaactttagattcttattccacaaaaagtcttctgtttttaataaaaactatttccttacagttaatataccaagctgacaaagctatgttcttttgccaagtttttgttaagattgctgtatacatcactaaaggaacatttgagtatccatttataaatgcacctactttttggcttagaatcttagtttgtgcgttttgaaaatagaagtactttataaagtcctt

SEQ ID NO: 454262 - DNA, 358 bp, Homo sapiens
tttaacacttctagtggtatttggagagttgtgattgcgggatttttaaaaattgataagtaatatttgtacatatttgtggtgtacatgtagcaygttttacatgcatagaatatgaaataatcaagtaaaggtattttgtatatccatcaccttgagtatttataatttctatgtgttggaaacattttgcactttctatctatttgaaatatacaatattgttaatattattattgacatatacaatattgttaactatagtcactgcagtctgctatgaaacattcaaacttattccttctatctaactgtatgcttgtacccgttaacctacctctcttcatcccattcccac

SEQ ID NO: 454263 - DNA, 368 bp, Homo sapiens
ctgactatttagaagtcctggagcagcaaacatagatggagagtttgagggctttcgcagaaatgctgtgattctgttttaagtccataccttgtaaataagtgccttacgtgagtgtgtcatcaatcagaacctaagcacagcagtaaactatggggaaaaaaaaagaagaagaaaaagaaactcagggatcactgggagaagccatggcattatcttcaggcaatttagtctgtcccaaataaaataaatccttgcatgtaaatcattcaaggrttatagtaatatttcatatactgaaaagtgtctcataggagtcctcttgcacatctaaaaaggctgaacatttaagtatcccgaattttctt

SEQ ID NO: 454264 - DNA, 595 bp, Homo sapiens
tagtcaaggtaatctgggaatgttttctgaacaccacacagagtcatgtactgggctatgaaggaacacattttccataaggaagtactcccttcaatttactccacaatatttcagtgattcttaaatggtctattaaatattttggcttttaatatccaactttgcactaatggcagaatatacattatttattttatttttaataagaagccttcttgttgataaaaacaatatgggctgtgctgcatagtatgaagactataagtaatgtaaaatcatatcatgagcttttttctttaagttattgtagatattaatgaaaatcaatcaagagttatgtattaaaaggtttattgaaaaccaacatttcttcattagcttccaaagtttggaagcataaaggtggaaattctttaaataataatttctaagggaaaatgtgtgtgcatatgaaatgctggatgtttatctactaaaaaatattcagcatggtaaatagtaaaatctccaaaacattattttwaaaattacattctcaagagaagaacaaataaaggccagaattcatgttattgcccttcttttactcagt

SEQ ID NO: 454265 - DNA, 588 bp, Homo sapiens
aacattcttttctttgggatgggggaaatatttctttaatctttatttgtcgttaattgcctaaagtaataatgttcactctttaacttataatgaagaggaacaaagttgtttaagaagccatgtaagtatatccccaaaatcaaagtacaatccttattctgaatgtaacttaaaactgacatggaaattacaatcgtttccaaaaacaagagattttaacggtttaaatgtttcattcacgactctttgtggaatttgttttcctactggttgttgagarttgagaaaggtaatgatggtctctaattctttgggatctatgagactttctcagaactttgattatttgacctgaatttccaatttcttctccttcccactaaagaataacttttattatactccttgtttgattgttcacttaagcaatcaatttggtctctttcagcagctaattgacagattcagaattccaattcctctttcagtatcctcagcgttattcacctgaacctggccattaaaaaaaaaaaaagtagacttttaattatcttagctttgcttcttgatttaaacagaagttac

SEQ ID NO: 454266 - DNA, 588 bp, Homo sapiens
aacattcttttctttgggatgggggaaatatttctttaatctttatttgtcgttaattgcctaaagtaataatgttcactctttaacttataatgaagaggaacaaagttgtttaagaagccatgtaagtatatccccaaaatcaaagtacaatccttattctgaatgtaacttaaaactgacatggaaattacaatcgtttccaaaaacaagagattttaacggtttaaatgtttcattcacgactctttgtggaatttgttttcctactggttgttgagagttgagaaaggtaatgatggtctctaattctttgggatctatgagactttctcagaactttgattatttgacctgaatttccaatttcttctccttcccactaaagaataacttttattatactccttgtttgattgttcacttaagcaatcaatttggtctctttcagcagctaattgacagattcagaattccaattcctctttcagtatcctcagcgttattcacctgaamctggccattaaaaaaaaaaaaagtagacttttaattatcttagctttgcttcttgatttaaacagaagttac

SEQ ID NO: 454267 - DNA, 268 bp, Homo sapiens
aaagacagctcaccaaggttccccatatatgagtttctgcaagattattttaggagattgttttctacataaaaagaaaattgcccatgtgtatacargtggtaactatttgggaagggaaggctgaatctcctggtagttaagaaatggttttacagtgaatttgagggttcttctctatttcttttccctgtagagcacttctatgaagaagttggggtatcataaaaggacaagcttttattgtaaaataagacacaattaaaag

SEQ ID NO: 454268 - DNA, 610 bp, Homo sapiens
aagcacatcataaactttatcaattctaactttctcttttagaaaatgaaggagctaaggggtttgcctagcactatataagtagtgagagtaacaaggccagaattggaaccctgtttgattgatgctgttaatttacattgttttgctttattctcagggcagtggtcctcatcagactcttgttataatcaaacatatttacagggcatgtgaaatcacagaaaacgtacgttttgccattgtgcacacgctgcttctatgtttaggtaggacactgtgagtttttaacatcttattgaaaaaaatggagayacttcactaactttagtcatggagtacctaattctagattattcagaatgatatattagcagattttagatacagctttacaaatgctgactgatttatcagactgaacaacatgtacatctggcaaccagaaagtcattgtttggtttcttttttctaattctgaatacttatttactatttatcaataccaacttttaggaatttgttttatttcatagaataaaatattgacaaagtagttaacatacagacagttctaatgataatacattaatttaaaacttctataaac

SEQ ID NO: 454269 - DNA, 610 bp, Homo sapiens
aagcacatcataaactttatcaattctaactttctcttttagaaaatgaaggagctaaggggtttgcctagcactatataagtagtgagagtaacaaggccagaattggaaccctgtttgattgatgctgttaatttacattgttttgctttattctcagggcagtggtcctcatcagactcttgttataatcaaacatatttacagggcatgtgaaatcacagaaaacgtacgttttgccattgtgcacacgctgcttctatgtttaggtaggacactgtgagtttttaacatcttattgaaaaaaatggagacayttcactaactttagtcatggagtacctaattctagattattcagaatgatatattagcagattttagatacagctttacaaatgctgactgatttatcagactgaacaacatgtacatctggcaaccagaaagtcattgtttggtttcttttttctaattctgaatacttatttactatttatcaataccaacttttaggaatttgttttatttcatagaataaaatattgacaaagtagttaacatacagacagttctaatgataatacattaatttaaaacttctataaac

SEQ ID NO: 454270 - DNA, 610 bp, Homo sapiens
aagcacatcataaactttatcaattctaactttctcttttagaaaatgaaggagctaaggggtttgcctagcactatataagtagtgagagtaacaaggccagaattggaaccctgtttgattgatgctgttaatttacattgttttgctttattctcagggcagtggtcctcatcagactcttgttataatcaaacatatttacagggcatgtgaaatcacagaaaacgtacgttttgccattgtgcacacgctgcttctatgtttaggtaggacactgtgagtttttaacatcttattgaaaaaaatggagacacttcactaactttagtcatggagtacctaattctagattattcagaatgatatattagcagattttagatacagctttacaaatgctgactgatttatcagactgaacaacatgtacatctggcaaccagaaagtcattgtttggtttcttttttctaattctgaatacttawttactatttatcaataccaacttttaggaatttgttttatttcatagaataaaatattgacaaagtagttaacatacagacagttctaatgataatacattaatttaaaacttctataaac

SEQ ID NO: 454271 - DNA, 586 bp, Homo sapiens
ttttttagagcagttttgggttcacagcaaagttgactaaaaagtacagagttgccatatatcccttgttcccacacaagcacagcctccccagctatcaatatctagcaacaagmtggtgcatttgttataattaatgaacctacttttacacattattatcacccaaagtgaactgtttacgttagtgttcatttttctatattctgtgggttttgaccaatgtccccacaattgtagtattctgtagaatggtgtcactgtcctaaaaactgcctgagctttgtctagttattgatctttttactgctgtgatagttttgtgttttctagaatgtcatagagttggaatcataatatatatccttttcaaactggcttctttcactcagtaatacacattaaagattcctcaatgtcctttcatttcttgacagctcatttcttcctgggcactgaataatattccatgacgtaccacaacttatttacccatttacttactaaagaaattcttggtttcttccaagatttgacaaatataaataaagctgctataagcattttgtgtggagatttttgcacg

SEQ ID NO: 454272 - DNA, 586 bp, Homo sapiens
ttttttagagcagttttgggttcacagcaaagttgactaaaaagtacagagttgccatatatcccttgttcccacacaagcacagcctccccagctatcaatatctagcaacaagctggtgcatttgttataattaatgaacctacttttacacattattatcacccaaagtgaactgtttacgttagtgttcatttttctatattctgtgggttttgaccaaygtccccacaattgtagtattctgtagaatggtgtcactgtcctaaaaactgcctgagctttgtctagttattgatctttttactgctgtgatagttttgtgttttctagaatgtcatagagttggaatcataatatatatccttttcaaactggcttctttcactcagtaatacacattaaagattcctcaatgtcctttcatttcttgacagctcatttcttcctgggcactgaataatattccatgacgtaccacaacttatttacccatttacttactaaagaaattcttggtttcttccaagatttgacaaatataaataaagctgctataagcattttgtgtggagatttttgcacg

SEQ ID NO: 454273 - DNA, 544 bp, Homo sapiens
tgcagttagtttttttcaaaaaaaaactttatttctattgtttgctctcagatatttatctgtactatgacattagccttctgattgtttcatccatatcactattgtrtctatacagcatttacaatgaactttttgtaaaacttcctttggcaactatagttccaaaagttattaatagttattattttttgcaatgtataatgggttaaaataaaccaagccccctcccttatgaccagatatcttgatctataaccctcagatattttgcccatgatgttctctcttccagggatgattcttctcttcactttgagtggataatgctttacattcattagtcctaaactcagccttgcctgatgccctattctggaccaaattcttgggtatagatactcatatactgtaattgtctgttctcatgctgcaataaatgcatacccaagactgggtaatttaaaaaggaaagaggtttagtggactcacagttccacatggctggggaaacctcacaatcatggtggaaggcaaagcagaa

SEQ ID NO: 454274 - DNA, 544 bp, Homo sapiens
tgcagttagtttttttcaaaaaaaaactttatttctattgtttgctctcagatatttatctgtactatgacattagccttctgattgtttcatccatatcactattgtatctatacagcatttacaatgaactttttgtaaaacttcctttggcaactatagttccaaaagttattaatagttattattttttgcaatgtataatgggttaaaataaaccaagccccctcccttatgaccagatatcttgatctataaccctcagatattttgcccatgatgttctctcttccagggatgattcttctcttcactttgagtggataatgctttacrttcattagtcctaaactcagccttgcctgatgccctattctggaccaaattcttgggtatagatactcatatactgtaattgtctgttctcatgctgcaataaatgcatacccaagactgggtaatttaaaaaggaaagaggtttagtggactcacagttccacatggctggggaaacctcacaatcatggtggaaggcaaagcagaa

SEQ ID NO: 454275 - DNA, 634 bp, Homo sapiens
aatcatttagcaatcatagttatgaccaaatgcaattaatgatctaattttgaacatgttgagttgtagtttacagtggtagttccccttgtctgtgacaggtaagttccaagatccccagtgaatgtctgaaaccgcagatagtaccaaactctatatctactatgtttttttctatgcatatatatcgacgataaagtttaatttataaagtaggcatagtaagagattaacaacaatgataacaaaataaaaacattctaacaatatgccagcattactactcttgtgctttggggccactattacgtaaaatcaatgttacttgaacacaagcactgcaataytgcaacagtggatctgataaccaagatggctactaagtgattaatggttgaagagagtagacagtgtggggactgtggacaaagggatgattcacctccaggagggacggagcggaaaggccaaagatttcatcatgctcctcagaatgacatgcaatttcaaacttatgaattatttctggaattttccatttaatatttttggaccatggttgaccacaggtaactgaaactgaagaaagtgaaactgcagataaagaggaactattatactaaaattaacataa

SEQ ID NO: 454276 - DNA, 629 bp, Homo sapiens
tatagcatgtggccattctagctgactcagaccaactttcgattgcagctttagagtcaggaaatccctttgattcatatcttttactaaggatatatttacatctaattgatttagaaataagtatctggcaagtataggatgaggatgattttgaataagatttccagctttacaactaggatagctagccagattcttgttcttttatttttcttgtcactcaatatttcaggaagccagaattcaaattgattcagtttttttttcctaagaggcagtctggatatgaccccagcaaacacttaacaaaattatagttggtcrtagagcttcaaaaaaatcccacctaaatgatcatcaccttgtctattagggtgttcatcctgatgttcatttgaagtgcatatgttgcttggatacagcagttgcatgaattatgggtcttacacatctaggaacaaaatgtggcttgcatttatttttgttgactttttcaatgcaattttcttcaatgacatttcatcaatacaaaaccattgcagaataataataaatatctaagagttaggtctgagattatccttttcaagatctataaatatcatagcacatgcttctgggcacca

SEQ ID NO: 454277 - DNA, 603 bp, Homo sapiens
gtaaatgaataaacttcttaaaaatgaaataaaatgcatgaagatattttcctagtgctataatcgctaacggaaaaaaaacggaaaatgtgttagcaagcgaccaaattagggtgtggaacaggaaatagctgttaactgataaggtgcgtgaaggcttctctgtgacgatatcacttataatttaagtgatgataaaaatgatgtggctaataaaaacatttcagaagagcagtaacaacaattcccttttctgtagtaacactggcatatctaaaagaagagagaaaagtcaaatgtgtctgagttattgtgaaccctgaagagttaggtaagagacagagcaagtaagagccacatgataattayatacgggaaagagtttgaaaaagttcaaagaagagtcactggatgattgtattaaatgatgcttaattaccatttgctaaataaacaaacaaatggaaactgctcagacacaatcacttttgcagccttgtatcttaccaatactttgatacttcattagtgagttttctgataatagtttaaaaaaaccacttggaaagtttttgtggcacccttggcaagaaaacatattgg

SEQ ID NO: 454278 - DNA, 603 bp, Homo sapiens
gtaaatgaataaacttcttaaaaatgaaataaaatgcatgaagatattttcctagtgctataatcgctaacggaaaaaaaacggaaaatgtgttagcaagcgaccaaattagggtgtggaacaggaaatagctgttaactgataaggtgcgtgaaggcttctctgtgacgatatcacttataatttaagtgatgataaaaatgatgtggctaataaaaacatttcagaagagcagtaacaacaattcccttttctgtagtaacactggcatatctaaaagaagagagaaaagtcaaatgtgtctgagttattgtgaaccctgaagagttaggtaagagacagagcaagtaagagccacatgataattacatacgggaaagagtttgaaaaagttcaaagaagagtcaytggatgattgtattaaatgatgcttaattaccatttgctaaataaacaaacaaatggaaactgctcagacacaatcacttttgcagccttgtatcttaccaatactttgatacttcattagtgagttttctgataatagtttaaaaaaaccacttggaaagtttttgtggcacccttggcaagaaaacatattgg

SEQ ID NO: 454279 - DNA, 591 bp, Homo sapiens
tgtggtttgtattatttgttattatgaaatagtattcaatactaaatttagagctgtaaatttactaataaagatattgaaaaaagatatatttagtcatagtttatcctatcctgaaaacctatgaaatttaaagtaatttttaaataattttcaatcatataatagaaaaaagtgttagcattccagtgacaattaataggccatgtattgacctgaaacagcttyatgaaatagactgattttggaagggtaaatttattatataaattattcaccataaattaacttttaacagttttgtatacatttcaaaataataaaatgttttcttaaatataatctaggattcacaatttccaaagacagagaaaaagattataaacattttaatgaggtttagtgttttaaaagaatgaaagtattatatcatttatataggcacatgcttaaatgattttcactagtatttgccaacagcagagggagatattgaactataaattacaattttaccatgcacatcttttgcagaatgatttatagccagttagacatttgattttgaacttgcttttcttgaaaaaaaac

SEQ ID NO: 454280 - DNA, 591 bp, Homo sapiens
tgtggtttgtattatttgttattatgaaatagtattcaatactaaatttagagctgtaaatttactaataaagatattgaaaaaagatatatttagtcatagtttatcctatcctgaaaacctatgaaatttaaagtaatttttaaataattttcaatcatataatagaaaaaagtgttagcattccagtgacaattaataggccatgtattgacctgaaacagctttatgaaatagactgattttggaagggtaaatttattatataaattattcaccataaattaacttttaacagttttgtayacatttcaaaataataaaatgttttcttaaatataatctaggattcacaatttccaaagacagagaaaaagattataaacattttaatgaggtttagtgttttaaaagaatgaaagtattatatcatttatataggcacatgcttaaatgattttcactagtatttgccaacagcagagggagatattgaactataaattacaattttaccatgcacatcttttgcagaatgatttatagccagttagacatttgattttgaacttgcttttcttgaaaaaaaac

SEQ ID NO: 454281 - DNA, 577 bp, Homo sapiens
attctgtctcctctctattccatctcctaagctccaaatcattgatggaaaatctattttcacctttttctaagactgatctgagtaataactctgtagtaatggcatggattacaatagagagagataaattggaaaaaaagaaaattaaatttcctttactatgctatctcctgtcaacacgttctctcrcccatggctttcttctttctaacctgcactttctgctcttttccaacccctctgaataatccgttttgtcgcccaactcagaatcttaatgcaatatccatggtacatgcccaagagccatcgtttttaaatgaaaatgagggggaaaaaatggaagacttgaatcgttttatgaaatacagattattctgtgatctaagagaccaaaatagacacgactgtataactaagatggaccctaaggctaaggagacaaagttttttacaggtccagggttcagggctccactggcaaatctaaattattattgctctaaattccttaactataggagctattagagctctcctaaatctgttttacaacccagaccgcttcaactct

SEQ ID NO: 454282 - DNA, 577 bp, Homo sapiens
attctgtctcctctctattccatctcctaagctccaaatcattgatggaaaatctattttcacctttttctaagactgatctgagtaataactctgtagtaatggcatggattacaatagagagagataaattggaaaaaaagaaaattaaatttcctttactatgctatctcctgtcaacacgttctctcgcccatggctttcttctttctaacctgcactttctgctcttttccaacccctctgaataatccgttttgtcgcccaactcagaatcttaawgcaatatccatggtacatgcccaagagccatcgtttttaaatgaaaatgagggggaaaaaatggaagacttgaatcgttttatgaaatacagattattctgtgatctaagagaccaaaatagacacgactgtataactaagatggaccctaaggctaaggagacaaagttttttacaggtccagggttcagggctccactggcaaatctaaattattattgctctaaattccttaactataggagctattagagctctcctaaatctgttttacaacccagaccgcttcaactct

SEQ ID NO: 454283 - DNA, 577 bp, Homo sapiens
attctgtctcctctctattccatctcctaagctccaaatcattgatggaaaatctattttcacctttttctaagactgatctgagtaataactctgtagtaatggcatggattacaatagagagagataaattggaaaaaaagaaaattaaatttcctttactatgctatctcctgtcaacacgttctctcgcccatggctttcttctttctaacctgcactttctgctcttttccaacccctctgaataatccgttttgtcgcccaactcagaatcttaatgcaatatccatggtacatgcccaagagccatcgtttttaaatgaaaatgagggggaaaaaatggaagacttgaatcgttttatgaaatacagattattctgtgatctaagagaccaaaatagacacgactgtataactaagatggaycctaaggctaaggagacaaagttttttacaggtccagggttcagggctccactggcaaatctaaattattattgctctaaattccttaactataggagctattagagctctcctaaatctgttttacaacccagaccgcttcaactct

SEQ ID NO: 454284 - DNA, 577 bp, Homo sapiens
attctgtctcctctctattccatctcctaagctccaaatcattgatggaaaatctattttcacctttttctaagactgatctgagtaataactctgtagtaatggcatggattacaatagagagagataaattggaaaaaaagaaaattaaatttcctttactatgctatctcctgtcaacacgttctctcgcccatggctttcttctttctaacctgcactttctgctcttttccaacccctctgaataatccgttttgtcgcccaactcagaatcttaatgcaatatccatggtacatgcccaagagccatcgtttttaaatgaaaatgagggggaaaaaatggaagacttgaatcgttttatgaaatacagattattctgtgatctaagagaccaaaatagacacgactgtataactaagatggaccctaaggctaaggagacaaagttttttacaggtccagggttcagggctccactggcaaatctaaattmttattgctctaaattccttaactataggagctattagagctctcctaaatctgttttacaacccagaccgcttcaactct

SEQ ID NO: 454285 - DNA, 616 bp, Homo sapiens
caaagcgtaatgttattgctggttcaaagagcatttgagaagctaaaatacttgtaagaagaaaaattgctgggttttctaaaaagcaactgccaaatgtctatggaactataaactactatctccagagttatttgctcaactaggtgcaaattatttgcatctctactagacacaaatctacatgttagcctgtgacttctctgagtcatttaatcaatagtgaataggaaactggaagaaagaataacttgaatattaactcgtattttacttccttttcatacattcaattctatccctttattcagatatcccctcatattatttctccagcaaaaatcctttacaggacgtgtcatctgtcaggcctttgagcccaagctaagccattgtatcccctgtgacctgcacacgtatacgtccagatggcccaaagcaagtgaagaatcacaaaagaagtgaaaatagccagtccctgccttaactgatgacattatcttgtgaaattccttctcctggctcatcctggctcaaaagctcccccactgagcaacttgtgacccccccacccttgccmgccagagaacaaccccctttgactgtaaaacggccc

SEQ ID NO: 454286 - DNA, 526 bp, Homo sapiens
atctgactctattttttccaaaaagaaataatataacatacttttaaaatcagcaaatagtcacatacacaaatgttgctcttttcatcctaagagacaaaatattcagtacygtatcaaggattatttcacgtgagctggcaagatgaataaaaaagattcagaatttcccaacatttatactatgaaaaagaaaaaaaaactgatctaaataatctaattttaaaatgacaagacacattacaaactggagacagtagcaaattaaaacattcaattttcagtgtactctgtattttctgaccacatagcattcctttttcacaaatttttactgactcatctgaaaataaatttcattaaaggaagatcctaaaccaacttttcctagtgtccagcttttttgtctttagacaaagcttattcatgtagatttagatgtttaccactttatctctactaatagattttacttttgagtgcatttgatgtaataaaagataatagctttttgtgttttttacat

SEQ ID NO: 454287 - DNA, 526 bp, Homo sapiens
atctgactctattttttccaaaaagaaataatataacatacttttaaaatcagcaaatagtcacatacacaaatgttgctcttttcatcctaagagacaaaatattcagtaccgtatcaaggattatttcaygtgagctggcaagatgaataaaaaagattcagaatttcccaacatttatactatgaaaaagaaaaaaaaactgatctaaataatctaattttaaaatgacaagacacattacaaactggagacagtagcaaattaaaacattcaattttcagtgtactctgtattttctgaccacatagcattcctttttcacaaatttttactgactcatctgaaaataaatttcattaaaggaagatcctaaaccaacttttcctagtgtccagcttttttgtctttagacaaagcttattcatgtagatttagatgtttaccactttatctctactaatagattttacttttgagtgcatttgatgtaataaaagataatagctttttgtgttttttacat

SEQ ID NO: 454288 - DNA, 526 bp, Homo sapiens
atctgactctattttttccaaaaagaaataatataacatacttttaaaatcagcaaatagtcacatacacaaatgttgctcttttcatcctaagagacaaaatattcagtaccgtatcaaggattatttcacgtgagctggcaagatgaataaaaaagattcagaatttcccaacatttatactatgaaaaagaaaaaaaaactgatctaaataatctaattttaaaatgacaagacacattacaaactggagacagtagcaaattaaaacattcaattttcagtgtactctgtattttctgaccacatagcattcctttttcacaaatttttactgactcatctgaaaataaatttcattaaaggaagatyctaaaccaacttttcctagtgtccagcttttttgtctttagacaaagcttattcatgtagatttagatgtttaccactttatctctactaatagattttacttttgagtgcatttgatgtaataaaagataatagctttttgtgttttttacat

SEQ ID NO: 454289 - DNA, 544 bp, Homo sapiens
aatgactaaatgtaattaaatagcccagataattctaaatatggaagtttttacaaaggaaccagcaatctgaaacccagatgttaagagaggtaattcaagtttattgaatgtctgagagaatgtgctaaagacttyttcttttatcatttaatcggtctaccattatcagaggtcattactctcatttacagagtagttagccaaatacttaaccatgacttccatggaaaatggaagtcaaccttctctgacctgtgggaagagccaggctcaaacccgccggctctctctaaagatttgagtcctgtattaagcgctaaattctttcactgagagctcgtctgtccacactcgatggttcacacacccatggacatgccttatacacagttacatagttttaacatttgctgaggtagtcatgcgttacttaatgggggtggagcgtgtgtcggggttgtggggggacacttctgggaaatgcgtcattaggcaatttctttgccattggaacatcatagaatgtactttcacaaacctc

SEQ ID NO: 454290 - DNA, 544 bp, Homo sapiens
aatgactaaatgtaattaaatagcccagataattctaaatatggaagtttttacaaaggaaccagcaatctgaaacccagatgttaagagaggtaattcaagtttattgaatgtctgagagaatgtgctaaagacttcttcttttatcatttaatcggtctaccattatcagaggtcattactctcatttacagagtagttagccaaatacttaaccatgacttccatggaaaatggaagtcaaccttctctgacctgtgggaagagccaggctcaaacccgccggctctctctaaagatttgagtcctgtattaagcgctaaattctttcactgagagctcgtctgtccacactcgatggttcacacacccatggacatgccttatacacagttacatagttttaacatttgctgaggtagtcatgcgttacttaatgggggtggagsgtgtgtcggggttgtggggggacacttctgggaaatgcgtcattaggcaatttctttgccattggaacatcatagaatgtactttcacaaacctc

SEQ ID NO: 454291 - DNA, 578 bp, Homo sapiens
tgacgaggcagtggctgagatctgcacggagatgctgcgtcagttcacaggtgcgccacgtgccccacgacccgcttcccccaccctgcttcttcctcacctgccctcctctggtggacccatggcagctctctcctccccagaccgtgaagctcggatgctgtgccccacgggagagccactgcagggtgccacattcagccaaaggctcttcagttgctgacagtttagaacttgamacactcagaattatgggcgctgtgtctcttccccctttctaaaggctgatggtaaaacactcagagatcaccgcccattgtgctctgttgctaagagctggatttgccttttactctctgagtctttcagctcaacatttttcacccactattccaggaggacctcacgagaacccccgatattaggcggggaaacatgattatgtgtcatgtgttttcagatagataggaaaagtaaggtggagcgttttgccgggggtcacaggaggcgctgagtgggtacacagctcgagccccagcctccctccttcctcttctatcctccgtgcctacccctgg

SEQ ID NO: 454292 - DNA, 351 bp, Homo sapiens
gttgcttaggctggagtgcagtggcatgatcccggctcactgcaacctccacctcccaggctcaagcrattctcctgcctcagcttcccgagtagctgggattaaggcacgaaccaccatgcccagctaatttttctattttaaatagagttggggttttgctatattggccagactggtctcaaactcctgacctcaggtgatccacccgcctcggactcccaaggtgttgggattacaggcgtagccactatgcccagcctatatatgaaaaattgtctgaatagaggatctgttcatgtagtttaagcccaaaagctgtccacgtggatacaatacactgaaatgttc

SEQ ID NO: 454293 - DNA, 605 bp, Homo sapiens
ttggccctggctatttgtagtcctactatgtgacactattttatgaaattcaagaagagacaaaactagtctgatagatgtcagacataaataaaaatttattgagctgtacacttaagctatgtaaattatatttcaatttaaggagtttaaaaaaattaaaaaaatttaggccttggcatgcccagaagtcaatgacttactcccagggcttgactcccatttgccaaagttctaggagcttgatgtataaactggaaagttgacaagataagtcctaatgagaactctaatgagccaggggcccagtgcctgtgtcacctggatagtggcagagacaaacygtccaatgagatactcaggacaccctcttctgaggtgctgctggttgattatgccccttccttggactggatgccacataatgagctgggttctgacttcaccagtgaagtgtcctgtgtccttgtggaaatgactcagcccccttcctcatctctaaaatgcgtatacctaccctccctcccagggtggttgtgagaagcatttgacaaaacaccatatttaaagtcccattcataggaggtaggtactcaggtaatgtg

SEQ ID NO: 454294 - DNA, 487 bp, Homo sapiens
tttctggaggttctgggagagaatcaatttcttgctcatttgggttgttggcagaatttactaccttgctgaggtccttgttttcttgctagctgtacgctgagggatgttcttagcttccagagactgctgtatttcttggcttctggttttctttcttcatctttgaagccagcaatggcaggtcaagtacttctcaggttgcatctccccgatacagttgggaaaggttcattgcttttaagaactcatgtgattagattggacccacctagataattcagtataatctccctatagtaaaatccttaaacttagtcacagctgcaaaatctattttgctctgtacagtaatatattctcacacgttytagggattagggcatggacatctttggggtgcattattctgcctcaccctcaatatatcaaaaaaattttcagttctatatgtaagccataaaaaatttattaatgagctatttta

SEQ ID NO: 454295 - DNA, 586 bp, Homo sapiens
tatttttcttgctttattgacgggcgttgtttttgtttgattggatttgagttttgaaaaagagcgtctagacaacgatatgtcagtggcaggaggatgatggacttaggtactaggaaaaggagagaaacctagacgggaaaaaacgggttctttcctacagctgttactgttggtggaacgtgtctggtcttagcagttagctgctgggatggaagaggctgccagcggggaacggytccagggccggtgtcagcccgggccgatgacactaccccgcacccagcccctcgccggggaggagcgcgggtggcaggaaacgccgcgctgccactatttttcagaaccttcaatctgccctgacgctgatgagccactcagtaatgccctgggagcttcactctagaacggggaaagggggataggatgaagtttttgctcagatctttccgaggccgcactgcccatctcgcgtgaatgcttggagacaaatgcctggctcaagttggaaaagacagacaagagattgtgccggggaaaccccccggagagtgcgttcaacaggacaggtggacggaagcacagg

SEQ ID NO: 454296 - DNA, 581 bp, Homo sapiens
agaacctggcatgtggtacacgctggtaaataccttgatagtgaatatatgaatgaaccaacgactaaatacccggaggtttgggtatatgactccacagatcctatcagtgcaaatgttttaaaagcataaagtactttgtatatatcatggacaaaggtaaacattttaaagttacagtccaaagcatatttggttatggaattctgtatgggatagctcttgttgaacaagtttctgctttgagacaggatctcaatctgttgtccaggctggagtgcattggcactatcttggctcaatgcaatgtcagcctcctggtgctsaagtgatcctcccacttcggcctcccaagtatctgggactacaggatagcgtcaccacacccagttaatttttgcatttttttgtagagatgggttttcacattttggccaggcttgtcttgaacttgtgagctcaagcaatccacccaccttagcctcccaaagttctgggatgacaagcatgagccactgtgcccagccactgagcacatttctaatcatggtaaaaatagcagcagcacattagagaaacaa

SEQ ID NO: 454297 - DNA, 538 bp, Homo sapiens
taatggtttcttaaaaacaaaactcagcaagatacaagagaatacagttaaacaattcaacaaaatcagaaaaaaaataggaaattcaacaaagttagcatttttggaaagtgcaaacagaaatcttggaactgaagaacttaaatgaaaaatacaattgagagtttcagcaacagactacatcaagcaaaagaaagaatttctgaatttgaaggyaggtcttttgaaataatccagccagagggtggaaaaaaaataagaataaaaaagaatgaagcaaacctatggaacttaagagttgcatttaaatatacaaatattcacataatatttatagagggtgagaagagatggaggaaaggcgcagaaaacatatttaatgaaatagtagctgaaaattgctcaagttgggagagatatgtatattcagatccaggaagctctggagtttcaaatagattaaattcaaaaggtcctctccaagacatattataatcaaactgtcagaagtcaaagagaattctaaaagcagaaaaag

SEQ ID NO: 454298 - DNA, 538 bp, Homo sapiens
taatggtttcttaaaaacaaaactcagcaagatacaagagaatacagttaaacaattcaacaaaatcagaaaaaaaataggaaattcaacaaagttagcatttttggaaagtgcaaacagaaatcttggaactgaagaacttaaatgaaaaatacaattgagagtttcagcaacagactacatcaagcaaaagaaagaatttctgaatttgaaggcagrtcttttgaaataatccagccagagggtggaaaaaaaataagaataaaaaagaatgaagcaaacctatggaacttaagagttgcatttaaatatacaaatattcacataatatttatagagggtgagaagagatggaggaaaggcgcagaaaacatatttaatgaaatagtagctgaaaattgctcaagttgggagagatatgtatattcagatccaggaagctctggagtttcaaatagattaaattcaaaaggtcctctccaagacatattataatcaaactgtcagaagtcaaagagaattctaaaagcagaaaaag

SEQ ID NO: 454299 - DNA, 593 bp, Homo sapiens
catgtctggctgggcctgttcccagttttggaacttggcagctttttcagagttttactcaagttctcaggtcaaaggaatcaagtagaagaggtattcatgtaaacatgctgtgtttttctgtragtaacaaatctactccggttatttattttagatttacaaaaatgttcccatcccagcagcttcagggcatgtgacagtataaaatttgagactcattaaagaaaatttctatgtatttcagctttgtacaatagcttcctcctggccctctgaaaatgttaaaatttcttgtacatatagtttgcattattctccaattgccaatgaatttaaaaatgttttggggtacctctaccattaaaaaatagtctcattagaagaggatgaatttttttaaatgacacattatagattttaaattagaatctaaaaattttccccctgcgctttctacaaacactttttcaaaggttttaatgtgtcattttcttgatagtttggtgttttccctgcaagcatgtgctctttctaaaatgtgtatcatctcctgcatctattgacgagttagacctgggaaatctaaccca

SEQ ID NO: 454300 - DNA, 593 bp, Homo sapiens
catgtctggctgggcctgttcccagttttggaacttggcagctttttcagagttttactcaagttctcaggtcaaaggaatcaagtagaagaggtattcatgtaaacatgctgtgtttttctgtgagtaacaaayctactccggttatttattttagatttacaaaaatgttcccatcccagcagcttcagggcatgtgacagtataaaatttgagactcattaaagaaaatttctatgtatttcagctttgtacaatagcttcctcctggccctctgaaaatgttaaaatttcttgtacatatagtttgcattattctccaattgccaatgaatttaaaaatgttttggggtacctctaccattaaaaaatagtctcattagaagaggatgaatttttttaaatgacacattatagattttaaattagaatctaaaaattttccccctgcgctttctacaaacactttttcaaaggttttaatgtgtcattttcttgatagtttggtgttttccctgcaagcatgtgctctttctaaaatgtgtatcatctcctgcatctattgacgagttagacctgggaaatctaaccca

SEQ ID NO: 454301 - DNA, 631 bp, Homo sapiens
aattggacataatctgttgtgagcaaatccatcctataagaaagggtaaaggaatgagcatttcaggctaaagagaaataatactagatggaaatttagaattacaggatggaatgaaggatatatgaaatataaatatgtggatacatataaaatacaattttttctgattgtctaacagacaaggcaaacacaaccattttgaggttatgatttattgaagcttactttatatcaggcactgtgtcctaaatgttttacaaatattaattcatccctacaataatataacaagatgcagagacgtgcaggagcatgtctaargtcacaattagtaggtggttagagtttagtgggtaaaacatggttctggaattaaacagacctgcattcaaatctcatctttccacttactagctgaatgtcttcgataaattttcttaataccttaaatatcagttttcttgtctaaaaatatgcataataatatcgattaagttgtgaaaaatcaaatgatattgaaataattcatgcaaaaaacattataccaaaggtggacacctcataagccctccacagaaattagcttttattattatgtgatctgggatttgaacttagaactgtcgga

SEQ ID NO: 454302 - DNA, 631 bp, Homo sapiens
aattggacataatctgttgtgagcaaatccatcctataagaaagggtaaaggaatgagcatttcaggctaaagagaaataatactagatggaaatttagaattacaggatggaatgaaggatatatgaaatataaatatgtggatacatataaaatacaattttttctgattgtctaacagacaaggcaaacacaaccattttgaggttatgatttattgaagcttactttatatcaggcactgtgtcctaaatgttttacaaatattaattcatccctacaataatataacaagatgcagagacgtgcaggagcatgtctaaggtcacaattagtaggtggttagagtttagtgggtaaaacatggttctggaattaaacagacctgcattcaaatctcatctttccacttactagctgaatgtcttcgataaattttcttaataccttaaatatcagttttcttgtctaaaaatatgcataatratatcgattaagttgtgaaaaatcaaatgatattgaaataattcatgcaaaaaacattataccaaaggtggacacctcataagccctccacagaaattagcttttattattatgtgatctgggatttgaacttagaactgtcgga

SEQ ID NO: 454303 - DNA, 631 bp, Homo sapiens
aattggacataatctgttgtgagcaaatccatcctataagaaagggtaaaggaatgagcatttcaggctaaagagaaataatactagatggaaatttagaattacaggatggaatgaaggatatatgaaatataaatatgtggatacatataaaatacaattttttctgattgtctaacagacaaggcaaacacaaccattttgaggttatgatttattgaagcttactttatatcaggcactgtgtcctaaatgttttacaaatattaattcatccctacaataatataacaagatgcagagacgtgcaggagcatgtctaaggtcacaattagtaggtggttagagtttagtgggtaaaacatggttctggaattaaacagacctgcattcaaatctcatctttccacttactagctgaatgtcttcgataaattttcttaataccttaaatatcagttttcttgtctaaaaatatgcataataatatcgattaagttgtgaaaaatcaaatgatattgaaataattcatgcaaaaaacattataccaaaggtggacacctcataagcyctccacagaaattagcttttattattatgtgatctgggatttgaacttagaactgtcgga

SEQ ID NO: 454304 - DNA, 617 bp, Homo sapiens
aaattgggtacattcttacaaatataatgggtaatagtaacaatgactggtctgcaaaggagaatgtggaaaaattttatttgctctgggtataactgtttgatgttagaatttggcatttccttgtgggaaatctattatagggatgttctgccaagataaaggaaggaagaaataagcaccgcgccccagtaagactatatggaagttttaaaaaacacttttaaaaatagcttgtctgatgatagaatcaattgaccttaaggaatatttcctaatcctactgccatgaggtgttcgtttccaaatttgtatggccatcattctgacagtaggcccatttctttcttctaggtttcctaaatcctgctcctagctctgctgtgggaggggggctagtttccatrtgtccaccaagttgctttgaatcaggatcacagttgcgtcaggaacatcagcccttgcctttctacaccctgccataaaaagtgtcttttatttgggcctcatgatgttgcttcagtaagctattagcactgcaacaagaagagcttgttctttctgaagaagtatgacttacaattttgagatgatttgccagttaaagtcacaattac

SEQ ID NO: 454305 - DNA, 617 bp, Homo sapiens
aaattgggtacattcttacaaatataatgggtaatagtaacaatgactggtctgcaaaggagaatgtggaaaaattttatttgctctgggtataactgtttgatgttagaatttggcatttccttgtgggaaatctattatagggatgttctgccaagataaaggaaggaagaaataagcaccgcgccccagtaagactatatggaagttttaaaaaacacttttaaaaatagcttgtctgatgatagaatcaattgaccttaaggaatatttcctaatcctactgccatgaggtgttcgtttccaaatttgtatggccatcattctgacagtaggcccatttctttcttctaggtttcctaaatcctgctcctagctctgctgtgggaggggggctagtttccatatgtccaccaagytgctttgaatcaggatcacagttgcgtcaggaacatcagcccttgcctttctacaccctgccataaaaagtgtcttttatttgggcctcatgatgttgcttcagtaagctattagcactgcaacaagaagagcttgttctttctgaagaagtatgacttacaattttgagatgatttgccagttaaagtcacaattac

SEQ ID NO: 454306 - DNA, 617 bp, Homo sapiens
aaattgggtacattcttacaaatataatgggtaatagtaacaatgactggtctgcaaaggagaatgtggaaaaattttatttgctctgggtataactgtttgatgttagaatttggcatttccttgtgggaaatctattatagggatgttctgccaagataaaggaaggaagaaataagcaccgcgccccagtaagactatatggaagttttaaaaaacacttttaaaaatagcttgtctgatgatagaatcaattgaccttaaggaatatttcctaatcctactgccatgaggtgttcgtttccaaatttgtatggccatcattctgacagtaggcccatttctttcttctaggtttcctaaatcctgctcctagctctgctgtgggaggggggctagtttccatatgtccaccaagttgctttgaatcaggatcacagttgcgtcaggaacatcagcccttgcctttctacaccctgccataaaaagtgtcttttatttgggcctcatgatgttgcttcagtaagctattagcactgcracaagaagagcttgttctttctgaagaagtatgacttacaattttgagatgatttgccagttaaagtcacaattac

SEQ ID NO: 454307 - DNA, 584 bp, Homo sapiens
tgaacttccctttactggtttgccttgatcgatatatacggaccaaaataatattcagaaattctggaaggtctctgtcttagcccgtttgggttgttataacaaagtaccatggactgagtagtttataaacaacagaaatgtatgtctcacagttctaaaaactgtgaagtccaagacaaatctctagcagatttgggtctggagagccaccgtttcccagttcatagatggtgccctctcactgtgtcctcacaaggtggaaaagggagaactccagtgctttcagccccttagcagggtactcatcccattcatgaggctctacccacctcctaatgccatcacattggtgaataggtttcaacatatgaattttggggggtacacaagcattcagaccatagcactttccaaggatcgctttgcagtttcctattctcagatgaacacmttcctaaatgtaacagatctgaaagtgctggataatttgaatgaatgctggttacgcaaagaaggcatatatctttgtttgataaaaatttgttacaattctctgtgaatggagaaaagatttatcagat

SEQ ID NO: 454308 - DNA, 621 bp, Homo sapiens
ggtattatacatagggatctactttagatagagtagtcaaggaagggctctttgagaagaaactaaaatttgttccaataaaggaagaaaaagagggctgggcctggtggctcatgcctgtaatcccagtactttgggaggccgaggtgggtggatcatatgaggtcaggagtttgagcccagcctggccaacatggtgaaaccccatctctactaaaaatacaaaaaattagccaggcrtggtggtgggcacctgtaatcccaagtacttgggaggctgaggcaggagaattgcttgaacctaggagatggaggttgcagtgagccgagatcatgccattgcactccagcctgggcaactctgtctaaaaaaaaagaatctcaccagtcacattctccatttctgggagatattcacttgtcttgggtctagtcacacttgcctttgacttcttgtaactcaaagacaaaacttaatagttccacaaaacacatcttatataatacagtgggtgtggcatagtggtggaaataaactaatatatgcaaatatgtacataaagcacagaagaacctgtgcatagcaactctagtccttgtttgtgcaaccggtcatgaagc

SEQ ID NO: 454309 - DNA, 589 bp, Homo sapiens
acaaatctgccttatttatgttcatcttgattttccttaatcctaaaggagcctcctccagaaatttgaacctaatagctttgcaaaaatattatgtacaaatccagacattttgctcattagttcaaagaagcatttctttccagtgctttcgttcagaatattagttctaagagctgttggtcgagcccctatgacattaagtttttcaagctaagtcatctcggaaggaattccttctgtatgaccttctcggaatttcttgatgaacagtgtcatatgaaaggcttgtgaaagtattatcataaagaaacttctttgttgtactcatggttttccaaaattctttaacaatgaaatctttttgaggaatatctacaagcatcttgtagaacttatattgacaaaacatatttttggaatcttctgttgtttaaataaaaataagagtgggaaaactattatctgtatgtaagaggaaaaaaayccaaacaaaaagtacgagattttaataatacttcaatactttgtattgaaaactaactttgcaagttagtagaagagtagaagatcaagcaatattatggct

SEQ ID NO: 454310 - DNA, 573 bp, Homo sapiens
attgttcccttatgatagtggtgatggtagcatctttaaccattgggtctgttacaataaaatctgctgtacagatagttaagagtcagataatatagcagacttctaattctatgtcatggttcctttaaataatagacacatttaagaggccatctgccatattagaaatgcctactttgaaaactgctttttttttttttttttctgagagggagtcttgctctgtcacccaggctggagtgcagtggcgtgatcttggctcaytgcaacctctgcctcccaggttcaagcaattcccctgcctcagcctcccaagtagctgggattacaggcacctgccaccacgcctggctaattttgtgtgtgtgtgtgtgtgtgttttagtagagacaggattttatcatgttggccaggctggtctcgaactcccgacttcaagtgatccacccgcctcagcctcccaaagtgccgggattacaggcgtgagccactgcacctggtggaaaactgctttttttctaaaactgtacattgccgagctgaacctgactctgactccatttgaataag

SEQ ID NO: 454311 - DNA, 573 bp, Homo sapiens
attgttcccttatgatagtggtgatggtagcatctttaaccattgggtctgttacaataaaatctgctgtacagatagttaagagtcagataatatagcagacttctaattctatgtcatggttcctttaaataatagacacatttaagaggccatctgccatattagaaatgcctactttgaaaactgctttttttttttttttttctgagagggagtcttgctctgtcacccaggctggagtgcagtggcgtgatcttggctcactgcaacctctgcctcccaggttcaagcaattcccctgcctcagcctcccaagtagctgggattacaggcacctgccaccacgcctggctaattttgtgtgtgtgtgtgtgtgtgttttagtagagacaggattttatcatgttggccaggctggtctcgaactcccgacttcaagtgatccacccgcctcagcctcccaaagtgcygggattacaggcgtgagccactgcacctggtggaaaactgctttttttctaaaactgtacattgccgagctgaacctgactctgactccatttgaataag

SEQ ID NO: 454312 - DNA, 470 bp, Homo sapiens
tctccttaacgtcttagcctctcagtcacttttgtttttttcttctcagcctctaggccttttggaaactatcttcctaaaaggaaaagcatcaccaaatgtttagctcacttttttggtgtacctttttttgcacttttctgctgtctgggatcttgttccctcttctcgtgactacattgacagccttgaactccagtttttgtctctttagccccttgagattcctgacaactttgaccagcttctctgacagttgggctcatgtttctgctcagcttctgagctctcagacatgccctattcataaactggcaaatgactcaaaggaaaaagtagcatgagatgttggscttgctttcacatgtttcccttccctttgacgtgttggatccccagatcctggctgcattgggaactttctgctgcattcaaacaggttttattttggtattttattcatttttgaa

SEQ ID NO: 454313 - DNA, 594 bp, Homo sapiens
tctttccctgactttaggatagggacatcttggaattgtgctctatccagagcttccagccattctgcctgtgcaggaacctgtgttgaggatgagggtggcatgaagcaaggaggacggcttatgccgtgaacactactgagtcacattcagagaaaggctgaggcggggggagctctgtgtccttccgtgggaattctctcaattttaatctctgttttcttctgtatgagtctctccctctctgaaaaaattgttccttcattttcccctcattcttctctttcaattatatctttgcctacctgtgacattttgtgttgcaaaaagactctggacttctgggctaaatgatytcttggaattgctaagattctttctcttggatgaggacttttcttcccaggatctcatggaaattgacttcatcgtgagaaatgaacatccttttgtttcatgtgtaatttggaactgtgaagcctcccttgttactgctctgctcagacagggctgccacacataaccgtcgtgattactcatcctttcatttactgagtttccaccacttcaaatgcacaaagattaacagtctat

SEQ ID NO: 454314 - DNA, 586 bp, Homo sapiens
gtaattccttttagaaatgtgaaagatatgagttcagtgccttaaaacttgtgcatagttcatggacatttcttcttcaagtcttttgtccacataggggtgtagcctggaattccagtttattacactgagtcctcagctgtggctcccctctcacctctaacacrcaaccccaaagtcacataaactcattatttatccccaggacacaacttagtgtgtgcttgtttatgaattgatctgtaataagcccacaggagctcagcagtataaaatttgaaataaataacacccggggccaagagttgtccacaaaatgaacttcaccctactattttcataaacctccaaccccccacctgctgacttcagatctctttcagcttcaggagagccagatgttcttcactccgtgtactcaaaaccaccactctgaaccccaggaaagtgaaaagagaacatgctttgctgtccactgccaagggcactccaccaggatccagaagcctgggaattctaccctggggaaagaaagcaggagcttcccagccagattcacctcccactacaggagattgtttttaat

SEQ ID NO: 454315 - DNA, 571 bp, Homo sapiens
caagtattctgttatagcagcacaaaatggacctagacagtactggccaattatttgatagaatgcctcacaatttgggtttgtttaatgttttcttatgattcaggttatgtatttctggcaagaatcatatggaagtgatgttgttgtcttcttagagcataagatcaggaggtacatgatgttgatatgtgtccttattggtgctgttaactttgatcactgcaaagttactcctttccttttttcarttagtatctattctttaaatttaaaccctcttgtacttatttatagttatataatttattacctttgggcccagtgtcctcaagtattaaatgtggttaataatcatagctctacatactgatcggtgttattgtgaggcacaaataacatatgtgaaagtgctttgtaaactgcgaagttatataatgcaccaagttaacatagtgaatcacatatataatgagaagccacaggttgatagactacccagcgtttatattatatgctttcagacttccactgacatcacttaaaagggatatttcagaattagcctgca

SEQ ID NO: 454316 - DNA, 517 bp, Homo sapiens
gtattctgttatagcagcacaaaatggacctagacagtactggccaattatttgatagaatgcctcacaatttgggtttgtttaatgttttcttatgattcaggttatgtatttctggcaagaatcatatggaagtgatgttgttgtcttcttagagcataagatcaggaggtacatgatgttgatatgtgtccttattggtgctgttaactttgatcactgcaaagttactcctttccttttttcagttagtatctattctttaaatttaaaccctcttgtacttatttatagttatataatttattacctttgggcccagtgtcctcaagtattaaatgtggttaataatcatagctctacatactgatcggtgttattgtgaggcacaaataacatatgtgaaagtgctttgtaaactgcgaagttatataatgmaccaagttaacatagtgaatcacatatataatgagaagccacaggttgatagactacccagcgtttatattatatgctt

SEQ ID NO: 454317 - DNA, 588 bp, Homo sapiens
tttgctagtatgcactcttccaaattggtggctcttttctctctgaacttgggaagaaagggaaggattccaagaaggaagaggaggrtagctcatgggattctttggcatagaaaaaaatggcttccctgtatcagctccttgaaaaatgacataattaaggagagaaagtcccagggattttgtgaggaaatcaaaaatgcctgctatgttactgtgtgttcaaataattaaagattgacttatgatcacaaacttttttaaatcgatggagttaaacacctcctaacctgaactatttttaattgatagagaataaaagtttcagctggggccaagaaaggagtgatttctagatggtggcaagattggacaagatatgcagatagccagaatacaggtaaagtaattgaaggtaaagataaggaatcatccattttttctttgaggttttttaaaacaataataacaatctcagatatgaaactggcagatttgtgtttcatatcttgaagagctctgatcatttcatgtaggacaattaagagcccagtgacagcatgctttagagttttattaaatacttat

SEQ ID NO: 454318 - DNA, 611 bp, Homo sapiens
tacagtgagctatgattgtgccactgcacttcagcctggacaacagaacaagaccccatctcaaaaaaagaatataaggtaaataaacaaaattaatgcttttcccatgtatattaacaataatctattacagattaaaatataaaagattccctttataaaagcaatcaactcatacattacctaagaataattttattgtttaatgagacctaaaatggagaactattgatctttatctagaacctttaaaaaagggcttaactaaatgaagagatactttcttcatcaaatataaattgccatagatgataagatgtaccattattgtatataacactaagaaataaaacactgccaattaagttatgaaacatcatctattgtaaataaatcctaatttcaaacatgttataatgtgggggcaggggaagtttctgagcctcagtgaaayatattatgttctaaaatactcagaccgaatatgataaagatattgattctttccaaattaaagtatgagttaaatgtacttctgatgggaccataaattgtaacctatcaaaatatttaagtaaatttttacatattcattaacatgtagcaagaga

SEQ ID NO: 454319 - DNA, 556 bp, Homo sapiens
tttttacttcatttagccggagtgtgtctctattgtttgccaatgatctaaaggatatgttcgtttagtattttgacaaatacctctaattgtcytccaatcggaggtagcatttgtatttctacccacaattggaagcgtctgggcttcatttttattttgatttgttttaaatagttctggtgtgttatgaacagagagtctcctctattcaatcttcctaatacaataccacttcaatttcccgatagagtgatgttgcttacttccaagtgagagaaatgctgcttgctgtagtgggttggccaacaaataaattatttattattgccaaaaaaacaactggtttatattaacttgccagaggcataactgataaaatgatctagtgtcaaattaatttcatttataagtgaagtgattcgtaaggatgtgagccacaaacttggacactaagtattccaaaaccaagcattcttacatgatcaccttagcaactgtaaataatgacatcaccagcaaataccagcaaaagaatggacaggcatgatacaaa

SEQ ID NO: 454320 - DNA, 556 bp, Homo sapiens
tttttacttcatttagccggagtgtgtctctattgtttgccaatgatctaaaggatatgttcgtttagtattttgacaaatacctctaattgtcttccaatcggaggtagcatttgtatttctacccacaattggaagcgtctgggcttcatttttattttgatttgytttaaatagttctggtgtgttatgaacagagagtctcctctattcaatcttcctaatacaataccacttcaatttcccgatagagtgatgttgcttacttccaagtgagagaaatgctgcttgctgtagtgggttggccaacaaataaattatttattattgccaaaaaaacaactggtttatattaacttgccagaggcataactgataaaatgatctagtgtcaaattaatttcatttataagtgaagtgattcgtaaggatgtgagccacaaacttggacactaagtattccaaaaccaagcattcttacatgatcaccttagcaactgtaaataatgacatcaccagcaaataccagcaaaagaatggacaggcatgatacaaa

SEQ ID NO: 454321 - DNA, 556 bp, Homo sapiens
tttttacttcatttagccggagtgtgtctctattgtttgccaatgatctaaaggatatgttcgtttagtattttgacaaatacctctaattgtcttccaatcggaggtagcatttgtatttctacccacaattggaagcgtctgggcttcatttttattttgatttgttttaaatagttctggtgtgttatgaacagagagtctcctctattcaatcttcctaatacaataccacttcaatttcccgatagagtgatgttgcttacttccaagtgagagaaatgctgcttgctrtagtgggttggccaacaaataaattatttattattgccaaaaaaacaactggtttatattaacttgccagaggcataactgataaaatgatctagtgtcaaattaatttcatttataagtgaagtgattcgtaaggatgtgagccacaaacttggacactaagtattccaaaaccaagcattcttacatgatcaccttagcaactgtaaataatgacatcaccagcaaataccagcaaaagaatggacaggcatgatacaaa

SEQ ID NO: 454322 - DNA, 556 bp, Homo sapiens
tttttacttcatttagccggagtgtgtctctattgtttgccaatgatctaaaggatatgttcgtttagtattttgacaaatacctctaattgtcttccaatcggaggtagcatttgtatttctacccacaattggaagcgtctgggcttcatttttattttgatttgttttaaatagttctggtgtgttatgaacagagagtctcctctattcaatcttcctaatacaataccacttcaatttcccgatagagtgatgttgcttacttccaagtgagagaaatgctgcttgctgtagtgggttggccaacaaataamttatttattattgccaaaaaaacaactggtttatattaacttgccagaggcataactgataaaatgatctagtgtcaaattaatttcatttataagtgaagtgattcgtaaggatgtgagccacaaacttggacactaagtattccaaaaccaagcattcttacatgatcaccttagcaactgtaaataatgacatcaccagcaaataccagcaaaagaatggacaggcatgatacaaa

SEQ ID NO: 454323 - DNA, 555 bp, Homo sapiens
cctttcaaagaaattgtctttgtggcctctttgcagtagaaagcatttgatacattaaaaaatgtgctatttgttatactgaatatgtyaagagaagatttcagttgaagacacaggacaccaattaacacaacagttctgctaagaaaactcaagccttctctggtttcagcaagatgttggaaatcaaagtccaatggtaaaaggaacacttcatgttgaagaagaccatatggctagggagagaattgctacgaatcttctgaggtctttcaaaaaaaagcagctatcttttttactagcagacagtgaaggaaactatatatctaacatgaataatcatttatatatgtatatatataatgtcatcatatcccattcgttttaaactatattcccctttcttggttgcagagaggttgaaaagttaatatataataaccagaccaccacatctgtggctttctcttggttacttaatgtattcagtcgtggaaataaaattttcatggctatactaatctaccactaactagaaatgatgttcactagtgg

SEQ ID NO: 454324 - DNA, 555 bp, Homo sapiens
cctttcaaagaaattgtctttgtggcctctttgcagtagaaagcatttgatacattaaaaaatgtgctatttgttatactgaatatgttaagagaagatttcagttgaagacacagsacaccaattaacacaacagttctgctaagaaaactcaagccttctctggtttcagcaagatgttggaaatcaaagtccaatggtaaaaggaacacttcatgttgaagaagaccatatggctagggagagaattgctacgaatcttctgaggtctttcaaaaaaaagcagctatcttttttactagcagacagtgaaggaaactatatatctaacatgaataatcatttatatatgtatatatataatgtcatcatatcccattcgttttaaactatattcccctttcttggttgcagagaggttgaaaagttaatatataataaccagaccaccacatctgtggctttctcttggttacttaatgtattcagtcgtggaaataaaattttcatggctatactaatctaccactaactagaaatgatgttcactagtgg

SEQ ID NO: 454325 - DNA, 555 bp, Homo sapiens
cctttcaaagaaattgtctttgtggcctctttgcagtagaaagcatttgatacattaaaaaatgtgctatttgttatactgaatatgttaagagaagatttcagttgaagacacaggacaccaattaacacaacagttctgctaagaaaactcaagccttctctggtttcagcaagatgttggaaatcaaagtccaatggtaaaaggaacacttcatgttgaagaagaccatatggctagggagagaattgctacgaatcttctgaggtctttcaaaaaaaagcagctatcttttttactagcagacagkgaaggaaactatatatctaacatgaataatcatttatatatgtatatatataatgtcatcatatcccattcgttttaaactatattcccctttcttggttgcagagaggttgaaaagttaatatataataaccagaccaccacatctgtggctttctcttggttacttaatgtattcagtcgtggaaataaaattttcatggctatactaatctaccactaactagaaatgatgttcactagtgg

SEQ ID NO: 454326 - DNA, 555 bp, Homo sapiens
cctttcaaagaaattgtctttgtggcctctttgcagtagaaagcatttgatacattaaaaaatgtgctatttgttatactgaatatgttaagagaagatttcagttgaagacacaggacaccaattaacacaacagttctgctaagaaaactcaagccttctctggtttcagcaagatgttggaaatcaaagtccaatggtaaaaggaacacttcatgttgaagaagaccatatggctagggagagaattgctacgaatcttctgaggtctttcaaaaaaaagcagctatcttttttactagcagacagtgaaggaaactatatatctaacatgaataatcatttatatatgtatatatataatgtcatcatatcccattcgttttaaactatattcccctttcttggttgcagagaggttgaaaagttaatatataataaccagaccaccacatctgtggctttctcttggttacttaatgtattcagtcgtrgaaataaaattttcatggctatactaatctaccactaactagaaatgatgttcactagtgg

SEQ ID NO: 454327 - DNA, 580 bp, Homo sapiens
atagcaatgtggttgctttgtgagatggtttggctctgtgtctccacccaaatctcatgtcaaattgtaatcctcagtgttggaagagaggcctggtgggaggtggttgaatcatgggggcagatttcccccttgctgttctcatgatagagttctcacaagatctgcttgtttgaaagtgtatagcacctccttcttctctctctcttcctcctgctctggtcacrtgaagatatgcctccttccccttcgccttccgccatgatagtaagtttcctgaggcctccccagccatacttcctgtacatcctatgaaactgtgagttaattaaacctcttttttaaaaagaataaatcacttagtctcaggtagttttttatccagtgcaagaacagactaatacactttgcatattgcaagaactagcaaactcctaaacaagactaattcattaagctgaaaattcttttcatgcagttgtttgcttggtttacagcctagcacaaaaatgtcactgaagtatattttaaacggcaagatgtcttgttttaactgttggcaagaaataaaatatgccaa

SEQ ID NO: 454328 - DNA, 597 bp, Homo sapiens
gactatgaagggcgagcccaagaactgcaggaattaaactcaaaaagaacactattatgttagaaaatagggaactgattttttaccagtaattcctgaaaaataggtttctacctcatcagcatcaaaaagagataagcaaaaacaaaatcatcaaaaagagataaatgctttaaaaaagaaaagaataacacgtttacccacataattcccccaatttctttctacttccaaaattgagaagaggaggttactctgtttttaatctgtcaccagaaagaaagaagaaaagaaaagaatagccaatgtgcaacatgagtagcccaggtctttctttccctgtggaatgctgtgccyttcaaaactaaaatcctcaaaacagagtctctgaagatttgctaacagcacatggaagactttaaatgtaccccttatttctggatggttctttcagtcagttcttgcccgcaccctccgagggtcccactagcatgcaacttagcctgaacttgaaaattgaacagctggtccttgaacaacacaggtttgaactgtgcagatccacgttatacgtggattcttttcaaccagatgcag

SEQ ID NO: 454329 - DNA, 597 bp, Homo sapiens
gactatgaagggcgagcccaagaactgcaggaattaaactcaaaaagaacactattatgttagaaaatagggaactgattttttaccagtaattcctgaaaaataggtttctacctcatcagcatcaaaaagagataagcaaaaacaaaatcatcaaaaagagataaatgctttaaaaaagaaaagaataacacgtttacccacataattcccccaatttctttctacttccaaaattgagaagaggaggttactctgtttttaatctgtcaccagaaagaaagaagaaaagaaaagaatagccaatgtgcaacatgagtagcccaggtctttctttccctgtggaatgctgtgcccttcaaaactaaaatcctcaaaacagagtctctgaagatttgctaacagcacatggaagactttaaatgtaccccttatttctggatggttctttcagtcagttcttgcccgcaccctccgagrgtcccactagcatgcaacttagcctgaacttgaaaattgaacagctggtccttgaacaacacaggtttgaactgtgcagatccacgttatacgtggattcttttcaaccagatgcag

SEQ ID NO: 454330 - DNA, 593 bp, Homo sapiens
cattttaaaattaaaatggaagagaaaatgtgaatgaatcaagaaaactttaggaaaaaagaaaacgagggaagacttaccctactagttagtgaaattctactgcagagggccgggcatggtgactcatgtctgtaatctcagcactttgcgaggccaaggtaggagcatygcttgagcccaggagttcagggctgcagtgagctatgatcaggccactgcgcgccagcctgggcaacagagcgagaccctatcaaatccttaaatcaggctcaagaataaaggctcaataaatacaggctcaagaataaagaagtaaaacccagaaatagatccatacatatggatgatggagacagtttaggttagtgggaaaagggtagactgaatcttcagtagatagcgttggtacagctggctatccctctttaaaagataaatttatatataactatttacccaattgatagaaatcaatgaattccagatggattaaaagtctaattgtaaaatacaaagctgtacaacatagatgaaacgaaaacattatactaagtgacagaagccagttacaaaagaccacatgtaatatg

SEQ ID NO: 454331 - DNA, 593 bp, Homo sapiens
cattttaaaattaaaatggaagagaaaatgtgaatgaatcaagaaaactttaggaaaaaagaaaacgagggaagacttaccctactagttagtgaaattctactgcagagggccgggcatggtgactcatgtctgtaatctcagcactttgcgaggccaaggtaggagcattgcttgagcccaggagttcagggctgcagtgagctatgatcaggccactgcgcgccagcctgggcaacagagygagaccctatcaaatccttaaatcaggctcaagaataaaggctcaataaatacaggctcaagaataaagaagtaaaacccagaaatagatccatacatatggatgatggagacagtttaggttagtgggaaaagggtagactgaatcttcagtagatagcgttggtacagctggctatccctctttaaaagataaatttatatataactatttacccaattgatagaaatcaatgaattccagatggattaaaagtctaattgtaaaatacaaagctgtacaacatagatgaaacgaaaacattatactaagtgacagaagccagttacaaaagaccacatgtaatatg

SEQ ID NO: 454332 - DNA, 593 bp, Homo sapiens
cattttaaaattaaaatggaagagaaaatgtgaatgaatcaagaaaactttaggaaaaaagaaaacgagggaagacttaccctactagttagtgaaattctactgcagagggccgggcatggtgactcatgtctgtaatctcagcactttgcgaggccaaggtaggagcattgcttgagcccaggagttcagggctgcagtgagctatgatcaggccactgcgcgccagcctgggcaacagagcgagaccctatcaaatccttaaatcaggctcaagaataaaggctcaataaatacaggctcaagaataaagaagtaaaacccagaaatagatccatacatatggatgatggagacagtttaggttagtgggaaaagggtagactgaatcttcagtagatagcgttggtacagctggctatccctctttaaaagataaatttatatataactatttacccaattgatrgaaatcaatgaattccagatggattaaaagtctaattgtaaaatacaaagctgtacaacatagatgaaacgaaaacattatactaagtgacagaagccagttacaaaagaccacatgtaatatg

SEQ ID NO: 454333 - DNA, 593 bp, Homo sapiens
cattttaaaattaaaatggaagagaaaatgtgaatgaatcaagaaaactttaggaaaaaagaaaacgagggaagacttaccctactagttagtgaaattctactgcagagggccgggcatggtgactcatgtctgtaatctcagcactttgcgaggccaaggtaggagcattgcttgagcccaggagttcagggctgcagtgagctatgatcaggccactgcgcgccagcctgggcaacagagcgagaccctatcaaatccttaaatcaggctcaagaataaaggctcaataaatacaggctcaagaataaagaagtaaaacccagaaatagatccatacatatggatgatggagacagtttaggttagtgggaaaagggtagactgaatcttcagtagatagcgttggtacagctggctatccctctttaaaagataaatttatatataactatttacccaattgatagaaatcaatgaattccagatggattaaaagtctaattgtaaaatacaaagctgtacaacatagatraaacgaaaacattatactaagtgacagaagccagttacaaaagaccacatgtaatatg

SEQ ID NO: 454334 - DNA, 582 bp, Homo sapiens
cctttgtgtccacctcactccagggtaggaaaagtctgtttgtgggagagatgcctttacagtggtaacttttggggtcactgagaaatggcagcagcaaacaaggaagagagccygaggctgtctgtccctgcatagtgcccatctcctggccagtgagcaacccatcccaccagcacaatggtggttacaatatggaaccctgtgacttacaccatgcttgaaaagttaactcaaggcaatgtgtggaaagcttaaaatgaaattcagaatattaccaaagacaactatttggtattatcttgcaataaacacacttatttaagtatatttaacatattattaaaataaatatattaaaacagaaaatggttttataacagaataaaggaaaatgaatatttattgagcaccaattatgtaccaggtactttatgatcataaattcattgcatagtcacatcaatactgcaaagtggttatcaaccccatcttagaccaaaaaaatgcagtccaaataggccaggtaacccccacaagttcaaacatgtacagcagcagtccccaacgtttttggcacca

SEQ ID NO: 454335 - DNA, 599 bp, Homo sapiens
ctgctacatctagccaaaacttctgacaccaactgcaatgagaatatcaagcttcaaagtctaaggaaacagacgtcacaggtctggcctcaatacagacaccaattgtgagttttggggtcccccaccaccaccttcgcttcagaccaactggctacaaattcaggggtttctatgaccacccttaggcttgataatctgctaggacaactcaaagaattcagacaaacactatacttatgattacagctgtattatagcaaaagaatataaattagaagcagaggcatataggatgagttctgggaggattccagatataaagttttcatcatcgtcaaggatgccttacactcccattatcaaaatgtaacaaaacactcccagtactgccaacctgggaaactcacctgaactttagtgtccagagtgattattgcggttttcttacataggcatgacttamtcattgaccacatagctgaactcaacttccagcaccctcttcttgtctctctggaggtcagacttatatcctgtggcccaaaggcccaattctgtaatcacacagttggtctttctggaatggcgatcccacc

SEQ ID NO: 454336 - DNA, 516 bp, Homo sapiens
attccctatctcagcagaacctagagtcactcttgattcctcatcaccttcacctttcacattcatttagacatcaagttmtagctgttctccctcataaatatatctcaaaacaccatttttctccatcttaactgccactaccttgaataatcctattaacccaccatccattcttgcccgaaatcacaccatggccccctaataggctttatattttctaatctttctgctctcagatcctttctgtgtgctacagccagaaagatctttctgaactgcaaacctaatcattatgaggtttaaaaccaatcagtctgttccattgcttttaggatagaatccagtctccttaacaggtctaatcagatccttgatgatctggtcctgcttagctcacagccattatcatcttcaccttcaattacagccctaaaaacattctttcagtgccttaaaggtagcttgcactctctcctctgggccttcacacaggacattccctttatcaaaaaa

SEQ ID NO: 454337 - DNA, 516 bp, Homo sapiens
attccctatctcagcagaacctagagtcactcttgattcctcatcaccttcacctttcacattcatttagacatcaagttctagctgttctccctcataaatatatctcaaaacaccatttttctccatcttaactgccactaccttgaataatcctattaacccaccatccrttcttgcccgaaatcacaccatggccccctaataggctttatattttctaatctttctgctctcagatcctttctgtgtgctacagccagaaagatctttctgaactgcaaacctaatcattatgaggtttaaaaccaatcagtctgttccattgcttttaggatagaatccagtctccttaacaggtctaatcagatccttgatgatctggtcctgcttagctcacagccattatcatcttcaccttcaattacagccctaaaaacattctttcagtgccttaaaggtagcttgcactctctcctctgggccttcacacaggacattccctttatcaaaaaa

SEQ ID NO: 454338 - DNA, 516 bp, Homo sapiens
attccctatctcagcagaacctagagtcactcttgattcctcatcaccttcacctttcacattcatttagacatcaagttctagctgttctccctcataaatatatctcaaaacaccatttttctccatcttaactgccactaccttgaataatcctattaacccaccatccattcttgcccgaaatcacaccatggccccctaataggctttatwttttctaatctttctgctctcagatcctttctgtgtgctacagccagaaagatctttctgaactgcaaacctaatcattatgaggtttaaaaccaatcagtctgttccattgcttttaggatagaatccagtctccttaacaggtctaatcagatccttgatgatctggtcctgcttagctcacagccattatcatcttcaccttcaattacagccctaaaaacattctttcagtgccttaaaggtagcttgcactctctcctctgggccttcacacaggacattccctttatcaaaaaa

SEQ ID NO: 454339 - DNA, 558 bp, Homo sapiens
tttcaaatgataacatgtagcaatcctggaagtcagatcaccctcattctgtatgggtttgtcattgttgcaggtcattgctgttgctcttcgtgtttgtttagcaactttcctggactaattctgtaaagcctttattctttttgtgtgtagccctgaagtctctgctgagtatgataatgattgaacagagattccttaaattccttgaaccagcaagcctcccagcctttgccaaggagctctgggtatgagctacagcatgccttttatgctgcatcagtatacgaatctgccttagacttcactttctatttgcacagagcttcaaagtaaaccagatgtgagagactaargttttcctgggtctttcctgagcttgtgcacagccctgcacaggcatgtagtcttctacattcccaggaataggcaagagcttttcaaggtgccctgtcgataacttattcccatgtttttttttttcttttaagtcttttgatcagcctcctgtgtatcccaacttgtatccccatctcaggttgttgtgatgtcaaacaa

SEQ ID NO: 454340 - DNA, 558 bp, Homo sapiens
tttcaaatgataacatgtagcaatcctggaagtcagatcaccctcattctgtatgggtttgtcattgttgcaggtcattgctgttgctcttcgtgtttgtttagcaactttcctggactaattctgtaaagcctttattctttttgtgtgtagccctgaagtctctgctgagtatgataatgattgaacagagattccttaaattccttgaaccagcaagcctcccagcctttgccaaggagctctgggtatgagctacagcatgccttttatgctgcatcagtatacgaatctgccttagacttcactttctatttgcacagagcttcaaagtaaaccagatgtgagagactaaagttttcctgggtctttcctgagcttgtgcacagccctgcacaggcatgtagtcttctasattcccaggaataggcaagagcttttcaaggtgccctgtcgataacttattcccatgtttttttttttcttttaagtcttttgatcagcctcctgtgtatcccaacttgtatccccatctcaggttgttgtgatgtcaaacaa

SEQ ID NO: 454341 - DNA, 646 bp, Homo sapiens
tttggtcaggttgctgccaaatacttctcagctgtttatgtgtccaataccattyaacaaggcgatgtttgctctaggcacaattcttggcctttgtgacaaacacaaagcaaattaatcatgttttctgggctgaaggagcttgtactctagcaaggaagataaaacattcatgtaaataattgtaacacaaggtcaattgcactataggctgcaaacacggcatgaatgaaacacggaagagtgttggaaaagtcgtgctcacttctggtgaggggcatccggagagttacaggtagtaaaggataggtttgatttaggtagccaaaaagggtggagagaggaagtgggaagaagaggggaacagaaaagagtggggatgtagttggggacttagaagaatcacacctggcaagactgggaatggaaaaacgtggagtccagttagggaaaagcaagtgataggctacagatcactctaagggaatcagagacaagtgaaggagtaagtaatacagagagatgggctggttggttaaaaggctctgattaaaactgagcttctcttgcctgatatctattttcttcttccagatttgtttgtccccacgccactgtagtgcactcataagctgctggttttgtt

SEQ ID NO: 454342 - DNA, 585 bp, Homo sapiens
tctggcaaaatgcagcataaaccattttccatgtaaaataagacactgccctctctctgttccctgcaaccctctcaaattctcccttgccattactaggcaaactcagtttttaaaaacccactcataattatgccacacagctaagcttattcctctaactccccagaaaataaccaccctgaaaccttagccaggtttctctgccatactgaacttttacatggcctttttttgaactaaagrtcattaaaagtttttttaaatgactgaactgttcaaaaagaagaaagaaaaataagtcaagctattagtgatttttgaagagcagtaatgaaggcaacctcaactttttgtccatgtgaaaaaattttctcatttctctgaacagcttttaatcttgttttcttctcatagacataattaatgggatccctacagaaaaagacaacaaaaacaaagctaaaaatgtttgtaataatcatgacacagaaaattttactgggttttaaatagtagaatggacagctaaagtattccagttatagaacctgcagaaggggaaataattgtagaaaaacaaaa

SEQ ID NO: 454343 - DNA, 585 bp, Homo sapiens
tctggcaaaatgcagcataaaccattttccatgtaaaataagacactgccctctctctgttccctgcaaccctctcaaattctcccttgccattactaggcaaactcagtttttaaaaacccactcataattatgccacacagctaagcttattcctctaactccccagaaaataaccaccctgaaaccttagccaggtttctctgccatactgaacttttacatggcctttttttgaactaaaggtcattaaaagtttttttaaatgactgaactgttcaaaaagaagaaagaaaaataagtcaagctattagtgatttttgaagagcagtaatgaaggcaacctcaactttttgtccaygtgaaaaaattttctcatttctctgaacagcttttaatcttgttttcttctcatagacataattaatgggatccctacagaaaaagacaacaaaaacaaagctaaaaatgtttgtaataatcatgacacagaaaattttactgggttttaaatagtagaatggacagctaaagtattccagttatagaacctgcagaaggggaaataattgtagaaaaacaaaa

SEQ ID NO: 454344 - DNA, 585 bp, Homo sapiens
tctggcaaaatgcagcataaaccattttccatgtaaaataagacactgccctctctctgttccctgcaaccctctcaaattctcccttgccattactaggcaaactcagtttttaaaaacccactcataattatgccacacagctaagcttattcctctaactccccagaaaataaccaccctgaaaccttagccaggtttctctgccatactgaacttttacatggcctttttttgaactaaaggtcattaaaagtttttttaaatgactgaactgttcaaaaagaagaaagaaaaataagtcaagctattagtgatttttgaagagcagtaatgaaggcaacctcaactttttgtccatgtgaaaaaattttctcatttctctgaacagcttttaatcttgttttcttctcatagacataattaatgggatccctacagaaaaagacaacaaaaacaaagctaaaaatgtttgtaataatcatgacacagaaaattttactgggttttaaatagtagaatggacagctaaagtattccagttatagaayctgcagaaggggaaataattgtagaaaaacaaaa

SEQ ID NO: 454345 - DNA, 614 bp, Homo sapiens
catgtaaacttggttctgccaattagatgcattttkcttgagcttttttaaaggcagaagggaggaatgcaccatccctctgcaactgtatggacccacaagaaagctctaatgggtgagaaggtttgcagtgggcaaattttataatccactgtcttgtcaccagttccatggatatgggtgctggccccagttctggtagcagtagcagcagcaactgcctaatcctagagtcacatcaacaatggttaaaattgaagtaaaagttccaacagaataaaacctgtcttctacatgtataattattttattgacaacttacttctatattgaattctttcatgtttggaaaacctagagcactttctattccctagattaaagcccagctgacacatgtacatgaaacacttgtacatgtactcactggaacattgtaataacttcaaaacaacaattacttacctgcctagcaacaggggaatggctgaatacattatggtgcattcgtactatgggatgccacagttcaaacaagtaaagtaaaactatgcatactgacatgaaaaaaactccaaagcatattggtcagtttttaagaaaggatgttacat

SEQ ID NO: 454346 - DNA, 573 bp, Homo sapiens
ctttaagtacaagcttttggcttcagagttcttgctagtattactaatggctwttgcacaaacctttgcaattagaaactggaaaagtgctggtgttcttaggactctctataaggaaagcaatggtgtcatgttgaagagatgtctgtttcagacaaattttgacagttactacctgggtaatcttgtacaaattgtataatctctcagagccttgggacagtgaagtctgttactgtgattggcacccaataagcactcacaggatggcagttactaccattatttcttcccaatgtcctttcatggagaggtagaaaggggttagtgaaaaatgcatgggcttagttgaaaaataaatattgccctgttgaatttctgcctaaagaatatttctattaccccaaacactttttctgaatggtttcctgtctccaccttaaatatctccccatgcaaaggaggttcaaggggtttatgagcatacacactatttgctatttatttgtcacataaataatgggaatttgaaaattgaagtctaatgaattaggaataattaattcctattat

SEQ ID NO: 454347 - DNA, 493 bp, Homo sapiens
atttttcttgagcttttttaaaggcagaagggaggaatgcaccatccctctgcaactgtatggacccacaagaaagctctaatgggtgagaaggtttgcagtgggcaaattttataatccactgtcttgtcaccagttccatggatatgggtgctggccccagttctggtagcagtagcagcagcaactgcctaatcytagagtcacatcaacaatggttaaaattgaagtaaaagttccaacagaataaaacctgtcttctacatgtataattattttattgacaacttacttctatattgaattctttcatgtttggaaaacctagagcactttctattccctagattaaagcccagctgacacatgtacatgaaacacttgtacatgtactcactggaacattgtaataacttcaaaacaacaattacttacctgcctagcaacaggggaatggctgaatacattatggtgcattcgtactatgggatgc

SEQ ID NO: 454348 - DNA, 614 bp, Homo sapiens
catgtaaacttggttctgccaattagatgcatttttcttgagcttttttaaaggcagaagggaggaatgcaccatccctctgcaactgtatggacccacaagaaagctctaatgggtgagaaggtttgcagtgggcaaattttataatccactgtcttgtcaccagttccatggatatgggtgctggccccagttctggtagcagtagcagcagcaactgcctaatcctagagtcacatcaacaatggttaaaattgaagtmaaagttccaacagaataaaacctgtcttctacatgtataattattttattgacaacttacttctatattgaattctttcatgtttggaaaacctagagcactttctattccctagattaaagcccagctgacacatgtacatgaaacacttgtacatgtactcactggaacattgtaataacttcaaaacaacaattacttacctgcctagcaacaggggaatggctgaatacattatggtgcattcgtactatgggatgccacagttcaaacaagtaaagtaaaactatgcatactgacatgaaaaaaactccaaagcatattggtcagtttttaagaaaggatgttacat

SEQ ID NO: 454349 - DNA, 609 bp, Homo sapiens
ataacaagttagctggcactatgaggaaccaactggccaagttcagaatgtgacattttctacagaaacaacccagtttatcttataaactaacggcataaataagagggggaaatggtgtgtagctataagaatcaacggccgggtgaggtggctcatgcctgtaatcccagcacttcgggaggcagaggcagatggatcacctgaggtcaggagtttgagaccagcctgaccaacatggagaaaccccgtctctatgaaaaatacaaawttagccaggcgtggtggtgcatgcctgtaatcccagctactcgggaggctgaggcaggagaatcacttgaaccccagagaaggaggttgtggtgagccaaggttatgccattgcactccagcctgagcaacaagagcgaaactccatatcaaaaaaaaaaaaaaaaaaagaataaaaagacctaacatattaattaagtgcagtatgtggatctggtgtaaaaactgattaaaaaaaaactataaaaagaggtttctgagacaatctgggaaattttaatgtagtaaggttttaaatgaaattaaagaaattattgttgattttattacctgtgataa

SEQ ID NO: 454350 - DNA, 479 bp, Homo sapiens
atggctatgttccaataaaactttatttacaaaagcaagcaacagactagttttgaaccaccagccgtagttagccaacccctcatgcagatacttaagtagtttggctgcttgctaaaaactctacaggcaattccctaaatccatatcttctctaattttacctgcccagtattagttctctaagttttgcattaaagatgacagagaatgaacttcgttatataagtttgtagagcctatttatttaagtctttagtggatgaaaaggcataggatgtcagatttaatatttcttgatggaaagaagaaaaaaaaactagaaatgatatctccaattgcacactcwtcaaaagcagttgagaagacatggaggaagagaatcagggagaaaagacaaaaagctgaattaaaaaggggtaaaaagaagagaaatggaaacgtgaagagaaataatccatctgtgagagaaaattgaa

SEQ ID NO: 454351 - DNA, 479 bp, Homo sapiens
atggctatgttccaataaaactttatttacaaaagcaagcaacagactagttttgaaccaccagccgtagttagccaacccctcatgcagatacttaagtagtttggctgcttgctaaaaactctacaggcaattccctaaatccatatcttctctaattttacctgcccagtattagttctctaagttttgcattaaagatgacagagaatgaacttcgttatataagtttgtagagcctatttatttaagtctttagtggatgaaaaggcataggatgtcagatttaatatttcttgatggaaagaagaaaaaaaaactagaaatgatatctccaattgcacactcttcaaaagcarttgagaagacatggaggaagagaatcagggagaaaagacaaaaagctgaattaaaaaggggtaaaaagaagagaaatggaaacgtgaagagaaataatccatctgtgagagaaaattgaa

SEQ ID NO: 454352 - DNA, 546 bp, Homo sapiens
ggaatcaggggtaataagatcacagaaatataattttttcacctattagcgaaattcactctgtcattgcattatggttatacattcaagagtccatctacattgaaagcaatttgaagcaaaaataagtctttttcatccttctaaacccagtactcattaaagtagcttcctaagagtgaacactcagtgaagtcacgttaaattgaattgtttcttttcaatggtaaaaataaaaattttcaaaatgtgggaagatgtcaattcactggagtgaagatcaagaacactttgtccctgcaaactctcagagcttgccatctattttccatgcctccaatctaaagctatccttcatttccattcattgtttgaattcctatactcatcaatrgagttcaaagcaaatggtcaaggctttgctctaatcactgcagttataagatgcattgtttgacccggatcccagcctgagattcagactgcagccactataagtcttttccagttgatatgttgcctgagaggagactgactgaacatgca

SEQ ID NO: 454353 - DNA, 424 bp, Homo sapiens
cagcaacagatgttgaagtttttcaaatgttttttcttttcttatttttttttttgagacagggtctcactctgttgcccaggctggaaagcagtggtgcaattgcggctcaatgcagccttgacttcccaggctcaggtgatcctcccaccttagcctccccagtagctgggactacaggcgtataccaccatgcctggctaatttttttttttttttttgtagagatggggtttcrtcatgttgcccaggctggtctcactcttgaattgaaggcatctgcccactttggcctcccaaagtgctgggattacaggaatgagccactgtgcctggcctcaaatgttttttctgcatctattaagatgaacaaataatatttcttcttaagtttgttaacatggccatttatatcacttgtttt

SEQ ID NO: 454354 - DNA, 535 bp, Homo sapiens
tgcgcttctattcctacatttttgagattaaaaaaaatcagcaacagatgttgaagtttttcaaatgttttttcttttcttatttttttttttgagacagggtctcactctgttgcccaggctggaaagcagtggtgcaattgcggctcaatgcagccttgacttcccaggctcaggtgatcctcccaccttagcctccccagtagctgggactacaggcgtataccaccatgcctggctaatttttttttttttttttgtagagatggggtttcatcatgttgcccaggctggtctcactcttgrattgaaggcatctgcccactttggcctcccaaagtgctgggattacaggaatgagccactgtgcctggcctcaaatgttttttctgcatctattaagatgaacaaataatatttcttcttaagtttgttaacatggccatttatatcacttgttttttaatgttgaattagccttgcactcttggaacaaacctcactggttgtgatgtattcttcttatatattgctg

SEQ ID NO: 454355 - DNA, 673 bp, Homo sapiens
aaaaaaaaaaaaaaaaaagccccagatactgtgctatgcgtcagctggttcatacaattttaccacattcatgatatttttgttaataagatttagtatcacagaatgagacagaactagaaggggcctttaatgatcatttaatttaatctcctcatttttagtggaagaaactaggcaccagaaagstttagtgacttaccaaaggtcacacaatgagttaggaacagggtcccagtctgctgactcattctgggataccacaatatagagttaacttttgctgcatgtcaaactgccccagtgttaatggcttaaattgcttatttaggtaaaaattctgtaggttagcaattggcctgggctcagctgggtggttcttctggtctttgctgggctgggctgatcttggctgggcttactcatgtctctgcagtcaggtagtatgttggctggggctggcatgtgatgatggcatcatctgaaattactgagataatagaggcttctcccatgtgatccctcatcttccaaaatgctagcccaggtttgccctcatggcagttacagggttccaagagcaacaagggagaaatctctcaatgtgcaatcattattttaaagacactacttatgtcatgattgctaatgtcccattggtcaaagtaagtca

SEQ ID NO: 454356 - DNA, 673 bp, Homo sapiens
aaaaaaaaaaaaaaaaaagccccagatactgtgctatgcgtcagctggttcatacaattttaccacattcatgatatttttgttaataagatttagtatcacagaatgagacagaactagaaggggcctttaatgatcatttaatttaatctcctcatttttagtggaagaaactaggcaccagaaaggtttagtgacttaccaaaggtcacacaatgagttaggaacagggtcccagtctgctgactcattctgggataccacaatatagagttaacttttgctgcatgtcaaactgccccagtgttaatggcttaaattgcttatttaggtaaaaattctgtaggttagcaattggcctgggctcagctgggtggttcttctggtctttgctgggctgggctgatcttggctgggcttactcatgtctctgcagtcaggtagtatgttggctggggctggcatgtgatgatggcatcatctgaaattactgagataatagaggcttctcccatgtgatccctcatcttccaaaatgctagcccaggtttgccctcatggcagttacagggttccaagagcaacaagggagaaatctctcaatgtgcaatcattwttttaaagacactacttatgtcatgattgctaatgtcccattggtcaaagtaagtca

SEQ ID NO: 454357 - DNA, 513 bp, Homo sapiens
gtctctcgggaatgggaggaggggcagtaagtgtggggtagggaggaggatggcgaggctcgatgtggagrttgaacactgggtgggagatagggatcggaaggtgaggtttgacttggtgaggaaggtggaattttgagtgctctgtctcgtccctctctccctgccttgccaaaaacattctctcaatcacaccacccagcgaagcaggaggctggctccatactgccgggttggtgtttagggagggaaacccagagtaaaaggggagctttctccccggggttagcggcggagccacgactaatgaactcgaagcacgaagaacgaggaagggcgggacgtgagcggaaccgagccacaaggccagcgcctgggatgggtacttaggagaggcaggaaggcgggtctgaaatcctgagggtgtggagagatggggagggctcggtctgcaggtggaggtgggggcaggggcgaagcctggggcgttagcagccgggaggaccaggctcc

SEQ ID NO: 454358 - DNA, 546 bp, Homo sapiens
ttgttcaggaaagcctcttaccttactgatactaactgataacatttcctcattttggaattcacccgtttccctstatcacctcctgagtgtccatggctggctcttcctcttcttcctcactaaagtttagaatgtcatctttcacatgcagatgtcctgaccatcccataaaatatccccttccatatgctctatcatgccacctcgctgatctcttccattcgtgtattgatttgtttctatctgtctctcacatcagactgtacatcccataaggacagagactgtgctgttttatccactaccttatatacccagcgcttagcaccatgcttgaaagaatgtctcaggtgaggaaatcagctcagagagaagtgacttgcttgaagccacacagcaggcagccaaggtgagcctggcccctggttgccactctccccaggtggatgctctttaatgtctccgtttaatcccgggccaatggtcaaggtttgggaaagattttcaatgctgctgttgtcgtcaggccttcggggaataaga

SEQ ID NO: 454359 - DNA, 587 bp, Homo sapiens
  misc_feature (1)...(587): n = A,T,C or G
agaaaacgtgaccccccaaggccacacagccttgactttgggtgaattgtttaccstatctgggtaccactttccttatctggaaatacaaagtgtagagacctgtggtagctcccttgggtgggtgttaggaagacacaagaaaggaggtcccttagcannnnnnnnnnnnnnnnnnnnnnnnnnnnnnnnnnnnnnnnnnnnnnnnnnnnnnnnnnnnnnnnnnnnnnnnnnnnnnnnnnnnnnnnnnnnnnnnnnnnttctgcttctcttccctgtttcacaaatctgtgatcaatgcacaaattgatcacagtggagcaaagacagacttctgagagccctttgcaaattgggactctgaggctgtcaccgtgtgcccagtggagtgaggcaggcgggagattcagaggcagatcacagtcccctggaaccggcctggggagagcaggccagtgatgatctcagcctgacgccttccattatggggtgtctcacccagcccctcctggaaagcgatggtggttaatatcaggcaacccatgcagctttgtcatacctgtgtatcatatttgtagtttctcttg

SEQ ID NO: 454360 - DNA, 661 bp, Homo sapiens
ctgctgggaccagaacccaggtttcattttttcctaatcagattgtgcccaaactaataatagttatccagatagagctgtgcgaaactagcaattttcacttcacaggcatttgtttgggaaaatcacagtttttcacctttagaacctgccattttgtttcacaaaaaactcaaggtgaaaagaaatgtaggtgagcattttcaatttttcatgagctggattttggcagaggtggcagctctctccaatcttgtttcatggtaaaagaagccaccatggggctggaccagggaagaagttggggtgctggaagacgatgaaagggggtgtgcggagtctaagaggtgcccatcagtgtcctccaagggagtctctggggattgggtgggacaggggtagcaccaagctctaggcaagcaaagwggggcacaggaccctgggacaaatgtctgtctcctttgatgccttgacctggggtgtctgggaaagagtgaagtgtttatcccctcgtttatgaaggtctctgcactcaagtctcagcaattggccataggcatctgggtcacgcctccttggagttttaaaaatgcagtgttcatttgttcagccacttgccaagtttctcttttctatctttagtgtagtcatgatagatact

SEQ ID NO: 454361 - DNA, 607 bp, Homo sapiens
ttgacatttattttttattacagcatggtgttcatttatggagctatataaatcgcataagaataattgaagagcacatgtaaacctgctcctttgccccttttgggtttcctccctcatgacttaacccgaatgtcaggaagcagctgtcagtcatgagtggcagtgtttaatcacctattgtttctcccactaacctgccccctcaaagcccatcgcaggtggccttcatcaaaggtaagtaatgagaaccacagagctttgtcatcagtgataattagggtgaccatttcatgtttggaaaattttaacatacattttaaaatgacagagtaaaaaaaatagtcatctttttgttcctttgtaattacaactataacctcgacaaggcaacctgcaatgagagcattyttgctcaagaagggatataagaataactctctggagctaactcttttaaaacgaccttgaataatatctgcatatggcttttcccgaagttagtgaaatttccacatgtgtactcaagtacggagcagtttagaatacattcccttatcgggaactatttccccttccctttgcctatgaaataaatgttttgtgc

SEQ ID NO: 454362 - DNA, 669 bp, Homo sapiens
gtcttataaacaaaacaaacaaaaaccccaaaatactctgactatagaatttccattgaggtgagagaaagtcagactggggaaagggtaaagctgaaaagtcatattgatgttcattctttgccaaatgcaccactcccttcctgttgtagcttcctaatgcagccagatgatcataatatcttccaacaagatctaaactaatcccatgctgaccatcgttccattatttccttacataaatacaaggatataggaaagagcaaatattttatgcaaggtaggttatgtggatcaagtaggaaaaaaggaacaaatgcatatgcttgaaaaataggccttttgtgccaattagaccccaattgttgctgtagaaactgtcctatattttataaaatatgagttaaagagtagaaaattgaaaatggagtgctgagtcatttaatatatttcatctggaaactttcaccaaaatttgagagtttttttgtttttttgttttktttttttcccacactctcatagcttttggagatttagctgtagcaggtcatgggctaatttatgtaaatggaatttgtactcatacaaaaaaatgctttttgctttttaatagctgatcagaagagtactcttattatgtgtaaaagcatgagttacccattgatt

SEQ ID NO: 454363 - DNA, 508 bp, Homo sapiens
tgtttcttactcaagtgaattgtagaattatagcaaggagttttaaaatatgtatctgtttttaaaatggaatcagggttagtgaatttcctaatgtaagttaggaagtccagctaagaggtaacataaaaacctcttagaaatgaagcatccaataatcagaaataataattgaaattagtttttaagaagatcagtctaatgaagaaccaaatattaaaggagggcrtgaaagagatgaaaataagcaatatagagtataagggcaagtcctcctccttcttttctcttttctaaaattcctccttatctttatattccactaccttacaaactgaatatataaattggacaatggaggataaaattcagaataaagatctaacaagtgtagttaatgaatagatttatctgaagctggtatgttagtcattttaaacaagtgctaaatctacttctgaatttcaacacaaacaaaataaagtatgatgaagttttgattcatatt

SEQ ID NO: 454364 - DNA, 520 bp, Homo sapiens
tatctcctccctggctgtctcctgagtctgaagacataatctttctttataagaagactatctgtagctttggaaaccaaaaccaactcagctattcctggtctagctgggttttgactggtttcatacatgatcctataatttgttatctcaattcctattgtggggttttcatgattaggagaaaaaaagtcatgtcttgggcaagtgacacaattcagtttttcctgttattatttttgatttggggtttttgttcactctattttttatttatttttwtttttatgttttgagatgctagagaatgtgtaggtaatcgcagggagacaaaccattgaccaataatttagcataggaggaggaatccacttctgaaaaattatctatgtgcccgtaaatgccatttatcagaaattggctaatggtattatgttaattaaagaagtgtcatgcatctggcttcatgcaaagaaggaagagagagagaaggaaaaaggaggaaaagaacaaaaacctc

SEQ ID NO: 454365 - DNA, 584 bp, Homo sapiens
tatattgcaacactaaatctaactttttggaaaacctctaatgtggctactctcactggcccaggaggaatattttcagaaatctagacaggaatcaaatcatgtatttcagctgaatgggatcgytctttcgcatatccatgagaagcttttaaaattgtactgaggctacactctactgactaaatatatgcactttttagtcttgactttggaatattaaaacaattccacttatacgattttttattacagtggctatatctaacaaccctggaaaaagagatcagactttcagaattcaaatggctcaatttgatgaaaatctatcgtaacagtttccataagcactaatgctagcactttcaggacttgaaaaactgacaaatcaagtcaagcacagttcttttttaaagacttaattgtatttttaattgacaaataataattgtaaaattccacttctggatatatgtccaaagaaattgaaatcagtatgccaagatatatctgtactcccacattcgctgtagcattatttacaatggcaaacagttctcttatggcctgatttctttgcggtt

SEQ ID NO: 454366 - DNA, 567 bp, Homo sapiens
atgttttattaattgaaaaaagagtgtttctaaaaggccagagtagcttgggagaggccaaagcagttttctttttcactgttaaaacactggaggcggttaaatttaagcaacagtttccttcccattgctatgtgtcttgtaatatcttcttgtgtctccatcagttcactggtgaataacwtcatattcctgaagttaagaagcctgccctgatgctcatgcagttactttgagcaatgaccaaacagagagaggaaggtaagtagtattgttttcatttctttaaaaacttcactaggaggaaaccccaaggtaacaatgacaacaacaaaaatctattgcaacataattgatagcaataaaaccttttttaaaaaataatcatttttgatattcatatttgtaatccccttttattatcttcaactttttcttgaaaagaccttaatatatttgaaataaattataatgtgtaatttgtctaaagctctgaaatatgtagaaactactaagtaaaacctttgagaagcaccagctgtttattacttctagcaaatcagttta

SEQ ID NO: 454367 - DNA, 624 bp, Homo sapiens
ctaccttgtaatgaaatcaaggcaaaaatcttatttgtctacctaatactgaaatcaaggcacataggagtactggcgaattatgaggtagagtggacatggtgcaaaaacctgaacttggtaggaaaccagtttatcaagccagagttatgcaacttgactgtagcccattaaggaagtccatgaamtggtgtttctttttgccttggagcctcagcatgtttattaaaaatatcagtacaagtcaataacctttgtgtgataacctttgtaaagtactcaaaaatgtcccggcccagtcaattcaaatttccttttcctttccttgtctccttcagctaaattcagttcaacacacatttatagagaatctttcattttttttagcctggtgctagatgctgaaaaccaaaaatcaagaaatctcatcccagtccttagggatgcctatgtttataggacataatataactatgggctacaatcttattaagataatactaagctcactgaattctgttcccagtttctagcaagagataaatataggaaaaaaattaaatgatatttttctcccatttttattcctcttatatatgagtcacaagacaatcttaatattag

SEQ ID NO: 454368 - DNA, 526 bp, Homo sapiens
cacacaccaccatgcctgactaatttttgtattgtttgtagtgatgaggtttcaccatgttgccgaggctggtctcaaactcctgagctcaagctacccacttgcctccgcctcccaaaatgctgggatcataggcgtgagctactgcacccagcccagtatttcaaaatgttactttatataaaccttcacaattaaataaaacatatacctgcaaatgttatttttccttttccaaaatcctggaaagtccttccagagtgcacataccatttaatcaattagacaaatctttttatcacatctccttaacttgttcaatgaaaaatacactgaaatattttcttcttgactccttgtattgagaaacgaamgaacttgacagagagagggagttttaaaagtcctttttgaatgagaatgggagaaatatatggtgtgtggagaggtggggagcatcccacataatgaatcatatgcagaatgtacaacagagaattcaatactgtgcttctaaaacctcaat

SEQ ID NO: 454369 - DNA, 570 bp, Homo sapiens
tatatcataatgtcaggagttgtcagaccctcagaactctccataatgtgagatcacaagcagagacaatttcattgtaacatttctgactacaaagtataaataccattcagttggcacattgtcatcacatcagaattttttyttcatccttatactttagatttgctgaggtatttaaatctataaagttagacaaagcagaataagaaaattaaaatttataatagaataacattgtcagaagaaaactatctttttgaaagaaaacataaaaaggaattttaaaataaagattacaaagatttttaaaaggcactgcatatattttcagttatgttttcatcaattctctccagagtacaaaaacatttctcagaacaatttaaaattgtagatataaaacaataaatcactcaacacaagatttaaaaatctcattgaaagccctgacagaatatttctttctcatgatgaagttaccaactgggagtattttactaattcttcagtttgttcatctgcctcactgcagaccattatggctcccataacagctattgtttttaa

SEQ ID NO: 454370 - DNA, 628 bp, Homo sapiens
gagggtgctggatccttacatcctattcaatatgctgcataatttactgcataatatactgcataatttatactgtacagtgatatagagtttatgctatatactatactttagaaattacaccagtcagtgggtgctgctgccccaggaaggaggcttacagctaggcaagactgctctctgtagtccaggacagtttcttgagaaggctaacagctgaggacagctcttctagcatctggagaaacaagtcccaaagtctcaaagggggatttatacagcttgtcacacattcactatagcattaaaatgaggaagattattttaatttctaacctaaattactcctattaagtctagattttyaaattctaccttctttgaaagtactgagtagctgcttttccttgtataagctacacatttcaatcatgatggagtgagtctactaatgtaactgaaagctggatgaacaagcccagtccactcctttctaagctttaaaagcattgctcttatgttttcttgaatgcattgctcttgtgttttcttgaatgcactggctaaatcttgaacatttattaattttttataccattgttgcaaagattgtaagaataagacatac

SEQ ID NO: 454371 - DNA, 499 bp, Homo sapiens
tcagtatgtccttcaggtgggagctaatcataattccaaaacaaacaaacacaaatgccatagtcccaagtgttgaaattccaaaagatcaaaatactgaaaatataattctaaaaaagtttaaaaaattgtatttacacttttaaaaggrgatttatttgagaaacataaaaacacaacaaaacacttcctaggccattttacataagaaaataggcaataataacatgcatatttttgcaagcattaacactttggcatactaatgacagttgcatgggtataacagttataagcagtcaagttgtattcatataaataggtcaaaagtgaaatatatactatagttggtaattacgtgtgtctagctttataactttggtcatatgaaacataatgacagacaacataaatcttgtcttggcgagactgttggaaaaccatgatgagatactgtcacaaatgtaatcacccaaagagtcaagatctcaagaaattg

SEQ ID NO: 454372 - DNA, 455 bp, Homo sapiens
taatgttccattgttatttccacaatataatttgttaatcaaagattatgttggttatatttttgtaaaakaatctttaattgttttgcttgaaaaactccaacttagattattcatttgaaaatgatcatcatgactaagaataaagtacttctaggctgcttggagatgtgtacagcatgtgactgtatgtgtaagtttttgtaactttctacacttctttaaaatcacctccttggtacaaaaaaaaatatatatatatatgtgagaaaactaacctgctgttcaggtgctgttctttaatcaacagaaatagtctggtaaaaaacttgctaagtttatataaatataataatacttttgtcattttaagcatgagtaatttgtgtaacaaaaaacataatttagccaatcatgcaattaatcttgtattgaaatctctgtgctgtggatgc

SEQ ID NO: 454373 - DNA, 599 bp, Homo sapiens
taagtttttgtaactttctacacttctttaaaatcacctccttggtacaaaaaaaaatatatatatatatgtgagaaaactaacctgctgttcaggtgctgttctttaatcaacagaaatagtctggtaaaaaacttgctaagtttatataaatataataatacttttgtcattttaagcatgagtaatttgtgtaacaaaaaacataatttagccaatcatgcaattaatcttgtattgaaatctctgtgctgtggatgcaaaggccaaggattctgccctcaaggagctcacagtctggcagaggtctcaaaaatacacataactggctgggtgtggggtctcaggcctgtaatcccagaactttgggaggccaaagtgggcggatcacgaggtcaggagatggagaccatccgggccaacatggtgaaaccccrtctctactaaaaatgcaaaaattagccagttgtggtggcagcgcctgtaatcccagctactcgggaggctgaggcaggagaatcgcttgaacccgggaggtggaggttgcagggggctaagatgacgccattgcactcaagcctggtgacagagtgagactc

SEQ ID NO: 454374 - DNA, 672 bp, Homo sapiens
gggagataaagcagatggcataaaagctgcaggatttatgcagtgtaggatcatatatggaaaggcgaggcaaatgtacccaaagtttcaattattgccatgtgagtgtgggagagaggctcaactstgaagagaggatggatttagcctactgatagcactgtgactgccacagagggagacagagcttgatactttggccaggattgctatttaggacctctcagtaacagagcgcctgatttgcagggcttttctatttccgatgccttgataactctggagtcatcacagcagaatttaggaggcagaagccccacagtttcaaattttgcctatgagttctagcatggtagactccaaaatttcctgtcccaaatactggtaatgtcccagaccctgcttccttattttcttcaaaggagtgtttggcaatatcctgagggcaggctgtgagataaaatgtacattatatcaaaaacttatttttaaagaccaaggagacttgattaatggtgagaaatttttcaagcctttctcccgccaatctctccacagcataggtgattattactaatttgaaaatgtcaatgaacaatttgcagcaaaaaaagtaagagaaacaggtaaaactagaaaaagatggattattacatcacaatttgggtactt

SEQ ID NO: 454375 - DNA, 508 bp, Homo sapiens
ttttttgtgatttttttttttttttttaagagagcgtctcactctgtcgcccaggctggaaggcagtgataccaacatggctcartgaagcctcagcctcctgggctcaagtgatcctctcacctaagcctcctgagtaggtgggaccacaggtgtgtgtcattgtgttcagctaattaaaaaaacaattgtagagatggggtctcaccatgttgcccaggctggtatcaaactcctgggctcaggcagtccttctgcctcagcatcccaaagttttttgggcctagccaaaaaagtttttcatgtacatgaaaaattacatctatctgtctctatgtctctatctttgtatttctatgtatctatatgcctatctgtctgtctataaacaggcataaggacaaatgccaatcatttggaaaagactgtcaataattattaggcaaatagaaatggcttgatataaaatcttcaggcttcagctcatttcaagccttggttccatatc

SEQ ID NO: 454376 - DNA, 597 bp, Homo sapiens
gtgggttgaaaaacgtcactgtattccaggaagaatacaatgaaaatacaatgaaaacatatctccatctgatcacagaataaaaaatattgaactacatagattaaaatgctttataagtatctaagttgacaaaagtaattggcctttcaaggagaaaaattcagttttgtcacatgttgtccaatgcaaaatgaatgccaaaaaaatattgaaagctgggcatggtggctcacgcctgtaatcccagcactttgagaggctaaggtgggaggatcacttgagcacaggagttcaagtctagcctctctctctaaaaaaaaaaaaaagcaggtggtcccagcaacttggaggctgaggcaagaggattgcttaagcccaggaggctgagcaagccatgattgtaccactgaactctagcctgggtaatggagtgagaccctatctcmaaaaaacaaaagggtataaaaagttctgtaacctaagaattttatcatcctatcattcagataatagaatggtaatttcagattttattaagaaaatattgtctacttttttgaaaaattattagtgataccattcaacagaatgagg

SEQ ID NO: 454377 - DNA, 505 bp, Homo sapiens
tagttctggaaatgattctgaaaatacctttcaaccagaggcaggtacsatgggctggaggcaggaaaaggctgctgaggatatcaaaatctgcacccaccctctacccatccacacagagccactgtcctccttacagcccggtgcatttatgctcctacaggcatcactatgtacttaaaggggcaaactcttaggcagagtaagagaaaaattacacccactgataatgaacataatttaattttctttgaaaattataattttaatatggctaaagtttggttatagacctgactgtgatttatcttgaaaaatatctagcaaaaggtcttttaatattagagattaattgaatgataaattcatttaaaattaaaatgaaattaacaaggaaatagcattcagtttgcaccaattcggcatacccaaacatagacaccatcaggtcagcttcattacaagagatgcacccagcactaccatcaacctcataagcagcaac

SEQ ID NO: 454378 - DNA, 505 bp, Homo sapiens
tagttctggaaatgattctgaaaatacctttcaaccagaggcaggtaccatgggctggaggcaggaaaaggctgctgaggatatcaaaatctgcacccaccctctacccatccacacagagccactgtcctccttacagcccggtgcatttatgctcctacaggcatcactatgtacttaaaggggcaaactcttaggcagagtaagagaaaaattacacccactgataatgaacataatttaattttctttgaaaattataattttaatatggctaaagtttggttatagwcctgactgtgatttatcttgaaaaatatctagcaaaaggtcttttaatattagagattaattgaatgataaattcatttaaaattaaaatgaaattaacaaggaaatagcattcagtttgcaccaattcggcatacccaaacatagacaccatcaggtcagcttcattacaagagatgcacccagcactaccatcaacctcataagcagcaac

SEQ ID NO: 454379 - DNA, 596 bp, Homo sapiens
tcttctaaaggggtaaatttgactctccaagggacattttttgttgtcaaaacttagaggtagaaagagaatttctggcatctagtgggtagaggccagggatgcagctaagcctcctactaagcatagaacagccccacagtggagaattatctgccccaaraagtccaataattgcaaggctgaaaacctttagactacaattaaaagatgggtaaagaaaaacatggcctcagctgtctgtaatcctagcactttgggaggctgaggcaagtggattacctgaggtcaggagtttgagactgcctgaccaacatgatgaaaccacatgttatatggttagtctctactaaaaatacaaaaaaaaaaaatagcttggcatagtggcagatgcctgtaatcccagctactcaggaggctgaggcaggagaattgcttgaacctgggaggcagaggttgcagtgagcctgttgtaccactgcactccagcctgggcaacaagagtgaaactccatttcaaaaagaaaagaaagaaaagaaaagaaaaaagaaaaagctggtctcaggaaaaacagataactccacatacacaatta

SEQ ID NO: 454380 - DNA, 596 bp, Homo sapiens
tcttctaaaggggtaaatttgactctccaagggacattttttgttgtcaaaacttagaggtagaaagagaatttctggcatctagtgggtagaggccagggatgcagctaagcctcctactaagcatagaacagccccacagtggagaattatctgccccaagaagtccaataattgcaaggctgaaaacctttagactacaattaaaagaygggtaaagaaaaacatggcctcagctgtctgtaatcctagcactttgggaggctgaggcaagtggattacctgaggtcaggagtttgagactgcctgaccaacatgatgaaaccacatgttatatggttagtctctactaaaaatacaaaaaaaaaaaatagcttggcatagtggcagatgcctgtaatcccagctactcaggaggctgaggcaggagaattgcttgaacctgggaggcagaggttgcagtgagcctgttgtaccactgcactccagcctgggcaacaagagtgaaactccatttcaaaaagaaaagaaagaaaagaaaagaaaaaagaaaaagctggtctcaggaaaaacagataactccacatacacaatta

SEQ ID NO: 454381 - DNA, 603 bp, Homo sapiens
agggacatgggtgaaggctgaattacacaggtgcatataatttactatcaaagttatcattttygcttggatggtgaatttttgtgtgtttgttatttaaataatagacaaacaggtaggcacattaattaagaaggccaagcatggatgaattgtgagcatataatatgaacagagggtatttgttaatctaattttgtgcttctgaaatccaatagtaagaaaattaaatgacataaactccacgacaacttggacaacttcccaagttgccattgatggcttgctcatctcatcttccccaagaatgactcagctgcttttcatagcatcagtcatatattgcaaaggagaagggttgatccttggttggttgtttgtccactcatttattactaatatgacttctcagaagattcaccctggaactagacctcagataaagcacctcctggcccagagtcaacatgcttgttattaggtcataacatcctcattttgagccagtcaagtaaatttcttcttcattatcccaggtcctcaggatgtcagggatactaagaagttctcacagtgcagaacatttggagctgctccatgctc

SEQ ID NO: 454382 - DNA, 603 bp, Homo sapiens
agggacatgggtgaaggctgaattacacaggtgcatataatttactatcaaagttatcattttcgcttggatggtgaatttttgtgtgtttgttatttaaataatagacaaacaggtaggcacattaattaagaaggccaagcatggatgaattgtgagcatataatatgaacagagggtatttgttaatctaattttgtgcttctgaaatccaatagtaagaaaattaaatgasataaactccacgacaacttggacaacttcccaagttgccattgatggcttgctcatctcatcttccccaagaatgactcagctgcttttcatagcatcagtcatatattgcaaaggagaagggttgatccttggttggttgtttgtccactcatttattactaatatgacttctcagaagattcaccctggaactagacctcagataaagcacctcctggcccagagtcaacatgcttgttattaggtcataacatcctcattttgagccagtcaagtaaatttcttcttcattatcccaggtcctcaggatgtcagggatactaagaagttctcacagtgcagaacatttggagctgctccatgctc

SEQ ID NO: 454383 - DNA, 504 bp, Homo sapiens
acccaagctgagcaagccacttactggccttagcagatattcagcttgtgtttctcaaataaaggatgatgagagtcaattccaacatgtaagattggtgatggcatgttggaaagagagaggctcagatcaaactttgggcttgagaagaaaagttatagagtgatgtctccagtgagggttgcagatcaggggtcagggtagacccaacagggcatctgggactctctgggagcaccctctcactcctctcactcaggctgccccattcctgttctctargttttaggtctgacaccactggcattttttccgatattttttttccactctcttggttgcttttcagcctcaccatccagtttgacataaaaaagcacattgcacctgttatgggacagtcactaaaagagctaatggctgctctcagtgcagcagttaagctgaaaatgcaaatacacctagaaacccggaagggaatgaggatcttatgttgaagaccga

SEQ ID NO: 454384 - DNA, 539 bp, Homo sapiens
ctttctgtatcccatattctgtaggctctagtgtactggaaaaatcagattacatgtgggcttggagaatgactgcaaggttttattgagtggtggaagtagctctcagtgagatggatgggggggccagcaaggggatggggtgggaagataggcttcagctggagtcggaccacccagtggccagctggcctccaactgcccccactgaattccatgaggtcctgctgttgatggcctgctggcgtctgctggtatcagtcagtgtgctyttctgctcctctccacgtccagccacttgtgtccatgcccactagggtcttgaagattttatgggcccaggatgtggggcatggtgggtcagagtgggcttagaaaatgcaacatttgggtgcaaaaccaggagtgcctgtcctcacttaggtccatgggcataggcctgagggtggagccctcaccagggaccccactcttctctacccagcacttccctgcccgcctctcgtatcaccatcatctcaatataaattgtttaaata

SEQ ID NO: 454385 - DNA, 565 bp, Homo sapiens
atggctctcccaagagactggagttgggagggaacatgtatggctctttgtctcattcactaccacctctccaccttcttcctgaataacacttcctcctccattgtattgggagatggaaaaggggaggggaaatcattacacatgtgactgtaccactagcctcctctgttggttgcttgctccctgtgtgtggcaggctctgcaggagggctgtcttatagggtgtttttgtgagtccttctggagcatctgcaagggttctccccacagcgctactcccagacatgggatgagcagtcagatttaacccttcagatactccttaagttcccaccttcattgacaccagccacagcttcttgatsatgaggtctcactgctcaacagaaaaccgttctaaacacaacactaggaagaatgtgcaagctggtcttccttcccagatgttgtctactattatgtctcaacatcctgctctatctctttaattccttttctttattaaacaataggctcagaagttaaacaatcaaatctactactgcagcagaacttctgctgc

SEQ ID NO: 454386 - DNA, 595 bp, Homo sapiens
ttcttttacacactgggtccaaccagaactttctcaggagactaaagaggtataaatagctcaaaatactacttaacctgaggggaaaattagaatccatataagaaacttaggcacattgaaggtatatggcactttctggctaccgagtcccattttccttaagaatgactcagctgcttgccatggaatgtgactgtcacagtcatggcaggaacagaatggagaaggaactgtgagttgtaagcaaagggagaagaattctgtttgtttactcatcyttgattgctgatgtggaatgtccaaaatgtactccaaagagctaaacctgaggtcctgcagtgcctgttcctatagtaccaattggaatgactaagtcatgaaatttttcctggattcatccagccagagcagtctctgtatttccttgatatctggggaccacaggaagccaagtctcctcaggatggggctcctgggactagtgactctcagggaggtgcccttgtgctgtaagggaagtgaccagatcatggtcttatagctaccatgtgtcatcacaggacaaatcctgtgcatatgaggactgtggact

SEQ ID NO: 454387 - DNA, 595 bp, Homo sapiens
ttcttttacacactgggtccaaccagaactttctcaggagactaaagaggtataaatagctcaaaatactacttaacctgaggggaaaattagaatccatataagaaacttaggcacattgaaggtatatggcactttctggctaccgagtcccattttccttaagaatgactcagctgcttgccatggaatgtgactgtcacagtcatggcaggaacagaatggagaaggaactgtgagttgtaagcaaagggagaagaattctgtttgtttactcatctttgattgctgatgtggaatgtccaaaatgtactccaaagagytaaacctgaggtcctgcagtgcctgttcctatagtaccaattggaatgactaagtcatgaaatttttcctggattcatccagccagagcagtctctgtatttccttgatatctggggaccacaggaagccaagtctcctcaggatggggctcctgggactagtgactctcagggaggtgcccttgtgctgtaagggaagtgaccagatcatggtcttatagctaccatgtgtcatcacaggacaaatcctgtgcatatgaggactgtggact

SEQ ID NO: 454388 - DNA, 383 bp, Homo sapiens
ggacaaatcctgtgcatatgaggactgtggacwcctgatctcaggaggaggagagtgagtgacaagggcaatcactaaggtagaaaggagattaatgagctctccaggtcttgtggggaggctttcaagacaggtagtcaagaatggggctggaagaaagcctaatagtcatccactgtgtttcataaaacagaggtaacacgatgtactgaaagtcattggaaaagatattttgattctttgaaacttgcccaaaatgtgtgatttattttcctttttaattctggctcctacctcttgcctcccctgctgccaacggctcagggttgcaatctatggaggaaaatggctgccatggaggaaaatggctgccatgtttgccc

SEQ ID NO: 454389 - DNA, 383 bp, Homo sapiens
ggacaaatcctgtgcatatgaggactgtggactcctgatctcaggaggaggagagtgagtgacaagggcaatcactaaggtagaaaggagattaatgagctctccaggtcttgtggggaggctttcaagacaggtagtcaagaatggggctggaagaaagcctaatagtcatccactgtgtttcataaaacagaggtaacacgatgtactgaaagtcattggaaaagatattttgattctttgaaacttgcccaaaatgtgtgatttattttcctttttaattctggctcctacctcttgcctcccctgctgccaayggctcagggttgcaatctatggaggaaaatggctgccatggaggaaaatggctgccatgtttgccc

SEQ ID NO: 454390 - DNA, 629 bp, Homo sapiens
taaatatctggagtgccttagggagagttaracatgaagaggttgtggatgcagggagaaaaatgagactgggattctatgaacaagtatcttatgtaagaagactggaaagaagaaaaaagtggaaatgagaaatgctgctggttttataaatggatataatcataaaatctaacatttacttagcacttatgatgagccaggcattgttctacgtgtcttacctacagtttctcaattaatcttcccaacaaccctttggggtaggtactcttagtctttcatgttacagttatggaaacataatcatcacatgttgccttcacttgccaaggtcatacagcagtctggatgcagagaccatgaacacaaccaccatgctatactgatttacttcgaaccaggaagtaaaattctttctaaattacttttttcagcctagctcaatgtgtttaacatcgctttttgaaatgtatacaactaagatcccaaaccatgtaagtcatagcttcaatatgatcctgtttgggtaagaaaggtgctgtcccagatgaaagtgcagtggtcaactaactatgcctctttaccccttattaaaaccatcactttgcacataaagcaacagtgat

SEQ ID NO: 454391 - DNA, 629 bp, Homo sapiens
taaatatctggagtgccttagggagagttaaacatgaagaggttgtggatgcagggagaaaaatgagactgggattctatgaayaagtatcttatgtaagaagactggaaagaagaaaaaagtggaaatgagaaatgctgctggttttataaatggatataatcataaaatctaacatttacttagcacttatgatgagccaggcattgttctacgtgtcttacctacagtttctcaattaatcttcccaacaaccctttggggtaggtactcttagtctttcatgttacagttatggaaacataatcatcacatgttgccttcacttgccaaggtcatacagcagtctggatgcagagaccatgaacacaaccaccatgctatactgatttacttcgaaccaggaagtaaaattctttctaaattacttttttcagcctagctcaatgtgtttaacatcgctttttgaaatgtatacaactaagatcccaaaccatgtaagtcatagcttcaatatgatcctgtttgggtaagaaaggtgctgtcccagatgaaagtgcagtggtcaactaactatgcctctttaccccttattaaaaccatcactttgcacataaagcaacagtgat

SEQ ID NO: 454392 - DNA, 595 bp, Homo sapiens
aactatgcctctttaccccttattaaaaccatcactttgcacataaagcaacagtgatatttcccactgatggtaaagtgttgaaatgagagtaaagcacaaatcatagccaaatctaagccaggatattcctaaaataaaactaaaaaatcaaaacgacatcgtagtattccatttctatgtatgcaccccctcaggccccagttgctaccaggaccactcgttcgtctaatccatgtggcacctttgagtgaattagaagaatggacacagacttatgcttayacacaggtaggccagcaacattcaagctggattacagtccccactttccccataggccagatatccttatgtagtgaccaccctaccccacaatactggtttggaggctgctgctgatggtggccctaaggtttgcagaggagcaatactggaagaaacaaaggatgggtgacctgtcccagtctgatgttcccagcaacttcctctcctccagtgtggaagctgagacccagggtattctgtgaaggagcattctttacaggagcaatgaagtagaactgccttaatgttcaacacgaagggaatagtt

SEQ ID NO: 454393 - DNA, 595 bp, Homo sapiens
aactatgcctctttaccccttattaaaaccatcactttgcacataaagcaacagtgatatttcccactgatggtaaagtgttgaaatgagagtaaagcacaaatcatagccaaatctaagccaggatattcctaaaataaaactaaaaaatcaaaacgacatcgtagtattccatttctatgtatgcaccccctcaggccccagttgctaccaggaccactcgttcgtctaatccatgtggcacctttgagtgaattagaagaatggacacagacttatgcttacacacaggtaggccagcaacattcaagctggattacagtccccactttcccyataggccagatatccttatgtagtgaccaccctaccccacaatactggtttggaggctgctgctgatggtggccctaaggtttgcagaggagcaatactggaagaaacaaaggatgggtgacctgtcccagtctgatgttcccagcaacttcctctcctccagtgtggaagctgagacccagggtattctgtgaaggagcattctttacaggagcaatgaagtagaactgccttaatgttcaacacgaagggaatagtt

SEQ ID NO: 454394 - DNA, 575 bp, Homo sapiens
gttcaacacgaagggaatagttaactaaagaactgtgcatccctaaaatgggtaaaatattgttcagtcattacaaccacttttaaaagtggacaaactgtcatcatgtgatgtgaaaaagcagcatttacagaatgtaaagtgtgtctccattgtgtgtacacacacacctttttcatgtttccatggttttcaaaaatttagggaatgtacattaccgtaattatcagaaaataattttatttttgaaagaaagtaattcggcagggtgagattccaaagaattatggatcctgaggttatctggcacagaggaagaaacagcttcaggcttcagccctgggcatgtctctgattttaaaactctgrttttttttttccgaagaaacggatggccctgctcttccctggtcacctcaagtcagtgactgcctctcctgaccactgttgtgcgggaaaagggcagccccttacccagaaaataagaggacaagggccgtcgctcaggtgcgcaacctgcctgggtcctgccccagacctgggaggaggacctgtgggctccccaaaccggtggc

SEQ ID NO: 454395 - DNA, 575 bp, Homo sapiens
gttcaacacgaagggaatagttaactaaagaactgtgcatccctaaaatgggtaaaatattgttcagtcattacaaccacttttaaaagtggacaaactgtcatcatgtgatgtgaaaaagcagcatttacagaatgtaaagtgtgtctccattgtgtgtacacacacacctttttcatgtttccatggttttcaaaaatttagggaatgtacattaccgtaattatcagaaaataattttatttttgaaagaaagtaattcggcagggtgagattccaaagaattatggatcctgaggttatctggcacagaggaagaaacagcttcaggcttcagccctgggcatgtctctgattttaaaactctgaktttttttttccgaagaaacggatggccctgctcttccctggtcacctcaagtcagtgactgcctctcctgaccactgttgtgcgggaaaagggcagccccttacccagaaaataagaggacaagggccgtcgctcaggtgcgcaacctgcctgggtcctgccccagacctgggaggaggacctgtgggctccccaaaccggtggc

SEQ ID NO: 454396 - DNA, 550 bp, Homo sapiens
agaacttctgaggtagaggattctcttctctccagaaattccaccctccctgatctcctggcatccatcttctccctacctcccmgacccccatctcctctttctatatgtgactttctgaaataacaaaactttcttcaactttatctgccttccctacaccactcttagcaactcaaagccccctggatgattggaggtctgacccattcctcagcactccaggcccaccatgacctgtactgaaaattggagcccagctcaagagtaaagaaagatcatgtcacagaccacccaagatagctcacagaaactgaaggttttgagggtgacatggagtttggagacaaaacttttcattgttgacatctgaagtctttcacatttttcaccacaaagccctgattttacagtgataattagctccaagaaggaatgttttcctaaatgcagtttaaaaaatattatgcaatttatgaaattgagtattgatttatttattgactgatattggaaagagaggaagaaccaagagagatccttggcagga

SEQ ID NO: 454397 - DNA, 532 bp, Homo sapiens
agtgggacaagcattattcaatgaggttaaggaagattcaagtaaaatataaaactatgaagagcactttttgaaatttggggaagacactaagaaaagaagataggtgagcatggtggctagaaatgatgctaatgccctcrtttttttaagctaaggtaacttcagtataattaaaaacacaagagagagacctatcaagccacaaaaatgccatggtccacgtcgcctccaagataaggttccaggagttttcaagagtcatacaagaccctgctttatttattccccgactagctatataatctcacctactctggcttccatgatcttcagccgtgcaatattgctttctataaaatacatgatcacctttccaacctttgcacttgctgttgtctactttaaattaaatatcttttctacgttctcagccagagcaattcctacacatcattctggactaacttcaaacaataccttttgccagtccctcagccgaatgagccatcacctctctgtattgctgact

SEQ ID NO: 454398 - DNA, 546 bp, Homo sapiens
acgtatcagctggataacctcaggtgggttgtttaaactgtaggagtccctccctgatctgttaaacagagatggtaatacttatgttacagaattatgaaagagataatatatgtggaaacgcctcataaacactaaatgctacataagtatcagttgttattattaccagtataataatataatttaagctgaaattggagccatcatgaataaaatatatttaacaataatrtccatttattccagagataatacgaaacctgattctgcctgtcacgtgtaccaggtgacaacctctgagtaggacttcactttgccaaatttcccacaggctcagcatccaccaccatcacctcacagagagtgcctgggccacacatacagctttacctactgctggaaatcagaaaagcctgaaggaccatgagcagagagctctagaccttccaaagtcgcttgctagatttctaaaatgaaactattcttaaaatactcaaatgtctctcatcaaagtccatgtgtgctgacctgctgggtttcagc

SEQ ID NO: 454399 - DNA, 425 bp, Homo sapiens
agcaaaaggaactttgaagatgtgattaagtcagggatcttgaaatagggagattttcctggattatgcaggtggactcactgtaaccacaaaggtccttacaagagggaggcaaaagggtcaacgtcagagaggggagatttatcagcagaagcagaggctggagtgaggcattttgaaaatgtaagaaggtgacagaagccaaggaatataagcagcttctagcagctgggaaaggtaagaaaatagatttttccctagagcctccagaaggaatacagycctgtcaacagcctgatattagcctagtgacacctatgccagtctgacctgcagaactataagataatacctgtgtgttgttttcagcaactaaatttgcagtaatttgttacagcagcaatcaaaaccaatcaagaggatcc

SEQ ID NO: 454400 - DNA, 581 bp, Homo sapiens
agtgacctctagcccagggtctgttcaccctgtcagagaagaagtgcacagaccaaaatctgcagggggctagaatataatgcacaaaagcagtctgtagatgctcttcttcagagaagatactgcgatatggccttaaaatgaagctttcttcctgtcctaagtgaacaaagtgctgagtggaagggcctctagcagtctggttgcaagctgcagacctttcttcttgccttcctgcacacsaccaccttcaagtaatgagtgccagagacatgggggcaagcaaggacatcagagactgactcatgagctacctggggcccccaggtgtgtgtgtgcacttcctggaaaagcctcacctccaggccccgagccaggcctgctcagcctagctgtggatccctggcatgtgggatgctcaggtttcctggggccttgccagctacagtgttatcttctctatggagagcatctccatagctggagcctggaagcgaggatgccatgggagcctccagagtgagtaaacagagaaaggaagattcctcctcttggagagcaggtaaatatccggggcgtgg

SEQ ID NO: 454401 - DNA, 548 bp, Homo sapiens
gtttctaatattcaggggggagaaaatgatgttactctctatatcacagggggtgtacactccccctgtgatattgtttctaatatccaggagagaagaggataatattactcccaatatcgcaaggcatgtacgtcctcctgtgatactgtctttaatatcctggttgggagagaattatattacttgcaatattgcacagggtgtatacaccctctgaaatatttctcckaatacacagggtggaagctgatgctattactcaaaatatctcagggagttcacaccactcccccaccttgatattgtttctaatacgaagggaggaagagaattatattactttcaatatctgagggggtttacaccttcccagtgatatttttcctaatacccacagggggaagaggatgatattactcccaacatcacagtttgtgtgcagtccctctgtgatattgttcctaatatacagggagggaggagagaatgatattactccccaaatcgcaggggtgtacaccctcgctttgatattgttcctaata

SEQ ID NO: 454402 - DNA, 548 bp, Homo sapiens
gtttctaatattcaggggggagaaaatgatgttactctctatatcacagggggtgtacactccccctgtgatattgtttctaatatccaggagagaagaggataatattactcccaatatcgcaaggcatgtacgtcctcctgtgatactgtctttaatatcctggttgggagagaattatattacttgcaatattgcacagggtgtatacaccctctgaaatatttctccgaatacacagggtggaagctgatgctattactcaaaatatctcagggagttcacaccactcccccaccttgatattgtttctaatacgaagggaggaagagaattatattactttcaatatctgagggggtttacaccttcccagtgatatttttcctaatayccacagggggaagaggatgatattactcccaacatcacagtttgtgtgcagtccctctgtgatattgttcctaatatacagggagggaggagagaatgatattactccccaaatcgcaggggtgtacaccctcgctttgatattgttcctaata

SEQ ID NO: 454403 - DNA, 541 bp, Homo sapiens
aaagaatggtattacttccaatatctcaaggagtgtacactcccactgtgatattgttcctaatattcagaagggaagaggatgatattactcccaatatcgcagggggtgtacacattttctgagatattgttcctaatattcagagggggagaggatgatcttactcccaatatcgcgggkgagctacaccttccctgtaatattgtttttaatatccagtggagaagaggacgatattaatcccaataatgcaggggggttacacacccactgtgatattgtttttaaaatccagttaataagcgaatgatattactttcaatatcacagcgggtgtacacccctctatgatattgttcctaacatctagtggcagagaggataatatgactaccaatattggaggagctgtgcagcgcccccctgcccgtcatattgattctaatatccaaggagggagacaataatattactctcaatatcacagaaagtgtacattcttcttgtggtattttcccaaatatcattaaaagcagaa
